United States Patent Application Publication US 2006/0150283 A1 - sequence listing, part 10

SEQ ID NO: 38563 - DNA, 713 bp, Arabidopsis thaliana
  misc_feature (1)..(713): Ceres Seq. ID no. 12325124
  misc_feature (1)..(713): Ortholog of  Ceres SEQ ID NO 12563124 as cited in SEQ ID NO 57104
  misc_feature (1)..(713): Ortholog of  Ceres SEQ ID NO 12617639 as cited in SEQ ID NO 65219
acacatctcactgctcactactctcactgtaatcccttagatcttcttttcaaatttcaatggcgtccggtgatgttgagtatcggtgcttcgttggaggtctagcatgggccactgatgacagagctcttgagactgccttcgctcaatacggcgacgttattgattccaagatcattaacgatcgtgagactggaagatcaaggggattcggattcgtcaccttcaaggatgagaaagccatgaaggatgcgattgagggaatgaacggacaagatctcgatggccgtagcatcactgttaacgaggctcagtcacgaggaagcggtggcggcggaggccaccgtggaggtggtggcggcggttactcctcaagaggtggtggtggcggaagctacggtggtggaagacgtgagggaggaggaggatacggtggtggtgaaggaggaggttacggaggaaacggtggtggtggaggatggtaattcctttaattaggtttgggattaccaatgaatgttctctctctcgcttgttatgcttctacttggttttgtgtgttctctattttgttctggttctgctttagatttgatgtaacagttcgtgattaggtattttggtatctggaaacgtaatgttaagtcacttgtcattctctaaataacaaatttcttcggagatattatctctgttgattgattctatcatcg

SEQ ID NO: 38564 - protein, 141 aa, Arabidopsis thaliana
  peptide (1)..(141): Ceres Seq. ID no. 12325125
MASGDVEYRCFVGGLAWATDDRALETAFAQYGDVIDSKIINDRETGRSRGFGFVTFKDEKAMKDAIEGMNGQDLDGRSITVNEAQSRGSGGGGGHRGGGGGGYSSRGGGGGSYGGGRREGGGGYGGGEGGGYGGNGGGGGW

SEQ ID NO: 38565 - protein, 80 aa, Arabidopsis thaliana
  peptide (1)..(80): Ceres Seq. ID no. 12325126
MKDAIEGMNGQDLDGRSITVNEAQSRGSGGGGGHRGGGGGGYSSRGGGGGSYGGGRREGGGGYGGGEGGGYGGNGGGGGW

SEQ ID NO: 38566 - protein, 73 aa, Arabidopsis thaliana
  peptide (1)..(73): Ceres Seq. ID no. 12325127
MNGQDLDGRSITVNEAQSRGSGGGGGHRGGGGGGYSSRGGGGGSYGGGRREGGGGYGGGEGGGYGGNGGGGGW

SEQ ID NO: 38567 - DNA, 1734 bp, Arabidopsis thaliana
  misc_feature (1)..(1734): Ceres Seq. ID no. 12328724
  misc_feature (1)..(1734): Ortholog of  Ceres SEQ ID NO 14302321 as cited in SEQ ID NO 68547
gagttccttctgtatctcgattctcgaatgtcgatcgagccatcgtagagatagagagagaatccatagaaatggctttcgttcgatatatcccttgtcggaagattccacgaaatgttgatcaattcgagctgccatgtcttggatcgcttcgagctttcttctctactcagaagctcataggggatgaaccagttctcgttcgagatttcatacacactgcattatatgatccaatacaaggctacttctctcaacggtcaaaatctgtcggggttttggagagaagcattaagttcaaccagcttgaagggaggaaagcatacatgaaactcttggaaaaagtatacaagcagagtgacatttcttggtttactccagtggagcttttcaagccttggtatgctcatgggattgcagaagctatactgcgtaccacaaatctctcagttccattaaagatatacgaaattggtggtggatcgggcacatgtgccaagggtgtattggactatataatgttgaatgctccggagagaatctacaagaacatgagctacacttctatagaaatcagtccctcacttgctaagattcagaaggaaactgttgcacaagttggaagtcatctatcaaagttccgagttgagtgtcgtgatgcatctgacctagctggatggaagaatgtggagcaacaaccgtgctgggtgataatgcttgaggtgctagataatctcccacatgatcttgtctattccaaaagtcaactttccccatggatggaagtcttggttgaaaataaaccagagagcgaagcactctctgagctatacaagcctttagaagatccactgattaagcggtgcattgaaattgttgaacatgaagatgatccggtttcaaaaccaaaagaaatttggtctaaactatttcccaaacctagacgtagttggcttccaacaggttgtttgaaactgctagaggttttacatgcaaagctgccaaagatgtccctaattgcttcggactttagcttcttgcctgatgtgaaagttcctggtgaaagagccccattggtttcaacaaagaaagatggatgtagctcagattacagtagttatctggacgcaaagggtgatgctgatatatttttcccaaccgatttctggcttctagaacgaatggaccattattgttccggttggaggaagatggaaaaagacgggacaccatcgaaaaaaggaaggaaaaggcgaactctcactcttgatacatcagcgttcatggatgagtttggtttaccttcaaagacgagaacaaaggacggatataaccccttacttgatgacttcaagaacactaagttctatcttagtgtcccaacacacaacactaagtagtaagcaacagatatcttcagctcatggatgtcggaattttgcagagaaatgaaagaaaaagtttagagctctgaattttttttagatgatttaataagttataatcaatattccatcgctacagacactgaagataggctccaaaatgtttcttttttacttactgcggtttgctgtgtcagcttttaaacactctttccaaatactacatgagtcggtagtttgtaatgtaatgggtttgggtatggaggctttctcgttgtctttcttttcccaacttatttgacatttcagtagtgaaaaacatgatactcaataaaacaactattagtgg

SEQ ID NO: 38568 - protein, 465 aa, Arabidopsis thaliana
  peptide (1)..(465): Ceres Seq. ID no. 12328725
VPSVSRFSNVDRAIVEIERESIEMAFVRYIPCRKIPRNVDQFELPCLGSLRAFFSTQKLIGDEPVLVRDFIHTALYDPIQGYFSQRSKSVGVLERSIKFNQLEGRKAYMKLLEKVYKQSDISWFTPVELFKPWYAHGIAEAILRTTNLSVPLKIYEIGGGSGTCAKGVLDYIMLNAPERIYKNMSYTSIEISPSLAKIQKETVAQVGSHLSKFRVECRDASDLAGWKNVEQQPCWVIMLEVLDNLPHDLVYSKSQLSPWMEVLVENKPESEALSELYKPLEDPLIKRCIEIVEHEDDPVSKPKEIWSKLFPKPRRSWLPTGCLKLLEVLHAKLPKMSLIASDFSFLPDVKVPGERAPLVSTKKDGCSSDYSSYLDAKGDADIFFPTDFWLLERMDHYCSGWRKMEKDGTPSKKGRKRRTLTLDTSAFMDEFGLPSKTRTKDGYNPLLDDFKNTKFYLSVPTHNTK

SEQ ID NO: 38569 - protein, 442 aa, Arabidopsis thaliana
  peptide (1)..(442): Ceres Seq. ID no. 12328726
MAFVRYIPCRKIPRNVDQFELPCLGSLRAFFSTQKLIGDEPVLVRDFIHTALYDPIQGYFSQRSKSVGVLERSIKFNQLEGRKAYMKLLEKVYKQSDISWFTPVELFKPWYAHGIAEAILRTTNLSVPLKIYEIGGGSGTCAKGVLDYIMLNAPERIYKNMSYTSIEISPSLAKIQKETVAQVGSHLSKFRVECRDASDLAGWKNVEQQPCWVIMLEVLDNLPHDLVYSKSQLSPWMEVLVENKPESEALSELYKPLEDPLIKRCIEIVEHEDDPVSKPKEIWSKLFPKPRRSWLPTGCLKLLEVLHAKLPKMSLIASDFSFLPDVKVPGERAPLVSTKKDGCSSDYSSYLDAKGDADIFFPTDFWLLERMDHYCSGWRKMEKDGTPSKKGRKRRTLTLDTSAFMDEFGLPSKTRTKDGYNPLLDDFKNTKFYLSVPTHNTK

SEQ ID NO: 38570 - protein, 357 aa, Arabidopsis thaliana
  peptide (1)..(357): Ceres Seq. ID no. 12328727
MKLLEKVYKQSDISWFTPVELFKPWYAHGIAEAILRTTNLSVPLKIYEIGGGSGTCAKGVLDYIMLNAPERIYKNMSYTSIEISPSLAKIQKETVAQVGSHLSKFRVECRDASDLAGWKNVEQQPCWVIMLEVLDNLPHDLVYSKSQLSPWMEVLVENKPESEALSELYKPLEDPLIKRCIEIVEHEDDPVSKPKEIWSKLFPKPRRSWLPTGCLKLLEVLHAKLPKMSLIASDFSFLPDVKVPGERAPLVSTKKDGCSSDYSSYLDAKGDADIFFPTDFWLLERMDHYCSGWRKMEKDGTPSKKGRKRRTLTLDTSAFMDEFGLPSKTRTKDGYNPLLDDFKNTKFYLSVPTHNTK

SEQ ID NO: 38571 - DNA, 1244 bp, Arabidopsis thaliana
  misc_feature (1)..(1244): Ceres Seq. ID no. 12328525
  misc_feature (1)..(1244): Ortholog of  Ceres SEQ ID NO 13596108 as cited in SEQ ID NO 68591
gtgtatgatgttttgtatattgttgcttctcttgctttacttgtttggtttgggatttcttctctgttttttcttggtgaattttgcgtttcgcttaaaaatgagtgaaattgatttggtgaaattaggtcagaggcgtttctcatggctcctcttactctctccgttgatgtgaagagctcttcagcgacctctcatgatgtttcgaagagggtaatgcagagtccacagctcaaaataaacaaaggcttttttgcatctgttaatacacaagaagataaaccctttgatttcttccgcactctctttgaggggtttatagcaggaggtacagctggagttgtagttgaaacagctttatacccaattgatactattaagactagacttcagctcgtggaggtggaaaaattgttttgaagggtctttattcaggattagctggaaatatcgctggtgtcttaccggcttcggctttatttgttggagtttacgaacccacaaagcagaaactgctgaagacctttcctgatcatttaagcgcagttgctcacctgactgcaggggccatcggtggacttgctgcatctctgattcgagtgcctacagaggttgtgaagcaaagaatgcagaccggacagtttacatcagctcccagtgctgttcgaatgattgcatcaaaagagggatttaggggtctctatgcaggataccggtccttccttttgcgagatttgccatttgatgctatacagttctgcatatatgagcagctttgcttggggtataaaaaagccgcgcgtagagagcttagtgatcctgagaacgctctaatcggtgcatttgctggtgctctgaccggagcagtcaccactccgcttgatgttattaagacaagattaatggttcagggatcagccaaacaatatcaaggaatcgttgactgtgttcaaacaattgtaagagaggaaggagctcctgctctcttaaagggtattgggccaagagtgttgtggataggtattggaggatcaatcttctttggtgtcctcgagagcactaagagaacacttgcacagagacgtcccaatacggttaaagaaaccaaagaagaataagtttctggccgcacaagaaaatgagtgtaagttgacaatgtaacccctttgtgagttctatgtggtgtgagtttgtttaagtaccaattcaactttcattaaaaaaaaataaaaaaaatagtgttc

SEQ ID NO: 38572 - protein, 163 aa, Arabidopsis thaliana
  peptide (1)..(163): Ceres Seq. ID no. 12328526
MQTGQFTSAPSAVRMIASKEGFRGLYAGYRSFLLRDLPFDAIQFCIYEQLCLGYKKAARRELSDPENALIGAFAGALTGAVTTPLDVIKTRLMVQGSAKQYQGIVDCVQTIVREEGAPALLKGIGPRVLWIGIGGSIFFGVLESTKRTLAQRRPNTVKETKEE

SEQ ID NO: 38573 - protein, 149 aa, Arabidopsis thaliana
  peptide (1)..(149): Ceres Seq. ID no. 12328527
MIASKEGFRGLYAGYRSFLLRDLPFDAIQFCIYEQLCLGYKKAARRELSDPENALIGAFAGALTGAVTTPLDVIKTRLMVQGSAKQYQGIVDCVQTIVREEGAPALLKGIGPRVLWIGIGGSIFFGVLESTKRTLAQRRPNTVKETKEE

SEQ ID NO: 38574 - protein, 91 aa, Arabidopsis thaliana
  peptide (1)..(91): Ceres Seq. ID no. 12328528
MAPLTLSVDVKSSSATSHDVSKRVMQSPQLKINKGFFASVNTQEDKPFDFFRTLFEGFIAGGTAGVVVETALYPIDTIKTRLQLVEVEKLF

SEQ ID NO: 38575 - DNA, 856 bp, Arabidopsis thaliana
  misc_feature (1)..(856): Ceres Seq. ID no. 12325518
  misc_feature (1)..(856): Ortholog of  Ceres SEQ ID NO 14309686 as cited in SEQ ID NO 58523
tttcttctgctctcggaattggtgttgcagaagttgcaaatttggaagaaaagttaacaggactggtgaagtatcaaaatttggggttttgctacgatgacgctaggtgctcggcttgttgctcccatgattatacttctcctttttataccgattgaattagttaaagcggaagtcattacactgacaccagaaaccttttctgacaaggtagatttatatatgtgttctgtgctcctttgacgatgcgatattgaaaacggcttagctcgtttcaaagattgtttgcattgctcataaaggagaaggatactgcgtggttcgtaaagttttgtgttccttggtgtaaacactgcaagaaactggggaatttgtgggaagacttgggaaaagcaatggagggagacgatgaaattgaggttggtgaagtagactgtggtactagcagagctgtttgcaccaaagttgaaattcactcgtatccaacatttatgctattttacaatggagaagaagtttcgaaatataaaggaaaaagagacgttgaatcgctcaaggcttttgttgtagaggaaactgaaaaggcagcagaaaaagcacagcttgaagacaaggaactgtgatacaactagtcggtgattattagaacctgatacattgttccctttggttttcattttgcctatgcagttgtgtgactcttaccgttagttagataggcatggttttcagcacgatggaggagcatctttgggtttaaaggtttttcacaccactgttttgctaaaatattcagtttccattttattcagagtcagataagcaaagacgtaagtgtagttagtcgagatttctt

SEQ ID NO: 38576 - protein, 75 aa, Arabidopsis thaliana; identical to SEQ ID NO: 29679
  peptide (1)..(75): Ceres Seq. ID no. 12325519

SEQ ID NO: 38577 - protein, 51 aa, Arabidopsis thaliana
  peptide (1)..(51): Ceres Seq. ID no. 12325520
SSALGIGVAEVANLEEKLTGLVKYQNLGFCYDDARCSACCSHDYTSPFYTD

SEQ ID NO: 38578 - protein, 48 aa, Arabidopsis thaliana
  peptide (1)..(48): Ceres Seq. ID no. 12325521
MTLGARLVAPMIILLLFIPIELVKAEVITLTPETFSDKVDLYMCSVLL

SEQ ID NO: 38579 - DNA, 930 bp, Arabidopsis thaliana
  misc_feature (1)..(930): Ceres Seq. ID no. 13492957
  misc_feature (1)..(930): Ortholog of  Ceres SEQ ID NO 14312277 as cited in SEQ ID NO 58836
atgtgcttctatttgctttccgaaaaaaaccaaacgcacccatctccttcctcttctccttttctctccgaacaaagaacacaaccaaaacaaaaatctatgttagatatgtcggaatctgtactcacggcgatgtatagttggttcactccgacagttctcttcgtcttcctcaaccttatgattggtaccatcgccattagctcatctttctcttccaaatccaacgacccaaatcaaactcagatccaacgctctccttccatgattcatcgtctcaaatccataaacttctcttctttcacttctccagacaagtctcatctcgagtttcctccttcaacacctgaagacaacagcaacaacaactttcaccaaccagcttcaatcgaacagaatcaaccattcttgtctagatctccttctgttcttcacagaatcaaatctttcaatctttataactacatttctcaagaacccaccaatataatcgaagcttcaccaccgtcggtgaccgtagagacaaaacaagaacaagtacaagaacaagaagtaaaagaagaacaagaagaagaagaacagagtcttgaagaggtttatagtaaacttaatctaaaccatgtcgctaggacaaaatctgacactgaaccagctgctggaattagacctccgaagcttccaaagaagatgaaaaaatctgctagtaccaaatctccgttctctcactttcaagaagatgaaatctccgtggaggctcgccgtcctgcgacggtgaaagtgccgagagttacgacggtggaagaagctgatgaagaagtagatgcaaaagctgatgactttatcaatcgattcaagcatcagttgaagttacagagaattgattccatcactaagtataaggagatggtgaagaaaagaaacgacaagtga

SEQ ID NO: 38580 - protein, 309 aa, Arabidopsis thaliana
  peptide (1)..(309): Ceres Seq. ID no. 13492958
MCFYLLSEKNQTHPSPSSSPFLSEQRTQPKQKSMLDMSESVLTAMYSWFTPTVLFVFLNLMIGTIAISSSFSSKSNDPNQTQIQRSPSMIHRLKSINFSSFTSPDKSHLEFPPSTPEDNSNNNFHQPASIEQNQPFLSRSPSVLHRIKSFNLYNYISQEPTNIIEASPPSVTVETKQEQVQEQEVKEEQEEEEQSLEEVYSKLNLNHVARTKSDTEPAAGIRPPKLPKKMKKSASTKSPFSHFQEDEISVEARRPATVKVPRVTTVEEADEEVDAKADDFINRFKHQLKLQRIDSITKYKEMVKKRNDK

SEQ ID NO: 38581 - protein, 276 aa, Arabidopsis thaliana
  peptide (1)..(276): Ceres Seq. ID no. 13492959
MLDMSESVLTAMYSWFTPTVLFVFLNLMIGTIAISSSFSSKSNDPNQTQIQRSPSMIHRLKSINFSSFTSPDKSHLEFPPSTPEDNSNNNFHQPASIEQNQPFLSRSPSVLHRIKSFNLYNYISQEPTNIIEASPPSVTVETKQEQVQEQEVKEEQEEEEQSLEEVYSKLNLNHVARTKSDTEPAAGIRPPKLPKKMKKSASTKSPFSHFQEDEISVEARRPATVKVPRVTTVEEADEEVDAKADDFINRFKHQLKLQRIDSITKYKEMVKKRNDK

SEQ ID NO: 38582 - protein, 273 aa, Arabidopsis thaliana
  peptide (1)..(273): Ceres Seq. ID no. 13492960
MSESVLTAMYSWFTPTVLFVFLNLMIGTIAISSSFSSKSNDPNQTQIQRSPSMIHRLKSINFSSFTSPDKSHLEFPPSTPEDNSNNNFHQPASIEQNQPFLSRSPSVLHRIKSFNLYNYISQEPTNIIEASPPSVTVETKQEQVQEQEVKEEQEEEEQSLEEVYSKLNLNHVARTKSDTEPAAGIRPPKLPKKMKKSASTKSPFSHFQEDEISVEARRPATVKVPRVTTVEEADEEVDAKADDFINRFKHQLKLQRIDSITKYKEMVKKRNDK

SEQ ID NO: 38583 - DNA, 1225 bp, Arabidopsis thaliana
  misc_feature (1)..(1225): Ceres Seq. ID no. 12328732
  misc_feature (1)..(1225): Ortholog of  Ceres SEQ ID NO 14316064 as cited in SEQ ID NO 52446
attcacacaaacccagagatctgaaactaagaagccatggatgctcaatatcaagatctacctcctctcaaaagattaagactgttgcagagagatctcgaagctgctcaacagcaccagctaccgaaccaaccggagatgaagtcgttgcagttgccggcaaagaagaggaagcagactcgtgttgattatgacgatgacgacgcagagaactccaatcccacctatcattgtcttccggcgaagaaaaggatctgggcgattgatcccgatcttctctccggtggtggtaaccccttttcgccttttgatctaaatgtagagtataagccttatgttgaagagaaatcaattgagaaaaagtcaactctaaatgttgaatctagtctagaggtagaagaagatgatgataaagagaatatagatcctctagggaaaggaaaagctttagatctctctgatagagaagtagaagatgaagatgggattatgtgtgctgtatgtcaaagtacagatggtgatccattgaatccaattgtgttctgtgatggttgtgatttgatggttcatgcttcttgctatgggaatcctcttgttaaggctattccagaaggtgattggttttgtagacagtgtttatcgtcgaagaaccgagaaaagatcttctcttgctgcttgtgtacaactaaaggcggggcgatgaaacctacgaatgatggtagatgggctcatattacttgtgcgttgtttgttccggaagtttactttgaggatcctgaaggaagagaagggatttgttgtagtgaggtattgagtaagagatggaaagataggtgttatttgtgtaaggttagacgcggttgtgttattgagtgttcggagatgagatgtaagttggcttttcatgttacttgtgggttaaaggaagatctttgtattgagtatcgtgaagggaagaagagtggtggtattgttgttggtttctgtaatgagcataccaaactttgggaaagggaaagtggaaagtacaagattgttgccagagaagaagataaaaagtaggagaaagctcaagggccatgacctgaagaccatgctttttttgcttgcaactctgaagcttccactcatgtatttgattgttttaaaacgtttgttcttcttatttatctgattagtgagagtagctgatcctaaatgctatcaagtttattatatttttgtg

SEQ ID NO: 38584 - protein, 341 aa, Arabidopsis thaliana
  peptide (1)..(341): Ceres Seq. ID no. 12328733
MDAQYQDLPPLKRLRLLQRDLEAAQQHQLPNQPEMKSLQLPAKKRKQTRVDYDDDDAENSNPTYHCLPAKKRIWAIDPDLLSGGGNPFSPFDLNVEYKPYVEEKSIEKKSTLNVESSLEVEEDDDKENIDPLGKGKALDLSDREVEDEDGIMCAVCQSTDGDPLNPIVFCDGCDLMVHASCYGNPLVKAIPEGDWFCRQCLSSKNREKIFSCCLCTTKGGAMKPTNDGRWAHITCALFVPEVYFEDPEGREGICCSEVLSKRWKDRCYLCKVRRGCVIECSEMRCKLAFHVTCGLKEDLCIEYREGKKSGGIVVGFCNEHTKLWERESGKYKIVAREEDKK

SEQ ID NO: 38585 - protein, 307 aa, Arabidopsis thaliana
  peptide (1)..(307): Ceres Seq. ID no. 12328734
MKSLQLPAKKRKQTRVDYDDDDAENSNPTYHCLPAKKRIWAIDPDLLSGGGNPFSPFDLNVEYKPYVEEKSIEKKSTLNVESSLEVEEDDDKENIDPLGKGKALDLSDREVEDEDGIMCAVCQSTDGDPLNPIVFCDGCDLMVHASCYGNPLVKAIPEGDWFCRQCLSSKNREKIFSCCLCTTKGGAMKPTNDGRWAHITCALFVPEVYFEDPEGREGICCSEVLSKRWKDRCYLCKVRRGCVIECSEMRCKLAFHVTCGLKEDLCIEYREGKKSGGIVVGFCNEHTKLWERESGKYKIVAREEDKK

SEQ ID NO: 38586 - protein, 190 aa, Arabidopsis thaliana
  peptide (1)..(190): Ceres Seq. ID no. 12328735
MCAVCQSTDGDPLNPIVFCDGCDLMVHASCYGNPLVKAIPEGDWFCRQCLSSKNREKIFSCCLCTTKGGAMKPTNDGRWAHITCALFVPEVYFEDPEGREGICCSEVLSKRWKDRCYLCKVRRGCVIECSEMRCKLAFHVTCGLKEDLCIEYREGKKSGGIVVGFCNEHTKLWERESGKYKIVAREEDKK

SEQ ID NO: 38587 - DNA, 2022 bp, Arabidopsis thaliana
  misc_feature (1)..(2022): Ceres Seq. ID no. 12328620
  misc_feature (1)..(2022): Ortholog of  Ceres SEQ ID NO 12465083 as cited in SEQ ID NO 68239
acagtaacaatctctctctcgcaccttcttaaaagctgctctatttcttcgcttccctcttctcttcactcacaaaacattttgttctaatcccgcaactgctaaaaacaaacccttttgtcaaaaatctctcctttcggtggtgacagaaatctattgcaggaaatggcagaagcagcatacacagtagcatcagacagtgaaaacactggagaggagaaatcatcatcatctccttcattacccgaaatcgcccttggtatcgacattggtacttctcaatgcagtatagctgtttggaacggttctcaagttcacatcttgaggaacacaagaaaccagaagctcatcaaatcatttgtcactttcaaagatgaagttcctgctggtggtgttagcaaccagctcgcacatgagcaggaaatgctaaccggagccgctatcttcaacatgaagcggctcgttggtcgtgtagacactgatcctgtggttcacgctagcaagaaccttcctttcttggttcaaactcttgatattggagttagaccgtttattgcagctttggtgaacaatgcttggagatcaacaacaccagaggaagttttagctatatttctggtggagttacgtctgatggctgaagctcagttgaaacgtcctgtgagaaatgtagtgcttacggttccggtttcgttctctaggttccagctcacacggttcgaaagagcttgcgctatggctggacttcatgttcttcgtttgatgccggaaccaactgctattgcgttgctttatgcgcaacagcagcagatgactacgcatgataacatgggaagcggaagcgagaggcttgcggttatattcaatatgggagctggttactgcgatgttgcggttactgctactgctggtggtgtttcacagataaaagctttagctggtagccccattgggggtgaagacattttgcagagcacaattcgccatatcgctccacctaatgaagaagcttcggggttgcttcgtgtagcggcacaggacgcgattcacaggctaacggatcaagaaaatgtccaaattgaagtggatttgggaaatggtaacaagatatccaaggttcttgataggttagagtttgaggaagtgaaccagaaggtatttgaggaatgtgagagacttgttgtgcagtgcctgcgagatgcgagagtcaatggtggtgatatcgatgatttgataatggttggagggtgttcgtacatcccgaaagtaagaactattatcaagaacgtatgcaagaaggatgagatatacaaaggcgtgaatcctttagaagctgcggttagaggagctgctttggaaggtgcggtgacttcagggattcatgatccttttgggagcttagatctgttaaccatacaagccacacctcttgcagttggagcaagagctaacggaaacaaattcatacccgtgattcctcgtaacacgatggttccagcgcggaaagacctctttttcacaacggttcaagacaaccagaaggaagctctgatcattatatacgaaggagaaggagagactgttgaagagaatcatcttcttggttatttcaagctcgttgggattccgccagcaccgaaaggtgttccagagatcaatgtttgtatggacatcgatgcgtcgaatgctttacgggttttcgcagctgtgttgatgccgggatcttcgactccggtggttcctgtgattgaggtgaggatgcctacggttgatgatggacatggttggtgtgctcaagctttgaatgtgaaatatggagctactcttgatttgattacttttcagagaaagatgtaagattaaaataaaatggtgttggtgatagattttagattagatgtaagatacgaggatgcttcgtatagaaaagagtttgtaaagtttgtgtgtgttttggggtttgtcgttgaagtggtaaacaatgtttatgtgtgtaatgaagtaataatgctttgcagattg

SEQ ID NO: 38588 - protein, 563 aa, Arabidopsis thaliana
  peptide (1)..(563): Ceres Seq. ID no. 12328621
MAEAAYTVASDSENTGEEKSSSSPSLPEIALGIDIGTSQCSIAVWNGSQVHILRNTRNQKLIKSFVTFKDEVPAGGVSNQLAHEQEMLTGAAIFNMKRLVGRVDTDPVVHASKNLPFLVQTLDIGVRPFIAALVNNAWRSTTPEEVLAIFLVELRLMAEAQLKRPVRNVVLTVPVSFSRFQLTRFERACAMAGLHVLRLMPEPTAIALLYAQQQQMTTHDNMGSGSERLAVIFNMGAGYCDVAVTATAGGVSQIKALAGSPIGGEDILQSTIRHIAPPNEEASGLLRVAAQDAIHRLTDQENVQIEVDLGNGNKISKVLDRLEFEEVNQKVFEECERLVVQCLRDARVNGGDIDDLIMVGGCSYIPKVRTIIKNVCKKDEIYKGVNPLEAAVRGAALEGAVTSGIHDPFGSLDLLTIQATPLAVGARANGNKFIPVIPRNTMVPARKDLFFTTVQDNQKEALIIIYEGEGETVEENHLLGYFKLVGIPPAPKGVPEINVCMDIDASNALRVFAAVLMPGSSTPVVPVIEVRMPTVDDGHGWCAQALNVKYGATLDLITFQRKM

SEQ ID NO: 38589 - protein, 477 aa, Arabidopsis thaliana
  peptide (1)..(477): Ceres Seq. ID no. 12328622
MLTGAAIFNMKRLVGRVDTDPVVHASKNLPFLVQTLDIGVRPFIAALVNNAWRSTTPEEVLAIFLVELRLMAEAQLKRPVRNVVLTVPVSFSRFQLTRFERACAMAGLHVLRLMPEPTAIALLYAQQQQMTTHDNMGSGSERLAVIFNMGAGYCDVAVTATAGGVSQIKALAGSPIGGEDILQSTIRHIAPPNEEASGLLRVAAQDAIHRLTDQENVQIEVDLGNGNKISKVLDRLEFEEVNQKVFEECERLVVQCLRDARVNGGDIDDLIMVGGCSYIPKVRTIIKNVCKKDEIYKGVNPLEAAVRGAALEGAVTSGIHDPFGSLDLLTIQATPLAVGARANGNKFIPVIPRNTMVPARKDLFFTTVQDNQKEALIIIYEGEGETVEENHLLGYFKLVGIPPAPKGVPEINVCMDIDASNALRVFAAVLMPGSSTPVVPVIEVRMPTVDDGHGWCAQALNVKYGATLDLITFQRKM

SEQ ID NO: 38590 - protein, 468 aa, Arabidopsis thaliana
  peptide (1)..(468): Ceres Seq. ID no. 12328623
MKRLVGRVDTDPVVHASKNLPFLVQTLDIGVRPFIAALVNNAWRSTTPEEVLAIFLVELRLMAEAQLKRPVRNVVLTVPVSFSRFQLTRFERACAMAGLHVLRLMPEPTAIALLYAQQQQMTTHDNMGSGSERLAVIFNMGAGYCDVAVTATAGGVSQIKALAGSPIGGEDILQSTIRHIAPPNEEASGLLRVAAQDAIHRLTDQENVQIEVDLGNGNKISKVLDRLEFEEVNQKVFEECERLVVQCLRDARVNGGDIDDLIMVGGCSYIPKVRTIIKNVCKKDEIYKGVNPLEAAVRGAALEGAVTSGIHDPFGSLDLLTIQATPLAVGARANGNKFIPVIPRNTMVPARKDLFFTTVQDNQKEALIIIYEGEGETVEENHLLGYFKLVGIPPAPKGVPEINVCMDIDASNALRVFAAVLMPGSSTPVVPVIEVRMPTVDDGHGWCAQALNVKYGATLDLITFQRKM

SEQ ID NO: 38591 - DNA, 1254 bp, Arabidopsis thaliana
  misc_feature (1)..(1254): Ceres Seq. ID no. 13499860
  misc_feature (1)..(1254): Ortholog of  Ceres SEQ ID NO 15178181 as cited in SEQ ID NO 58740
  misc_feature (1)..(1254): Ortholog of  Ceres SEQ ID NO 12614739 as cited in SEQ ID NO 68587
aacttcgtggtactcttttgctttacccatttttcaatgtcttacgatgagatgctttctgctgcgaagaaagctgtttctctcgctgctcgtctcagcaacgaagtgaggaaatctctgttggtaactgacgtttggaacaaatcagatgatagtcctgttactgttgctgattatggttcgcaggcggtggttagccttgtactggaaagggaactccagaatgaacctgtgtctttagtggctgaagaggattctggtgagttaaggaagattgctgctgagaccgttttggctcgtattacagagcttgtcaaagatactcttgcaagtgatgaatcatatgctattgcttctcctttgacttcggatgatgtgctcaacgctatagatcgtggtaaatcagaaggaggtcctaagggtcgccactggatcttggatcctattggtggcactagaggatttataagaggagaacaatatgcaataggattagcattgttggtggaaggcaaagtagtactaggtgtaatggcttgtcctaagcttccattggcatcaactgctggtaatgcactcaagtctttacctgaaaaagttggttgccttttctatggttcggttggcaatgggacttatgtccagtctctcagtgtcgactctcttcctgcgaaggtggaggttagcagcatagatgatcctgcgaaagcgagtttcttcgagtcataccacacacctgtccccatccataacaccattgctacgaaattggggataaaagaatctccaatcaagatcaacagccagactaagtatgcagctttatctagaggagatggagaggtttacttgaggtttactcgcaaagcaagacccgaatcaatatggaatcacgctgctggctcaatcattgtttcagaagcaggagggaaagtgactgatgcagcagggaatccattggacttttcgaaagggaagtatcttgattacaagagaggaatcgtcgttacgacgcagaaactgttgccaaggcttttaacagcagtaagagaatcaattaaagaagaagaagaggaagaagaaaaagctgcttctctaaaacttcactaacacgcaactgtaatatacttattattgttgtctttgggtatactctgttgtctctgtgtttttcacagtctatttattgaaaaccagaaacaaaaaaaaaactcacctttgatatatataagaaacactaattctcttttgaat

SEQ ID NO: 38592 - protein, 369 aa, Arabidopsis thaliana
  peptide (1)..(369): Ceres Seq. ID no. 13499861
NFVVLFCFTHFSMSYDEMLSAAKKAVSLAARLSNEVRKSLLVTDVWNKSDDSPVTVADYGSQAVVSLVLERELQNEPVSLVAEEDSGELRKIAAETVLARITELVKDTLASDESYAIASPLTSDDVLNAIDRGKSEGGPKGRHWILDPIGGTRGFIRGEQYAIGLALLVEGKVVLGVMACPKLPLASTAGNALKSLPEKVGCLFYGSVGNGTYVQSLSVDSLPAKVEVSSIDDPAKASFFESYHTPVPIHNTIATKLGIKESPIKINSQTKYAALSRGDGEVYLRFTRKARPESIWNHAAGSIIVSEAGGKVTDAAGNPLDFSKGKYLDYKRGIVVTTQKLLPRLLTAVRESIKEEEEEEEKAASLKLH

SEQ ID NO: 38593 - protein, 357 aa, Arabidopsis thaliana
  peptide (1)..(357): Ceres Seq. ID no. 13499862
MSYDEMLSAAKKAVSLAARLSNEVRKSLLVTDVWNKSDDSPVTVADYGSQAVVSLVLERELQNEPVSLVAEEDSGELRKIAAETVLARITELVKDTLASDESYAIASPLTSDDVLNAIDRGKSEGGPKGRHWILDPIGGTRGFIRGEQYAIGLALLVEGKVVLGVMACPKLPLASTAGNALKSLPEKVGCLFYGSVGNGTYVQSLSVDSLPAKVEVSSIDDPAKASFFESYHTPVPIHNTIATKLGIKESPIKINSQTKYAALSRGDGEVYLRFTRKARPESIWNHAAGSIIVSEAGGKVTDAAGNPLDFSKGKYLDYKRGIVVTTQKLLPRLLTAVRESIKEEEEEEEKAASLKLH

SEQ ID NO: 38594 - protein, 352 aa, Arabidopsis thaliana
  peptide (1)..(352): Ceres Seq. ID no. 13499863
MLSAAKKAVSLAARLSNEVRKSLLVTDVWNKSDDSPVTVADYGSQAVVSLVLERELQNEPVSLVAEEDSGELRKIAAETVLARITELVKDTLASDESYAIASPLTSDDVLNAIDRGKSEGGPKGRHWILDPIGGTRGFIRGEQYAIGLALLVEGKVVLGVMACPKLPLASTAGNALKSLPEKVGCLFYGSVGNGTYVQSLSVDSLPAKVEVSSIDDPAKASFFESYHTPVPIHNTIATKLGIKESPIKINSQTKYAALSRGDGEVYLRFTRKARPESIWNHAAGSIIVSEAGGKVTDAAGNPLDFSKGKYLDYKRGIVVTTQKLLPRLLTAVRESIKEEEEEEEKAASLKLH

SEQ ID NO: 38595 - DNA, 1198 bp, Arabidopsis thaliana
  misc_feature (1)..(1198): Ceres Seq. ID no. 12328752
  misc_feature (1)..(1198): Ortholog of  Ceres SEQ ID NO 14316161 as cited in SEQ ID NO 52384
  misc_feature (1)..(1198): Ortholog of  Ceres SEQ ID NO 14315249 as cited in SEQ ID NO 52512
  misc_feature (1)..(1198): Ortholog of  Ceres SEQ ID NO 15174595 as cited in SEQ ID NO 53460
  misc_feature (1)..(1198): Ortholog of  Ceres SEQ ID NO 13503553 as cited in SEQ ID NO 64822
  misc_feature (1)..(1198): Ortholog of  Ceres SEQ ID NO 13660155 as cited in SEQ ID NO 67635
atgagggacaccattgaaacgtttggttaacatattgccttcaaagccttttttggtttttcttcatttctctttcgcgaagtttcattgatcagaaagggttcccactttctccattgattattcttttgttcgattcttctcggtgtgatttggtatcaaaatggcgtatgaggaacactttcagcaaacttctgaagctaaatatgattgtcttttatttgatatagatgatactctttaccctctcagttctggtttggccatggaagtgaaaaagaacattcaagaatatatggttcagaaacttggtattgaagaagataaagtccaagaactttgcctttccctttataaaatctatggaactactatggctggtctcaaggctgtgggttatgactttgattatgacgatttccatcgttttgttcatgggagattgccatactcaacactgaagcctgacccaattctgaggaatattattcttagcttgcctattcggaaagttgtttttacgaatgcagacaaggctcatgcagccaagattattgccaggctaggcctagagggctgctttgagaaaatcatatctttcgagactctgaaccccatcaccaaaactgaatctcctgttgataccaaaaccagagaaatcttcgacataatcagttacatggcaaatcctgattcaagcattgaacttccaaagacttctgttgtatgcaaaccttctgaaggagcattcgaacaggttttcaagatggccaacatcaatcctaagaagacattgttcttcgatgacagcatccgcaacattcaaactgggaagcgcgttggtctccacaccgtatgggttgggacctcacacagagaggaaggagtagatattgcattggagcatattcacaacatacgtgaagctcttcctcaactatgggatgctgttgatgacaaagccaaggagattagaaccaggcaaaaggtcgccattgaaaccattgcttaaacaaaacattcactggctcattttgcagctaatagtatcgagaatagcgagaaaaccacataactatttcactcttgtaagaggaaaaataagtgtaatttaaagctttgattgagaccactttttgagattatgagtagttatgaaaaaagctttactttattcaatgaagtgcaacatcgtttg

SEQ ID NO: 38596 - protein, 282 aa, Arabidopsis thaliana
  peptide (1)..(282): Ceres Seq. ID no. 12328753
MAYEEHFQQTSEAKYDCLLFDIDDTLYPLSSGLAMEVKKNIQEYMVQKLGIEEDKVQELCLSLYKIYGTTMAGLKAVGYDFDYDDFHRFVHGRLPYSTLKPDPILRNIILSLPIRKVVFTNADKAHAAKIIARLGLEGCFEKIISFETLNPITKTESPVDTKTREIFDIISYMANPDSSIELPKTSVVCKPSEGAFEQVFKMANINPKKTLFFDDSIRNIQTGKRVGLHTVWVGTSHREEGVDIALEHIHNIREALPQLWDAVDDKAKEIRTRQKVAIETIA

SEQ ID NO: 38597 - protein, 248 aa, Arabidopsis thaliana
  peptide (1)..(248): Ceres Seq. ID no. 12328754
MEVKKNIQEYMVQKLGIEEDKVQELCLSLYKIYGTTMAGLKAVGYDFDYDDFHRFVHGRLPYSTLKPDPILRNIILSLPIRKVVFTNADKAHAAKIIARLGLEGCFEKIISFETLNPITKTESPVDTKTREIFDIISYMANPDSSIELPKTSVVCKPSEGAFEQVFKMANINPKKTLFFDDSIRNIQTGKRVGLHTVWVGTSHREEGVDIALEHIHNIREALPQLWDAVDDKAKEIRTRQKVAIETIA

SEQ ID NO: 38598 - protein, 238 aa, Arabidopsis thaliana
  peptide (1)..(238): Ceres Seq. ID no. 12328755
MVQKLGIEEDKVQELCLSLYKIYGTTMAGLKAVGYDFDYDDFHRFVHGRLPYSTLKPDPILRNIILSLPIRKVVFTNADKAHAAKIIARLGLEGCFEKIISFETLNPITKTESPVDTKTREIFDIISYMANPDSSIELPKTSVVCKPSEGAFEQVFKMANINPKKTLFFDDSIRNIQTGKRVGLHTVWVGTSHREEGVDIALEHIHNIREALPQLWDAVDDKAKEIRTRQKVAIETIA

SEQ ID NO: 38599 - DNA, 745 bp, Arabidopsis thaliana
  misc_feature (1)..(745): Ceres Seq. ID no. 5672374
  misc_feature (1)..(745): Ortholog of  Ceres SEQ ID NO 13503305 as cited in SEQ ID NO 58293
agaaagcggaaaaaaaaacaaaaggtcgtgaatgtctctgtccctttcttcctcagttctcacgcaagcttcaacgagaaaagatcggaatctcgccgtcggtaaagcgccgccgtaagtaaaagacggaaaaccagaagaaggaggagattgtatttatgtgtagcagcgtttagtgtgaggaaggaggagattttgtatatagttagaatttgcttcgaagacgatgtcgctgagaattaaattagtggtggataagtttgtggaggagcttaagcaagcacttgacgctgatatacaagatcggatcatgaaggagagagagatgcagagttatatagaagagcgtgagcgtgaagtcgctgagcgagaagctgcctggaaagctgagctctctcgccgtgagacggagatcgctagacaggaagcgaggttgaagatggagagagagaatctggagaaggagaagagtgttcttatggggactgcgtcgaatcaggataatcaagatggtgctctggaaattactgtgagtggtgagaaatatcggtgtcttagattctctaaggctaagaaatgaggttggaaattggaatctggattctaaatttagggcacaaaaggaaaagatttgttcttgcgtttatgatggatgcaatgggaattgttggaatgatgcttggtttgtgtaaattattaattcaatgaagaaagtattgtgttttctggaaagagagtttgtctg

SEQ ID NO: 38600 - protein, 117 aa, Arabidopsis thaliana
  peptide (1)..(117): Ceres Seq. ID no. 5672375
MSLRIKLVVDKFVEELKQALDADIQDRIMKEREMQSYIEEREREVAEREAAWKAELSRRETEIARQEARLKMERENLEKEKSVLMGTASNQDNQDGALEITVSGEKYRCLRFSKAKK

SEQ ID NO: 38601 - protein, 89 aa, Arabidopsis thaliana
  peptide (1)..(89): Ceres Seq. ID no. 5672376
MKEREMQSYIEEREREVAEREAAWKAELSRRETEIARQEARLKMERENLEKEKSVLMGTASNQDNQDGALEITVSGEKYRCLRFSKAKK

SEQ ID NO: 38602 - protein, 84 aa, Arabidopsis thaliana
  peptide (1)..(84): Ceres Seq. ID no. 5672377
MQSYIEEREREVAEREAAWKAELSRRETEIARQEARLKMERENLEKEKSVLMGTASNQDNQDGALEITVSGEKYRCLRFSKAKK

SEQ ID NO: 38603 - DNA, 1945 bp, Arabidopsis thaliana
  misc_feature (1)..(1945): Ceres Seq. ID no. 13574947
  misc_feature (1)..(1945): Ortholog of  Ceres SEQ ID NO 13600220 as cited in SEQ ID NO 0
aagtgtctctctataaccagagaaattatttcaagatctacttctcatcatcgttcttttcttatctcttcttgtccaacttcttctgaatcaagacaagagaaaagcaaccaaagatggcacatcttcaaagaacatttcctactgagatgtcaaaaggtagagctagctttccaaaaggctttctctttggaactgcttcatcttcttatcagtacgaaggagcagtgaatgaaggtgcgagaggacaaagcgtgtgggatcatttctccaacaggtttcctcacagaatcagtgattctagcgacggaaacgttgccgttgatttctaccatcgttacaaggaagatattaagagaatgaaggatataaacatggattcgtttcggctttccattgcttggccacgagttctaccttatggcaaaagggatagaggagttagtgaagaaggaattaagttttacaatgatgttattgatgaactcttagccaatgaaatcactcctcttgttactatctttcattgggacataccacaggatcttgaagatgaatacggcggttttctaagcgagcagattatagatgacttcagagactatgcgagtctctgcttcgagagatttggggacagagtgagtctgtggtgcacaatgaatgagccgtgggtctacagtgtcgcgggctatgacacaggaaggaaagcgccaggacggtgctccaagtatgttaatggcgctagtgttgctggaatgtcgggatacgaggcatatattgtgagccataacatgcttctagcgcacgcagaagcagtggaagtgtttagaaaatgtgaccatattaaaaacggacaaattgggattgcgcataatccactttggtacgagccatatgatccgagtgatccagatgatgtcgaaggatgtaatcgagctatggacttcatgcttggttggcatcagcatccgactgcttgtggagactatccagaaacgatgaagaaatcagttggagatagattaccgagttttacaccagaacaatctaagaaacttataggctcttgcgattacgttggtataaactactatagctcgcttttcgtgaagagtatcaaacacgtggatcctacgcaacctacttggagaactgaccaaggcgttgattggatgaaaaccaacatagatgggaaacaaatagcaaaacaaggaggatcagagtggagtttcacatatccaacaggactcagaaacattttgaagtatgtgaaaaaaacttatggcaatcctcccattctcataactgaaaacgggtatggtgaagtagcggaacagagtcagagtctttatatgtacaatccttcaatcgacacagagagattggagtacattgaaggacatatccacgctattcatcaagccatccatgaagatggagtaagagtggaaggttattacgtatggtcattgctagataacttcgagtggaacagtggatatggtgtgagatatggtttatattacattgattacaaagatgggcttagacgatacccgaaaatgtcggcgttatggttgaaagagttcttgaggtttgatcaagaagacgattcttcgacgtctaagaaagaagagaagaaagagagctatggaaaacagttattgcattctgttcaggacagtcaatttgttcattcgattaaagacagtggtgcgttacctgcggttttggggagcttgttcgttgtgtctgcaactgttggtacttctctgttcttcaaaggagctaataattgaaacagaagaaacaaaattttaaaaaattgttgggatttgttgttgttcttgaaagattgaaaaagaactatgtgatactttgtactattcttttctataatttattgtgtgttttgttattgaaaacttgtgtggtctattagttg

SEQ ID NO: 38604 - protein, 560 aa, Arabidopsis thaliana
  peptide (1)..(560): Ceres Seq. ID no. 13574948
MAHLQRTFPTEMSKGRASFPKGFLFGTASSSYQYEGAVNEGARGQSVWDHFSNRFPHRISDSSDGNVAVDFYHRYKEDIKRMKDINMDSFRLSIAWPRVLPYGKRDRGVSEEGIKFYNDVIDELLANEITPLVTIFHWDIPQDLEDEYGGFLSEQIIDDFRDYASLCFERFGDRVSLWCTMNEPWVYSVAGYDTGRKAPGRCSKYVNGASVAGMSGYEAYIVSHNMLLAHAEAVEVFRKCDHIKNGQIGIAHNPLWYEPYDPSDPDDVEGCNRAMDFMLGWHQHPTACGDYPETMKKSVGDRLPSFTPEQSKKLIGSCDYVGINYYSSLFVKSIKHVDPTQPTWRTDQGVDWMKTNIDGKQIAKQGGSEWSFTYPTGLRNILKYVKKTYGNPPILITENGYGEVAEQSQSLYMYNPSIDTERLEYIEGHIHAIHQAIHEDGVRVEGYYVWSLLDNFEWNSGYGVRYGLYYIDYKDGLRRYPKMSALWLKEFLRFDQEDDSSTSKKEEKKESYGKQLLHSVQDSQFVHSIKDSGALPAVLGSLFVVSATVGTSLFFKGANN

SEQ ID NO: 38605 - protein, 549 aa, Arabidopsis thaliana
  peptide (1)..(549): Ceres Seq. ID no. 13574949
MSKGRASFPKGFLFGTASSSYQYEGAVNEGARGQSVWDHFSNRFPHRISDSSDGNVAVDFYHRYKEDIKRMKDINMDSFRLSIAWPRVLPYGKRDRGVSEEGIKFYNDVIDELLANEITPLVTIFHWDIPQDLEDEYGGFLSEQIIDDFRDYASLCFERFGDRVSLWCTMNEPWVYSVAGYDTGRKAPGRCSKYVNGASVAGMSGYEAYIVSHNMLLAHAEAVEVFRKCDHIKNGQIGIAHNPLWYEPYDPSDPDDVEGCNRAMDFMLGWHQHPTACGDYPETMKKSVGDRLPSFTPEQSKKLIGSCDYVGINYYSSLFVKSIKHVDPTQPTWRTDQGVDWMKTNIDGKQIAKQGGSEWSFTYPTGLRNILKYVKKTYGNPPILITENGYGEVAEQSQSLYMYNPSIDTERLEYIEGHIHAIHQAIHEDGVRVEGYYVWSLLDNFEWNSGYGVRYGLYYIDYKDGLRRYPKMSALWLKEFLRFDQEDDSSTSKKEEKKESYGKQLLHSVQDSQFVHSIKDSGALPAVLGSLFVVSATVGTSLFFKGANN

SEQ ID NO: 38606 - protein, 479 aa, Arabidopsis thaliana
  peptide (1)..(479): Ceres Seq. ID no. 13574950
MKDINMDSFRLSIAWPRVLPYGKRDRGVSEEGIKFYNDVIDELLANEITPLVTIFHWDIPQDLEDEYGGFLSEQIIDDFRDYASLCFERFGDRVSLWCTMNEPWVYSVAGYDTGRKAPGRCSKYVNGASVAGMSGYEAYIVSHNMLLAHAEAVEVFRKCDHIKNGQIGIAHNPLWYEPYDPSDPDDVEGCNRAMDFMLGWHQHPTACGDYPETMKKSVGDRLPSFTPEQSKKLIGSCDYVGINYYSSLFVKSIKHVDPTQPTWRTDQGVDWMKTNIDGKQIAKQGGSEWSFTYPTGLRNILKYVKKTYGNPPILITENGYGEVAEQSQSLYMYNPSIDTERLEYIEGHIHAIHQAIHEDGVRVEGYYVWSLLDNFEWNSGYGVRYGLYYIDYKDGLRRYPKMSALWLKEFLRFDQEDDSSTSKKEEKKESYGKQLLHSVQDSQFVHSIKDSGALPAVLGSLFVVSATVGTSLFFKGANN

SEQ ID NO: 38607 - DNA, 2028 bp, Arabidopsis thaliana
  misc_feature (1)..(2028): Ceres Seq. ID no. 13492917
  misc_feature (1)..(2028): Ortholog of  Ceres SEQ ID NO 13584744 as cited in SEQ ID NO 69137
atttttgtaatctggctctataattgtctctgtttgctgctactctcgagcttggttgacgcggatcaggccaacatagattgcttaaggacctttaaatctcaagtagaggatccaaatagatatttatcgacttgggtttttggcaacgagactgctggttatatctgcaagttcagtggtgtgacttgttggcatgatgatgagaatagggttttgagtattaagctatctggttatggtcttagaggagtgtttcctcctgcggttaagctatgtgctgatctcactggtttagatctttctagaaacaacttctctggacctttaccagccaacattagcaccttgattccacttgttacgattctagacctctcctacaatagcttctctggtgaaatccctatgttgatctccaacattacctttttgaacactcttatgcttcagcataaccagttcacgggtactcttcctccccagctagcgcaacttggacggctcaaaacattctctgtgtctgacaatcgtctcgttggtcctatcccaaatttcaaccaaaccttgcagtttaagcaggaattgtttgctaataacctggatctgtgtggtaagcctctagatgactgtaagagtgcttctagctctcgtggtaaagttgttattatagcggcagttggtggactgactgcagcagcattagtcgttggggttgttttgttcttctatttccgtaaattgggtgctgttcggaagaagcaggatgatcctgaaggaaacagatgggcaaagagcttgaaaggacagaaaggtgttaaggttttcatgtttaagaaatcggtttcaaagatgaaattaagcgatcttatgaaggcaacagaggaattcaagaaagataatatcattgcaacaggaagaacaggaactatgtacaaaggtaggcttgaagacgggtctctacttatgataaagaggttgcaggattctcaacgctctgagaaagagtttgatgcagagatgaagactttgggctctgttaaaaacagaaacttagtccctctcttgggctattgtgttgccaataaggagaggcttctaatgtatgagtacatggcaaacggttacctttatgatcagttacatcctgcagatgaagaatccttcaagcccttggattggccttcaaggctgaaaatcgcgattgggacggcaaaaggattggcatggcttcatcatagctgcaacccgagaatcatccatcgcaacataagctcgaaatgcatattgntgactgcagagtttgagccaaagatctcggatttcggtctagctaggctgatgaacccaattgatacccatttaagcacattcgtcaatggagaatttggggatttcggttatgttgctcccgagtattcaagaaccatggttgcaactccaaaaggagatgtctacagcttcggtgttgtgcttctagagctagtaacgggccaaaaagcaacgagtgtaacaaaagtatctgaagaaaaagctgaggaagaaaacttcaagggtaacctcgtggaatggattacaaagctatcaagtgaatcaaaactgcaggaagcaatcgacaggtccttacttgggaacggtgtggatgatgaaatcttcaaagtactcaaagtagcatgcaactgcgttctaccggaaatagcaaagcagaggccaaccatgtttgaagtttatcagcttctaagagccattggagagagctacaacttcaccgccgatgatgatatcttaatcccatctgaatcaggtgaaggcgatttcattgaagagctcatagttgctcgttgatcaagaggaagggtaagaattgtgaaacaaacatctctagtcgtagcagtccaaagatatatataatgtataagtattgtttttattttatttttgggttctcgtcgtcgatggtgtgttgtaatatgatatattgttagatgcactctcttattactatgtactaagctttgggtgtgtggc

SEQ ID NO: 38608 - protein, 614 aa, Arabidopsis thaliana
  peptide (1)..(614): Ceres Seq. ID no. 13492918
  misc_feature (431)..(431): Xaa is any aa, unknown or other
IFVIWLYNCLCLLLLSSLVDADQANIDCLRTFKSQVEDPNRYLSTWVFGNETAGYICKFSGVTCWHDDENRVLSIKLSGYGLRGVFPPAVKLCADLTGLDLSRNNFSGPLPANISTLIPLVTILDLSYNSFSGEIPMLISNITFLNTLMLQHNQFTGTLPPQLAQLGRLKTFSVSDNRLVGPIPNFNQTLQFKQELFANNLDLCGKPLDDCKSASSSRGKVVIIAAVGGLTAAALVVGVVLFFYFRKLGAVRKKQDDPEGNRWAKSLKGQKGVKVFMFKKSVSKMKLSDLMKATEEFKKDNIIATGRTGTMYKGRLEDGSLLMIKRLQDSQRSEKEFDAEMKTLGSVKNRNLVPLLGYCVANKERLLMYEYMANGYLYDQLHPADEESFKPLDWPSRLKIAIGTAKGLAWLHHSCNPRIIHRNISSKCILXTAEFEPKISDFGLARLMNPIDTHLSTFVNGEFGDFGYVAPEYSRTMVATPKGDVYSFGVVLLELVTGQKATSVTKVSEEKAEEENFKGNLVEWITKLSSESKLQEAIDRSLLGNGVDDEIFKVLKVACNCVLPEIAKQRPTMFEVYQLLRAIGESYNFTADDDILIPSESGEGDFIEELIVAR

SEQ ID NO: 38609 - protein, 478 aa, Arabidopsis thaliana
  peptide (1)..(478): Ceres Seq. ID no. 13492919
  misc_feature (295)..(295): Xaa is any aa, unknown or other
MLISNITFLNTLMLQHNQFTGTLPPQLAQLGRLKTFSVSDNRLVGPIPNFNQTLQFKQELFANNLDLCGKPLDDCKSASSSRGKVVIIAAVGGLTAAALVVGVVLFFYFRKLGAVRKKQDDPEGNRWAKSLKGQKGVKVFMFKKSVSKMKLSDLMKATEEFKKDNIIATGRTGTMYKGRLEDGSLLMIKRLQDSQRSEKEFDAEMKTLGSVKNRNLVPLLGYCVANKERLLMYEYMANGYLYDQLHPADEESFKPLDWPSRLKIAIGTAKGLAWLHHSCNPRIIHRNISSKCILXTAEFEPKISDFGLARLMNPIDTHLSTFVNGEFGDFGYVAPEYSRTMVATPKGDVYSFGVVLLELVTGQKATSVTKVSEEKAEEENFKGNLVEWITKLSSESKLQEAIDRSLLGNGVDDEIFKVLKVACNCVLPEIAKQRPTMFEVYQLLRAIGESYNFTADDDILIPSESGEGDFIEELIVAR

SEQ ID NO: 38610 - protein, 466 aa, Arabidopsis thaliana
  peptide (1)..(466): Ceres Seq. ID no. 13492920
  misc_feature (283)..(283): Xaa is any aa, unknown or other
MLQHNQFTGTLPPQLAQLGRLKTFSVSDNRLVGPIPNFNQTLQFKQELFANNLDLCGKPLDDCKSASSSRGKVVIIAAVGGLTAAALVVGVVLFFYFRKLGAVRKKQDDPEGNRWAKSLKGQKGVKVFMFKKSVSKMKLSDLMKATEEFKKDNIIATGRTGTMYKGRLEDGSLLMIKRLQDSQRSEKEFDAEMKTLGSVKNRNLVPLLGYCVANKERLLMYEYMANGYLYDQLHPADEESFKPLDWPSRLKIAIGTAKGLAWLHHSCNPRIIHRNISSKCILXTAEFEPKISDFGLARLMNPIDTHLSTFVNGEFGDFGYVAPEYSRTMVATPKGDVYSFGVVLLELVTGQKATSVTKVSEEKAEEENFKGNLVEWITKLSSESKLQEAIDRSLLGNGVDDEIFKVLKVACNCVLPEIAKQRPTMFEVYQLLRAIGESYNFTADDDILIPSESGEGDFIEELIVAR

SEQ ID NO: 38611 - DNA, 2019 bp, Arabidopsis thaliana
  misc_feature (1)..(2019): Ceres Seq. ID no. 12328728
  misc_feature (1)..(2019): Ortholog of  Ceres SEQ ID NO 13594037 as cited in SEQ ID NO 55666
  misc_feature (1)..(2019): Ortholog of  Ceres SEQ ID NO 13657707 as cited in SEQ ID NO 66407
gtaaatcaaaagagaactaaaccaagaaacaaaatgggatacgaaaggctcggaccatccggagcaactggttcggtcaccacctccactactacagctccaatccttaaccaagtctccacgtcagaacaaccggagaacaacaaccgaagaagcaaaaagaagcttgtagtatcatctatcgtcttagccatctcacttatcctcgccgccgcgatcttcgccggagtcagatcacgtctcaagttaaaccaatcagtcccaggcctagctcgtaaaccgagtcaagcaatctctaaagcttgtgagttaactcgtttccccgagttatgcgttgactcactcatggactttcccggctcactcgccgcttcctcctctaaagatctcatccacgtgactgtgaacatgacgctccaccacttcagccacgctctctactcgtctgcttccctctccttcgtcgacatgccgccacgtgctcgctcagcttacgactcttgcgtcgagctacttgacgattccgttgacgcgctatcacgcgctctttcctccgtcgtatcctcctccgctaagccgcaagatgttacaacgtggcttagcgcggctttaacaaaccatgacacgtgtactgaaggattcgacggcgtcgacgacggtggagtgaaggatcatatgacggcggcgttacagaatctttctgagcttgttagtaactgtcttgctatattctcggcgagtcacgacggtgacgatttcgccggagttccaatacagaacaggaggctgctgggagtggaggaacgagaagagaaattcccgagatggatgagaccaaaagaacgcgagatactggaaatgccggtatctcagatacaagctgatattatcgtatcgaaagacggtaacggcacgtgcaaaactatatcggaagctatcaagaaagctcctcagaacagtactcgccggataattatctacgtcaaggccggaagatatgaagagaacaacctcaaggtcggtaggaaaaaaattaatttgatgttcgttggagatggcaagggtaaaactgttatttcgggaggcaaaagtatatttgacaacatcactactttccacacggcgtcatttgctgcgaccggagctggatttattgcaagggacatcacattcgaaaactgggccggtccagcgaagcaccaagccgtggctctccgcatcggagctgaccacgcagtgatctaccgatgcaatataatcggttaccaagacacactctacgtccattcaaaccgccaattctttcgtgaatgcgatatctacggtacagtcgattttatctttggtaacgcagccgtcgtactacaaaactgtagcatctacgcacggaagccaatggattttcagaaaaatacaatcacggctcaaaacagaaaagatccgaaccaaaacaccggaatatcaatacatgcgtctagggttcttgcagcatccgatctccaagcgacaaacggtagtacacagacgtatctaggccgaccttggaagctattctctaggacagtgtatatgatgtcgtatatcggtggtcatgtacacacgagaggttggctcgagtggaacacaacatttgctttagatactttgtattacggagagtatttgaacagtggacctgggtcgggtctcgggcaacgtgtgagctggccgggttatcgggtcatcaattcgacggccgaggcaaaccggttcactgtggcagaatttatatacggttcctcgtggttgccatcgaccggagtttcgttcttggccggattaagcatataggtagagaaaaaattgaaatgcttatttttccgatgaattgtttcattcttacggtccttatattaatggacatatcagtattccaatatatatgagtatattttaactttaattgtaatgtctccactctccagaggtattattcaataatagatgaacactcgaggataattttcccttgttttcttg

SEQ ID NO: 38612 - protein, 609 aa, Arabidopsis thaliana
  peptide (1)..(609): Ceres Seq. ID no. 12328729
VNQKRTKPRNKMGYERLGPSGATGSVTTSTTTAPILNQVSTSEQPENNNRRSKKKLVVSSIVLAISLILAAAIFAGVRSRLKLNQSVPGLARKPSQAISKACELTRFPELCVDSLMDFPGSLAASSSKDLIHVTVNMTLHHFSHALYSSASLSFVDMPPRARSAYDSCVELLDDSVDALSRALSSVVSSSAKPQDVTTWLSAALTNHDTCTEGFDGVDDGGVKDHMTAALQNLSELVSNCLAIFSASHDGDDFAGVPIQNRRLLGVEEREEKFPRWMRPKEREILEMPVSQIQADIIVSKDGNGTCKTISEAIKKAPQNSTRRIIIYVKAGRYEENNLKVGRKKINLMFVGDGKGKTVISGGKSIFDNITTFHTASFAATGAGFIARDITFENWAGPAKHQAVALRIGADHAVIYRCNIIGYQDTLYVHSNRQFFRECDIYGTVDFIFGNAAVVLQNCSIYARKPMDFQKNTITAQNRKDPNQNTGISIHASRVLAASDLQATNGSTQTYLGRPWKLFSRTVYMMSYIGGHVHTRGWLEWNTTFALDTLYYGEYLNSGPGSGLGQRVSWPGYRVINSTAEANRFTVAEFIYGSSWLPSTGVSFLAGLSI

SEQ ID NO: 38613 - protein, 598 aa, Arabidopsis thaliana; identical to SEQ ID NO: 27422
  peptide (1)..(598): Ceres Seq. ID no. 12328730

SEQ ID NO: 38614 - protein, 494 aa, Arabidopsis thaliana; identical to SEQ ID NO: 27423
  peptide (1)..(494): Ceres Seq. ID no. 12328731

SEQ ID NO: 38615 - DNA, 1499 bp, Arabidopsis thaliana
  misc_feature (1)..(1499): Ceres Seq. ID no. 12394512
  misc_feature (1)..(1499): Ortholog of  Ceres SEQ ID NO 14304925 as cited in SEQ ID NO 52996
atttctcaattcccaagttctttatccaaattgttctgaaacatagagagaaacaatgggtgttacaggaggattagtcagaagcattttcttcaggaacaaatcatttggagctcatgactacaacaatggaagaggcaatctaggagagaagaaacgatggagctcggttagatcatacctttgcggagatgaatttaactctgttcgcgctgtgaatgattcagaatcgataaaggattctgaggctcttcttacaatgtctcagcaactgagttcagagttcggtatgccttttggttcggttatcgcaatcgaagattcagcttctgtgagacatttggaggatgaggactctggttccgttaagagctctgaggcacagtgactcaacctttactggaggagaaatcgaaaggactggattgttatctaaaagaagaagatgttgaagataaccaaagcgaagcaacagagacacacatacccaagaagcatcagactactccaatctccaagttgttcctcgaagaagacgctgcagtcataattcagtcagcattcaggagttacctggcaatacgccggagcaaagaagaagaggaaacatttgctaaggaggagagcttctcaggagaggaatctcaagacaatgcatccatggggacatcactagaagctcagacaggtaattccgtgaaagcaccatttttcaggagaaagcgagtatctgcgaatcgaagaacactacagaagaacaacactcaagttctgaggataaaggaagactgggatgatagtacagtgagcagcaccatatcaaaatcaaggattcaaagcagagtcgaagcaatgacaaaacgggagagagcacttgcgtatgcattttcacagcagctaagaatttgctcaaagaagaaacaaatagatcgtagcagtgaagatgattccaatatcggttggagttggttagaacgctggatggcaacccgtgtaccagacagcattccaattgaaccaagaacagatgttgcaacgaaaaatcaaagcttgataagaaagaatagagcttttggtacagctggcgagttggagagctgtgcttccaacgacctacctctccattttgaaagcatatcagagacacaaggagatgcaactacagttttgcagaccgaaaaaagtagttttaaaccaagtatatctaagcgtaaatctgttccaagctacaaaagccagagaaagcatcacaagcttcaggccaccaaaagtgatctgcaacaacaaacaaagaaagcaaagaaggccaaaaccacacccacaagctgcaaaacaggaaacgaatgcgaagaaacctcacataagctaaatagcagcacctaagataagcattacctgtaaatctttgcatttaaatcacaaaagtttgttctttcgaatcagataacaactttctgtaaattatttagggattcaaatcaaaccagtaatagtaaggg

SEQ ID NO: 38616 - protein, 240 aa, Arabidopsis thaliana
  peptide (1)..(240): Ceres Seq. ID no. 12394513
MGTSLEAQTGNSVKAPFFRRKRVSANRRTLQKNNTQVLRIKEDWDDSTVSSTISKSRIQSRVEAMTKRERALAYAFSQQLRICSKKKQIDRSSEDDSNIGWSWLERWMATRVPDSIPIEPRTDVATKNQSLIRKNRAFGTAGELESCASNDLPLHFESISETQGDATTVLQTEKSSFKPSISKRKSVPSYKSQRKHHKLQATKSDLQQQTKKAKKAKTTPTSCKTGNECEETSHKLNSST

SEQ ID NO: 38617 - protein, 176 aa, Arabidopsis thaliana
  peptide (1)..(176): Ceres Seq. ID no. 12394514
MTKRERALAYAFSQQLRICSKKKQIDRSSEDDSNIGWSWLERWMATRVPDSIPIEPRTDVATKNQSLIRKNRAFGTAGELESCASNDLPLHFESISETQGDATTVLQTEKSSFKPSISKRKSVPSYKSQRKHHKLQATKSDLQQQTKKAKKAKTTPTSCKTGNECEETSHKLNSST

SEQ ID NO: 38618 - protein, 133 aa, Arabidopsis thaliana
  peptide (1)..(133): Ceres Seq. ID no. 12394515
MATRVPDSIPIEPRTDVATKNQSLIRKNRAFGTAGELESCASNDLPLHFESISETQGDATTVLQTEKSSFKPSISKRKSVPSYKSQRKHHKLQATKSDLQQQTKKAKKAKTTPTSCKTGNECEETSHKLNSST

SEQ ID NO: 38619 - DNA, 1699 bp, Arabidopsis thaliana
  misc_feature (1)..(1699): Ceres Seq. ID no. 13487978
  misc_feature (1)..(1699): Ortholog of  Ceres SEQ ID NO 15178299 as cited in SEQ ID NO 0
  misc_feature (1)..(1699): Ortholog of  Ceres SEQ ID NO 15226331 as cited in SEQ ID NO 0
gccgaaccaatcaccctaaggggacacttaaagagagaaacaaatccttcttctaaaatattcttcaatcttcttctcgaagcttctccaaaaatggcgattacttcttctagaaccaccagatcaaacggatctgcttcgctccgatccaaatcaccgtccggtcgattctgtggcgtttactcaaaccgtatgccgtcatcatctccgtcgtcgtcaggtttcgcttcttccacaagctcaagtttctcctcaccgtctacagcgtttttcagcagccacaatcagaacaaccaccaccaacacagatctgcttctccgacgcgtgtgaatctattcacatcagctccgatgacgcaatcgtttcgttactcaatcgataacagatctatatcaccgaatcgatccatcgctgtttcttccaacaaacctagcaatcatcacaagattccggattcgaggagaagatgtatgtgctctccgacaacgcatcctggttcattccggtgtagtctacacaagaacgtcgcgaatccacatggtcaaggtacagcttcgtatacaacgaatggattgaatatgcgtcgatctgcgatgacgaattctcttgtgagaattggtggtgttgaaggtgaatgggtgcgaagagctttgactactttgattagaccatcttcacatcaactaaagagaagatctgcttatgagcctcgtcgtagtagactcgcatctatgtcgaaagcagaagatctttgaatctctcttcaggtttgttcttgtttttgatatactcagatctgccatgaacgagttgaatcaaggagcagaatcggagctgagtcataccggaccgagtcaaattcggagctgagttataccggaccgagttatgtaaaacggtgactaagacgacaccgtttttgttttgttgggtgggagatgagatgatgatgatgcattgtacatacacatattgcttattgaagcagaacaaaaaaatttcgcaagtcgaaagtatctagaaatctaaaaatggaaaatagtagtgacgaattgggtaattaaaatctggaaaaggacttagtagtaaatattgtttggattcaactttgcaaatctctccatctccattgttcgttgccttcaccgttagtttgttccgtcaagtcaacgttctctattctccgtcgttgacccgttctgtttgccgttaaccgtcgtcgtgtgttatgtgtgttccgttattatttctccaggtatgtgttgttcgtcgtgtcaggtatgtattttccgtttcttatttatttggttaatttcgttttactttttttgtgcacgtttgatctgtttttttttttttggtttgtctttttcaggtttcgtacaatgaggagaagatgattacttaaccgttacgttcaactttggaatattttgggtttgtggactttggaagaaaaatgaatttggactatgagaaaaatcaaatatatgacctaaaacacggagaatttgataaaggacgatcgaatatgagtgattttgattcgtggaacgattaaggttttggttttggagctggagaatgtgaaagattcgaaggaatcagatttttctctggaatttgtgaatcacagatttagattcctgaaacggttgaggttaaagtgaaaagattcaatgaaatcatatttttacc

SEQ ID NO: 38620 - protein, 251 aa, Arabidopsis thaliana
  peptide (1)..(251): Ceres Seq. ID no. 13487979
AEPITLRGHLKRETNPSSKIFFNLLLEASPKMAITSSRTTRSNGSASLRSKSPSGRFCGVYSNRMPSSSPSSSGFASSTSSSFSSPSTAFFSSHNQNNHHQHRSASPTRVNLFTSAPMTQSFRYSIDNRSISPNRSIAVSSNKPSNHHKIPDSRRRCMCSPTTHPGSFRCSLHKNVANPHGQGTASYTTNGLNMRRSAMTNSLVRIGGVEGEWVRRALTTLIRPSSHQLKRRSAYEPRRSRLASMSKAEDL

SEQ ID NO: 38621 - protein, 220 aa, Arabidopsis thaliana
  peptide (1)..(220): Ceres Seq. ID no. 13487980
MAITSSRTTRSNGSASLRSKSPSGRFCGVYSNRMPSSSPSSSGFASSTSSSFSSPSTAFFSSHNQNNHHQHRSASPTRVNLFTSAPMTQSFRYSIDNRSISPNRSIAVSSNKPSNHHKIPDSRRRCMCSPTTHPGSFRCSLHKNVANPHGQGTASYTTNGLNMRRSAMTNSLVRIGGVEGEWVRRALTTLIRPSSHQLKRRSAYEPRRSRLASMSKAEDL

SEQ ID NO: 38622 - protein, 187 aa, Arabidopsis thaliana
  peptide (1)..(187): Ceres Seq. ID no. 13487981
MPSSSPSSSGFASSTSSSFSSPSTAFFSSHNQNNHHQHRSASPTRVNLFTSAPMTQSFRYSIDNRSISPNRSIAVSSNKPSNHHKIPDSRRRCMCSPTTHPGSFRCSLHKNVANPHGQGTASYTTNGLNMRRSAMTNSLVRIGGVEGEWVRRALTTLIRPSSHQLKRRSAYEPRRSRLASMSKAEDL

SEQ ID NO: 38623 - DNA, 1376 bp, Arabidopsis thaliana; identical to SEQ ID NO: 37205
  misc_feature (1)..(1376): Ceres Seq. ID no. 13575567
  misc_feature (1)..(1376): Ortholog of  Ceres SEQ ID NO 13585976 as cited in SEQ ID NO 0

SEQ ID NO: 38624 - protein, 309 aa, Arabidopsis thaliana; identical to SEQ ID NO: 37206
  peptide (1)..(309): Ceres Seq. ID no. 13575568

SEQ ID NO: 38625 - protein, 248 aa, Arabidopsis thaliana; identical to SEQ ID NO: 37207
  peptide (1)..(248): Ceres Seq. ID no. 13575569

SEQ ID NO: 38626 - protein, 217 aa, Arabidopsis thaliana; identical to SEQ ID NO: 37208
  peptide (1)..(217): Ceres Seq. ID no. 13575570

SEQ ID NO: 38627 - DNA, 2315 bp, Arabidopsis thaliana
  misc_feature (1)..(2315): Ceres Seq. ID no. 12562127
  misc_feature (1)..(2315): Ortholog of  Ceres SEQ ID NO 15224874 as cited in SEQ ID NO 55015
caaaaaccaaaatcacaatcgaagaaatcttttgaaagcaaaatggaagagatttcgacggatccggttgttccagcggtgaaacctgacccgagaacatcttcagttggtgaaggtgctaatcgtcatgaaaatgacgacggaggaagcggcggttctgagattggagcaccggatctggataaagacttgctttgtccgatttgtatgcagattattaaagatgctttcctcacggcttgtggtcatagtttctgctatatgtgtatcatcacacatcttaggaacaagagtgattgtccctgttgtagccaacacctcaccaataatcagctttaccctaatttcttgctcgataagctattgaagaaaacttcagctcggcatgtgtcaaaaactgcatcgcccttggatcagtttcgggaagcactacaaaggggttgtgatgtgtcaattaaggaggttgataatcttctgacacttcttgcggaaaggaagagaaaaatggaacaggaagaagctgagaggaacatgcagatacttttggactttttgcattgtctaaggaagcaaaaagttgatgaactaaatgaggtgcaaactgatctccagtatattaaagaagatataaatgccgttgagagacatagaatagatttataccgagctagggacagatattctgtaaagttgcggatgctcggagatgatccaagcacaagaaatgcatggccacatgagaagaaccagattggtttcaactccaattctctcagcataagaggaggaaattttgtaggcaattatcaaaacaaaaaggtagaggggaaggcacaaggaagctctcatgggctaccaaagaaggatgcgctgagtgggtcagattcgcaaagtttgaatcagtcaactgtctcaatggctagaaagaaacggattcatgctcagttcaatgatttacaagaatgttacctccaaaagcggcgtcagttggcagaccaaccaaatagtaaacaagaaaatgataagagtgtagtacggagggaaggctatagcaacggccttgcagattttcaatctgtgttgactaccttcactcgctacagtcgtctaagagttatagcagaaatccggcatggggatatatttcattcagccaacattgtatcaagcatagagtttgatcgtgatgatgagctgtttgccactgctggtgtttctagatgtataaaggtttttgacttctcttcggttgtaaatgaaccagcagatatgcagtgtccgattgtggagatgtcaactcggtctaaacttagttgcttgagttggaataagcatgaaaaaaatcacatagcaagcagtgattatgaaggaatagtaacagtgtgggatgtaactactaggcagagtcttatggagtatgaagagcacgaaaaacgtgcctggagtgttgacttttcacgaacagaaccatcaatgcttgtatctggtagtgacgactgcaaggttaaagtttggtgcacgaggcaggaagcaagtgtgattaatattgatatgaaagcaaacatatgttgtgtcaagtacaatcctggctcaagcaactacattgcggtcggatcagctgatcatcacatccattattacgatctaagaaacataagccaaccacttcatgtcttcagtggacacaagaaagcagtttcctatgttaaatttttgtccaacaacgagctcgcttctgcgtccacagatagcacactacgcttatgggatgtcaaagacaacttgccagttcgaacattcagaggacatactaacgagaagaactttgtgggtctcacagtgaacagcgagtatctcgcctgtggaagcgagacaaacgaagtatatgtatatcacaaggaaatcacgagacccgtgacatcgcacagatttggatcgccagacatggacgatgcagaggaagaggcaggttcctactttattagtgcggtttgctggaagagtgatagtcccacgatgttgactgcgaatagtcaaggaaccatcaaagttctggtactcgctgcgtgattctagtagacattacaaaagatcttatagcttcgtgaatcaataaaaacaaatttgccgtctatgttctttagtgggagttacatatagagagagaacaatttattaaaagtagggttcatcatttggaaagcaactttgtattattatgcttgccttggaacactcctcaagaagaatttgtatcagtgatgtagatatgtcttacggtttcttagcttctactttatataattaaatgttag

SEQ ID NO: 38628 - protein, 689 aa, Arabidopsis thaliana
  peptide (1)..(689): Ceres Seq. ID no. 12562128
QKPKSQSKKSFESKMEEISTDPVVPAVKPDPRTSSVGEGANRHENDDGGSGGSEIGAPDLDKDLLCPICMQIIKDAFLTACGHSFCYMCIITHLRNKSDCPCCSQHLTNNQLYPNFLLDKLLKKTSARHVSKTASPLDQFREALQRGCDVSIKEVDNLLTLLAERKRKMEQEEAERNMQILLDFLHCLRKQKVDELNEVQTDLQYIKEDINAVERHRIDLYRARDRYSVKLRMLGDDPSTRNAWPHEKNQIGFNSNSLSIRGGNFVGNYQNKKVEGKAQGSSHGLPKKDALSGSDSQSLNQSTVSMARKKRIHAQFNDLQECYLQKRRQLADQPNSKQENDKSVVRREGYSNGLADFQSVLTTFTRYSRLRVIAEIRHGDIFHSANIVSSIEFDRDDELFATAGVSRCIKVFDFSSVVNEPADMQCPIVEMSTRSKLSCLSWNKHEKNHIASSDYEGIVTVWDVTTRQSLMEYEEHEKRAWSVDFSRTEPSMLVSGSDDCKVKVWCTRQEASVINIDMKANICCVKYNPGSSNYIAVGSADHHIHYYDLRNISQPLHVFSGHKKAVSYVKFLSNNELASASTDSTLRLWDVKDNLPVRTFRGHTNEKNFVGLTVNSEYLACGSETNEVYVYHKEITRPVTSHRFGSPDMDDAEEEAGSYFISAVCWKSDSPTMLTANSQGTIKVLVLAA

SEQ ID NO: 38629 - protein, 675 aa, Arabidopsis thaliana
  peptide (1)..(675): Ceres Seq. ID no. 12562129
MEEISTDPVVPAVKPDPRTSSVGEGANRHENDDGGSGGSEIGAPDLDKDLLCPICMQIIKDAFLTACGHSFCYMCIITHLRNKSDCPCCSQHLTNNQLYPNFLLDKLLKKTSARHVSKTASPLDQFREALQRGCDVSIKEVDNLLTLLAERKRKMEQEEAERNMQILLDFLHCLRKQKVDELNEVQTDLQYIKEDINAVERHRIDLYRARDRYSVKLRMLGDDPSTRNAWPHEKNQIGFNSNSLSIRGGNFVGNYQNKKVEGKAQGSSHGLPKKDALSGSDSQSLNQSTVSMARKKRIHAQFNDLQECYLQKRRQLADQPNSKQENDKSVVRREGYSNGLADFQSVLTTFTRYSRLRVIAEIRHGDIFHSANIVSSIEFDRDDELFATAGVSRCIKVFDFSSVVNEPADMQCPIVEMSTRSKLSCLSWNKHEKNHIASSDYEGIVTVWDVTTRQSLMEYEEHEKRAWSVDFSRTEPSMLVSGSDDCKVKVWCTRQEASVINIDMKANICCVKYNPGSSNYIAVGSADHHIHYYDLRNISQPLHVFSGHKKAVSYVKFLSNNELASASTDSTLRLWDVKDNLPVRTFRGHTNEKNFVGLTVNSEYLACGSETNEVYVYHKEITRPVTSHRFGSPDMDDAEEEAGSYFISAVCWKSDSPTMLTANSQGTIKVLVLAA

SEQ ID NO: 38630 - protein, 620 aa, Arabidopsis thaliana
  peptide (1)..(620): Ceres Seq. ID no. 12562130
MQIIKDAFLTACGHSFCYMCIITHLRNKSDCPCCSQHLTNNQLYPNFLLDKLLKKTSARHVSKTASPLDQFREALQRGCDVSIKEVDNLLTLLAERKRKMEQEEAERNMQILLDFLHCLRKQKVDELNEVQTDLQYIKEDINAVERHRIDLYRARDRYSVKLRMLGDDPSTRNAWPHEKNQIGFNSNSLSIRGGNFVGNYQNKKVEGKAQGSSHGLPKKDALSGSDSQSLNQSTVSMARKKRIHAQFNDLQECYLQKRRQLADQPNSKQENDKSVVRREGYSNGLADFQSVLTTFTRYSRLRVIAEIRHGDIFHSANIVSSIEFDRDDELFATAGVSRCIKVFDFSSVVNEPADMQCPIVEMSTRSKLSCLSWNKHEKNHIASSDYEGIVTVWDVTTRQSLMEYEEHEKRAWSVDFSRTEPSMLVSGSDDCKVKVWCTRQEASVINIDMKANICCVKYNPGSSNYIAVGSADHHIHYYDLRNISQPLHVFSGHKKAVSYVKFLSNNELASASTDSTLRLWDVKDNLPVRTFRGHTNEKNFVGLTVNSEYLACGSETNEVYVYHKEITRPVTSHRFGSPDMDDAEEEAGSYFISAVCWKSDSPTMLTANSQGTIKVLVLAA

SEQ ID NO: 38631 - DNA, 1016 bp, Arabidopsis thaliana; identical to SEQ ID NO: 20851
  misc_feature (1)..(1016): Ceres Seq. ID no. 12329124
  misc_feature (1)..(1016): Ortholog of  Ceres SEQ ID NO 13596519 as cited in SEQ ID NO 62572
  misc_feature (1)..(1016): Ortholog of  Ceres SEQ ID NO 12625108 as cited in SEQ ID NO 68102

SEQ ID NO: 38632 - protein, 253 aa, Arabidopsis thaliana; identical to SEQ ID NO: 20852
  peptide (1)..(253): Ceres Seq. ID no. 12329125

SEQ ID NO: 38633 - protein, 207 aa, Arabidopsis thaliana; identical to SEQ ID NO: 20853
  peptide (1)..(207): Ceres Seq. ID no. 12329126

SEQ ID NO: 38634 - protein, 169 aa, Arabidopsis thaliana; identical to SEQ ID NO: 20854
  peptide (1)..(169): Ceres Seq. ID no. 12329127

SEQ ID NO: 38635 - DNA, 1793 bp, Arabidopsis thaliana
  misc_feature (1)..(1793): Ceres Seq. ID no. 12328926
  misc_feature (1)..(1793): Ortholog of  Ceres SEQ ID NO 13596398 as cited in SEQ ID NO 68611
gaaaaggatttttaattttcggagaggaagaagaagagagagatattgaagagcgctgaaggcggaaaagactattttgacctcgtcgtctccgtagatcatttttcttcagctcttcttcttcctctttctccgattctccttcttttgattttatctatccgccatgaacgagaaagccaacgtctctaaggagcttaatgcccgccatagaaagattcttgaagggcttcttaaacatccagagaacagagaatgtgctgactgcaaaacaaaaggtccaagatgggctagtgttaatttaggtatctttatctgcatgcaatgttctgggattcacaggagtctcggggtacacatatcgaaggttcgatctgccactctggacacatggctccccgagcaggttgcatttatacagtcaatgggaaatgataaagcaaatagttactgggaagcagagctacccccaaactatgatagagttggaattgagaattttatacgtgcaaagtatgaagagaagagatgggtttctagaggggaaaaggctagatcacctcctagagtcgagcaggaacggcggaaatctgtggagagaagtgggccgggatatgagcatggacatagtagtagtcctgtaaatttgtttgaggagaggaaaactattccagcatctagaacaagaaataatgttgctgcaacgagaataaatcttcccgtgcctccccaaggacccagtcaggttataaagccacagcagaaaatggagtctgcagctactccagtagagagggagaaacaagcagtaaatgttgcaccagcatcagatcctccaaaggtggattttgctactgatctgtttaacatgctatcaatggatgattcgactacaaatacctcagaggcaactcctggcgatactcctgccgatgataactcatgggctggctttcagtctgctggaagtggtcaaacggcagagaaaattgtcacagccaagcctgctgagagcagttctcctccagcttcatcttctgactttgaggatttgtttaaggacacacctaatttaacaactcaacaagcaccaaaagatgtgaaaggcgatatcatgagcctgtttgagaagacgaatatagtatcgccttttgccatgcatcagcaacaggttgctatgctcgctcagcagcaagccctttacatggctgcagcgaaagctgctggaggcactccaaacggcgtgaatcaacaagctattgctaatgctcttaacgtagcttctgcaaattggtcaaaccccggcggctaccagatccccggaatgactaaccccgtaggtggtcaagctgatctccagaaacttatgcaaaacatgaatatgaacgcaaacatgaacacgagacccgcacaaccgcaagagaacactctacaatacccatcatccagtttctacacaatgggtcaagctaatcaagtgaacggtatgaccccaaactcaaccggtaaacctcagtcatcatccgcaacccaaccaacaagcaccacaccatcttcacaatcaggcaaagactttgatttctcttccttgatggatggaatgttcacaaaacattgatcaagagagagagactttttctgaatttgcctttacatctttgttctaaatttgaagaaccaaaagaatatatatacaatcatctctggacagtttttctctgttaaacatatattttcttttctttggaactgtgttgtagccgagctttgatttatgattttactcgattgtc

SEQ ID NO: 38636 - protein, 483 aa, Arabidopsis thaliana
  peptide (1)..(483): Ceres Seq. ID no. 12328927
MNEKANVSKELNARHRKILEGLLKHPENRECADCKTKGPRWASVNLGIFICMQCSGIHRSLGVHISKVRSATLDTWLPEQVAFIQSMGNDKANSYWEAELPPNYDRVGIENFIRAKYEEKRWVSRGEKARSPPRVEQERRKSVERSGPGYEHGHSSSPVNLFEERKTIPASRTRNNVAATRINLPVPPQGPSQVIKPQQKMESAATPVEREKQAVNVAPASDPPKVDFATDLFNMLSMDDSTTNTSEATPGDTPADDNSWAGFQSAGSGQTAEKIVTAKPAESSSPPASSSDFEDLFKDTPNLTTQQAPKDVKGDIMSLFEKTNIVSPFAMHQQQVAMLAQQQALYMAAAKAAGGTPNGVNQQAIANALNVASANWSNPGGYQIPGMTNPVGGQADLQKLMQNMNMNANMNTRPAQPQENTLQYPSSSFYTMGQANQVNGMTPNSTGKPQSSSATQPTSTTPSSQSGKDFDFSSLMDGMFTKH

SEQ ID NO: 38637 - protein, 432 aa, Arabidopsis thaliana
  peptide (1)..(432): Ceres Seq. ID no. 12328928
MQCSGIHRSLGVHISKVRSATLDTWLPEQVAFIQSMGNDKANSYWEAELPPNYDRVGIENFIRAKYEEKRWVSRGEKARSPPRVEQERRKSVERSGPGYEHGHSSSPVNLFEERKTIPASRTRNNVAATRINLPVPPQGPSQVIKPQQKMESAATPVEREKQAVNVAPASDPPKVDFATDLFNMLSMDDSTTNTSEATPGDTPADDNSWAGFQSAGSGQTAEKIVTAKPAESSSPPASSSDFEDLFKDTPNLTTQQAPKDVKGDIMSLFEKTNIVSPFAMHQQQVAMLAQQQALYMAAAKAAGGTPNGVNQQAIANALNVASANWSNPGGYQIPGMTNPVGGQADLQKLMQNMNMNANMNTRPAQPQENTLQYPSSSFYTMGQANQVNGMTPNSTGKPQSSSATQPTSTTPSSQSGKDFDFSSLMDGMFTKH

SEQ ID NO: 38638 - protein, 397 aa, Arabidopsis thaliana
  peptide (1)..(397): Ceres Seq. ID no. 12328929
MGNDKANSYWEAELPPNYDRVGIENFIRAKYEEKRWVSRGEKARSPPRVEQERRKSVERSGPGYEHGHSSSPVNLFEERKTIPASRTRNNVAATRINLPVPPQGPSQVIKPQQKMESAATPVEREKQAVNVAPASDPPKVDFATDLFNMLSMDDSTTNTSEATPGDTPADDNSWAGFQSAGSGQTAEKIVTAKPAESSSPPASSSDFEDLFKDTPNLTTQQAPKDVKGDIMSLFEKTNIVSPFAMHQQQVAMLAQQQALYMAAAKAAGGTPNGVNQQAIANALNVASANWSNPGGYQIPGMTNPVGGQADLQKLMQNMNMNANMNTRPAQPQENTLQYPSSSFYTMGQANQVNGMTPNSTGKPQSSSATQPTSTTPSSQSGKDFDFSSLMDGMFTKH

SEQ ID NO: 38639 - DNA, 1258 bp, Arabidopsis thaliana
  misc_feature (1)..(1258): Ceres Seq. ID no. 12323144
  misc_feature (1)..(1258): Ortholog of  Ceres SEQ ID NO 14310390 as cited in SEQ ID NO 59715
acggagattgtaacaaggaaaccgccgtcgccggatctgatagtgcatatccatgaagtagaagacgaagaaacttactttctgatcttagaacggagtatatgtacagaagattcgcgtccctcaatttttgatctcaagggtcgggtttacctttttttccttcttatttttggtggctttgcgttttctcattcgacgatttctggatttggggatttcaaaaccatgaggaagaagctcgatactcggttcccagctgctcgtattaaaaagattatgcaagctgatgaggatgttggcaagatagctttggcagtgcctgtcttagtctcaaaatctttggagttgttcttgcaagacctttgtgatcgtacatatgaaattacccttgaaagaggtgccaagactgtgagctcattgcacctaaaacattgtgtggaaagatataacgtgtttgattttctgagggaagttgtgagtaaggtgcctgactatggccattcccaagggcaaggacatggtgatgttaccatggatgatcgcagcatctccaagagaaggaagcccatcagcgatgaagtgaatgacagtgacgaggaatataagaaaagcaaaacgcaagagatagggagtgctaagaccagtggcaggggtggtagaggaagagggcgaggaagaggtcgtggtggacgagctgcaaaagcagccgaaagagagggtctcaaccgcgagatggaagtagaagccgccaattctggacagccaccaccagaagacaatgtcaagatgcatgcgtcagagtcatcaccacaagaggatgagaagaaaggcatcgacggcacagcagcatcgaacgaagacaccaagcaacaccttcaaagtcccaaagaaggcattgactttgatctcaacgctgaatccctcgacctaaacgagaccaaactggcaccagccacaggcacaaccacaaccacaactgcagcaacagactctgaggagtattcgggctggcctatgatggacataagcaaaatggatccagcacagcttgctagtctgggtaagaggatagacgaggatgaggaagattatgacgaagaaggctaagtcataacagcactataggatatatagagtagcagcgtttagcagtttgtctagaaaatgcttcttctgtcatcaaaatcttctcctgtttccatttattgtatgaaccaaagattgcatgcactctatgaaacttaatttattctcg

SEQ ID NO: 38640 - protein, 369 aa, Arabidopsis thaliana
  peptide (1)..(369): Ceres Seq. ID no. 12323145
TEIVTRKPPSPDLIVHIHEVEDEETYFLILERSICTEDSRPSIFDLKGRVYLFFLLIFGGFAFSHSTISGFGDFKTMRKKLDTRFPAARIKKIMQADEDVGKIALAVPVLVSKSLELFLQDLCDRTYEITLERGAKTVSSLHLKHCVERYNVFDFLREVVSKVPDYGHSQGQGHGDVTMDDRSISKRRKPISDEVNDSDEEYKKSKTQEIGSAKTSGRGGRGRGRGRGRGGRAAKAAEREGLNREMEVEAANSGQPPPEDNVKMHASESSPQEDEKKGIDGTAASNEDTKQHLQSPKEGIDFDLNAESLDLNETKLAPATGTTTTTTAATDSEEYSGWPMMDISKMDPAQLASLGKRIDEDEEDYDEEG

SEQ ID NO: 38641 - protein, 293 aa, Arabidopsis thaliana
  peptide (1)..(293): Ceres Seq. ID no. 12323146
MRKKLDTRFPAARIKKIMQADEDVGKIALAVPVLVSKSLELFLQDLCDRTYEITLERGAKTVSSLHLKHCVERYNVFDFLREVVSKVPDYGHSQGQGHGDVTMDDRSISKRRKPISDEVNDSDEEYKKSKTQEIGSAKTSGRGGRGRGRGRGRGGRAAKAAEREGLNREMEVEAANSGQPPPEDNVKMHASESSPQEDEKKGIDGTAASNEDTKQHLQSPKEGIDFDLNAESLDLNETKLAPATGTTTTTTAATDSEEYSGWPMMDISKMDPAQLASLGKRIDEDEEDYDEEG

SEQ ID NO: 38642 - protein, 276 aa, Arabidopsis thaliana
  peptide (1)..(276): Ceres Seq. ID no. 12323147
MQADEDVGKIALAVPVLVSKSLELFLQDLCDRTYEITLERGAKTVSSLHLKHCVERYNVFDFLREVVSKVPDYGHSQGQGHGDVTMDDRSISKRRKPISDEVNDSDEEYKKSKTQEIGSAKTSGRGGRGRGRGRGRGGRAAKAAEREGLNREMEVEAANSGQPPPEDNVKMHASESSPQEDEKKGIDGTAASNEDTKQHLQSPKEGIDFDLNAESLDLNETKLAPATGTTTTTTAATDSEEYSGWPMMDISKMDPAQLASLGKRIDEDEEDYDEEG

SEQ ID NO: 38643 - DNA, 1348 bp, Arabidopsis thaliana
  misc_feature (1)..(1348): Ceres Seq. ID no. 13489207
  misc_feature (1)..(1348): Ortholog of  Ceres SEQ ID NO 14304408 as cited in SEQ ID NO 58051
  misc_feature (1)..(1348): Ortholog of  Ceres SEQ ID NO 14314759 as cited in SEQ ID NO 59915
  misc_feature (1)..(1348): Ortholog of  Ceres SEQ ID NO 13661769 as cited in SEQ ID NO 61435
  misc_feature (1)..(1348): Ortholog of  Ceres SEQ ID NO 13600585 as cited in SEQ ID NO 0
atttcataaatcatagagagagagagagagagagagagagagtttggaaacattccaaaaccagaactcgatattatttcaccaaagaatgatagaaacaagaactatctttttataaaactctttacaccccaaaagaaaatgtctcactcgttttgccttataatatttctttcaacaacaacccaaatctacaaaaaatcccaataaaaaaaaacttcagtctgtttgacattttgtcgaacacttggacggcatcacaaaaagctctaaactttctgactaccaatggcggattcgtcttccgacaaggagaagaaggaaaataataagcagcccgtgtatcgtggagtccgtatgaggagctggggaaaatgggtatcggagattcgcgaaccgaggaagaaatcgagaatctggctcgggacttttccgacggcggagatggctatgcgtgctcacgacgtggcggctatgagtatcaaaggaacttcagccattctcaatttccctgagctctctaaacttcttccccgacccgtttcgctcagccctcgtgacgtcagagctgcggcgaccaaagctgctctcatggacttcgatacgacggcgtttcgttcggatactgagactagcgaaacgacgacgtcgaataaaatgtcagagagtagtgagagtaacgaaacggtgtcgttctcatcgtcgtcttggtcctctgttacgagcattgaggaaagtacagtctccgacgatcttgacgagatcgtaaagttaccgagtctaggaacgagcctaaacgagtcgaacgagttcgtgatatttgactcgttggaggatttggtgtacatgcctcggtggttaagcggtacggaagaagaagtttttacgtataataacaatgattcttcgttgaattactcatcagttttcgaatcttggaaacattttccctgagaaaagaaagaagccatattttctctctctttttcgccatttttggttttaagttttttgatgggattctctctgtttttgctatgcgtgagatatctctctttgtggaatagataacttttctgttgaaaatctcctaagtctgtgaaatgaacgacgatggaaatgtaagtgtgtatattagcccgaaataatgactgtatacattcttttttgcaagatcattagaaaaaaataaataggaaatgtggtttgtattagagtatagaattgattaagatcggtttagatcatcaatatcggtttaatgtctgtgaaccagaaccctctcattgtataagaggcttcaatgtaatatttcctaagcaagataatgagaatgatcgtttgtttt

SEQ ID NO: 38644 - protein, 221 aa, Arabidopsis thaliana
  peptide (1)..(221): Ceres Seq. ID no. 13489208
MADSSSDKEKKENNKQPVYRGVRMRSWGKWVSEIREPRKKSRIWLGTFPTAEMAMRAHDVAAMSIKGTSAILNFPELSKLLPRPVSLSPRDVRAAATKAALMDFDTTAFRSDTETSETTTSNKMSESSESNETVSFSSSSWSSVTSIEESTVSDDLDEIVKLPSLGTSLNESNEFVIFDSLEDLVYMPRWLSGTEEEVFTYNNNDSSLNYSSVFESWKHFP

SEQ ID NO: 38645 - protein, 198 aa, Arabidopsis thaliana
  peptide (1)..(198): Ceres Seq. ID no. 13489209
MRSWGKWVSEIREPRKKSRIWLGTFPTAEMAMRAHDVAAMSIKGTSAILNFPELSKLLPRPVSLSPRDVRAAATKAALMDFDTTAFRSDTETSETTTSNKMSESSESNETVSFSSSSWSSVTSIEESTVSDDLDEIVKLPSLGTSLNESNEFVIFDSLEDLVYMPRWLSGTEEEVFTYNNNDSSLNYSSVFESWKHFP

SEQ ID NO: 38646 - protein, 169 aa, Arabidopsis thaliana
  peptide (1)..(169): Ceres Seq. ID no. 13489210
MAMRAHDVAAMSIKGTSAILNFPELSKLLPRPVSLSPRDVRAAATKAALMDFDTTAFRSDTETSETTTSNKMSESSESNETVSFSSSSWSSVTSIEESTVSDDLDEIVKLPSLGTSLNESNEFVIFDSLEDLVYMPRWLSGTEEEVFTYNNNDSSLNYSSVFESWKHFP

SEQ ID NO: 38647 - DNA, 1509 bp, Arabidopsis thaliana
  misc_feature (1)..(1509): Ceres Seq. ID no. 12422481
  misc_feature (1)..(1509): Ortholog of  Ceres SEQ ID NO 14307288 as cited in SEQ ID NO 54318
gtacgccaaatatctaacaaggagctctttagattgagactagtggaagagagacgagcaaggaattagcaatggcggcggatttgccggaggcgacagtacagaacattctggaccaagagtctcttaaatgggttttcgtcggaggtaaaggaggtgttgggaagacgacatgcagttcaattctcgcaatttgtctcgccattgttcgatcctccgttctcatcatctccaccgatcctgctcacaatcttagtgatgcctttcagcaacgcttcactaaatctcccactttggttcaaggtttctctaatctctttgccatggaggtagatcctaccgttgaaactgatgacatggctggtacagacgggatggatggtttattctctgatttggcaaatgcgattcctggaatcgatgaggctatgagttttgctgagatgttgaagttggtgcaaacaatggattatgctactattgtgtttgacactgctcctactggacatactctccgcctgttacagtttccggccacactagaaaagggactttcgaagttgatgtcattgaagagtagatttggtggcttgatgactcggatgagccgtatgtttggcatggaggatgagttcggagaggatgctctgctgggaagacttgagggcttgaaagatgtgattgagcaagtaaatcggcaattcaaagacccggatatgactacgttcgtttgtgtctgcatccccgagttcttgtctctctatgaaacagagagacttgttcaggaactcgccaagtttgagattgacacgcataacattatcatcaaccaagtactatacgacgacgaagatgtggagtccaagttgctcagagcaaggatgcggatgcaacagaagtatcttgatcagttttatatgctatacgatgactttaatatcacaaagcttcctctgcttccggaagaggtgacaggggttgaagccttaaaggcgttttcacataagttcttgacgccgtaccatcctaccactagcaggagcaatgtagaggagctggagaggaaagtacacacattgcgtttgcagttaaaaacagctgaagaagaactcgaacgggtcaagagtggctaaagataaggctctgttcttccctttaattgtggaaaattaaaactgaatctttttctctctagttcttcatctagcaacaactctttataggacaggaaacaagatcaagcagaatcttcttttgcgttgttttattgttatgcattggatttgtttttatatttgtaataatcatgactacatagactcatatctaccaagaaatcgttgttttacgacttaatcagctttttatatattaagttgaagggtatctcacaagcgaatgctatgatctcttgtaacagctttttatatactgtagactggtcttgcaacagagaagcaaaattcatgtaaaaaaattatagtaaataagagatgttttgatttattg

SEQ ID NO: 38648 - protein, 353 aa, Arabidopsis thaliana
  peptide (1)..(353): Ceres Seq. ID no. 12422482
MAADLPEATVQNILDQESLKWVFVGGKGGVGKTTCSSILAICLAIVRSSVLIISTDPAHNLSDAFQQRFTKSPTLVQGFSNLFAMEVDPTVETDDMAGTDGMDGLFSDLANAIPGIDEAMSFAEMLKLVQTMDYATIVFDTAPTGHTLRLLQFPATLEKGLSKLMSLKSRFGGLMTRMSRMFGMEDEFGEDALLGRLEGLKDVIEQVNRQFKDPDMTTFVCVCIPEFLSLYETERLVQELAKFEIDTHNIIINQVLYDDEDVESKLLRARMRMQQKYLDQFYMLYDDFNITKLPLLPEEVTGVEALKAFSHKFLTPYHPTTSRSNVEELERKVHTLRLQLKTAEEELERVKSG

SEQ ID NO: 38649 - protein, 269 aa, Arabidopsis thaliana
  peptide (1)..(269): Ceres Seq. ID no. 12422483
MEVDPTVETDDMAGTDGMDGLFSDLANAIPGIDEAMSFAEMLKLVQTMDYATIVFDTAPTGHTLRLLQFPATLEKGLSKLMSLKSRFGGLMTRMSRMFGMEDEFGEDALLGRLEGLKDVIEQVNRQFKDPDMTTFVCVCIPEFLSLYETERLVQELAKFEIDTHNIIINQVLYDDEDVESKLLRARMRMQQKYLDQFYMLYDDFNITKLPLLPEEVTGVEALKAFSHKFLTPYHPTTSRSNVEELERKVHTLRLQLKTAEEELERVKSG

SEQ ID NO: 38650 - protein, 258 aa, Arabidopsis thaliana
  peptide (1)..(258): Ceres Seq. ID no. 12422484
MAGTDGMDGLFSDLANAIPGIDEAMSFAEMLKLVQTMDYATIVFDTAPTGHTLRLLQFPATLEKGLSKLMSLKSRFGGLMTRMSRMFGMEDEFGEDALLGRLEGLKDVIEQVNRQFKDPDMTTFVCVCIPEFLSLYETERLVQELAKFEIDTHNIIINQVLYDDEDVESKLLRARMRMQQKYLDQFYMLYDDFNITKLPLLPEEVTGVEALKAFSHKFLTPYHPTTSRSNVEELERKVHTLRLQLKTAEEELERVKSG

SEQ ID NO: 38651 - DNA, 765 bp, Arabidopsis thaliana
  misc_feature (1)..(765): Ceres Seq. ID no. 12337978
  misc_feature (1)..(765): Ortholog of  Ceres SEQ ID NO 13495070 as cited in SEQ ID NO 53216
  misc_feature (1)..(765): Ortholog of  Ceres SEQ ID NO 13661333 as cited in SEQ ID NO 61620
  misc_feature (1)..(765): Ortholog of  Ceres SEQ ID NO 13596812 as cited in SEQ ID NO 62283
  misc_feature (1)..(765): Ortholog of  Ceres SEQ ID NO 13623021 as cited in SEQ ID NO 0
gacaaaaaaagaaacagtgaagaagaaaaaaaaaaaaggtcattttcattttctccatttgatttttgccgaccggagaaaatatcttcttgccgtcttcttcttcatttcaccaggaacttttatttgaaatcggtttgatttagccatggcaaacgcggcatcgggaatggctgtgcatgatgattgcaagctgaaatttatggaactgaaggcgaaaagaacattccgtaccatagtctacaagattgaggataagcaagtgattgtagagaaactcggtgaacctgaacaatcatatgatgactttgcagctagtcttccagctgatgattgccgatattgcatttacgatttcgactttgtcactgcggagaactgccagaagagcaagatcttcttgcatggtctccggacactgccaaagtgagagacaagatgatttacgcgagctctaaagataggttcaagagagaactagatggaattcaagtggaacttcaagctactgatccaacagaaatgggtcttgatgttttcaaaagccgcaccaactaagtaaaacaaaaccctgtaagggcatttgaataagtttggtttctggagtgaatatgtttcctctgactgttatgaaaactttttaacaccttcaacttcattctacttggtattattgtatgtctttgatgtgttatgtgtgccttgtgatggttttcaattagttttacatgtacaatacttgaaatcagattgttgctaagcttc

SEQ ID NO: 38652 - protein, 93 aa, Arabidopsis thaliana
  peptide (1)..(93): Ceres Seq. ID no. 12337979
MANAASGMAVHDDCKLKFMELKAKRTFRTIVYKIEDKQVIVEKLGEPEQSYDDFAASLPADDCRYCIYDFDFVTAENCQKSKIFLHGLRTLPK

SEQ ID NO: 38653 - protein, 86 aa, Arabidopsis thaliana
  peptide (1)..(86): Ceres Seq. ID no. 12337980
MAVHDDCKLKFMELKAKRTFRTIVYKIEDKQVIVEKLGEPEQSYDDFAASLPADDCRYCIYDFDFVTAENCQKSKIFLHGLRTLPK

SEQ ID NO: 38654 - protein, 75 aa, Arabidopsis thaliana
  peptide (1)..(75): Ceres Seq. ID no. 12337981
MELKAKRTFRTIVYKIEDKQVIVEKLGEPEQSYDDFAASLPADDCRYCIYDFDFVTAENCQKSKIFLHGLRTLPK

SEQ ID NO: 38655 - DNA, 1607 bp, Arabidopsis thaliana
  misc_feature (1)..(1607): Ceres Seq. ID no. 12330922
  misc_feature (1)..(1607): Ortholog of  Ceres SEQ ID NO 13657677 as cited in SEQ ID NO 66119
agacaaacagagagtgatgcgatggaacaagaagaacgttatcagtctcgtctcaaagtctcatcatcttccggcgccgattacgccaccgttacctgagatttaccgaatacctaatcctccaccaaagcttccggagatctcaattcctccgacacttacgctctctccatctcccaaacactccaatttcgtcaatttcctcgagaacaatctccctcaccatcaaacactaacgccacaaactcttcttggattcctccgttccaagatccgtcaccatccgctctacgctcattatgacttcgccgtctttaattgggcagctacactcgacactttccgtcatgatcacgattctttcctctggatgtcgagatcactcgccgccacgcaccggtttgacgatctttatcgtcttctctcttttgtagctgcgaatccatgtccttgttcctcaggtatattctcttgtccagagcttgaacctatttttccgatccgccattgatgcgtattgtagagctaggaaaatggattatgctttgttagcgtttgatactatgaagagattgatcgatggtaaaccaaatgttggagtttataacactgttgtgaatggatatgtgaaatctggagatatggataaggctttaaggttttaccagaggatgggaaaggaaagagcaaagccagatgtatgcacgtttaacattctcatcaatggttattgtagaagctctaagtttgatttggcattggatttgttcagggagatgaaggagaaaggttgtgaaccgaatgtggttagcttcaacactcttattagagggtttttgagcagtggtaaaatcgaggaaggtgttaaaatggcttatgagatgattgagctaggttgtagattctcagaagctacttgtgagattcttgttgatgggttgtgtagagaaggtcgggttgacgatgcttgtggattggtgctcgatcttttgaacaagagggttttacctagtgagtttgattatggtagtttggttgagaaactctgcggagaaaacaaggcggttagagcaatggagatgatggaggagctgtggaagaaaggccaaaccccatgtttcattgcttgtactacactcgtcgaagggttgaggaaatcaggaagaacagagaaagcgtcagggtttatggagaagatgatgaatgcaggaattcttcccgatagtgtgacatttaacttgcttcttcgggatctctgcagttctgatcattctactgatgcaaacagattgagacttttggcatcaagcaaaggatatgaacccgatgagacaacgtaccatgttttggtttcggggttcacgaaagaagggagaagaaaggaaggagaagttctagtgaacgagatgttggataaagatatgttgcctgatatctttacatataatagattgatggatggcttgtcctgcactggaaaattctcaaggaaacaagtccggatgttgtaacctgtgtttgatctgtgtaaactagacccaagctatatctatgtatcaacaaattttattttgaacatatgaaatggaaaccaagttggttctttg

SEQ ID NO: 38656 - protein, 325 aa, Arabidopsis thaliana
  peptide (1)..(325): Ceres Seq. ID no. 12330923
MDYALLAFDTMKRLIDGKPNVGVYNTVVNGYVKSGDMDKALRFYQRMGKERAKPDVCTFNILINGYCRSSKFDLALDLFREMKEKGCEPNVVSFNTLIRGFLSSGKIEEGVKMAYEMIELGCRFSEATCEILVDGLCREGRVDDACGLVLDLLNKRVLPSEFDYGSLVEKLCGENKAVRAMEMMEELWKKGQTPCFIACTTLVEGLRKSGRTEKASGFMEKMMNAGILPDSVTFNLLLRDLCSSDHSTDANRLRLLASSKGYEPDETTYHVLVSGFTKEGRRKEGEVLVNEMLDKDMLPDIFTYNRLMDGLSCTGKFSRKQVRML

SEQ ID NO: 38657 - protein, 315 aa, Arabidopsis thaliana
  peptide (1)..(315): Ceres Seq. ID no. 12330924
MKRLIDGKPNVGVYNTVVNGYVKSGDMDKALRFYQRMGKERAKPDVCTFNILINGYCRSSKFDLALDLFREMKEKGCEPNVVSFNTLIRGFLSSGKIEEGVKMAYEMIELGCRFSEATCEILVDGLCREGRVDDACGLVLDLLNKRVLPSEFDYGSLVEKLCGENKAVRAMEMMEELWKKGQTPCFIACTTLVEGLRKSGRTEKASGFMEKMMNAGILPDSVTFNLLLRDLCSSDHSTDANRLRLLASSKGYEPDETTYHVLVSGFTKEGRRKEGEVLVNEMLDKDMLPDIFTYNRLMDGLSCTGKFSRKQVRML

SEQ ID NO: 38658 - protein, 289 aa, Arabidopsis thaliana
  peptide (1)..(289): Ceres Seq. ID no. 12330925
MDKALRFYQRMGKERAKPDVCTFNILINGYCRSSKFDLALDLFREMKEKGCEPNVVSFNTLIRGFLSSGKIEEGVKMAYEMIELGCRFSEATCEILVDGLCREGRVDDACGLVLDLLNKRVLPSEFDYGSLVEKLCGENKAVRAMEMMEELWKKGQTPCFIACTTLVEGLRKSGRTEKASGFMEKMMNAGILPDSVTFNLLLRDLCSSDHSTDANRLRLLASSKGYEPDETTYHVLVSGFTKEGRRKEGEVLVNEMLDKDMLPDIFTYNRLMDGLSCTGKFSRKQVRML

SEQ ID NO: 38659 - DNA, 1292 bp, Arabidopsis thaliana
  misc_feature (1)..(1292): Ceres Seq. ID no. 12371013
  misc_feature (1)..(1292): Ortholog of  Ceres SEQ ID NO 14315461 as cited in SEQ ID NO 57150
atttccagttggaactttaattaattagatatgaactaaagcgttacgccacggaagaatttaggatctgttcgcagcatccgtttcaacgctaaatccaaacaacaaaagaagattagcaaaatcggattatcttctttgtttcttttcccttgacaagtcttcgtttttgaattagggtttttggacaattcttctcttcttcggctgcaaaaggttttcgcaagatatggctggctctgttggtgaggaaactgagccagaatgtattaagagagtgaaattagagggagctgttccatgtcttaagccagacgacaactgcaaaaatggttggacgacgccatctcctgacacatttatggttagaggaccaaagtatttctctgacaaagttaagatacctgctggtgatttccttctaaagcctctgggttttgattggattaaaggtcctaaaaagctttctgagatcctgagttatccaagcagccgaatcaggaaagttatcgatgaggagtttcaaaaagatggaactaagccttttgtctgggcattcaatctccagcttcctcacaaagacaattacagtgctgtggcttactttgttaccacagagcctatccttgaaggctccctgatggatcggtttttgaaaggagatgatgggttcaagaaatcgaggcttaaactgattgcaaacattgtcaaaggcccttggattgttagaaaagctgttggagagcaagcgatctgtgtgattggacgtgcactctcttgcaaatatgtttcaggggaaaactttgtggagattgatgtcgatattggttcttcaatggtcgctagtgccattgttcatctcgcatttggctacgttactacattgacagttgatcttgcgttcctcattgagagtcagaccgaagcagagcttccagaaaagctactaggagctgtgagattctctgagctgcagaccgagtcagccacatctatcgaactgtcctcaagcaccagtaatgaccagtgggatcaaactacctcagagcggtcgagctggtggaaatcgattggaaatggattctctaatctgcttaatcaagatacggccaacatgaacaatacttctcatggggacatccagaaggatgaacatgtacagaagcagtaagtgttttgggagttattaacttcacaattctttgaatttgttcgatttcattaccaaaaaacagaaacaaaaacttgtcaattctttaaaaaaaccacagatgtatagattggtttttact

SEQ ID NO: 38660 - protein, 313 aa, Arabidopsis thaliana
  peptide (1)..(313): Ceres Seq. ID no. 12371014
MAGSVGEETEPECIKRVKLEGAVPCLKPDDNCKNGWTTPSPDTFMVRGPKYFSDKVKIPAGDFLLKPLGFDWIKGPKKLSEILSYPSSRIRKVIDEEFQKDGTKPFVWAFNLQLPHKDNYSAVAYFVTTEPILEGSLMDRFLKGDDGFKKSRLKLIANIVKGPWIVRKAVGEQAICVIGRALSCKYVSGENFVEIDVDIGSSMVASAIVHLAFGYVTTLTVDLAFLIESQTEAELPEKLLGAVRFSELQTESATSIELSSSTSNDQWDQTTSERSSWWKSIGNGFSNLLNQDTANMNNTSHGDIQKDEHVQKQ

SEQ ID NO: 38661 - protein, 269 aa, Arabidopsis thaliana
  peptide (1)..(269): Ceres Seq. ID no. 12371015
MVRGPKYFSDKVKIPAGDFLLKPLGFDWIKGPKKLSEILSYPSSRIRKVIDEEFQKDGTKPFVWAFNLQLPHKDNYSAVAYFVTTEPILEGSLMDRFLKGDDGFKKSRLKLIANIVKGPWIVRKAVGEQAICVIGRALSCKYVSGENFVEIDVDIGSSMVASAIVHLAFGYVTTLTVDLAFLIESQTEAELPEKLLGAVRFSELQTESATSIELSSSTSNDQWDQTTSERSSWWKSIGNGFSNLLNQDTANMNNTSHGDIQKDEHVQKQ

SEQ ID NO: 38662 - protein, 176 aa, Arabidopsis thaliana
  peptide (1)..(176): Ceres Seq. ID no. 12371016
MDRFLKGDDGFKKSRLKLIANIVKGPWIVRKAVGEQAICVIGRALSCKYVSGENFVEIDVDIGSSMVASAIVHLAFGYVTTLTVDLAFLIESQTEAELPEKLLGAVRFSELQTESATSIELSSSTSNDQWDQTTSERSSWWKSIGNGFSNLLNQDTANMNNTSHGDIQKDEHVQKQ

SEQ ID NO: 38663 - DNA, 1998 bp, Arabidopsis thaliana
  misc_feature (1)..(1998): Ceres Seq. ID no. 12329724
  misc_feature (1)..(1998): Ortholog of  Ceres SEQ ID NO 14313943 as cited in SEQ ID NO 54725
agggatcactgttctccggctccggcgaaaaaatccctcgaaatcgatcctaacctcaattgattgaaggaagttatgtattcgctttcgaggattctccaaaggagtcaaagatataactttgcaccttcttcgtttggtgcggtcagtaaattagaagtatcaagtggtggtgataaagaacgggtctttaaatcatttggattgatttatagcaaacctcaaggtttagtcagactttattccgcaagagatgtgttttcacggttctttggcatccacaagctttcttctatagctgatgctaaagataaaggagatgaggtagttagggaagaggagctgtctgaatcagaggaggcggttcctgtttctggggatgtaccagagggagttgttgatgatgattctttgttcgagcctgaacttggtagtgacaatgatgatcttgaaattgaagtgaagcattcgaaagatggtgggaaaccaactaagaaaagaggtcaatctgagctgtacgaatccattgttgcttataaatcagtgaaacatgttcttgaaaaatgggtcaaagaaggaaaagatttgagtcaagctgaggttactcttgctatacacaatctgcgtaaacgcaaatcctatgctatgtgtttgcagttgtgggagtggttgggagctaatacgcagtttgagttcacagaggcaaattatgcttctcagttggatttggtggccaaggtacatagtttacaaaaagctgaaatctttttgaaagatattccagaatcttctaggggagaagtagtatacagaaccctgctggcaaattgtgtacttaagcatcatgtaaataaagctgaagacattttcaacaaaatgaaagagctaaaatttccaacaagtgtgtttgcttgcaaccagctgcttctcctctacagtatgcatgatagaaagaagataagtgatgttttgttgctaatggagagagaaaacatcaagccgagtcgtgctacctatcattttttaatcaatagtaaaggtttagccggagacataactggaatggagaagatcgtggagacaatgaaggaagaaggcatcgaactagatcctgaactgcagtctattctggctaagtactacataagagcggggcttaaagaaagagcacaagaccttatgaaggagatagaagggaaaggtttgcaacaaacaccatgggtgtgccggtcattactcccactttatgcagacataggagacagtgacaatgtgagaagactgagtaggtttgttgatcaaaatccgagatacgataattgcatttctgccattaaagcatggggaaagctgaaggaagtcgaagaagcagaggcagtgtttgagagacttgtggagaaatacaaaattttccctatgatgccatattttgccctcatggagatatacacagagaacaagatgctagcaaaaggcagagatctggttaaaagaatgggaaatgcagggattgcgattgggccgtcgacatggcacgcgcttgtgaagctatacatcaaagcaggagaagttggaaaagctgagttgatattgaacagagctacaaaggataataagatgagacctatgttcactacttacatggcgattcttgaagaatatgcaaaaagaggcgatgttcataacacagagaaggtattcatgaaaatgaaaagggcaagctatgcagctcagcttatgcagtatgaaaccgtgctcctggcttatatcaacgccaaaactcctgcttacgggatgattgagaggatgaaggcagacaatgtgttcccgaacaagagtctagctgcgaaactggctcaggttaatccgtttaaaaagtgtccagtgtctgttttacttgacatataacgataatcatcttatgtattgagctgttaagtgtttgttctggttgcctccaagctaggaaataataaaaagaggattcgtttttcttcc

SEQ ID NO: 38664 - protein, 610 aa, Arabidopsis thaliana
  peptide (1)..(610): Ceres Seq. ID no. 12329725
MYSLSRILQRSQRYNFAPSSFGAVSKLEVSSGGDKERVFKSFGLIYSKPQGLVRLYSARDVFSRFFGIHKLSSIADAKDKGDEVVREEELSESEEAVPVSGDVPEGVVDDDSLFEPELGSDNDDLEIEVKHSKDGGKPTKKRGQSELYESIVAYKSVKHVLEKWVKEGKDLSQAEVTLAIHNLRKRKSYAMCLQLWEWLGANTQFEFTEANYASQLDLVAKVHSLQKAEIFLKDIPESSRGEVVYRTLLANCVLKHHVNKAEDIFNKMKELKFPTSVFACNQLLLLYSMHDRKKISDVLLLMERENIKPSRATYHFLINSKGLAGDITGMEKIVETMKEEGIELDPELQSILAKYYIRAGLKERAQDLMKEIEGKGLQQTPWVCRSLLPLYADIGDSDNVRRLSRFVDQNPRYDNCISAIKAWGKLKEVEEAEAVFERLVEKYKIFPMMPYFALMEIYTENKMLAKGRDLVKRMGNAGIAIGPSTWHALVKLYIKAGEVGKAELILNRATKDNKMRPMFTTYMAILEEYAKRGDVHNTEKVFMKMKRASYAAQLMQYETVLLAYINAKTPAYGMIERMKADNVFPNKSLAAKLAQVNPFKKCPVSVLLDI

SEQ ID NO: 38665 - protein, 420 aa, Arabidopsis thaliana
  peptide (1)..(420): Ceres Seq. ID no. 12329726
MCLQLWEWLGANTQFEFTEANYASQLDLVAKVHSLQKAEIFLKDIPESSRGEVVYRTLLANCVLKHHVNKAEDIFNKMKELKFPTSVFACNQLLLLYSMHDRKKISDVLLLMERENIKPSRATYHFLINSKGLAGDITGMEKIVETMKEEGIELDPELQSILAKYYIRAGLKERAQDLMKEIEGKGLQQTPWVCRSLLPLYADIGDSDNVRRLSRFVDQNPRYDNCISAIKAWGKLKEVEEAEAVFERLVEKYKIFPMMPYFALMEIYTENKMLAKGRDLVKRMGNAGIAIGPSTWHALVKLYIKAGEVGKAELILNRATKDNKMRPMFTTYMAILEEYAKRGDVHNTEKVFMKMKRASYAAQLMQYETVLLAYINAKTPAYGMIERMKADNVFPNKSLAAKLAQVNPFKKCPVSVLLDI

SEQ ID NO: 38666 - protein, 343 aa, Arabidopsis thaliana
  peptide (1)..(343): Ceres Seq. ID no. 12329727
MKELKFPTSVFACNQLLLLYSMHDRKKISDVLLLMERENIKPSRATYHFLINSKGLAGDITGMEKIVETMKEEGIELDPELQSILAKYYIRAGLKERAQDLMKEIEGKGLQQTPWVCRSLLPLYADIGDSDNVRRLSRFVDQNPRYDNCISAIKAWGKLKEVEEAEAVFERLVEKYKIFPMMPYFALMEIYTENKMLAKGRDLVKRMGNAGIAIGPSTWHALVKLYIKAGEVGKAELILNRATKDNKMRPMFTTYMAILEEYAKRGDVHNTEKVFMKMKRASYAAQLMQYETVLLAYINAKTPAYGMIERMKADNVFPNKSLAAKLAQVNPFKKCPVSVLLDI

SEQ ID NO: 38667 - DNA, 1371 bp, Arabidopsis thaliana
  misc_feature (1)..(1371): Ceres Seq. ID no. 12328756
  misc_feature (1)..(1371): Ortholog of  Ceres SEQ ID NO 14304148 as cited in SEQ ID NO 57313
  misc_feature (1)..(1371): Ortholog of  Ceres SEQ ID NO 13598513 as cited in SEQ ID NO 64102
ataaaatggcgcaaagtgtgaaagttgaaacatatcctcatatttagcatcactcctctaatattattttttcaaacaagaacaatggcaaaccatctccaagtccccttaaccaaaccggatcgagttaaagaagaacaagaggttgaagaagaggcaagattgctagcgagaaggctcgcgaatgcagccgcattacctatggttctcaaagccgccttggagctcggcgtgatcgacaccatcaccacagtaggaggtggcgatttgtggctctcaccttctgaaatagcactaagactcccaaccaaaccatgcaacctggaagctccggttttgctagaccgtatgcttcgatttctcgtcagccattcggtcttaaaatgccgtactgtaatagaagagaacggtcaaaccggaaaagttgagagggtatatgcagctgaaccggtctgcaaatatctcttgaacaaaagtgacgacgtctcgggttcttttgcatcgctctttatgcttgacctcagcgacgtatttatcaagacatggacacatctcaaagatgtgatattagcaggaagagatgcatttagttctgcccatgggatgaaactattcgaatacatccaagccgatgagcgatttggtaaagtgtttaaccgggctatgttggaatcttccaccatggttacggagaaggttcttaaattttatgaaggattcaaagatgtgaagactttggtggatgtagggggaggacttggcaacacactaggtctcatcacttccaagtatcctcatcttattggtatcaatttcgatttagctccggtgttagccaatgctcattcttatcccggtgtgaaccatgtggctggtgatatgttcatcaagattccaaagggggatgccattttcatgaagtggatactacatgattggacggacgaacaatgcgtagcaattcttaaaaactgttggaaaagtctcgaagaaaatggaaaactgataatagtggaaatggttacaccggtggaagcaaagagcggagatatatgttctaacattgtgtttggtatggacatgacaatgttaacacaatgttcaggtggtaaagagagatctctctatgagtttgaaaatttagcatatgcatcgggtttttctcgttgtgcaatcgtatgcgctgtttatccattttccgtcatcgaaatctacaaatagattcattcaacatatgccattttacgatatttacacaacccgtttcttcttctatttgggatgtaatgtttgtgattatcatttgtgtgtggtcgatcttttgtaatgttttcgtgtgatgttcttaccgttgtaatgatatatgtgtct

SEQ ID NO: 38668 - protein, 378 aa, Arabidopsis thaliana
  peptide (1)..(378): Ceres Seq. ID no. 12328757
MANHLQVPLTKPDRVKEEQEVEEEARLLARRLANAAALPMVLKAALELGVIDTITTVGGGDLWLSPSEIALRLPTKPCNLEAPVLLDRMLRFLVSHSVLKCRTVIEENGQTGKVERVYAAEPVCKYLLNKSDDVSGSFASLFMLDLSDVFIKTWTHLKDVILAGRDAFSSAHGMKLFEYIQADERFGKVFNRAMLESSTMVTEKVLKFYEGFKDVKTLVDVGGGLGNTLGLITSKYPHLIGINFDLAPVLANAHSYPGVNHVAGDMFIKIPKGDAIFMKWILHDWTDEQCVAILKNCWKSLEENGKLIIVEMVTPVEAKSGDICSNIVFGMDMTMLTQCSGGKERSLYEFENLAYASGFSRCAIVCAVYPFSVIEIYK

SEQ ID NO: 38669 - protein, 339 aa, Arabidopsis thaliana
  peptide (1)..(339): Ceres Seq. ID no. 12328758
MVLKAALELGVIDTITTVGGGDLWLSPSEIALRLPTKPCNLEAPVLLDRMLRFLVSHSVLKCRTVIEENGQTGKVERVYAAEPVCKYLLNKSDDVSGSFASLFMLDLSDVFIKTWTHLKDVILAGRDAFSSAHGMKLFEYIQADERFGKVFNRAMLESSTMVTEKVLKFYEGFKDVKTLVDVGGGLGNTLGLITSKYPHLIGINFDLAPVLANAHSYPGVNHVAGDMFIKIPKGDAIFMKWILHDWTDEQCVAILKNCWKSLEENGKLIIVEMVTPVEAKSGDICSNIVFGMDMTMLTQCSGGKERSLYEFENLAYASGFSRCAIVCAVYPFSVIEIYK

SEQ ID NO: 38670 - protein, 290 aa, Arabidopsis thaliana
  peptide (1)..(290): Ceres Seq. ID no. 12328759
MLRFLVSHSVLKCRTVIEENGQTGKVERVYAAEPVCKYLLNKSDDVSGSFASLFMLDLSDVFIKTWTHLKDVILAGRDAFSSAHGMKLFEYIQADERFGKVFNRAMLESSTMVTEKVLKFYEGFKDVKTLVDVGGGLGNTLGLITSKYPHLIGINFDLAPVLANAHSYPGVNHVAGDMFIKIPKGDAIFMKWILHDWTDEQCVAILKNCWKSLEENGKLIIVEMVTPVEAKSGDICSNIVFGMDMTMLTQCSGGKERSLYEFENLAYASGFSRCAIVCAVYPFSVIEIYK

SEQ ID NO: 38671 - DNA, 1524 bp, Arabidopsis thaliana
  misc_feature (1)..(1524): Ceres Seq. ID no. 12331033
  misc_feature (1)..(1524): Ortholog of  Ceres SEQ ID NO 14303366 as cited in SEQ ID NO 54418
  misc_feature (1)..(1524): Ortholog of  Ceres SEQ ID NO 13503610 as cited in SEQ ID NO 62416
  misc_feature (1)..(1524): Ortholog of  Ceres SEQ ID NO 13657610 as cited in SEQ ID NO 66165
  misc_feature (1)..(1524): Ortholog of  Ceres SEQ ID NO 13598312 as cited in SEQ ID NO 68448
  misc_feature (1)..(1524): Ortholog of  Ceres SEQ ID NO 13596100 as cited in SEQ ID NO 68573
aatcataggcatagcaaaactcttccaaaatgtctgatttctcgagctccgtgaagcttaaatatgttaaactcggttaccaataccttatcaacaacttccttactcttcttttgattccagtcatagcaaccgtcgccatcgagcttctccgaatgggtccggaagagattctcagtgtcttgaactcactccacttcgagcttcttcatatcctttgttcctctttccttattatctttgtttcaaccgtttacttcatgtccaagccacgtaccgtctaccttgtggactactcttgctacaaacctcctgtcacgtgccgtgtcccgttctcttcgttcatggaacactctcgtctcatcctcaaagacaatcccaagagtgtcgaattccaaatgagaatcctcgagcgatcaggtctaggagaagagacttgtctccctccagctattcattacatccctccaactccaaccatggaatccgcaagaaacgaggcccaaatggttatcttcaccgccatggaagatctcttcaagaatacaggtcttaaacctaaagacatcgacatcctcattgttaattgctctctgttctcaccaacgccgtctctctccgctatgattatcaacaagtacaagcttaggagtaacatcaaaagctataacctttccgggatgggatgcagcgctagtcttatctcagttgatgtagcacgtaatttgttacaagtccatcctaactccaacgcaatcataattagcactgagatcattactcctaattactataagggtaatgagagagccatgttgctcccaaactgcctcttccgtatgggaggcgccgccattctcctctctaaccgcagatccgacaggtggcgagctaagtacaagttatgccaccttgttaggacccatcgcggtgcggatgacaaatcctacaactgtgttatggaacaggaagacaaaaatggtaacgtgggaatcaacttgtctaaagatctcatgaccattgccggagaagccttgaaagctaatatcactaccataggtcctttggtccttccggcatccggagcagcttctcttcctctcatcccttatcggacgtaaaatcttcaatccaaagtggaagccgtacataccagatttcaagcaggccttcgagcatttctgcatccacgcaggaggaagagcggtgattgatgagctgcaaaagaatctacagctgtcgggagaacacgtggaagcttcaagaatgacactacataggtttggtaatacatcgtcgtcatcattatggtatgagcttagctacatagaggctcaagggaggatgaagagaaacgatagggtttggcagatcgctttcggaagtggattcaagtgtaactccgccgtttggaaatgtaaccgtacgatcaagacaccaacggatggagcgtggtcggattgtatcgaacgataccctgtctttatccctgaagttgttaaactatgaaaatacttttttttt

SEQ ID NO: 38672 - protein, 363 aa, Arabidopsis thaliana
  peptide (1)..(363): Ceres Seq. ID no. 12331034
MSDFSSSVKLKYVKLGYQYLINNFLTLLLIPVIATVAIELLRMGPEEILSVLNSLHFELLHILCSSFLIIFVSTVYFMSKPRTVYLVDYSCYKPPVTCRVPFSSFMEHSRLILKDNPKSVEFQMRILERSGLGEETCLPPAIHYIPPTPTMESARNEAQMVIFTAMEDLFKNTGLKPKDIDILIVNCSLFSPTPSLSAMIINKYKLRSNIKSYNLSGMGCSASLISVDVARNLLQVHPNSNAIIISTEIITPNYYKGNERAMLLPNCLFRMGGAAILLSNRRSDRWRAKYKLCHLVRTHRGADDKSYNCVMEQEDKNGNVGINLSKDLMTIAGEALKANITTIGPLVLPASGAASLPLIPYRT

SEQ ID NO: 38673 - protein, 321 aa, Arabidopsis thaliana
  peptide (1)..(321): Ceres Seq. ID no. 12331035
MGPEEILSVLNSLHFELLHILCSSFLIIFVSTVYFMSKPRTVYLVDYSCYKPPVTCRVPFSSFMEHSRLILKDNPKSVEFQMRILERSGLGEETCLPPAIHYIPPTPTMESARNEAQMVIFTAMEDLFKNTGLKPKDIDILIVNCSLFSPTPSLSAMIINKYKLRSNIKSYNLSGMGCSASLISVDVARNLLQVHPNSNAIIISTEIITPNYYKGNERAMLLPNCLFRMGGAAILLSNRRSDRWRAKYKLCHLVRTHRGADDKSYNCVMEQEDKNGNVGINLSKDLMTIAGEALKANITTIGPLVLPASGAASLPLIPYRT

SEQ ID NO: 38674 - protein, 286 aa, Arabidopsis thaliana
  peptide (1)..(286): Ceres Seq. ID no. 12331036
MSKPRTVYLVDYSCYKPPVTCRVPFSSFMEHSRLILKDNPKSVEFQMRILERSGLGEETCLPPAIHYIPPTPTMESARNEAQMVIFTAMEDLFKNTGLKPKDIDILIVNCSLFSPTPSLSAMIINKYKLRSNIKSYNLSGMGCSASLISVDVARNLLQVHPNSNAIIISTEIITPNYYKGNERAMLLPNCLFRMGGAAILLSNRRSDRWRAKYKLCHLVRTHRGADDKSYNCVMEQEDKNGNVGINLSKDLMTIAGEALKANITTIGPLVLPASGAASLPLIPYRT

SEQ ID NO: 38675 - DNA, 972 bp, Arabidopsis thaliana
  misc_feature (1)..(972): Ceres Seq. ID no. 12422442
  misc_feature (1)..(972): Ortholog of  Ceres SEQ ID NO 15174082 as cited in SEQ ID NO 61896
  misc_feature (1)..(972): Ortholog of  Ceres SEQ ID NO 13655598 as cited in SEQ ID NO 64077
acacaaatagaaataacttgtaatcaaccaaagtcgaaaaacagagttattttgtcggatcaatggtgaagattgagataggaagtgtgggtgactcctttagtgtagcatctcttaaggcttacttgtctgaatttatcgcaactcttctctttgtgtttgctggcgttggctctgctcttgcttttgccaagctcacatccgatgcagccttggaccccgctggtcttgtcgctgtcgctgtggctcacgcctttgcccttttcgttggtgtttccatagccgccaacatctccggcggacaccttaaccccgccgtgacactcggtctcgccgtcggtggcaacatcacagtaataaccggtttcttttactggattgctcaatgccttggctccatcgtcgcgtgtctcctcctcgtcttcgttaccaatggcgagagcgtaccgactcatggagtagcggccggtttaggagctattgaaggagtagtgatggagattgtggtgacctttgctctggtctacacagtctacgccacagcggctgatccaaagaaaggttcactcgggaccattgctccaattgctatcggtttcatcgttggtgccaacatcctcgcagcgggtccctttagcggtggttccatgaacccggccaggtcatttggaccagctgttgtcagtggtgacttctctcagatatggatctactgggtgggtccactagtcggtggtgcacttgctggactcatctacggagacgtcttcatcggatcctacgctccagctcccaccacagaaagctacccttgatcaatcctatagcgttttaatttgcttggcttgctttttgttgtatgaaaatgtttggtcctcgtttcttccaaaaatgaatgattgaatgtggagaaaaagatcaaagttgtactttgtgttggttataaataagaattgtatattttcaaatttt

SEQ ID NO: 38676 - protein, 250 aa, Arabidopsis thaliana
  peptide (1)..(250): Ceres Seq. ID no. 12422443
MVKIEIGSVGDSFSVASLKAYLSEFIATLLFVFAGVGSALAFAKLTSDAALDPAGLVAVAVAHAFALFVGVSIAANISGGHLNPAVTLGLAVGGNITVITGFFYWIAQCLGSIVACLLLVFVTNGESVPTHGVAAGLGAIEGVVMEIVVTFALVYTVYATAADPKKGSLGTIAPIAIGFIVGANILAAGPFSGGSMNPARSFGPAVVSGDFSQIWIYWVGPLVGGALAGLIYGDVFIGSYAPAPTTESYP

SEQ ID NO: 38677 - DNA, 864 bp, Arabidopsis thaliana
  misc_feature (1)..(864): Ceres Seq. ID no. 12385261
  misc_feature (1)..(864): Ortholog of  Ceres SEQ ID NO 15176177 as cited in SEQ ID NO 0
aaattagttcgtcgaagcatcgagaaaatgatcgtactttctgttggttccgcttcttcatctccgatcgtcgtcgtcttttccgtcgctcttcttctgttctacttctctgaaacttctctaggagctccttgtcacatcaatggcttgccaatcgtgaggaatattagtgaccttcctcaggataactatggaagaccaggtctttcccacatgactgttgctggctccgtattgcatggaatgaaagaggttgaaatatggcttcagacatttgctccaggttcagagacaccaattcacaggcactcctgtgaagaggtttttgttgtcctaaagggcagtggtactctgtatctcgctgaaacacatggaaatttccctgggaaaccaatcgaatttccaatctttgccaacagtacaattcatattccgatcaatgatgctcatcaggtcaaaaacaccggtcatgaggacctgcaggtgttggttatcatatctcggccgcctattaaaatcttcatctacgaagactggtttatgccacacactgctgcaaggctgaagttcccttactattgggatgagcaatgcattcaagaatcacaaaaagacgagctttaaagcaaagtccgaggctaaaagcaagcacaacctttagatagtaaaatcatagttgaggttttgtgacactacgtagatactggtaaattggcaaggattttacatgaatgttgttgttaccagaaagtaaataaatgttcaatctttgatgttcttaagtaagtgagtcctattggtcatgaaaatatgtaagtgtgcacatcttgattgcatttgcgataaatttatagagtttcactc

SEQ ID NO: 38678 - protein, 207 aa, Arabidopsis thaliana
  peptide (1)..(207): Ceres Seq. ID no. 12385262
KLVRRSIEKMIVLSVGSASSSPIVVVFSVALLLFYFSETSLGAPCHINGLPIVRNISDLPQDNYGRPGLSHMTVAGSVLHGMKEVEIWLQTFAPGSETPIHRHSCEEVFVVLKGSGTLYLAETHGNFPGKPIEFPIFANSTIHIPINDAHQVKNTGHEDLQVLVIISRPPIKIFIYEDWFMPHTAARLKFPYYWDEQCIQESQKDEL

SEQ ID NO: 38679 - protein, 198 aa, Arabidopsis thaliana
  peptide (1)..(198): Ceres Seq. ID no. 12385263
MIVLSVGSASSSPIVVVFSVALLLFYFSETSLGAPCHINGLPIVRNISDLPQDNYGRPGLSHMTVAGSVLHGMKEVEIWLQTFAPGSETPIHRHSCEEVFVVLKGSGTLYLAETHGNFPGKPIEFPIFANSTIHIPINDAHQVKNTGHEDLQVLVIISRPPIKIFIYEDWFMPHTAARLKFPYYWDEQCIQESQKDEL

SEQ ID NO: 38680 - protein, 136 aa, Arabidopsis thaliana; identical to SEQ ID NO: 22652
  peptide (1)..(136): Ceres Seq. ID no. 12385264

SEQ ID NO: 38681 - DNA, 3238 bp, Arabidopsis thaliana
  misc_feature (1)..(3238): Ceres Seq. ID no. 12328934
  misc_feature (1)..(3238): Ortholog of  Ceres SEQ ID NO 15168378 as cited in SEQ ID NO 59129
aaaacagaggaagtgataagaggttctttttgggtttgaagatgagttcaagaactggagcctctttgctcctgatcttgtttttcttccaaatttgttctgtttcggcactcacgaatggtttagacgcttctgctttaaatgctctgaagagtgaatggaccactcctcctgatggttgggaaggctctgatccttgtggaaccaattgggttggaattacatgtcaaaatgaccgcgtcgtttcaatatcactaggtaaccttgacttggaaggaaagcttcctgccgatatatcgttcttgtccgagttgcggatcttggatttgtcatacaatcctaaattgtccggaccgcttccaccaaacatcggtaaccttgggaagttaaggaacttgatccttgtgggatgtagtttcagtggtcaaatccctgagtccattggaactctaaaagaacttatatatctctccctaaatttaaataaatttagtggaacaattccgccttcaattggcctgttatcaaaactatattggtttgatatagctgacaatcagattgaaggagagcttccagtttctaatgggacttctgcacctggacttgacatgcttcttcaaactaagcattttcattttggaaaaaacaagctttcaggcaatatcccaaaagaacttttcagctcaaacatgagtttaatacatgtcctcttcgatggaaaccaattcacgggcgaaattccagagaccctcagtctcgttaaaacgttgacggtgttacgccttgataggaacaaactcattggagatattccttcatatcttaacaatctcacaaatcttaacgaactgtacttggccaacaacagatttactggtactcttccaaatttaaccagcttgaccagtctctacacattggatgtgagcaataacactttggatttctcacccattccatcatggatctcttcattaccctccctatcaacattaaggatggaagggatccaacttaatggtccaataccaatctcatttttcagccctcctcagttgcagactgttatcttaaagcgaaatagtatagtggaaagcttagactttggtacagacgttagcagccagttggagtttgtggatttacaatacaatgaaataactgattataaaccatcagctaataaagtcctccaagtaatattggcaaataatccagtgtgtctagaggcgggaaacgggccgagttactgttcagcaatccaacacaatacctcattttctacactcccaacaaactgttctccatgcgaaccgggcatggaagcgagtcccacgtgccgctgtgcgtatccattcatgggaacactctacttccggtctccttctttctcagggttgttcaactccaccaacttctcaattctacagaaggcaatcgcggatttctttaagaagttcaattatcctgtagactccgttggtgttcggaacataagagagaatccaactgatcatcagcttctaatagatctattggtctttccattgggaagagagagttttaatcagacaggaatgtcacttgttggttttgcatttagcaaccagacttataagcctcctccgatatttggcccttatattttcaaagctgatttgtacaaacagttctctggtatgatgaacccttgtcacacacacaatcaaactagaactaaaggttgttattgataactcatttgctctgcctttctttttgtcacagatgtagaagtttcatcaaagtcatcaaacaaaagcattctcattggagcagtagttggtgttgttgttcttctactattgttaacaatagctgggatttacgctcttaggcagaagaagagagctgaaagagcaactggtcaaaataatccttttgctaaatgggatacaagtaagagtagtattgatgctccgcagctaatgggagcaaaagcgtttacttttgaggagctgaagaaatgcactgacaacttttcagaggcaaatgatgttggcggtggaggttacggcaaggtttatagagggattcttcctaatgggcaactcatagcaatcaaaagggctcaacaaggatctttgcaaggagggttggagttcaaaactgagattgagcttctctcaagggtccatcataagaatgttgtcagactcttgggcttctgctttgaccggaatgaacaaatgctcgtatacgagtacatttcaaatgggtcacttaaagacagtctgtccgggaagagtgggattcgattggattggacaagaagacttaaaatagcacttggttcaggcaagggcttggcttatcttcatgaacttgctgatcctccaattatacatagagacatcaaatcaaataacatattacttgatgaaaatctaaccgcaaaggttgccgacttcggtctctccaaacttgtgggagaccctgagaaaactcatgtcacaacacaagtcaaaggaaccatgggctacttggatccagagtactacatgacgaatcaattaacggagaagagcgatgtgtatgggtttggtgtggttttactcgagctattaaccggtagaagtccgatagagagaggcaaatatgtggtgagagaggtgaagacaaagatgaataaatctcggagtttgtatgacctgcaggagttgttggacacaacgatcatagcaagcagtgggaatctaaaagggttcgagaagtatgtagacttggctttgagatgtgtggaggaggaaggagttaataggccatcaatgggtgaggttgtgaaagagattgagaacataatgcagcttgcgggattaaatcctaactcagattcagcaacgagttcaagaacgtatgaggacgcaatcaaaggatctggtgatccttatggcagtgaatcgtttcagtacagtgggaattttccagcttcaaagcttgagccccaatgattgattatgtttctttttgttattttgttatttcgtaagtgacttcatacttgaaatgccttgtgaatgtggagtagcatgattctgtttgatatgtggtcgctgattataaagcagatgaatggagagccaaacgcagaatcaaaaaccaccagatctttggcaatgtcgacaccagtttcaaacataagaaaagtaatcaagctcaatgtatgatgaataattgaatatattaattcttgttg

SEQ ID NO: 38682 - protein, 577 aa, Arabidopsis thaliana
  peptide (1)..(577): Ceres Seq. ID no. 12328935
NRGSDKRFFLGLKMSSRTGASLLLILFFFQICSVSALTNGLDASALNALKSEWTTPPDGWEGSDPCGTNWVGITCQNDRVVSISLGNLDLEGKLPADISFLSELRILDLSYNPKLSGPLPPNIGNLGKLRNLILVGCSFSGQIPESIGTLKELIYLSLNLNKFSGTIPPSIGLLSKLYWFDIADNQIEGELPVSNGTSAPGLDMLLQTKHFHFGKNKLSGNIPKELFSSNMSLIHVLFDGNQFTGEIPETLSLVKTLTVLRLDRNKLIGDIPSYLNNLTNLNELYLANNRFTGTLPNLTSLTSLYTLDVSNNTLDFSPIPSWISSLPSLSTLRMEGIQLNGPIPISFFSPPQLQTVILKRNSIVESLDFGTDVSSQLEFVDLQYNEITDYKPSANKVLQVILANNPVCLEAGNGPSYCSAIQHNTSFSTLPTNCSPCEPGMEASPTCRCAYPFMGTLYFRSPSFSGLFNSTNFSILQKAIADFFKKFNYPVDSVGVRNIRENPTDHQLLIDLLVFPLGRESFNQTGMSLVGFAFSNQTYKPPPIFGPYIFKADLYKQFSGMMNPCHTHNQTRTKGCY

SEQ ID NO: 38683 - protein, 564 aa, Arabidopsis thaliana
  peptide (1)..(564): Ceres Seq. ID no. 12328936
MSSRTGASLLLILFFFQICSVSALTNGLDASALNALKSEWTTPPDGWEGSDPCGTNWVGITCQNDRVVSISLGNLDLEGKLPADISFLSELRILDLSYNPKLSGPLPPNIGNLGKLRNLILVGCSFSGQIPESIGTLKELIYLSLNLNKFSGTIPPSIGLLSKLYWFDIADNQIEGELPVSNGTSAPGLDMLLQTKHFHFGKNKLSGNIPKELFSSNMSLIHVLFDGNQFTGEIPETLSLVKTLTVLRLDRNKLIGDIPSYLNNLTNLNELYLANNRFTGTLPNLTSLTSLYTLDVSNNTLDFSPIPSWISSLPSLSTLRMEGIQLNGPIPISFFSPPQLQTVILKRNSIVESLDFGTDVSSQLEFVDLQYNEITDYKPSANKVLQVILANNPVCLEAGNGPSYCSAIQHNTSFSTLPTNCSPCEPGMEASPTCRCAYPFMGTLYFRSPSFSGLFNSTNFSILQKAIADFFKKFNYPVDSVGVRNIRENPTDHQLLIDLLVFPLGRESFNQTGMSLVGFAFSNQTYKPPPIFGPYIFKADLYKQFSGMMNPCHTHNQTRTKGCY

SEQ ID NO: 38684 - protein, 374 aa, Arabidopsis thaliana
  peptide (1)..(374): Ceres Seq. ID no. 12328937
MLLQTKHFHFGKNKLSGNIPKELFSSNMSLIHVLFDGNQFTGEIPETLSLVKTLTVLRLDRNKLIGDIPSYLNNLTNLNELYLANNRFTGTLPNLTSLTSLYTLDVSNNTLDFSPIPSWISSLPSLSTLRMEGIQLNGPIPISFFSPPQLQTVILKRNSIVESLDFGTDVSSQLEFVDLQYNEITDYKPSANKVLQVILANNPVCLEAGNGPSYCSAIQHNTSFSTLPTNCSPCEPGMEASPTCRCAYPFMGTLYFRSPSFSGLFNSTNFSILQKAIADFFKKFNYPVDSVGVRNIRENPTDHQLLIDLLVFPLGRESFNQTGMSLVGFAFSNQTYKPPPIFGPYIFKADLYKQFSGMMNPCHTHNQTRTKGCY

SEQ ID NO: 38685 - DNA, 1391 bp, Arabidopsis thaliana
  misc_feature (1)..(1391): Ceres Seq. ID no. 12330746
  misc_feature (1)..(1391): Ortholog of  Ceres SEQ ID NO 13596581 as cited in SEQ ID NO 62420
  misc_feature (1)..(1391): Ortholog of  Ceres SEQ ID NO 13591273 as cited in SEQ ID NO 65904
  misc_feature (1)..(1391): Ortholog of  Ceres SEQ ID NO 13623086 as cited in SEQ ID NO 0
aagattcagtagaaaaaattgaccacaagacaaaatatagatacaactatacagaaagagaagataggatgaacaagtgagtctcttctctctctcaaatccactccgtaataagttcataatctatcatccaccatggagaaaacatcaatgttctccattcacgaaggaaagccgattcgatgcaaagcagcagtatctagaaaaccaggagaagcattggtgatagaagagatccatgtggatccacctcaagcttatgaagttaggataaagatcatatgtacatctttatgtcataccgatgtttctttctcgaaaatagacagtggaccgcttgcaaggtttcctaggattctaggacacgaagcagtcggtgtgatcgagagcattggtgaacatgtgaatggatttcaacaaggtgatatcgttttgccagtgtttcaccctcactgtgaagaatgtagagattgcaaatcctcaaagagcaactggtgcgcaagatttgccgacgatttcttatcaaacacgagacgatatggaatgacttcaagattcaaagactcctttggagaagatatttatcattttctctttgtctcgagtttttctgaatatacggtcgtcgacatcgcacatcttgtcaaaatctctcctgatattccggttgataaagcagcattgctcagctgcggtgtttccacaggaattggagcagcttggaaagtggctaacgtggaaaaaggctccaccgttgcagtttttggccttggtgctgttggacttgcggttggagaaggagccaggctgcgtggagccggcaagatcattggtgttgatctcaatccagaaaaattcgagctaggcaagaaatttggtttcacgagtttcatcaatcctaccttgtgtggagaaaagaagattagcgaggtgattaaagaaatgactggaggaggagttgactatagtttcgaatgcgttggtttaccttctttattgaccgaagctttctccagcactcgcacgggttcaggaaaaacggtagtgttggggatagataagcatctaacgccagtaagtttgggtagctttgatcttctcagaggcagacatgtttgtggaagcttgtttggtggtcttaaacccaaactagatattccgattctggttgatcattacttaaaaaaggagcttaatttggatagttttattacacatgaattgaaatttgaggaaatcaacaaagctttcgatttattagtgcaaggaaagtctctccgctgcattctttggatgaacaagtgaagtgattaattatgttgaaactatatatgttgaaaaattgattaaatttctttatcaaaaagaaaagaattaattattactctttc

SEQ ID NO: 38686 - protein, 389 aa, Arabidopsis thaliana
  peptide (1)..(389): Ceres Seq. ID no. 12330747
MEKTSMFSIHEGKPIRCKAAVSRKPGEALVIEEIHVDPPQAYEVRIKIICTSLCHTDVSFSKIDSGPLARFPRILGHEAVGVIESIGEHVNGFQQGDIVLPVFHPHCEECRDCKSSKSNWCARFADDFLSNTRRYGMTSRFKDSFGEDIYHFLFVSSFSEYTVVDIAHLVKISPDIPVDKAALLSCGVSTGIGAAWKVANVEKGSTVAVFGLGAVGLAVGEGARLRGAGKIIGVDLNPEKFELGKKFGFTSFINPTLCGEKKISEVIKEMTGGGVDYSFECVGLPSLLTEAFSSTRTGSGKTVVLGIDKHLTPVSLGSFDLLRGRHVCGSLFGGLKPKLDIPILVDHYLKKELNLDSFITHELKFEEINKAFDLLVQGKSLRCILWMNK

SEQ ID NO: 38687 - protein, 384 aa, Arabidopsis thaliana
  peptide (1)..(384): Ceres Seq. ID no. 12330748
MFSIHEGKPIRCKAAVSRKPGEALVIEEIHVDPPQAYEVRIKIICTSLCHTDVSFSKIDSGPLARFPRILGHEAVGVIESIGEHVNGFQQGDIVLPVFHPHCEECRDCKSSKSNWCARFADDFLSNTRRYGMTSRFKDSFGEDIYHFLFVSSFSEYTVVDIAHLVKISPDIPVDKAALLSCGVSTGIGAAWKVANVEKGSTVAVFGLGAVGLAVGEGARLRGAGKIIGVDLNPEKFELGKKFGFTSFINPTLCGEKKISEVIKEMTGGGVDYSFECVGLPSLLTEAFSSTRTGSGKTVVLGIDKHLTPVSLGSFDLLRGRHVCGSLFGGLKPKLDIPILVDHYLKKELNLDSFITHELKFEEINKAFDLLVQGKSLRCILWMNK

SEQ ID NO: 38688 - protein, 253 aa, Arabidopsis thaliana
  peptide (1)..(253): Ceres Seq. ID no. 12330749
MTSRFKDSFGEDIYHFLFVSSFSEYTVVDIAHLVKISPDIPVDKAALLSCGVSTGIGAAWKVANVEKGSTVAVFGLGAVGLAVGEGARLRGAGKIIGVDLNPEKFELGKKFGFTSFINPTLCGEKKISEVIKEMTGGGVDYSFECVGLPSLLTEAFSSTRTGSGKTVVLGIDKHLTPVSLGSFDLLRGRHVCGSLFGGLKPKLDIPILVDHYLKKELNLDSFITHELKFEEINKAFDLLVQGKSLRCILWMNK

SEQ ID NO: 38689 - DNA, 1550 bp, Arabidopsis thaliana
  misc_feature (1)..(1550): Ceres Seq. ID no. 13492477
  misc_feature (1)..(1550): Ortholog of  Ceres SEQ ID NO 14301420 as cited in SEQ ID NO 56580
actttcttcttcgattagccacttttttttcttttgtaattttcctttcttttttttttcttttgaattttcgggaagcagcatttccactggagctgcaaaatcttcctatcaaaattatagatcgatccaagttttagattcgagaatcattttctccaaattagatttatatatcaaaaggaatcgaaaatagacagcaatttttgttttgtcggatcgtattgaatcagctgtgaattttagcgccaatttaaccactgaatcgtttgattagaagctaagatttggtcttacgatcgatctaagtagggttcttcttcttaagtgtgtgttttgttaaaattagtaaagagagatggagaagaagaaagtcgcgactccgctagtgtgccatggccattcgagacctgttgtggatttgttctacagtccaatcactcctgatggtttcttcctcatcagcgcaagtaaagattctcaaccaatgttgagaaatggggaaactggagattggattggtacatttgaaggtcataaaggtgctgtgtggagttcttgtcttgataacaatgctttacgtgcagcttctgcatctgctgatttttcagcgaagctttgggatgctttgactggggatgtcttgcattcttttgagcacaagcatattgttcgagcatgcgccttctctcaggatacgaaatatctaatcacaggaggatttgagaaaattcttcgtgttttcgacttgaatcgcttggatgcacctcctacagaaattgataaatctcctggttctatcagaacactaacatggcttcacggtgatcaaacaatattaagttcttgcactgatattggtggtgtgaggttatgggatgtgaggagtggcaaaatagtgcaaactctagaaaccaagtctcctgtcaccagtgctgaagtgagtcaagatggacggtatataacaactgccgatgggtcaactgttaaattttgggatgcaaatcattttggactagtgaaaagttacgacatgccctgcaatatcgaatctgcatcgcttgagccaaaatctggcaacaaattcgttgctggtggagaagatatgtgggttcgactctttgatttccacaccggaaaggagattggatgcaacaagggacatcatggtccggttcactgtgtgagatttgcaccaacaggtgagtcttatgcttcagggtctgaagatggtacaatcagaatttggcaaactggaccggtgaatcctgaagagatcagcgagtcaaagccgaagcagagtgtggatgaggttgctcgtaagattgaaggctttcacattaacaaggaaggaaaaaccgcagagaaaccatctgatgcttaaaccaagaaaagaaccaagaaaaatggctgcttctctttgtcttcttactgtgtttttacttccagactgaatatacggaaattcaaaacaagtgtttgaaaaacagtcgttgtcaatcttcattcgagtcaagtttatggatgtggctgaaaatttacgaattaat

SEQ ID NO: 38690 - protein, 341 aa, Arabidopsis thaliana
  peptide (1)..(341): Ceres Seq. ID no. 13492478
MEKKKVATPLVCHGHSRPVVDLFYSPITPDGFFLISASKDSQPMLRNGETGDWIGTFEGHKGAVWSSCLDNNALRAASASADFSAKLWDALTGDVLHSFEHKHIVRACAFSQDTKYLITGGFEKILRVFDLNRLDAPPTEIDKSPGSIRTLTWLHGDQTILSSCTDIGGVRLWDVRSGKIVQTLETKSPVTSAEVSQDGRYITTADGSTVKFWDANHFGLVKSYDMPCNIESASLEPKSGNKFVAGGEDMWVRLFDFHTGKEIGCNKGHHGPVHCVRFAPTGESYASGSEDGTIRIWQTGPVNPEEISESKPKQSVDEVARKIEGFHINKEGKTAEKPSDA

SEQ ID NO: 38691 - protein, 298 aa, Arabidopsis thaliana
  peptide (1)..(298): Ceres Seq. ID no. 13492479
MLRNGETGDWIGTFEGHKGAVWSSCLDNNALRAASASADFSAKLWDALTGDVLHSFEHKHIVRACAFSQDTKYLITGGFEKILRVFDLNRLDAPPTEIDKSPGSIRTLTWLHGDQTILSSCTDIGGVRLWDVRSGKIVQTLETKSPVTSAEVSQDGRYITTADGSTVKFWDANHFGLVKSYDMPCNIESASLEPKSGNKFVAGGEDMWVRLFDFHTGKEIGCNKGHHGPVHCVRFAPTGESYASGSEDGTIRIWQTGPVNPEEISESKPKQSVDEVARKIEGFHINKEGKTAEKPSDA

SEQ ID NO: 38692 - DNA, 1028 bp, Arabidopsis thaliana; identical to SEQ ID NO: 38518
  misc_feature (1)..(1028): Ceres Seq. ID no. 12325605
  misc_feature (1)..(1028): Ortholog of  Ceres SEQ ID NO 15173696 as cited in SEQ ID NO 59972
  misc_feature (1)..(1028): Ortholog of  Ceres SEQ ID NO 15226351 as cited in SEQ ID NO 61706

SEQ ID NO: 38693 - protein, 258 aa, Arabidopsis thaliana; identical to SEQ ID NO: 38519
  peptide (1)..(258): Ceres Seq. ID no. 12325606

SEQ ID NO: 38694 - protein, 145 aa, Arabidopsis thaliana; identical to SEQ ID NO: 38520
  peptide (1)..(145): Ceres Seq. ID no. 12325607

SEQ ID NO: 38695 - DNA, 1516 bp, Arabidopsis thaliana
  misc_feature (1)..(1516): Ceres Seq. ID no. 12395354
  misc_feature (1)..(1516): Ortholog of  Ceres SEQ ID NO 14316025 as cited in SEQ ID NO 65242
actgaactttcttttcctttcaagtttcacctctaatgcgacgaacacagccacgggaactggccgtcactggtttatcggagaatctccaaggatgtgttttccgcacggtgaaacgagcagttctgatcggaaacggctgcgccggcgcggagaatcaatgcatcggtctccttcgatccttaggcctcttcgatcgccacctctattatagagtagctaaaccaagaggtggaatccttcaatggcttcctatctctctctacaaacgaattcatcgttttatcagcactatctgtgccggattatccattaacgctactggaatcacgaatgtgtttgaagtagatgatgcgaagcagattgctgctatggctcgtaaaacgtttgaaaagaatggcccgttgttagtcgtggcgtctggtagtgatactatttccgtcgcaagctcaataagacgactggctatggaaaatgtttttgttgttcaggtgcaacatccaaggtcgcatcttgagagatttgatctagtgatcacacctcaacacgattatttttctttaacacctgaagggaagaggcaaattcctttctttctcagaccatgggtaactccacgtgaacatccaggtagaaatgtgtttctcactactggagctcttcattacgccgacgcttctactctaagaaatgctacatcggaatggaaaaacgagtttgcttcgctgccaaagcctttggttgtagttaatattggaggacctacaaggaactgtttgtatggtgttgatcttgctaaacagttgtgtggtatgcttcagagtatcctctggagctgtggaagcctaagaatatctttctcaagaagaacaccaaagaaggttgtagaagtcataactggagaattgagctctaactctaaggtctacatttgggatggaaaagaccctaatccgcatttgggacatctagctttagccaatacttttatcataactgctgactctataagtatgttgagcgaggcatgtagtaccgggaaacccgtttatgttgtgggtgctgaacggtgtacatggaaattttctgacttccagaagactctccatggtagaggagctgttcgacctttgaccggcaaagaagatatgtgtgagaagtggagttactctcctcttaacgataatgtagaagctgcgaggcgtgtgattcaagatctggccaagcgtggctgggaaatcgaggcatgaccgttctttccctccacaagttttccagagtactactctcttttccctatatagtctacagttattattttcgtactgggaattatcctccatagaagttaaatgctctagtcgaactcagggtcatatacttagctcatcgtttgaactattagtctattaacgattggtttttgttagttctttggttttttccatttggtttgtagtctcatgtatcaagcatcatctgtaaaggaacgaataaaagctgcgtgctctgacct

SEQ ID NO: 38696 - protein, 404 aa, Arabidopsis thaliana
  peptide (1)..(404): Ceres Seq. ID no. 12395355
MRRTQPRELAVTGLSENLQGCVFRTVKRAVLIGNGCAGAENQCIGLLRSLGLFDRHLYYRVAKPRGGILQWLPISLYKRIHRFISTICAGLSINATGITNVFEVDDAKQIAAMARKTFEKNGPLLVVASGSDTISVASSIRRLAMENVFVVQVQHPRSHLERFDLVITPQHDYFSLTPEGKRQIPFFLRPWVTPREHPGRNVFLTTGALHYADASTLRNATSEWKNEFASLPKPLVVVNIGGPTRNCLYGVDLAKQLCGMLQSILWSCGSLRISFSRRTPKKVVEVITGELSSNSKVYIWDGKDPNPHLGHLALANTFIITADSISMLSEACSTGKPVYVVGAERCTWKFSDFQKTLHGRGAVRPLTGKEDMCEKWSYSPLNDNVEAARRVIQDLAKRGWEIEA

SEQ ID NO: 38697 - protein, 292 aa, Arabidopsis thaliana
  peptide (1)..(292): Ceres Seq. ID no. 12395356
MARKTFEKNGPLLVVASGSDTISVASSIRRLAMENVFVVQVQHPRSHLERFDLVITPQHDYFSLTPEGKRQIPFFLRPWVTPREHPGRNVFLTTGALHYADASTLRNATSEWKNEFASLPKPLVVVNIGGPTRNCLYGVDLAKQLCGMLQSILWSCGSLRISFSRRTPKKVVEVITGELSSNSKVYIWDGKDPNPHLGHLALANTFIITADSISMLSEACSTGKPVYVVGAERCTWKFSDFQKTLHGRGAVRPLTGKEDMCEKWSYSPLNDNVEAARRVIQDLAKRGWEIEA

SEQ ID NO: 38698 - protein, 260 aa, Arabidopsis thaliana
  peptide (1)..(260): Ceres Seq. ID no. 12395357
MENVFVVQVQHPRSHLERFDLVITPQHDYFSLTPEGKRQIPFFLRPWVTPREHPGRNVFLTTGALHYADASTLRNATSEWKNEFASLPKPLVVVNIGGPTRNCLYGVDLAKQLCGMLQSILWSCGSLRISFSRRTPKKVVEVITGELSSNSKVYIWDGKDPNPHLGHLALANTFIITADSISMLSEACSTGKPVYVVGAERCTWKFSDFQKTLHGRGAVRPLTGKEDMCEKWSYSPLNDNVEAARRVIQDLAKRGWEIEA

SEQ ID NO: 38699 - DNA, 1164 bp, Arabidopsis thaliana
  misc_feature (1)..(1164): Ceres Seq. ID no. 12559029
  misc_feature (1)..(1164): Ortholog of  Ceres SEQ ID NO 13594435 as cited in SEQ ID NO 57977
atcaaaaaatctctatccatccacaacaacaacaaaaactcaagaacaatatctccacttgatcactaccacattgtccaatcactctacaaagcctgtacgtacacaacaacattaccatggtgaaacaagaacgcaagatccaaaccagcagcacaaaaaaggaaatgcctttgtcatcatcaccatcttcttcttcttcttcatcttcttcctcgtcttcgtcttcgtgtaagaacaagaacaagaagagtaagattaagaagtacaaaggagtgaggatgagaagttggggatcatgggtctctgagattagggcaccaaatcaaaagacaaggatttggttaggttcttactcaacagctgaagcagctgctagagcttacgatgttgcactcttatgtctcaaaggccctcaagccaatctcaacttccctacttcttcttcttctcatcatcttcttgataatctcttagatgaaaatacccttttgtcccccaaatccatccaaagagtagctgctcaagctgccaactcatttaaccattttgcccctacttcatcagccgtctcgtcaccgtccgatcatgatcatcaccatgatgatgggatgcaatctttgatgggatcttttgtggacaatcatgtgtctttgatggattcaacatcttcatggtatgatgatcataatgggatgttcttgtttgataatggagctccattcaattactctcctcaactaaactcgacgacgatgctcgatgaatacttctacgaagatgctgacattccgctttggagtttcaattaatccgacggtccataatacatactttaattagttttctaaatcattttttaaattcttttttatatatgtaacatatatttaccctcgtcgtaattattcatttccaagttgtttgttgcttggagagaattgacgacggatacgattatataatataattgtaagtttttatatgtagcaaactcggtacaattcggatttaatagggatctaggaagttcacatgaacaagcgactcttttttttgtcacttctttgactttttcatgtgaggtttcttttcatcaattttttttaacaatgtgtgaaaatatttctgtattgtaatgatatatttcgcacaatagttttg

SEQ ID NO: 38700 - protein, 230 aa, Arabidopsis thaliana
  peptide (1)..(230): Ceres Seq. ID no. 12559030
MVKQERKIQTSSTKKEMPLSSSPSSSSSSSSSSSSSSCKNKNKKSKIKKYKGVRMRSWGSWVSEIRAPNQKTRIWLGSYSTAEAAARAYDVALLCLKGPQANLNFPTSSSSHHLLDNLLDENTLLSPKSIQRVAAQAANSFNHFAPTSSAVSSPSDHDHHHDDGMQSLMGSFVDNHVSLMDSTSSWYDDHNGMFLFDNGAPFNYSPQLNSTTMLDEYFYEDADIPLWSFN

SEQ ID NO: 38701 - protein, 214 aa, Arabidopsis thaliana
  peptide (1)..(214): Ceres Seq. ID no. 12559031
MPLSSSPSSSSSSSSSSSSSSCKNKNKKSKIKKYKGVRMRSWGSWVSEIRAPNQKTRIWLGSYSTAEAAARAYDVALLCLKGPQANLNFPTSSSSHHLLDNLLDENTLLSPKSIQRVAAQAANSFNHFAPTSSAVSSPSDHDHHHDDGMQSLMGSFVDNHVSLMDSTSSWYDDHNGMFLFDNGAPFNYSPQLNSTTMLDEYFYEDADIPLWSFN

SEQ ID NO: 38702 - protein, 176 aa, Arabidopsis thaliana; identical to SEQ ID NO: 30986
  peptide (1)..(176): Ceres Seq. ID no. 12559032

SEQ ID NO: 38703 - DNA, 1889 bp, Arabidopsis thaliana
  misc_feature (1)..(1889): Ceres Seq. ID no. 13488816
  misc_feature (1)..(1889): Ortholog of  Ceres SEQ ID NO 13597411 as cited in SEQ ID NO 64125
atacaaaaacaaacccacaaagtctagctctctctctatatcggtgattcgaattttcagaaccgaaactccggcgaaaagattatggcgggacagtcacgaaaatggatgatactggtggcgacgatatggattcaagctttcaccgggacgaatttcgatttctcagcttactcgtcagatttgaaatcggttctagggatttcacaggtgcagctaaactacctcgccgtggcttcggatctcggaaaagtattcggatggtcgtcgggactagcgcttatgtatttcccgctttggacggtgcttttcgcggcggcgtttatgggattcgtcggttatggagttcagtggcttgtcatcactcatttcatctctttgccttatatcatggtgtttctctgttgcttacttgctggtttaagtatctgttggttcaacactgtctgctttgtgctctgcattagtaacttccctgcaaacagatcacttgctctttccctcacagtgagtttcaatggtgtaagcgctgctttatatactcttgcttacaacgcaatcaatccaacttctccagagctatatcttcttttgaacgctcttataccgctcattgtctctttcactgctatcatcccgattcttcgtcaaccgccttttgagcctcttccaccagatggagttcgtcgtgactctctcatgtttctattgctcaacatactcgctgctttaaacggtgtttatctccttctctttggatcaaactcctctgatttaacctctgctcgtctactctttggtggagcaatcctcctcttggtattccctttatgtattcccggtttagtcatcgcccggaattggtataaccgcacaatccacactagtttccgtctagaaggttctggtttcattcttgttgatcctgatgagcttgagttgcataaagggatgcttgcacatgaagcaaaccgtgaaggttatcaattgctgagtgacgatgtggtgcaaaacccggttaagtccgtagctgttgaggaagaggatagtgatgagtcatgttgcaagaaacttatcacaagagatcagcttgaaggtttggggattgaacattctttgtcgctgctcttaaccagatcagatttttggttatactatatcacgtacttctgcggtggaaccattggacttgtgtacagcaacaaccttggacagattgctcaatctttaggacaaagctcaaataccacaactcttgtcacactttattctgctttctcattctttggaagattgctttctgcaacaccagattatatccgagcgaaggtttattttgccagaaccgggtggttagcaatcgcgctattaccaacccccttcgcacttttcttgcttgcatcatcaggaactgcatcagcattacaagctggaacagcgctgatgggtttaagctccgggtttatctttgcagcagcggtttccatcacatcagagctttttggaccaaacagtgttggagttaaccacaatatcttaatcacaaacataccgataggatcattgatctatggattcttggctgcattggtctatgactcacatggtttcaccgggaccaaatcaatgacctcggagtcggtggtgtgtatgggacgagattgttattacttgacctttgtgtggtggggttgcttgtctcttcttgggctaggttcgagtcttgtgttgtttattagaactagacgagcttatcaacggtttgaacaagctcgtataagttcgaacatcaacgactcttagaaatttgcatcaaccccaacggtttgtgtatatgtaggatctaagttataacagacggattaatggtattttagtggattttggcc

SEQ ID NO: 38704 - protein, 572 aa, Arabidopsis thaliana
  peptide (1)..(572): Ceres Seq. ID no. 13488817
MAGQSRKWMILVATIWIQAFTGTNFDFSAYSSDLKSVLGISQVQLNYLAVASDLGKVFGWSSGLALMYFPLWTVLFAAAFMGFVGYGVQWLVITHFISLPYIMVFLCCLLAGLSICWFNTVCFVLCISNFPANRSLALSLTVSFNGVSAALYTLAYNAINPTSPELYLLLNALIPLIVSFTAIIPILRQPPFEPLPPDGVRRDSLMFLLLNILAALNGVYLLLFGSNSSDLTSARLLFGGAILLLVFPLCIPGLVIARNWYNRTIHTSFRLEGSGFILVDPDELELHKGMLAHEANREGYQLLSDDVVQNPVKSVAVEEEDSDESCCKKLITRDQLEGLGIEHSLSLLLTRSDFWLYYITYFCGGTIGLVYSNNLGQIAQSLGQSSNTTTLVTLYSAFSFFGRLLSATPDYIRAKVYFARTGWLAIALLPTPFALFLLASSGTASALQAGTALMGLSSGFIFAAAVSITSELFGPNSVGVNHNILITNIPIGSLIYGFLAALVYDSHGFTGTKSMTSESVVCMGRDCYYLTFVWWGCLSLLGLGSSLVLFIRTRRAYQRFEQARISSNINDS

SEQ ID NO: 38705 - protein, 564 aa, Arabidopsis thaliana
  peptide (1)..(564): Ceres Seq. ID no. 13488818
MILVATIWIQAFTGTNFDFSAYSSDLKSVLGISQVQLNYLAVASDLGKVFGWSSGLALMYFPLWTVLFAAAFMGFVGYGVQWLVITHFISLPYIMVFLCCLLAGLSICWFNTVCFVLCISNFPANRSLALSLTVSFNGVSAALYTLAYNAINPTSPELYLLLNALIPLIVSFTAIIPILRQPPFEPLPPDGVRRDSLMFLLLNILAALNGVYLLLFGSNSSDLTSARLLFGGAILLLVFPLCIPGLVIARNWYNRTIHTSFRLEGSGFILVDPDELELHKGMLAHEANREGYQLLSDDVVQNPVKSVAVEEEDSDESCCKKLITRDQLEGLGIEHSLSLLLTRSDFWLYYITYFCGGTIGLVYSNNLGQIAQSLGQSSNTTTLVTLYSAFSFFGRLLSATPDYIRAKVYFARTGWLAIALLPTPFALFLLASSGTASALQAGTALMGLSSGFIFAAAVSITSELFGPNSVGVNHNILITNIPIGSLIYGFLAALVYDSHGFTGTKSMTSESVVCMGRDCYYLTFVWWGCLSLLGLGSSLVLFIRTRRAYQRFEQARISSNINDS

SEQ ID NO: 38706 - protein, 506 aa, Arabidopsis thaliana
  peptide (1)..(506): Ceres Seq. ID no. 13488819
MYFPLWTVLFAAAFMGFVGYGVQWLVITHFISLPYIMVFLCCLLAGLSICWFNTVCFVLCISNFPANRSLALSLTVSFNGVSAALYTLAYNAINPTSPELYLLLNALIPLIVSFTAIIPILRQPPFEPLPPDGVRRDSLMFLLLNILAALNGVYLLLFGSNSSDLTSARLLFGGAILLLVFPLCIPGLVIARNWYNRTIHTSFRLEGSGFILVDPDELELHKGMLAHEANREGYQLLSDDVVQNPVKSVAVEEEDSDESCCKKLITRDQLEGLGIEHSLSLLLTRSDFWLYYITYFCGGTIGLVYSNNLGQIAQSLGQSSNTTTLVTLYSAFSFFGRLLSATPDYIRAKVYFARTGWLAIALLPTPFALFLLASSGTASALQAGTALMGLSSGFIFAAAVSITSELFGPNSVGVNHNILITNIPIGSLIYGFLAALVYDSHGFTGTKSMTSESVVCMGRDCYYLTFVWWGCLSLLGLGSSLVLFIRTRRAYQRFEQARISSNINDS

SEQ ID NO: 38707 - DNA, 1751 bp, Arabidopsis thaliana
  misc_feature (1)..(1751): Ceres Seq. ID no. 12727312
  misc_feature (1)..(1751): Ortholog of  Ceres SEQ ID NO 14314300 as cited in SEQ ID NO 57386
  misc_feature (1)..(1751): Ortholog of  Ceres SEQ ID NO 14311993 as cited in SEQ ID NO 60371
  misc_feature (1)..(1751): Ortholog of  Ceres SEQ ID NO 13596509 as cited in SEQ ID NO 62004
  misc_feature (1)..(1751): Ortholog of  Ceres SEQ ID NO 13500385 as cited in SEQ ID NO 67583
gagtttgtttaggcaggggagattcttcttcattctcatcattatttctctattaatttcaccccaaaaaagaaaaaagaaaaattccaacaagaaaaaaaaaagaaaaagaaagttgattcttcgcttaggcttgaaatctctccaatccaaatctcaaattaaccttccatcgtcatctctttccctttttttttcccactttctttgcgaatcgcgagatctcggaatcgcatccttgattttgggatactgttttttttttttttaatcttgtttcattttcacgtgaaattcttagctgctagaactggacttgaatttcaacgagaattttggagattttttttttgtttgggtttttcctttctgttttgtgtgtttggaattagggttgtcgagcgagaatggacaagtacgagctggtgaaagacataggtgctgggaattttggagttgccaggctcatgaaggtcaaaaactctaaggaacttgttgccatgaagtacatcgagcgtggtcctaagattgatgagaatgtggcaagagagatcattaatcacagatcacttcgccatccgaatataatccggttcaaggaggtggtgttgactccaacccatcttgccattgccatggaatatgctgctggtggtgaactattcgagcgtatatgcagtgctggaagatttagtgaggatgaggcgagatatttcttccagcagcttatatcaggtgttagctattgccatgctatgcaaatatgccatagagatctgaagctcgagaatacgctcttggatggaagtcctgctccacgtctgaaaatctgtgattttggttattccaagtcctctctgctgcactctaggcccaaatcaacagttggaactccagcatatattgcacctgaggtcctttctcgaagagaatatgatggcaagatggctgatgtatggtcttgtggtgtgactctttatgtcatgctggttggagcatacccatttgaagaccaggaagaccccaagaacttcaggaaaacaatacaaaaaataatggctgtccagtacaagatcccggactacgtccatatctcacaggattgtaaaaatctcctttcccgtatatttgtcgccaattcactcaagaggatcaccattgcagaaatcaagaaacattcatggttcctaaagaatttgccaagggaactcacagagacagctcaagctgcatatttcaagaaagagaacccaaccttctcccttcagaccgttgaagagatcatgaagatagtggctgacgccaaaacaccgcctcctgtttcccgatccatcggaggttttggctggggaggaaatggggatgcagatggaaaagaggaagatgcagaagacgtggaggaggaagaggaggaggtggaagaagaggaagacgatgaggatgaatacgataagactgtaaaggaagtacacgcaagtggagaagtgagaataagttgatattttggtttttggtctgtgtaagaaagaagtcgtcgttggtttgttgaaactgaaaagtctctgttctcgtgtttgcctttacaatgctttggctaaggttttggttctggttttggagatttgtaaaatttgcagtataagatgaacaaacagagaggttgatgatgagaatgagtcctttgctacgcatggtactatgaacattgtgacctccaataaatatttttgtaaattagattttattttccg

SEQ ID NO: 38708 - protein, 363 aa, Arabidopsis thaliana
  peptide (1)..(363): Ceres Seq. ID no. 12727313
MDKYELVKDIGAGNFGVARLMKVKNSKELVAMKYIERGPKIDENVAREIINHRSLRHPNIIRFKEVVLTPTHLAIAMEYAAGGELFERICSAGRFSEDEARYFFQQLISGVSYCHAMQICHRDLKLENTLLDGSPAPRLKICDFGYSKSSLLHSRPKSTVGTPAYIAPEVLSRREYDGKMADVWSCGVTLYVMLVGAYPFEDQEDPKNFRKTIQKIMAVQYKIPDYVHISQDCKNLLSRIFVANSLKRITIAEIKKHSWFLKNLPRELTETAQAAYFKKENPTFSLQTVEEIMKIVADAKTPPPVSRSIGGFGWGGNGDADGKEEDAEDVEEEEEEVEEEEDDEDEYDKTVKEVHASGEVRIS

SEQ ID NO: 38709 - protein, 343 aa, Arabidopsis thaliana
  peptide (1)..(343): Ceres Seq. ID no. 12727314
MKVKNSKELVAMKYIERGPKIDENVAREIINHRSLRHPNIIRFKEVVLTPTHLAIAMEYAAGGELFERICSAGRFSEDEARYFFQQLISGVSYCHAMQICHRDLKLENTLLDGSPAPRLKICDFGYSKSSLLHSRPKSTVGTPAYIAPEVLSRREYDGKMADVWSCGVTLYVMLVGAYPFEDQEDPKNFRKTIQKIMAVQYKIPDYVHISQDCKNLLSRIFVANSLKRITIAEIKKHSWFLKNLPRELTETAQAAYFKKENPTFSLQTVEEIMKIVADAKTPPPVSRSIGGFGWGGNGDADGKEEDAEDVEEEEEEVEEEEDDEDEYDKTVKEVHASGEVRIS

SEQ ID NO: 38710 - protein, 332 aa, Arabidopsis thaliana
  peptide (1)..(332): Ceres Seq. ID no. 12727315
MKYIERGPKIDENVAREIINHRSLRHPNIIRFKEVVLTPTHLAIAMEYAAGGELFERICSAGRFSEDEARYFFQQLISGVSYCHAMQICHRDLKLENTLLDGSPAPRLKICDFGYSKSSLLHSRPKSTVGTPAYIAPEVLSRREYDGKMADVWSCGVTLYVMLVGAYPFEDQEDPKNFRKTIQKIMAVQYKIPDYVHISQDCKNLLSRIFVANSLKRITIAEIKKHSWFLKNLPRELTETAQAAYFKKENPTFSLQTVEEIMKIVADAKTPPPVSRSIGGFGWGGNGDADGKEEDAEDVEEEEEEVEEEEDDEDEYDKTVKEVHASGEVRIS

SEQ ID NO: 38711 - DNA, 1643 bp, Arabidopsis thaliana
  misc_feature (1)..(1643): Ceres Seq. ID no. 12328994
  misc_feature (1)..(1643): Ortholog of  Ceres SEQ ID NO 14308723 as cited in SEQ ID NO 58758
ggttcagtctcttcgaagctcgtcgtctctctcttcaaaactccggtgaaaatggcgtcgcttactctccggtgcgattcgacgcatcttttgccttcccgtgatgttgtcaagggaacaaaaccatttggaacgagcttggtgtatcctaggatcatatcgaagaagtttaatgttagaatgagagtgatacctgaggaaggagatgtgttctcttcttctaagagtaatggatcatcaatggggattgagttacagccagatttggtttcgtttggaacattagcagctgaaatgattcctacaacaatggattctcctgaagttgaggatgaagagtttgatttagatcgacctactgatggatttgcgtctattcctcaagctattgaagatattcgacatggcaagatggtagttgttgtagatgatgaagatagagaaaacgaaggagatttgataatggcggcatctttggctacacctgaagctatggcttttgttgtaaagcatgggactggaatcgtgtgtgtgagcatgaaaggcgaagacttggagaggttagagcttcctttaatggtaacgcgtaaggataacgaggaaaaactccgcacggccttcacggtttcagtggacgcaaaaaagggaacatccacaggtgtctcagctcgtgatagggcgcaaacaatattaacccttgcatcaaaagattcaaaacctgaagatttcaatcgtcctggtcatatttttcctttgagatacagagaaggtggtgttcttaaaagagcagggcatacagaagcctctgttgacttgactgtgttgtccggtttagaaccagtatctgttttatgtgagattgtagatgatgatggttccatggctagattaccaagactccgccaattcgctcaagagaacaacttgaaattaatttcaatcgctgatttaatcagataccgaaggaaaagagagagactggttgagtttactgcggttgcgcctataccgacaatgtggggaccattcaaagcacattgctttaagtcattacttgatggagttgagcacattgcaatggtcaagggagaaatcggagatgggaaggatattctcgtgagagtacacgcggagtgtatcacagatgatatattcggaaatagctctggtggaaaacagttagcgattgcaatgagactgattgaagaaaatgggagaggtgtttttgtctacttacgtggtcctgaaagtaaaggcattgatctaagccacaagcctcgtacttacaacaccaattcagatcaagccgagggtgtttcatttcccgttgcttcacgggaatacggcattggagcacaaattctaagggatcttggagttagagagatgaaggtgatgacgaataatccagcacattacgttggtcttaaaggctatggtttatcaatttctggtaaggttccactcattactactccttaagtgttgttttgaccgttgtttgattacgttaagagacgacacgtgtcggcttcttgagtgacttagtttgttgtttagttgtggttttggcgcctaaatcatgtgatctgatattgtgttttttgacctccataattatcattagaattattttaaatggc

SEQ ID NO: 38712 - protein, 493 aa, Arabidopsis thaliana
  peptide (1)..(493): Ceres Seq. ID no. 12328995
GSVSSKLVVSLFKTPVKMASLTLRCDSTHLLPSRDVVKGTKPFGTSLVYPRIISKKFNVRMRVIPEEGDVFSSSKSNGSSMGIELQPDLVSFGTLAAEMIPTTMDSPEVEDEEFDLDRPTDGFASIPQAIEDIRHGKMVVVVDDEDRENEGDLIMAASLATPEAMAFVVKHGTGIVCVSMKGEDLERLELPLMVTRKDNEEKLRTAFTVSVDAKKGTSTGVSARDRAQTILTLASKDSKPEDFNRPGHIFPLRYREGGVLKRAGHTEASVDLTVLSGLEPVSVLCEIVDDDGSMARLPRLRQFAQENNLKLISIADLIRYRRKRERLVEFTAVAPIPTMWGPFKAHCFKSLLDGVEHIAMVKGEIGDGKDILVRVHAECITDDIFGNSSGGKQLAIAMRLIEENGRGVFVYLRGPESKGIDLSHKPRTYNTNSDQAEGVSFPVASREYGIGAQILRDLGVREMKVMTNNPAHYVGLKGYGLSISGKVPLITTP

SEQ ID NO: 38713 - protein, 476 aa, Arabidopsis thaliana
  peptide (1)..(476): Ceres Seq. ID no. 12328996
MASLTLRCDSTHLLPSRDVVKGTKPFGTSLVYPRIISKKFNVRMRVIPEEGDVFSSSKSNGSSMGIELQPDLVSFGTLAAEMIPTTMDSPEVEDEEFDLDRPTDGFASIPQAIEDIRHGKMVVVVDDEDRENEGDLIMAASLATPEAMAFVVKHGTGIVCVSMKGEDLERLELPLMVTRKDNEEKLRTAFTVSVDAKKGTSTGVSARDRAQTILTLASKDSKPEDFNRPGHIFPLRYREGGVLKRAGHTEASVDLTVLSGLEPVSVLCEIVDDDGSMARLPRLRQFAQENNLKLISIADLIRYRRKRERLVEFTAVAPIPTMWGPFKAHCFKSLLDGVEHIAMVKGEIGDGKDILVRVHAECITDDIFGNSSGGKQLAIAMRLIEENGRGVFVYLRGPESKGIDLSHKPRTYNTNSDQAEGVSFPVASREYGIGAQILRDLGVREMKVMTNNPAHYVGLKGYGLSISGKVPLITTP

SEQ ID NO: 38714 - protein, 433 aa, Arabidopsis thaliana
  peptide (1)..(433): Ceres Seq. ID no. 12328997
MRVIPEEGDVFSSSKSNGSSMGIELQPDLVSFGTLAAEMIPTTMDSPEVEDEEFDLDRPTDGFASIPQAIEDIRHGKMVVVVDDEDRENEGDLIMAASLATPEAMAFVVKHGTGIVCVSMKGEDLERLELPLMVTRKDNEEKLRTAFTVSVDAKKGTSTGVSARDRAQTILTLASKDSKPEDFNRPGHIFPLRYREGGVLKRAGHTEASVDLTVLSGLEPVSVLCEIVDDDGSMARLPRLRQFAQENNLKLISIADLIRYRRKRERLVEFTAVAPIPTMWGPFKAHCFKSLLDGVEHIAMVKGEIGDGKDILVRVHAECITDDIFGNSSGGKQLAIAMRLIEENGRGVFVYLRGPESKGIDLSHKPRTYNTNSDQAEGVSFPVASREYGIGAQILRDLGVREMKVMTNNPAHYVGLKGYGLSISGKVPLITTP

SEQ ID NO: 38715 - DNA, 1066 bp, Arabidopsis thaliana
  misc_feature (1)..(1066): Ceres Seq. ID no. 13497453
  misc_feature (1)..(1066): Ortholog of  Ceres SEQ ID NO 14304608 as cited in SEQ ID NO 53283
aacgtctgatctctgatcttccgttttaaaacgacatcaaggtgttactgtccaatttcagattgggttagaacatcttgtaatatctacaaacttgagggtgttttacacgaatatttcttaattaagaggcttaacgttggcgtttttgacgaaaatggagcaaccaatgtcgccgggaacgaagtcggtggatctccgagaatgcatggaatcacttctccgttttagtctgagatctcatttaaacgaatctgttccaagtttcgatcttgacctgaccagagatttttgtcttcatctccttggggaagctacagattcaacagaaaaatctgcggtgtacaagcttctagcaacggctttgtctgaatgtctagcttccgagggtgataaaaattctaacttggaaaaatacagcaaactgattcatggcttgggatatgacttaataaatatgttgaaggaggtgaactttgagcttcatgtccaagagccttacttcacccaattgaaagatggtttgaaaactgttgaaggaagatgcgcagtgggagactacatgagaattagttcaggagattttcttttgttcaataaatgcttgctgcttgaagttcaggacgttcaccgttatacttcattctcagaaatgctgaaagtggagggtcttgccaaagttcttcctggagttgaaagtatagaagaaggtgttcaagtttaccgaaacttttattctgaagagaaggaaagaatgaacggtgttgtagctattcgtgttgcaaaaccagctaatcagccttctgcagctttggcaggagtattgtctgaactgaagtccagtgggatcaaaagcctgttggatgaatacacagctggggttacctcgtagctgcatctgaaaacctttgtgcgcagagaaactactcaatttgaagggttttgatttctctacactcggatgatgttaaatttgtgtttgtttgtgtgtacgagtagctaaatcacagaagatcacatcttttcttacttattgagcacctcacaaggcaacaaaacatttttc

SEQ ID NO: 38716 - protein, 244 aa, Arabidopsis thaliana
  peptide (1)..(244): Ceres Seq. ID no. 13497454
MEQPMSPGTKSVDLRECMESLLRFSLRSHLNESVPSFDLDLTRDFCLHLLGEATDSTEKSAVYKLLATALSECLASEGDKNSNLEKYSKLIHGLGYDLINMLKEVNFELHVQEPYFTQLKDGLKTVEGRCAVGDYMRISSGDFLLFNKCLLLEVQDVHRYTSFSEMLKVEGLAKVLPGVESIEEGVQVYRNFYSEEKERMNGVVAIRVAKPANQPSAALAGVLSELKSSGIKSLLDEYTAGVTS

SEQ ID NO: 38717 - protein, 240 aa, Arabidopsis thaliana
  peptide (1)..(240): Ceres Seq. ID no. 13497455
MSPGTKSVDLRECMESLLRFSLRSHLNESVPSFDLDLTRDFCLHLLGEATDSTEKSAVYKLLATALSECLASEGDKNSNLEKYSKLIHGLGYDLINMLKEVNFELHVQEPYFTQLKDGLKTVEGRCAVGDYMRISSGDFLLFNKCLLLEVQDVHRYTSFSEMLKVEGLAKVLPGVESIEEGVQVYRNFYSEEKERMNGVVAIRVAKPANQPSAALAGVLSELKSSGIKSLLDEYTAGVTS

SEQ ID NO: 38718 - protein, 227 aa, Arabidopsis thaliana
  peptide (1)..(227): Ceres Seq. ID no. 13497456
MESLLRFSLRSHLNESVPSFDLDLTRDFCLHLLGEATDSTEKSAVYKLLATALSECLASEGDKNSNLEKYSKLIHGLGYDLINMLKEVNFELHVQEPYFTQLKDGLKTVEGRCAVGDYMRISSGDFLLFNKCLLLEVQDVHRYTSFSEMLKVEGLAKVLPGVESIEEGVQVYRNFYSEEKERMNGVVAIRVAKPANQPSAALAGVLSELKSSGIKSLLDEYTAGVTS

SEQ ID NO: 38719 - DNA, 1636 bp, Arabidopsis thaliana
  misc_feature (1)..(1636): Ceres Seq. ID no. 12371490
  misc_feature (1)..(1636): Ortholog of  Ceres SEQ ID NO 13659033 as cited in SEQ ID NO 66372
  misc_feature (1)..(1636): Ortholog of  Ceres SEQ ID NO 13655724 as cited in SEQ ID NO 68973
  misc_feature (1)..(1636): Ortholog of  Ceres SEQ ID NO 12625899 as cited in SEQ ID NO 69079
aagggatgcaatagagccaagaggaggagaaagatgggatctggtaaacaaaacacgtcaaagtcaaattacaaatttatattttataaaacagataacaacaacaaattaaacttttattaatctctctctgcctctactcactggatcatcatagctccaaacttgtaccagtcgcatcaaagcaagttttggtgaagaagaagagacgaggtcttcctcttactgtggtggtgacattttctctaaaaagaaagtctccgatatgtcgcagagatggagtagaaagaagagtagacttccattagcgggtctcctctttattctcgttgtcacctttatgattctcttcaacgagcgtagcattcagcagatccatcaccacgccgcgagtcacactcaaaatctccgagaaccttccacgttcgatttcgtcaagcctaatgttcctcggattaactacttgggagctcatgaggttttggatagattcagcaaatgcaactcgacgaaagagtacagtgggaagaaaatcggatgggttgacccgtttgaagaccacccgggtcaagtaacaaaggaggagcagaaatgtgatgtcttttctgggaaatgggtctttgataattcatcatcataccctttacacaaggaatctcagtgtccttacatgtccgaccagttggcttgtcagaagcatggtaggaaggatttggagtatcagcattggagatggcaacctcatgcctgcaacttgaagagatggaatgcgatagaaatgtgggagaagctgagaggaaagagattgatgtttgttggagactcgttaaacagaggccaatggatttcaatggtttgtctcttacagtctgtcattccacgtgacaagcagtctatgtctcctaacgctcacctcaccattttcagggctgaggactacaatgccacagtggagtttctctgggcaccgttgctcgtggagtcgaattctgatgaccctgttaatcacagattgagcgagcggattatccgacccgattctgttcttaaacatgcatcaaagtggcaacatgctgatattctaatcttcaacacctacttatggtggagacaagactctgtcaagctccgatggagcagtgaagaaaaagggtcatgcgaggaggtgaagagcgccgagggaatggagatggcaatggatagttggggtgattgggttgctaacaatgtcgatccaaacaaaaagcgagttttcttcgttacaatgtctcctacacatcaatggagccgagaatggaacccgggaagcgaaggaaactgctacggggagaagaaaccaatagaggaagagagttattggggaagtgggtcggacattccgacaatgaggatggtgaagagagttttggagagattgggaccaaaggtctcagttataaacatcactcagttgtctgagtatcgaaaagatggtcatccatcggtgtaccggaaattctgggaacctctaaatgaagaccggttgaaaaacccggcatcgtattctgactgtactcattggtgtgtacctggagttcctgatgtctggaatcaattgcttttccattttttgtgaaaatgaaatgaatataacctt

SEQ ID NO: 38720 - protein, 449 aa, Arabidopsis thaliana
  peptide (1)..(449): Ceres Seq. ID no. 12371491
MSQRWSRKKSRLPLAGLLFILVVTFMILFNERSIQQIHHHAASHTQNLREPSTFDFVKPNVPRINYLGAHEVLDRFSKCNSTKEYSGKKIGWVDPFEDHPGQVTKEEQKCDVFSGKWVFDNSSSYPLHKESQCPYMSDQLACQKHGRKDLEYQHWRWQPHACNLKRWNAIEMWEKLRGKRLMFVGDSLNRGQWISMVCLLQSVIPRDKQSMSPNAHLTIFRAEDYNATVEFLWAPLLVESNSDDPVNHRLSERIIRPDSVLKHASKWQHADILIFNTYLWWRQDSVKLRWSSEEKGSCEEVKSAEGMEMAMDSWGDWVANNVDPNKKRVFFVTMSPTHQWSREWNPGSEGNCYGEKKPIEEESYWGSGSDIPTMRMVKRVLERLGPKVSVINITQLSEYRKDGHPSVYRKFWEPLNEDRLKNPASYSDCTHWCVPGVPDVWNQLLFHFL

SEQ ID NO: 38721 - protein, 424 aa, Arabidopsis thaliana
  peptide (1)..(424): Ceres Seq. ID no. 12371492
MILFNERSIQQIHHHAASHTQNLREPSTFDFVKPNVPRINYLGAHEVLDRFSKCNSTKEYSGKKIGWVDPFEDHPGQVTKEEQKCDVFSGKWVFDNSSSYPLHKESQCPYMSDQLACQKHGRKDLEYQHWRWQPHACNLKRWNAIEMWEKLRGKRLMFVGDSLNRGQWISMVCLLQSVIPRDKQSMSPNAHLTIFRAEDYNATVEFLWAPLLVESNSDDPVNHRLSERIIRPDSVLKHASKWQHADILIFNTYLWWRQDSVKLRWSSEEKGSCEEVKSAEGMEMAMDSWGDWVANNVDPNKKRVFFVTMSPTHQWSREWNPGSEGNCYGEKKPIEEESYWGSGSDIPTMRMVKRVLERLGPKVSVINITQLSEYRKDGHPSVYRKFWEPLNEDRLKNPASYSDCTHWCVPGVPDVWNQLLFHFL

SEQ ID NO: 38722 - protein, 314 aa, Arabidopsis thaliana
  peptide (1)..(314): Ceres Seq. ID no. 12371493
MSDQLACQKHGRKDLEYQHWRWQPHACNLKRWNAIEMWEKLRGKRLMFVGDSLNRGQWISMVCLLQSVIPRDKQSMSPNAHLTIFRAEDYNATVEFLWAPLLVESNSDDPVNHRLSERIIRPDSVLKHASKWQHADILIFNTYLWWRQDSVKLRWSSEEKGSCEEVKSAEGMEMAMDSWGDWVANNVDPNKKRVFFVTMSPTHQWSREWNPGSEGNCYGEKKPIEEESYWGSGSDIPTMRMVKRVLERLGPKVSVINITQLSEYRKDGHPSVYRKFWEPLNEDRLKNPASYSDCTHWCVPGVPDVWNQLLFHFL

SEQ ID NO: 38723 - DNA, 1885 bp, Arabidopsis thaliana
  misc_feature (1)..(1885): Ceres Seq. ID no. 12482192
  misc_feature (1)..(1885): Ortholog of  Ceres SEQ ID NO 13595870 as cited in SEQ ID NO 62101
  misc_feature (1)..(1885): Ortholog of  Ceres SEQ ID NO 13590241 as cited in SEQ ID NO 63878
  misc_feature (1)..(1885): Ortholog of  Ceres SEQ ID NO 13657939 as cited in SEQ ID NO 66349
ggtgatctctgtgctccggcgcataaacccctgtaaagccaataacttgttgttccccaaagtttggttcttcatgttggaaaccgaaagcagtgtctgcgacaacatcgccggcaatgagaaatggcgagcggaagctgaaattggtggcaacgagagagctctgcaagcgcttcgagaactcattatcttcccttttcgttaccctctcgaagctcgaactcttggtctcaaatggcctagaggattgcttctctacggtcctcctggaaccggcaagacaagcttggtccgtgctgttgtccaggaatgtgatgcacatttgattgttttaagccctcattctgtacatcgagcacatgctggagaaagcgagaaagtcttaagggaagctttcgctgaggcttcttctcacgctgtttcagacaagccttctgtgatttttattgatgaaatcgatgttctttgtcctcgtcgtgatgctagacgagaacaagatgttcgtattgcttctcaactgtttacacttatggactcaaacaagccttcatcatctgcaccaagagttgttgttgtagcatccacaaatagggtggatgcgattgacccagcgctaagaagagcgggacgatttgatgctttagttgaagtgagcacaccaaatgaggaggatcgtttaaaaatcctgcagctgtacacaaagaaagtcaatttagatcctagtgtcgatcttcaagccattgcaatatcttgcaacggttatgttggagcagatttggaagctttatgtcgtgaagcgacaatatctgcaagtaaaagatcttcagattctcttattctaacatctcaagacttcaagattgcaaaatctgtggttggtccaagtataaacagaggcatcacagttgaaatccctaaagtgacatgggacgatgttggtggtcttaaagacttaaagaaaaagctccagcaagctgttgaatggccaatcaaacattcagctgcatttgtaaaaatgggcatatcgccaatgcgtgggatacttctacatggtcctccaggttgctcaaagacaactcttgctaaagccgctgcaaatgctgctcaagcctccttcttttccttaagctgtgcggagctattttctatgtatgttggagaaggtgaagcattattgcggaatacatttcaaagagctcgacttgcttctccaagtataatattctttgatgaagctgatgtcgttgcctgtaaaagaggtgatgagagctcaagcaatagttctacagttggagaaaggcttctatctacactgttaaccgaaatggacggtcttgaagaagcaaagggaatcctcgtcttggctgccacaaaccgcccgtatgcaattgatgctgctctaatgcgacctggtcgatttgatctcgtgctatacgtgccaccgcctgatctagaagcccggtttgaaatactgcaagtgcatacacgcaacatgacactaggagacgacgttgatctcagaaaaatcgctgaagaaaccgatctcttcacaggtgccgagctcgagggtctatgcagagaaagcggaactgtctcacttagagaaaacatcgcagcaaccgctgtcttcaatcgccatttccaaaccgcaaaaagctcgcttaaaccagcgttaacaatcgaagaagtcgaaacttattcatcattcaggaaggcggcgaaaagatctgattcgaaaccgattccgattaacaaaaagaaggcgacttccaccgtcttcggattctcatggcaattaggtgttttgagcttattgttgcttgctactggaaactattacttcaaccacactaaacatgaattactagtagcttctgctacatga

SEQ ID NO: 38724 - protein, 627 aa, Arabidopsis thaliana
  peptide (1)..(627): Ceres Seq. ID no. 12482193
VISVLRRINPCKANNLLFPKVWFFMLETESSVCDNIAGNEKWRAEAEIGGNERALQALRELIIFPFRYPLEARTLGLKWPRGLLLYGPPGTGKTSLVRAVVQECDAHLIVLSPHSVHRAHAGESEKVLREAFAEASSHAVSDKPSVIFIDEIDVLCPRRDARREQDVRIASQLFTLMDSNKPSSSAPRVVVVASTNRVDAIDPALRRAGRFDALVEVSTPNEEDRLKILQLYTKKVNLDPSVDLQAIAISCNGYVGADLEALCREATISASKRSSDSLILTSQDFKIAKSVVGPSINRGITVEIPKVTWDDVGGLKDLKKKLQQAVEWPIKHSAAFVKMGISPMRGILLHGPPGCSKTTLAKAAANAAQASFFSLSCAELFSMYVGEGEALLRNTFQRARLASPSIIFFDEADVVACKRGDESSSNSSTVGERLLSTLLTEMDGLEEAKGILVLAATNRPYAIDAALMRPGRFDLVLYVPPPDLEARFEILQVHTRNMTLGDDVDLRKIAEETDLFTGAELEGLCRESGTVSLRENIAATAVFNRHFQTAKSSLKPALTIEEVETYSSFRKAAKRSDSKPIPINKKKATSTVFGFSWQLGVLSLLLLATGNYYFNHTKHELLVASAT

SEQ ID NO: 38725 - protein, 603 aa, Arabidopsis thaliana
  peptide (1)..(603): Ceres Seq. ID no. 12482194
MLETESSVCDNIAGNEKWRAEAEIGGNERALQALRELIIFPFRYPLEARTLGLKWPRGLLLYGPPGTGKTSLVRAVVQECDAHLIVLSPHSVHRAHAGESEKVLREAFAEASSHAVSDKPSVIFIDEIDVLCPRRDARREQDVRIASQLFTLMDSNKPSSSAPRVVVVASTNRVDAIDPALRRAGRFDALVEVSTPNEEDRLKILQLYTKKVNLDPSVDLQAIAISCNGYVGADLEALCREATISASKRSSDSLILTSQDFKIAKSVVGPSINRGITVEIPKVTWDDVGGLKDLKKKLQQAVEWPIKHSAAFVKMGISPMRGILLHGPPGCSKTTLAKAAANAAQASFFSLSCAELFSMYVGEGEALLRNTFQRARLASPSIIFFDEADVVACKRGDESSSNSSTVGERLLSTLLTEMDGLEEAKGILVLAATNRPYAIDAALMRPGRFDLVLYVPPPDLEARFEILQVHTRNMTLGDDVDLRKIAEETDLFTGAELEGLCRESGTVSLRENIAATAVFNRHFQTAKSSLKPALTIEEVETYSSFRKAAKRSDSKPIPINKKKATSTVFGFSWQLGVLSLLLLATGNYYFNHTKHELLVASAT

SEQ ID NO: 38726 - protein, 451 aa, Arabidopsis thaliana
  peptide (1)..(451): Ceres Seq. ID no. 12482195
MDSNKPSSSAPRVVVVASTNRVDAIDPALRRAGRFDALVEVSTPNEEDRLKILQLYTKKVNLDPSVDLQAIAISCNGYVGADLEALCREATISASKRSSDSLILTSQDFKIAKSVVGPSINRGITVEIPKVTWDDVGGLKDLKKKLQQAVEWPIKHSAAFVKMGISPMRGILLHGPPGCSKTTLAKAAANAAQASFFSLSCAELFSMYVGEGEALLRNTFQRARLASPSIIFFDEADVVACKRGDESSSNSSTVGERLLSTLLTEMDGLEEAKGILVLAATNRPYAIDAALMRPGRFDLVLYVPPPDLEARFEILQVHTRNMTLGDDVDLRKIAEETDLFTGAELEGLCRESGTVSLRENIAATAVFNRHFQTAKSSLKPALTIEEVETYSSFRKAAKRSDSKPIPINKKKATSTVFGFSWQLGVLSLLLLATGNYYFNHTKHELLVASAT

SEQ ID NO: 38727 - DNA, 1208 bp, Arabidopsis thaliana
  misc_feature (1)..(1208): Ceres Seq. ID no. 12422009
  misc_feature (1)..(1208): Ortholog of  Ceres SEQ ID NO 15178317 as cited in SEQ ID NO 52489
  misc_feature (1)..(1208): Ortholog of  Ceres SEQ ID NO 14314415 as cited in SEQ ID NO 57442
aaaaatcgaatcaagcatcttcttctttcacgtacgaaacaaaaagctcagagcagagtcgaatcgcgatgaagcatcgagttcggtgttcatgaaggtcagagagttaagtattagcagaactggttaggtcttagtgacaaacaaggtattcatgttatccatccctgatactagaatgtggaatctagcatcgagttatcttacgggaaacattggaccgaaaaacgatatcagaagaccggtccatgctcatgcggagtgttcagatgacgatgtatcttctgtaggtagtaaagacgaaggtctcgagtgtcctatatgctgggaatcatttaatatagttgaaaacgttccgtatgtgttatggtgtggacatacgatgtgtaaaaactgcattttgggacttcaatgggctattgtgaaattgcctactcacccggttcagcttcctctcttcatttcatgcccctggtgcaaccttttgtctttccgtctggtcttcagaggaacactcagattccctcacaagaactactttgtgctttggatggtcgagaggatgaatggagagagacgtaactcacctggtggagctcaaacagatggaaacaatgatcatacaagggaaactccatctccatgtctccacaatcgccatcatcgcagtcaacctgaaccatcacgttctgttaatgatcatcgcattccaagggacaacatacaaacttcactgaggaagtctctggttttctttgtccagttgacagcaaagttcccattagttgtcatatttctgctgataatactctatgcaataccgaccagtgcagccatattggcgatgtacattctagtcactctcttgctggctctaccgtcgtttctcatcctctacttcgcttatccttgtctcgactggcttgttcgagagattgtcacatgaactttctaaggatgcgttcagaaacttcccattcctaatttgacgacttttcttcaacaactgagacccaagatcggtcagtccttcatgtaagtataacaatttcataattaccgtcttctttatctatatatggatgtagttttggattgcattgttgctctacgaagctggacgtatgtgttgtaagggctcttgcagaaacttattagtatttgtggatttgtttgtgagtgtttgagtgtctcaataagatttatgt

SEQ ID NO: 38728 - protein, 263 aa, Arabidopsis thaliana
  peptide (1)..(263): Ceres Seq. ID no. 12422010
MLSIPDTRMWNLASSYLTGNIGPKNDIRRPVHAHAECSDDDVSSVGSKDEGLECPICWESFNIVENVPYVLWCGHTMCKNCILGLQWAIVKLPTHPVQLPLFISCPWCNLLSFRLVFRGTLRFPHKNYFVLWMVERMNGERRNSPGGAQTDGNNDHTRETPSPCLHNRHHRSQPEPSRSVNDHRIPRDNIQTSLRKSLVFFVQLTAKFPLVVIFLLIILYAIPTSAAILAMYILVTLLLALPSFLILYFAYPCLDWLVREIVT

SEQ ID NO: 38729 - protein, 255 aa, Arabidopsis thaliana
  peptide (1)..(255): Ceres Seq. ID no. 12422011
MWNLASSYLTGNIGPKNDIRRPVHAHAECSDDDVSSVGSKDEGLECPICWESFNIVENVPYVLWCGHTMCKNCILGLQWAIVKLPTHPVQLPLFISCPWCNLLSFRLVFRGTLRFPHKNYFVLWMVERMNGERRNSPGGAQTDGNNDHTRETPSPCLHNRHHRSQPEPSRSVNDHRIPRDNIQTSLRKSLVFFVQLTAKFPLVVIFLLIILYAIPTSAAILAMYILVTLLLALPSFLILYFAYPCLDWLVREIVT

SEQ ID NO: 38730 - protein, 187 aa, Arabidopsis thaliana
  peptide (1)..(187): Ceres Seq. ID no. 12422012
MCKNCILGLQWAIVKLPTHPVQLPLFISCPWCNLLSFRLVFRGTLRFPHKNYFVLWMVERMNGERRNSPGGAQTDGNNDHTRETPSPCLHNRHHRSQPEPSRSVNDHRIPRDNIQTSLRKSLVFFVQLTAKFPLVVIFLLIILYAIPTSAAILAMYILVTLLLALPSFLILYFAYPCLDWLVREIVT

SEQ ID NO: 38731 - DNA, 1563 bp, Arabidopsis thaliana
  misc_feature (1)..(1563): Ceres Seq. ID no. 12329827
  misc_feature (1)..(1563): Ortholog of  Ceres SEQ ID NO 15170670 as cited in SEQ ID NO 68165
aatcatcatccaaaaacattcttctcacaagaatcagattcaagatagaagtttttcaaacaatgtctagtcctcttggtcactttcagattcttgtttttcttcatgctttgcttatcttctcagctgagtcccgcaaaacccaattgctgaacgataatgatgttgaatctagcgacaagagtgcaaaaggcacacgatgggctgttttagttgctggatcaaatgaatattataactacaggcatcaggctgacatatgccacgcgtatcagatactccgaaaaggcggtttaaaagatgaaaacatcattgtgtttatgtatgatgatatcgcgttttcctcggagaatcctaggcctggagttatcattaataaaccagatggagaagatgtttataaaggagttcctaaggactacactaaagaagctgttaatgttcaaaacttctacaatgtgttacttggaaatgaaagtggcgtcacaggaggaaatggcaaagttgtgaaaagtggtcctaatgataatatcttcatctattatgctgaccatggagctcctggcttaatagcgatgcccactggtgatgaagttatggcaaaagatttcaatgaagtcttggagaagatgcataagagaaaaaaatacaacaagatggtgatctatgttgaagcatgtgaatcaggaagtatgtttgaagggattttaaagaaaaatctcaacatatacgcagtgactgctgctaattctaaagagagcagctggggagtttactgtcctgagtcatatcctcctcctccttctgagattggaacttgtctcggcgatacatttagcatctcttggcttgaggacagtgaccttcatgacatgagcaaagagactttggagcaacaataccacgttgtaaagagaagagtaggatctgatgtaccagagacttctcatgtatgccgtttcggaacagagaagatgcttaaagattatctttcctcttacattggaagaaatcctgaaaacgataacttcactttcacggaatccttttcctcaccaatctctaattctggcttggtcaatccgcgcgatattcctctgctatacctccagagaaagattcaaaaagctccaatgggatcacttgaaagcaaagaagctcagaagaaattgcttgacgaaaagaatcataggaaacaaatcgatcagagcattacagacattctgcggctttcagttaaacaaaccaatgtcttaaatctcttaacttccacaagaacaacaggacagcctcttgtagacgattgggattgcttcaagactctagttaatagcttcaagaatcactgcggtgcaacggtgcattacggattgaagtatacaggagcgcttgccaatatctgcaatatgggagtggatgtgaagcaaactgtttcagccattgaacaagcttgttcgatgtaatgatttgcaaaacaatgtgatattcgactttaaaaatatcaaagttaatttcaataaaactcgatgtagagatggttggttcatgatactacttttacat

SEQ ID NO: 38732 - protein, 486 aa, Arabidopsis thaliana
  peptide (1)..(486): Ceres Seq. ID no. 12329828
SSSKNILLTRIRFKIEVFQTMSSPLGHFQILVFLHALLIFSAESRKTQLLNDNDVESSDKSAKGTRWAVLVAGSNEYYNYRHQADICHAYQILRKGGLKDENIIVFMYDDIAFSSENPRPGVIINKPDGEDVYKGVPKDYTKEAVNVQNFYNVLLGNESGVTGGNGKVVKSGPNDNIFIYYADHGAPGLIAMPTGDEVMAKDFNEVLEKMHKRKKYNKMVIYVEACESGSMFEGILKKNLNIYAVTAANSKESSWGVYCPESYPPPPSEIGTCLGDTFSISWLEDSDLHDMSKETLEQQYHVVKRRVGSDVPETSHVCRFGTEKMLKDYLSSYIGRNPENDNFTFTESFSSPISNSGLVNPRDIPLLYLQRKIQKAPMGSLESKEAQKKLLDEKNHRKQIDQSITDILRLSVKQTNVLNLLTSTRTTGQPLVDDWDCFKTLVNSFKNHCGATVHYGLKYTGALANICNMGVDVKQTVSAIEQACSM

SEQ ID NO: 38733 - protein, 466 aa, Arabidopsis thaliana
  peptide (1)..(466): Ceres Seq. ID no. 12329829
MSSPLGHFQILVFLHALLIFSAESRKTQLLNDNDVESSDKSAKGTRWAVLVAGSNEYYNYRHQADICHAYQILRKGGLKDENIIVFMYDDIAFSSENPRPGVIINKPDGEDVYKGVPKDYTKEAVNVQNFYNVLLGNESGVTGGNGKVVKSGPNDNIFIYYADHGAPGLIAMPTGDEVMAKDFNEVLEKMHKRKKYNKMVIYVEACESGSMFEGILKKNLNIYAVTAANSKESSWGVYCPESYPPPPSEIGTCLGDTFSISWLEDSDLHDMSKETLEQQYHVVKRRVGSDVPETSHVCRFGTEKMLKDYLSSYIGRNPENDNFTFTESFSSPISNSGLVNPRDIPLLYLQRKIQKAPMGSLESKEAQKKLLDEKNHRKQIDQSITDILRLSVKQTNVLNLLTSTRTTGQPLVDDWDCFKTLVNSFKNHCGATVHYGLKYTGALANICNMGVDVKQTVSAIEQACSM

SEQ ID NO: 38734 - protein, 380 aa, Arabidopsis thaliana
  peptide (1)..(380): Ceres Seq. ID no. 12329830
MYDDIAFSSENPRPGVIINKPDGEDVYKGVPKDYTKEAVNVQNFYNVLLGNESGVTGGNGKVVKSGPNDNIFIYYADHGAPGLIAMPTGDEVMAKDFNEVLEKMHKRKKYNKMVIYVEACESGSMFEGILKKNLNIYAVTAANSKESSWGVYCPESYPPPPSEIGTCLGDTFSISWLEDSDLHDMSKETLEQQYHVVKRRVGSDVPETSHVCRFGTEKMLKDYLSSYIGRNPENDNFTFTESFSSPISNSGLVNPRDIPLLYLQRKIQKAPMGSLESKEAQKKLLDEKNHRKQIDQSITDILRLSVKQTNVLNLLTSTRTTGQPLVDDWDCFKTLVNSFKNHCGATVHYGLKYTGALANICNMGVDVKQTVSAIEQACSM

SEQ ID NO: 38735 - DNA, 1604 bp, Arabidopsis thaliana
  misc_feature (1)..(1604): Ceres Seq. ID no. 12330926
  misc_feature (1)..(1604): Ortholog of  Ceres SEQ ID NO 14315626 as cited in SEQ ID NO 52943
  misc_feature (1)..(1604): Ortholog of  Ceres SEQ ID NO 13584616 as cited in SEQ ID NO 65234
  misc_feature (1)..(1604): Ortholog of  Ceres SEQ ID NO 14313536 as cited in SEQ ID NO 67925
atctacgacagtcgtaccttttgctaggttatcgtcgtcatgatgcagcagccacctccagcttccaacggtgctgcaacagggccagggcagattccttccgaccaacaagcttacctccagcagcagcagtcgtggatgatgcagcaccagcagcaacaacaaggtcagccgcctgcaggatggaatcagcagtctgcaccgtcttctggtcaaccacagcagcagcagtatggtggtggtggatctcagaatccaggatcagctggtgagatccggtccctgtggatcggtgacttgcagccatggatggatgagaactatctcatgaacgtctttggtcttactggcgaggctacagcagctaaagttattcgcaataaacagaacggatattcagaaggttatggctttattgagtttgtgaaccatgctacagctgagaggaatttacagacttacaatggtgctccgatgccgagcagtgagcaggccttcaggttgaactgggctcagcttggagctggagagagacgccaggctgaagggcctgagcacacagtttttgttggagacttggcacctgatgttaccgaccacatgcttactgaaacgtttaaagctgtgtattcctctgtcaagggagctaaagttgtgaatgataggactactggacggtccaagggttatggatttgtcaggtttgcggatgaaagtgagcagattcgtgccatgactgaaatgaatggtcaatactgctcatcaaggcctatgcgtactggtcctgctgccaacaagaagcctcttacaatgcaaccagcttcatatcagaacactcaaggaaattcaggagaaagtgatccaactaacacaacaatttttgttggagctgtggatcaaagtgtaacagaagatgatttgaagtcagtttttggtcaatttggtgaactagttcatgtgaaaatacccgcaggaaaacgttgcggatttgttcaatacgccaatagggcatgtgctgagcaagcactttctgtgttgaacggaacacaacttgggggacaaagcattcgtctttcatggggtcgcagtccttccaacaaacagactcaacctgatcaagcccagtatggtggtggtggaggatactatgggtatcctcctcaaggatatgaagcatacggatatgcacctcctcctcaggaccctaacgcctactacggtggttatgctgggggcggctatggaaactaccagcagcctggtggataccagcagcaacagcagtgaagcatgatgtgtaagtcgtgatcgagctgaagttgtagaaagctgtaaccgtttgacaatggtgaatgaattattgaagtggatgtgtattagctcttcttgtctcagattctctcttcaactcttttttttttcttttggattatttttctttcgcgtggctattgttgagtgtccttgcaagtcataacaaaaagcttaaacacaagtgttttttttttttttttttgctgtaccatttcttcttgtatcacctatgacttccaattattcagtagtaccctcataatttttcaataatactcgttttgtgatcc

SEQ ID NO: 38736 - protein, 415 aa, Arabidopsis thaliana
  peptide (1)..(415): Ceres Seq. ID no. 12330927
MMQQPPPASNGAATGPGQIPSDQQAYLQQQQSWMMQHQQQQQGQPPAGWNQQSAPSSGQPQQQQYGGGGSQNPGSAGEIRSLWIGDLQPWMDENYLMNVFGLTGEATAAKVIRNKQNGYSEGYGFIEFVNHATAERNLQTYNGAPMPSSEQAFRLNWAQLGAGERRQAEGPEHTVFVGDLAPDVTDHMLTETFKAVYSSVKGAKVVNDRTTGRSKGYGFVRFADESEQIRAMTEMNGQYCSSRPMRTGPAANKKPLTMQPASYQNTQGNSGESDPTNTTIFVGAVDQSVTEDDLKSVFGQFGELVHVKIPAGKRCGFVQYANRACAEQALSVLNGTQLGGQSIRLSWGRSPSNKQTQPDQAQYGGGGGYYGYPPQGYEAYGYAPPPQDPNAYYGGYAGGGYGNYQQPGGYQQQQQ

SEQ ID NO: 38737 - protein, 414 aa, Arabidopsis thaliana
  peptide (1)..(414): Ceres Seq. ID no. 12330928
MQQPPPASNGAATGPGQIPSDQQAYLQQQQSWMMQHQQQQQGQPPAGWNQQSAPSSGQPQQQQYGGGGSQNPGSAGEIRSLWIGDLQPWMDENYLMNVFGLTGEATAAKVIRNKQNGYSEGYGFIEFVNHATAERNLQTYNGAPMPSSEQAFRLNWAQLGAGERRQAEGPEHTVFVGDLAPDVTDHMLTETFKAVYSSVKGAKVVNDRTTGRSKGYGFVRFADESEQIRAMTEMNGQYCSSRPMRTGPAANKKPLTMQPASYQNTQGNSGESDPTNTTIFVGAVDQSVTEDDLKSVFGQFGELVHVKIPAGKRCGFVQYANRACAEQALSVLNGTQLGGQSIRLSWGRSPSNKQTQPDQAQYGGGGGYYGYPPQGYEAYGYAPPPQDPNAYYGGYAGGGYGNYQQPGGYQQQQQ

SEQ ID NO: 38738 - protein, 382 aa, Arabidopsis thaliana
  peptide (1)..(382): Ceres Seq. ID no. 12330929
MMQHQQQQQGQPPAGWNQQSAPSSGQPQQQQYGGGGSQNPGSAGEIRSLWIGDLQPWMDENYLMNVFGLTGEATAAKVIRNKQNGYSEGYGFIEFVNHATAERNLQTYNGAPMPSSEQAFRLNWAQLGAGERRQAEGPEHTVFVGDLAPDVTDHMLTETFKAVYSSVKGAKVVNDRTTGRSKGYGFVRFADESEQIRAMTEMNGQYCSSRPMRTGPAANKKPLTMQPASYQNTQGNSGESDPTNTTIFVGAVDQSVTEDDLKSVFGQFGELVHVKIPAGKRCGFVQYANRACAEQALSVLNGTQLGGQSIRLSWGRSPSNKQTQPDQAQYGGGGGYYGYPPQGYEAYGYAPPPQDPNAYYGGYAGGGYGNYQQPGGYQQQQQ

SEQ ID NO: 38739 - DNA, 2010 bp, Arabidopsis thaliana
  misc_feature (1)..(2010): Ceres Seq. ID no. 12329837
  misc_feature (1)..(2010): Ortholog of  Ceres SEQ ID NO 14304471 as cited in SEQ ID NO 53670
atccgccattacagacgaagaagaatttcaactgcaatctctctctgaaccatgagaggtcacgatcggattaacaattgtttgccggaggaacttatcctcgagatattccggcgacttgaatcgaaaccgaatcgcgacgcatgctccctcgtctgcaagcgatggttatctctcgagcgatttagccgcaccacgcttcgtatcggcgcttcgttttctcccgacgacttcatctccctcctatctcgtcgctttctctatattacctctatccatgtcgacgaacgtatctccgtctcccttccttccctctctccttccccaaaaagaaaacgtgggagggacagttcgtcgccatcgtcgagtaagcggaagaaattgactgataagacacattctggagctgagaacgtcgagtcttccagcttgactgatacgggcttgactgctctagcgaatggatttccaagaatagaaaacttgagcttgatatggtgccctaacgtttcaagtgtgggtttgtgttcccttgctcagaaatgcacttcacttaaatctcttgatttacagggttgctatgttggagatcaaggcttagcagctgttggaaagttttgtaagcaacttgaagaactaaatttgcgcttttgcgaaggcttaactgatgttggagttattgatcttgttgttggttgttccaagtctttaaagtctatcggtgttgctgcgtcagcaaaaataacagatttatctctggaagcagttggttctcactgtaaattactagaagttttgtatttggattctgaatacatccatgataaaggattgatagcggtggctcagggatgccaccgtttgaaaaatctgaagcttcaatgtgttagtgtgacggatgtggcttttgctgcagtgggagagttgtgtacttcgttggagcgattggcattgtatagctttcagcattttactgacaagggcatgcgagccatcggtaaagggtctaagaagttgaaagatcttactttaagtgattgttactttgtgagttgcaaaggtttagaagctattgctcatggttgtaaggaacttgagcgtgtggaaattaacggatgccacaacattggtacacgtggaatagaggcaattggaaaatcttgcccgcgcctcaaagagttagctttgttgtattgccaaaggattggtaattcggctcttcaagaaattggaaaaggctgtaaatccctagaaatacttcacttagtagactgctctggcattggagacatcgctatgtgcagtattgctaaaggctgtcgcaacctcaagaaacttcatatccgcagatgctatgagataggaaacaaaggaattatatctattggaaagcattgcaaatcactaaccgagcttagtctccggttttgcgataaagttggaaataaagcattaatcgccattggaaaaggttgctccttacaacaactaaacgtaagtggttgtaatcaaatcagcgatgctggaataacagcaatcgccagaggctgtcctcaactcactcacctcgacattagtgttcttcagaacattggagacatgccgttggctgagcttggagaaggatgtccaatgctgaaagacttggtcttgtctcattgccaccatataacagacaatggtctgaaccatcttgtacagaagtgcaaacttctggagacttgtcacatggtttactgcccagggatcacttccgctggagtggctacagtcgtctcgagctgtccacacatcaaaaaggtgttgatagagaaatggaaagtgactgagaggacgacaaggagagctggatcggttatctcttatctatgcatggatctctagatcgtaatttcaaggtcagtttctaagatttatgtttatgttttcttaataaaagtaataacttatagtccaaacttatggtgagtcatggttgtttattgtatgtttatgtgaactggttgtacg

SEQ ID NO: 38740 - protein, 610 aa, Arabidopsis thaliana
  peptide (1)..(610): Ceres Seq. ID no. 12329838
MRGHDRINNCLPEELILEIFRRLESKPNRDACSLVCKRWLSLERFSRTTLRIGASFSPDDFISLLSRRFLYITSIHVDERISVSLPSLSPSPKRKRGRDSSSPSSSKRKKLTDKTHSGAENVESSSLTDTGLTALANGFPRIENLSLIWCPNVSSVGLCSLAQKCTSLKSLDLQGCYVGDQGLAAVGKFCKQLEELNLRFCEGLTDVGVIDLVVGCSKSLKSIGVAASAKITDLSLEAVGSHCKLLEVLYLDSEYIHDKGLIAVAQGCHRLKNLKLQCVSVTDVAFAAVGELCTSLERLALYSFQHFTDKGMRAIGKGSKKLKDLTLSDCYFVSCKGLEAIAHGCKELERVEINGCHNIGTRGIEAIGKSCPRLKELALLYCQRIGNSALQEIGKGCKSLEILHLVDCSGIGDIAMCSIAKGCRNLKKLHIRRCYEIGNKGIISIGKHCKSLTELSLRFCDKVGNKALIAIGKGCSLQQLNVSGCNQISDAGITAIARGCPQLTHLDISVLQNIGDMPLAELGEGCPMLKDLVLSHCHHITDNGLNHLVQKCKLLETCHMVYCPGITSAGVATVVSSCPHIKKVLIEKWKVTERTTRRAGSVISYLCMDL

SEQ ID NO: 38741 - DNA, 1831 bp, Arabidopsis thaliana
  misc_feature (1)..(1831): Ceres Seq. ID no. 13489239
  misc_feature (1)..(1831): Ortholog of  Ceres SEQ ID NO 13503610 as cited in SEQ ID NO 62416
  misc_feature (1)..(1831): Ortholog of  Ceres SEQ ID NO 13657610 as cited in SEQ ID NO 66165
  misc_feature (1)..(1831): Ortholog of  Ceres SEQ ID NO 13598312 as cited in SEQ ID NO 68448
  misc_feature (1)..(1831): Ortholog of  Ceres SEQ ID NO 13596100 as cited in SEQ ID NO 68573
tgaggccattctcttttctcctctctctctctctcacacaacacaaacaactcttgagagagagaaacaaatctttcacttgacacttctctccaaatcctcatctcattcttcatcctaaacatttgctcattctcacgatgagccataaccaaaaccaacctcaccggccagtcccggtccatgtcacaaacgccgagccaaaccctaacccaaacaacctcccaaactttctattatccgtccgtctcaaatacgtaaaactcggttaccactacctaatctccaacgctctctacatcctcctccttcctctcctcgccgcaacaatcgctaacctctcttctttcaccatcaacgacctctctctcctctacaacacactccgtttccatttcctctccgccacactcgccaccgcactcttaatctctctctccaccgcttacttcaccacccgtccccgccgtgtcttcctcctcgacttctcgtgttacaaaccagacccttcactgatctgcactcgtgaaacattcatggacagatctcaacgtgtaggcatcttcacagaagacaacttagctttccaacaaaagatcctcgaaagatccggtctaggtcagaaaacttacttccctgaagctcttcttcgtgttcctcctaatccttgtatggaagaagcgagaaaagaggcagaaacagttatgttcggagctattgacgcggttcttgagaagaccggtgtgaaacctaaagatattggaatccttgtggtgaattgtagcttgtttaatccaacaccgtcactttctgctatgattgtgaataagtataagcttagaggcaacattttgagctataatcttggtggaatgggatgtagtgctggccttatctccattgatctcgctaaacagatgcttcaggtgcaaccaaactcatacgcactagtggtgagcacagagaacataaccctaaactggtacttaggcaacgaccgatcaatgcttctatctaactgtatcttccgtatgggcggagccgcggtacttctctcgaaccgctcctctgatcgcagccgttcaaaatatcagctcatccataccgtccgtacccacaaaggagctgatgacaacgcatttggctgtgtttaccaacgagaagacaacaacgcagaagaaaccggcaaaatcggagtgtccctctctaaaaacctaatggcgatagctggagaagctctcaagacaaacatcacaactctcggaccactagttctaccaatgtccgaacaacttctctttttcgcgactcttgtggcccgaaaagtcttcaaagtcaagaaaataaagccttacattcctgatttcaagctagctttcgagcatttctgtatccacgcgggaggtagagccgtgctcgacgagattgagaagaacttggatttatccgaatggcacatggagccatcgaggatgacgttgaaccggtttggtaacacttcgagtagctcactttggtatgagcttgcgtatagtgaagctaaaggaaggattaagagaggagataggacttggcagattgcttttggatcgggttttaagtgtaatagtgcagtttggaaagctttgagaacgattgatccaatggacgagaagactaatccatggattgatgagattgatgactttcctgttcaagttcctaggatcactcccattacatcgtcgtagtgttttaaattcttttggagaactaatttgttatgttttattaaatgtaataacttacgtgatttgatatttttttattatcttaatatatatgattgccg

SEQ ID NO: 38742 - protein, 529 aa, Arabidopsis thaliana [sequence omitted]

SEQ ID NO: 38743 - protein, 397 aa, Arabidopsis thaliana; identical to SEQ ID NO: 30634
  peptide (1)..(397): Ceres Seq. ID no. 13489241

SEQ ID NO: 38744 - protein, 352 aa, Arabidopsis thaliana; identical to SEQ ID NO: 30635
  peptide (1)..(352): Ceres Seq. ID no. 13489242

SEQ ID NO: 38745 - DNA, 1688 bp, Arabidopsis thaliana
  misc_feature (1)..(1688): Ceres Seq. ID no. 12395594
  misc_feature (1)..(1688): Ortholog of  Ceres SEQ ID NO 14307863 as cited in SEQ ID NO 20504
ataaacctaatttgccaacgaagttaaaccaaaaaaagaagatctcactctcaccgccttcatttcctcgatctccgtcttcctccttctccgtctgtcgcagagcatcgctcgaattagggtttctgctgagagaagatgagggaaattattagcattcatatcggacaagccgggatccaagtcggaaattcctgctgggagctttactgtctcgaacatggaatccagcccgacggaatgatgccgagtgatactacagttggtgttgcacacgatgcgttcaatactttctttagcgagactggagctgggaagcatgttcctagggctgtcttcgttgatctcgagcctaccgttatcgacgaagttcgtactggtacttaccgtcaacttttccatccagagcagctcatttctgggaaagaagatgctgctaacaacttcgctagaggacattacactgttggaaaggaaattgtggatctatgtcttgaccgtgtgaggaagcttgccgacaactgtactggcttacaagggtttttggtgttcaatgctgttggtggtggaactggttctggattgggttctctgttgctagagcgtttgtctgtagattacggaaagaagtctaagcttggttttaccatatacccttctcctcaggtttctactgctgttgtagagccttacaacagtgtgctttcaacgcattcccttcttgaacataccgatgtagctgtcctcttggataacgaagccatctatgacatttgccgcagatccctagatatcgagaggccaacctacacaaacttgaacaggttgatatcacagatcatttcatccttgacaacatctttgaggtttgatggtgccatcaacgtggatatcactgagttccagaccaatcttgtcccatatccccgtatccatttcatgctgtcatcttatgcaccagtcatctcagccgccaaggcttaccacgagcagctatcagtccctgagatcaccaatgccgtgtttgagccagcgagcatgatggcaaagtgtgacccaaggcacggaaagtacatggcatgttgtttgatgtaccgaggagatgttgttcccaaagatgttaatgctgccgttggcaccatcaagacaaagaggactgttcagtttgttgactggtgcccaactgggttcaaatgtggaatcaactaccaacctccaacagttgttccaggtggtgacctcgctaaggttcagagagctgtatgcatgatcagtaacaacacagcagttgcagaggtgttctcacggatcgaccacaagtttgatctcatgtatgcgaagagggcattcgtgcactggtacgttggtgaaggaatggaggaaggtgaattctctgaggcacgtgaagacttggccgcactggagaaagactacgaagaagttggtgctgaaggtggagacgatgaagaagatgaaggtgaagactattgacaccttttctcaagcaatgtgctaccaaaaagttttttcgtttatctgttttcattaatgattcttgttgattacatgtttgttttaatcctgtacaatattcgatcctccttcgtgtttcatctcggttagatacattttcattggtagagcgaccattggggaagatcccgagttcattatcaagcttttgttgt

SEQ ID NO: 38746 - protein, 450 aa, Arabidopsis thaliana
  peptide (1)..(450): Ceres Seq. ID no. 12395595
MREIISIHIGQAGIQVGNSCWELYCLEHGIQPDGMMPSDTTVGVAHDAFNTFFSETGAGKHVPRAVFVDLEPTVIDEVRTGTYRQLFHPEQLISGKEDAANNFARGHYTVGKEIVDLCLDRVRKLADNCTGLQGFLVFNAVGGGTGSGLGSLLLERLSVDYGKKSKLGFTIYPSPQVSTAVVEPYNSVLSTHSLLEHTDVAVLLDNEAIYDICRRSLDIERPTYTNLNRLISQIISSLTTSLRFDGAINVDITEFQTNLVPYPRIHFMLSSYAPVISAAKAYHEQLSVPEITNAVFEPASMMAKCDPRHGKYMACCLMYRGDVVPKDVNAAVGTIKTKRTVQFVDWCPTGFKCGINYQPPTVVPGGDLAKVQRAVCMISNNTAVAEVFSRIDHKFDLMYAKRAFVHWYVGEGMEEGEFSEAREDLAALEKDYEEVGAEGGDDEEDEGEDY

SEQ ID NO: 38747 - protein, 416 aa, Arabidopsis thaliana
  peptide (1)..(416): Ceres Seq. ID no. 12395596
MMPSDTTVGVAHDAFNTFFSETGAGKHVPRAVFVDLEPTVIDEVRTGTYRQLFHPEQLISGKEDAANNFARGHYTVGKEIVDLCLDRVRKLADNCTGLQGFLVFNAVGGGTGSGLGSLLLERLSVDYGKKSKLGFTIYPSPQVSTAVVEPYNSVLSTHSLLEHTDVAVLLDNEAIYDICRRSLDIERPTYTNLNRLISQIISSLTTSLRFDGAINVDITEFQTNLVPYPRIHFMLSSYAPVISAAKAYHEQLSVPEITNAVFEPASMMAKCDPRHGKYMACCLMYRGDVVPKDVNAAVGTIKTKRTVQFVDWCPTGFKCGINYQPPTVVPGGDLAKVQRAVCMISNNTAVAEVFSRIDHKFDLMYAKRAFVHWYVGEGMEEGEFSEAREDLAALEKDYEEVGAEGGDDEEDEGEDY

SEQ ID NO: 38748 - protein, 415 aa, Arabidopsis thaliana
  peptide (1)..(415): Ceres Seq. ID no. 12395597
MPSDTTVGVAHDAFNTFFSETGAGKHVPRAVFVDLEPTVIDEVRTGTYRQLFHPEQLISGKEDAANNFARGHYTVGKEIVDLCLDRVRKLADNCTGLQGFLVFNAVGGGTGSGLGSLLLERLSVDYGKKSKLGFTIYPSPQVSTAVVEPYNSVLSTHSLLEHTDVAVLLDNEAIYDICRRSLDIERPTYTNLNRLISQIISSLTTSLRFDGAINVDITEFQTNLVPYPRIHFMLSSYAPVISAAKAYHEQLSVPEITNAVFEPASMMAKCDPRHGKYMACCLMYRGDVVPKDVNAAVGTIKTKRTVQFVDWCPTGFKCGINYQPPTVVPGGDLAKVQRAVCMISNNTAVAEVFSRIDHKFDLMYAKRAFVHWYVGEGMEEGEFSEAREDLAALEKDYEEVGAEGGDDEEDEGEDY

SEQ ID NO: 38749 - DNA, 1154 bp, Arabidopsis thaliana
  misc_feature (1)..(1154): Ceres Seq. ID no. 12327520
  misc_feature (1)..(1154): Ortholog of  Ceres SEQ ID NO 12635696 as cited in SEQ ID NO 0
aatacctttgatatttgcctgcacgtccccaaacaagtagagaataataatcacatcaagattgattaaaaccctctcactaatcaccttcttaatcaccaccctctccggctctcaacagaacaacaacaaaaaaacagcttccgttgtcctgttccggcgaaatcggacggtcgagatcaatcatgcatcgtagagcagcaattcaagaatcggatgacgaagaagatgagacttacaacgacgtcgttcctgaatctccttcttcttgtgaagactcaaagatctcaaaaccaactccaaagaaaagtaggaggaacgtagagaagagagttgtctcagttccgatagctgacgtggaaggatctaagagcagaggcgaagtatatccaccgtccgattcatgggcctggagaaagtacggacaaaaaccgatcaaaggctcgccttatcccaggggatattacagatgtagtagctcaaaaggatgtccggcgaggaagcaggtggagagaagccgtgtggacccttctaagcttatgattacttacgcctgcgaccacaatcaccctttcccttcctcctccgctaacaccaaatcccaccaccgctcctccgtcgtcctcaaaaccgcaaagaaagaggaagaatacgaagaggaggaagaagaactaaccgtcaccgccgcagaggaaccaccggcgggacttgatctaagccacgtagactcaccgttgctattaggcggctgctacagcgaaatcggagagttcgggtggttctacgacgcgtcgatctcatcatcatctggttcttcgaatttcctcgacgtaactctagagagaggtttttcagtaggccaagaggaagatgagtctttgttcggtgatctcggtgatttacctgattgcgcctccgtgttccgccgtgggactgttgcgacggaggagcaacatcgaagatgtgattttggcgccattcctttctgtgatagttctagatgagtttgtgtgtgtagccaaaaccaaaagaaaaaaacacaatttttttattttccactgtaaaggtgtatcaatggtggattcatttttttaaaaaaggaaacccaaataataaatttaatatcatttgagagaattcaagtacaattaaag

SEQ ID NO: 38750 - protein, 272 aa, Arabidopsis thaliana
  peptide (1)..(272): Ceres Seq. ID no. 12327521
MHRRAAIQESDDEEDETYNDVVPESPSSCEDSKISKPTPKKSRRNVEKRVVSVPIADVEGSKSRGEVYPPSDSWAWRKYGQKPIKGSPYPRGYYRCSSSKGCPARKQVERSRVDPSKLMITYACDHNHPFPSSSANTKSHHRSSVVLKTAKKEEEYEEEEEELTVTAAEEPPAGLDLSHVDSPLLLGGCYSEIGEFGWFYDASISSSSGSSNFLDVTLERGFSVGQEEDESLFGDLGDLPDCASVFRRGTVATEEQHRRCDFGAIPFCDSSR

SEQ ID NO: 38751 - protein, 154 aa, Arabidopsis thaliana
  peptide (1)..(154): Ceres Seq. ID no. 12327522
MITYACDHNHPFPSSSANTKSHHRSSVVLKTAKKEEEYEEEEEELTVTAAEEPPAGLDLSHVDSPLLLGGCYSEIGEFGWFYDASISSSSGSSNFLDVTLERGFSVGQEEDESLFGDLGDLPDCASVFRRGTVATEEQHRRCDFGAIPFCDSSR

SEQ ID NO: 38752 - DNA, 1448 bp, Arabidopsis thaliana
  misc_feature (1)..(1448): Ceres Seq. ID no. 12559926
  misc_feature (1)..(1448): Ortholog of  Ceres SEQ ID NO 15168484 as cited in SEQ ID NO 57034
agagacacaaaaagggttttgagtattgaccttcttctctcggccgctcgctgaggtttatcaagtgagagccttttctttcggagttttcaacgcaattcttcagagaagcagaagagatgttgtacattatagggttaggtttaggagatgaaaaagatataaccttgagaggactcgaggctgttaagaaatcacagaaagtatacatggaagcttacacttctcttttgtcctttggtctctctgctgatggactttccaatcttgaaaagttctatgggaaaccaattatacttgctgatagagaaatggtggaagaaaaggctggtgatatgattgatgaagccattgataatgatgtcgcttttctcgttgttggtgatcctttcggagctacaacgcatagtgatcttgttgttcgagctaagacactcggtgtaaaagtagaggtagtgcacaatgcatcggtgatgaatgctgttgggatttgtggattgcagctttaccattatggagagactgtttcgatcccattctttaccgagacttggagacctgatagtttttatgagaagatcaagaagaaccgctctcttggacttcacactctctgtttgctagatatccgagtgaaggagcctacttttgaatctctatgcagaggagggaagaaacagtatgaaccgccgaggtatatgagtgttaatacagcaatcgagcagcttctggaagttgagcaaaagcatggagattctgtttatggtgaagacacacagtgtgtgggctttgcccggcttggctctgaggaccagacgatagttgcagggacgatgaagcaactcgaaagcgttgattttggagcaccgttgcattgtcttgtgatagtaggcgagactcatcccgtggaagaagagatgttagagttttacaaatacaaaagtggaaactaaaagaccacaaaactaaagaagactcttcttatcattactcgcaaagcttcaaggcagagcaggaggaggaagagattgaaactaggaactgataggtgaaatactcttcttcatctctattgactttcgaggttttggtagtgaattttgtataagcatagttatggtgtgacttcgaattggaaaggtggatattgaaatattcatttggctatagattgaggtggattttgtatcaaagctttgtttcagagataattttattttggcttggtttggtttggtttgaggatttgaaaccaaactagaggtcgtttcggtttgtttttgttcggtctggttcttgagggttgattacccttcaaaagatcattgtttagtttatgattgtctccttaaaccaccacacgtccaaagattgtattttattattgcccctaagttagaactgagaaaactttgtaacgttcaaatataatgatgtttatagaaatg

SEQ ID NO: 38753 - protein, 277 aa, Arabidopsis thaliana
  peptide (1)..(277): Ceres Seq. ID no. 12559927
MLYIIGLGLGDEKDITLRGLEAVKKSQKVYMEAYTSLLSFGLSADGLSNLEKFYGKPIILADREMVEEKAGDMIDEAIDNDVAFLVVGDPFGATTHSDLVVRAKTLGVKVEVVHNASVMNAVGICGLQLYHYGETVSIPFFTETWRPDSFYEKIKKNRSLGLHTLCLLDIRVKEPTFESLCRGGKKQYEPPRYMSVNTAIEQLLEVEQKHGDSVYGEDTQCVGFARLGSEDQTIVAGTMKQLESVDFGAPLHCLVIVGETHPVEEEMLEFYKYKSGN

SEQ ID NO: 38754 - protein, 247 aa, Arabidopsis thaliana
  peptide (1)..(247): Ceres Seq. ID no. 12559928
MEAYTSLLSFGLSADGLSNLEKFYGKPIILADREMVEEKAGDMIDEAIDNDVAFLVVGDPFGATTHSDLVVRAKTLGVKVEVVHNASVMNAVGICGLQLYHYGETVSIPFFTETWRPDSFYEKIKKNRSLGLHTLCLLDIRVKEPTFESLCRGGKKQYEPPRYMSVNTAIEQLLEVEQKHGDSVYGEDTQCVGFARLGSEDQTIVAGTMKQLESVDFGAPLHCLVIVGETHPVEEEMLEFYKYKSGN

SEQ ID NO: 38755 - protein, 213 aa, Arabidopsis thaliana
  peptide (1)..(213): Ceres Seq. ID no. 12559929
MVEEKAGDMIDEAIDNDVAFLVVGDPFGATTHSDLVVRAKTLGVKVEVVHNASVMNAVGICGLQLYHYGETVSIPFFTETWRPDSFYEKIKKNRSLGLHTLCLLDIRVKEPTFESLCRGGKKQYEPPRYMSVNTAIEQLLEVEQKHGDSVYGEDTQCVGFARLGSEDQTIVAGTMKQLESVDFGAPLHCLVIVGETHPVEEEMLEFYKYKSGN

SEQ ID NO: 38756 - DNA, 2014 bp, Arabidopsis thaliana
  misc_feature (1)..(2014): Ceres Seq. ID no. 13497225
  misc_feature (1)..(2014): Ortholog of  Ceres SEQ ID NO 14312408 as cited in SEQ ID NO 55042
accataggtcaccaaagactttataaataacccatacattatcatatacatataggcatacaaagtgagagaactctactctagattgtgctaaactcaatttgtattaatgatggatagattttggtcatggagattgtttgttgctctctctctttttctccattctccaatttgttcttctgacaaagctccgaactactccttcatgcgggacgcgacaggaagtcctacaacgtcgtactacgactatatcatcatcggtggtgggactgccgggtgccctctagccgcaacgctgtctcaaaacgccagcgttttgctgctcgaacgcggtgactcaccgtacaataaccccaacatcacgaggctctcggctttcggagccgctctctctgacctgtctgagtcctcaccatctcagcgttttgtatcagaagatggtgtcattaatgcacgtgctcgggttctcggtggcggaagcgctctcaacgccggcttctatacacgtgcgggcactaaatacgttaggaacatgggttgggacggagcgctagcgaacgagtcgtaccagtgggttgaagctaaggtggcgtttcagcctccgatggggcggtggcaaacggccgtgagagacggcttattggaggctgggattgtccctaataatggtttcacctatgatcatatcaatggcaccaaatttggcggtactatttttgaccgcaacggcaatagacacaccgccgccgatttgttagagtatgccgatcctaagggtattaccgtccttttgcatgccaccgtccaccggatcttgtttcgtactcgaggtacgaccaagccaatagccaacggagttgtgtaccgagaccggaccggtcaggctcatagagcttacctaaaggaaggcgccttgagtgagatcatcctatcggccggaaccctagggagcccacaacttcttatgctaagtggtgttggcccatcggctcaattacaggcccaaaacatcacggtggtgatggaccagcctcatgtgggtcaaggcatgtatgacaaccctatgaatgccgtgttcgttccttctccagtccccgttgaggtctcactcattgaggttgttgggattaccggggaaggaacatatgtcgaagccgccggtggtgaaaattttggcggaggtggtggtggttctagtggatcgtcctccactagagactactatgcaatgttttcaccaagggcaacattattagagtcaaattcaatgaccaaattatcatcagcccaaccttttcaaggaggcttccttttagagaaagtaatgggcccattatcaacgggtcatttagagctcaagacccgaaacccaaaagataacccgattgtgactttcaactatttccaacatcctgacgacctaaaacgttgtgttcgaggaatccaaaccatagagagagtcgtgcaatctaaagctttttcgaggtataagtacgcagatgtgtcatttgagtatttacttaacctcacggcgagtactcctgtcaatctaaggccgcctcgcagtggtcctggagcctcgttgcctccatccgcagaggaattttgccaacatacagttacaaccatttggcattaccatggaggatgcgttgtgggcagagtggtcgatggggattataaagttattggtatcgaccagcttagagtcattgatatgtcgaccgttggttattgtcccgggacaaatcctcaagccacggttatgatgcttggcaggtatatgggtgtgaagatcttgagagagagactcaccaagaagtagggttttgaatcggatcaggggttttgggaaaacgttatattaaaaatgaaatgaatcaagatattactaatcgatgttattaatagctgaatatgtattgttcttggtaatttctgtttggtacttattattagaccaaactgagatgtatacggaaatatatgtatagactcattcccaattttc

SEQ ID NO: 38757 - protein, 572 aa, Arabidopsis thaliana
  peptide (1)..(572): Ceres Seq. ID no. 13497226
MMDRFWSWRLFVALSLFLHSPICSSDKAPNYSFMRDATGSPTTSYYDYIIIGGGTAGCPLAATLSQNASVLLLERGDSPYNNPNITRLSAFGAALSDLSESSPSQRFVSEDGVINARARVLGGGSALNAGFYTRAGTKYVRNMGWDGALANESYQWVEAKVAFQPPMGRWQTAVRDGLLEAGIVPNNGFTYDHINGTKFGGTIFDRNGNRHTAADLLEYADPKGITVLLHATVHRILFRTRGTTKPIANGVVYRDRTGQAHRAYLKEGALSEIILSAGTLGSPQLLMLSGVGPSAQLQAQNITVVMDQPHVGQGMYDNPMNAVFVPSPVPVEVSLIEVVGITGEGTYVEAAGGENFGGGGGGSSGSSSTRDYYAMFSPRATLLESNSMTKLSSAQPFQGGFLLEKVMGPLSTGHLELKTRNPKDNPIVTFNYFQHPDDLKRCVRGIQTIERVVQSKAFSRYKYADVSFEYLLNLTASTPVNLRPPRSGPGASLPPSAEEFCQHTVTTIWHYHGGCVVGRVVDGDYKVIGIDQLRVIDMSTVGYCPGTNPQATVMMLGRYMGVKILRERLTKK

SEQ ID NO: 38758 - protein, 571 aa, Arabidopsis thaliana
  peptide (1)..(571): Ceres Seq. ID no. 13497227
MDRFWSWRLFVALSLFLHSPICSSDKAPNYSFMRDATGSPTTSYYDYIIIGGGTAGCPLAATLSQNASVLLLERGDSPYNNPNITRLSAFGAALSDLSESSPSQRFVSEDGVINARARVLGGGSALNAGFYTRAGTKYVRNMGWDGALANESYQWVEAKVAFQPPMGRWQTAVRDGLLEAGIVPNNGFTYDHINGTKFGGTIFDRNGNRHTAADLLEYADPKGITVLLHATVHRILFRTRGTTKPIANGVVYRDRTGQAHRAYLKEGALSEIILSAGTLGSPQLLMLSGVGPSAQLQAQNITVVMDQPHVGQGMYDNPMNAVFVPSPVPVEVSLIEVVGITGEGTYVEAAGGENFGGGGGGSSGSSSTRDYYAMFSPRATLLESNSMTKLSSAQPFQGGFLLEKVMGPLSTGHLELKTRNPKDNPIVTFNYFQHPDDLKRCVRGIQTIERVVQSKAFSRYKYADVSFEYLLNLTASTPVNLRPPRSGPGASLPPSAEEFCQHTVTTIWHYHGGCVVGRVVDGDYKVIGIDQLRVIDMSTVGYCPGTNPQATVMMLGRYMGVKILRERLTKK

SEQ ID NO: 38759 - protein, 539 aa, Arabidopsis thaliana
  peptide (1)..(539): Ceres Seq. ID no. 13497228
MRDATGSPTTSYYDYIIIGGGTAGCPLAATLSQNASVLLLERGDSPYNNPNITRLSAFGAALSDLSESSPSQRFVSEDGVINARARVLGGGSALNAGFYTRAGTKYVRNMGWDGALANESYQWVEAKVAFQPPMGRWQTAVRDGLLEAGIVPNNGFTYDHINGTKFGGTIFDRNGNRHTAADLLEYADPKGITVLLHATVHRILFRTRGTTKPIANGVVYRDRTGQAHRAYLKEGALSEIILSAGTLGSPQLLMLSGVGPSAQLQAQNITVVMDQPHVGQGMYDNPMNAVFVPSPVPVEVSLIEVVGITGEGTYVEAAGGENFGGGGGGSSGSSSTRDYYAMFSPRATLLESNSMTKLSSAQPFQGGFLLEKVMGPLSTGHLELKTRNPKDNPIVTFNYFQHPDDLKRCVRGIQTIERVVQSKAFSRYKYADVSFEYLLNLTASTPVNLRPPRSGPGASLPPSAEEFCQHTVTTIWHYHGGCVVGRVVDGDYKVIGIDQLRVIDMSTVGYCPGTNPQATVMMLGRYMGVKILRERLTKK

SEQ ID NO: 38760 - DNA, 1407 bp, Arabidopsis thaliana; identical to SEQ ID NO: 22506
  misc_feature (1)..(1407): Ceres Seq. ID no. 12371114
  misc_feature (1)..(1407): Ortholog of  Ceres SEQ ID NO 14304654 as cited in SEQ ID NO 53301
  misc_feature (1)..(1407): Ortholog of  Ceres SEQ ID NO 15172291 as cited in SEQ ID NO 55046
  misc_feature (1)..(1407): Ortholog of  Ceres SEQ ID NO 13658153 as cited in SEQ ID NO 66326
  misc_feature (1)..(1407): Ortholog of  Ceres SEQ ID NO 14303011 as cited in SEQ ID NO 67226

SEQ ID NO: 38761 - protein, 379 aa, Arabidopsis thaliana; identical to SEQ ID NO: 22507
  peptide (1)..(379): Ceres Seq. ID no. 12371115

SEQ ID NO: 38762 - protein, 349 aa, Arabidopsis thaliana; identical to SEQ ID NO: 22508
  peptide (1)..(349): Ceres Seq. ID no. 12371116

SEQ ID NO: 38763 - protein, 327 aa, Arabidopsis thaliana; identical to SEQ ID NO: 22509
  peptide (1)..(327): Ceres Seq. ID no. 12371117

SEQ ID NO: 38764 - DNA, 1052 bp, Arabidopsis thaliana
  misc_feature (1)..(1052): Ceres Seq. ID no. 12439723
  misc_feature (1)..(1052): Ortholog of  Ceres SEQ ID NO 13504028 as cited in SEQ ID NO 56107
gaaactgttcttttgccctcttctctcaattttaatccaccaaacaaatcgaacagtgttcgataacttttagattgcaagtcctgtttttgatttggtcgggagaaagaaaactagggttttgatgggaactgatacagttatgtctggacgagtaaggaaagatctatcaaaaacgaatccaaatgggaatattcctgagaatcgttctaattcacgtaagaagatccaacgacggagtaagaaaaccctaatctgtccggttcaaaaactattcgatacttgtaagaaagttttcgctgatggcaaatctggtaccgtcccttctcaagaaaacattgagatgcttcgagccgttttggatgaaatcaagcctgaggatgttggcgtaaatcctaagatgtcgtattttcgatctacagtgaccggacgatctccgttagtgacgtatcttcacatctatgcatgtcatagattctcgatttgcattttctgtttacctccatctggtgttatccctcttcacaatcacccggagatgactgtgtttagtaagctcttgtttggtacaatgcatatcaaatcctatgattgggtccctgattctccccagccgagttcagatactcgtttggcgaaagtgaaagtagattcggactttaccgcaccttgtgatacttctatactgtacccggctgatggagggaatatgcattgcttcaccgcgaaaacggcttgcgcggttcttgatgttattggtcctccatactctgatcccgcaggacgtcattgtacttactatttcgattatccgttctctagtttctcggtcgatggagtcgtggttgccgaggaggagaaggaaggctatgcatggttgaaggagagggaagagaagccagaggatttaacggttactgcattgatgtatagtggaccaaccatcaaagaatgaatgtggaagcatagcagaaaaaaaaaaccctttctttttctttgttctgttagagtattttcttgatttctggttgcatataaaaagaggtttttgg

SEQ ID NO: 38765 - protein, 276 aa, Arabidopsis thaliana
  peptide (1)..(276): Ceres Seq. ID no. 12439724
MGTDTVMSGRVRKDLSKTNPNGNIPENRSNSRKKIQRRSKKTLICPVQKLFDTCKKVFADGKSGTVPSQENIEMLRAVLDEIKPEDVGVNPKMSYFRSTVTGRSPLVTYLHIYACHRFSICIFCLPPSGVIPLHNHPEMTVFSKLLFGTMHIKSYDWVPDSPQPSSDTRLAKVKVDSDFTAPCDTSILYPADGGNMHCFTAKTACAVLDVIGPPYSDPAGRHCTYYFDYPFSSFSVDGVVVAEEEKEGYAWLKEREEKPEDLTVTALMYSGPTIKE

SEQ ID NO: 38766 - protein, 270 aa, Arabidopsis thaliana
  peptide (1)..(270): Ceres Seq. ID no. 12439725
MSGRVRKDLSKTNPNGNIPENRSNSRKKIQRRSKKTLICPVQKLFDTCKKVFADGKSGTVPSQENIEMLRAVLDEIKPEDVGVNPKMSYFRSTVTGRSPLVTYLHIYACHRFSICIFCLPPSGVIPLHNHPEMTVFSKLLFGTMHIKSYDWVPDSPQPSSDTRLAKVKVDSDFTAPCDTSILYPADGGNMHCFTAKTACAVLDVIGPPYSDPAGRHCTYYFDYPFSSFSVDGVVVAEEEKEGYAWLKEREEKPEDLTVTALMYSGPTIKE

SEQ ID NO: 38767 - protein, 203 aa, Arabidopsis thaliana
  peptide (1)..(203): Ceres Seq. ID no. 12439726
MLRAVLDEIKPEDVGVNPKMSYFRSTVTGRSPLVTYLHIYACHRFSICIFCLPPSGVIPLHNHPEMTVFSKLLFGTMHIKSYDWVPDSPQPSSDTRLAKVKVDSDFTAPCDTSILYPADGGNMHCFTAKTACAVLDVIGPPYSDPAGRHCTYYFDYPFSSFSVDGVVVAEEEKEGYAWLKEREEKPEDLTVTALMYSGPTIKE

SEQ ID NO: 38768 - DNA, 1474 bp, Arabidopsis thaliana
  misc_feature (1)..(1474): Ceres Seq. ID no. 12331029
  misc_feature (1)..(1474): Ortholog of  Ceres SEQ ID NO 12784228 as cited in SEQ ID NO 66111
atctattaatcatctaggtggcagaagcagcatcgttgagaacgaagaagcttgaaaaagttgcgagctcagagaatctggaagtagcaaaatttggcggctttaactcagcaatttgttctgtacatggtattttgagaagagagcattcagctcacagttacgctctgcctatccagcttctaaatctactcactttggtcgagtcatggcttcttctggatctgaggcaaaagctaattacgcacccatatctaccaatgaacctgttgtgtctgttgattggctccactctaatcttggagatgctgatataaaggttttggatgcctcatggtacatggcacatgagcaaagaaatccaatccaagagtatcaagttgctcatattccaggtgctctcttctttgatttgaatggaatagcagatcgaaaaacaaatagattcccattaatagctttggcaagccttctggctgtgagcttctatgtgtctgtatgcgcaacaaccaaaaagtattgtatattatttgaattacatgtgcagttacgacacatgctaccatctgaggaagcttttgctgctggttgttctgctcttggaatcgagaacaacgatggagtggttgtgtatgatggaatggggctctttagtgcagctcgtgtatggtggatgtttagagtctttggacatgacaaagtatgggtacttgatggaggcttgccgaaatggcgtgcttcaggctatgacgttgaatccagtgtttcaaatgatgccattttgaaagccagtgcagcaactgaggctatagagaagatctatcaaggacaaacaattagcccaataacttttcagacgaagttccggccacatcttgtattggcacttgatcaggtgaaggaaaacatcgaggataagacttatcagcacatcgatgcgcgttcaaaggctagatttgacggtattgctccagaaccttggaagggtttaccgagtggtcatatacccggtaccaagtgtgtcccttttcccctaatgtttgattcctctcaaacactgttaccagcagaggagctgaagaagcagtttgaacaggaagacatatctctggacagtccgattgcggcctcatgtggaaccggtgtaacagcttgtattttggcattgggactttatcgtctgggaaaaactaatgtggcaatctatgatgggtcttggactgaatgggcaactgcaccaaacttgcccatagtgggttcttcttcataagaaagtccaagaaaaagctacaagatcacaagccagtggatatatatttataagcttagcttggttcaatccatttctgtgttaaactttaacaaatttgctgggagggttgtattagtattatacatcagtattcaggattcttgagtttggtctcatctttgtggagattgattaaaagtcttaatgttcttgttgtttgtc

SEQ ID NO: 38769 - protein, 353 aa, Arabidopsis thaliana
  peptide (1)..(353): Ceres Seq. ID no. 12331030
MASSGSEAKANYAPISTNEPVVSVDWLHSNLGDADIKVLDASWYMAHEQRNPIQEYQVAHIPGALFFDLNGIADRKTNRFPLIALASLLAVSFYVSVCATTKKYCILFELHVQLRHMLPSEEAFAAGCSALGIENNDGVVVYDGMGLFSAARVWWMFRVFGHDKVWVLDGGLPKWRASGYDVESSVSNDAILKASAATEAIEKIYQGQTISPITFQTKFRPHLVLALDQVKENIEDKTYQHIDARSKARFDGIAPEPWKGLPSGHIPGTKCVPFPLMFDSSQTLLPAEELKKQFEQEDISLDSPIAASCGTGVTACILALGLYRLGKTNVAIYDGSWTEWATAPNLPIVGSSS

SEQ ID NO: 38770 - protein, 309 aa, Arabidopsis thaliana
  peptide (1)..(309): Ceres Seq. ID no. 12331031
MAHEQRNPIQEYQVAHIPGALFFDLNGIADRKTNRFPLIALASLLAVSFYVSVCATTKKYCILFELHVQLRHMLPSEEAFAAGCSALGIENNDGVVVYDGMGLFSAARVWWMFRVFGHDKVWVLDGGLPKWRASGYDVESSVSNDAILKASAATEAIEKIYQGQTISPITFQTKFRPHLVLALDQVKENIEDKTYQHIDARSKARFDGIAPEPWKGLPSGHIPGTKCVPFPLMFDSSQTLLPAEELKKQFEQEDISLDSPIAASCGTGVTACILALGLYRLGKTNVAIYDGSWTEWATAPNLPIVGSSS

SEQ ID NO: 38771 - protein, 237 aa, Arabidopsis thaliana
  peptide (1)..(237): Ceres Seq. ID no. 12331032
MLPSEEAFAAGCSALGIENNDGVVVYDGMGLFSAARVWWMFRVFGHDKVWVLDGGLPKWRASGYDVESSVSNDAILKASAATEAIEKIYQGQTISPITFQTKFRPHLVLALDQVKENIEDKTYQHIDARSKARFDGIAPEPWKGLPSGHIPGTKCVPFPLMFDSSQTLLPAEELKKQFEQEDISLDSPIAASCGTGVTACILALGLYRLGKTNVAIYDGSWTEWATAPNLPIVGSSS

SEQ ID NO: 38772 - DNA, 2063 bp, Arabidopsis thaliana
  misc_feature (1)..(2063): Ceres Seq. ID no. 12371494
  misc_feature (1)..(2063): Ortholog of  Ceres SEQ ID NO 15169474 as cited in SEQ ID NO 66139
  misc_feature (1)..(2063): Ortholog of  Ceres SEQ ID NO 13584744 as cited in SEQ ID NO 69137
aaacaaaaaaaacagagacccttcctctggggaatctaaggaagcttcaaaatgaagctaaagatttctctaatcgctccgattcttcttctcttctcattcttcttcgccgtggaatctaagtgcaggactagctgtcctttagctctagcttcgtactatctcgagaacggaacaacactctccgtcatcaaccaaaacctcaattcttcaatcgcgccttacgatcaaatcaatttcgatccaatcctcaggtacaacagtaacattaaagacaaagatagaatccagatgggctctagggttcttgtacctttcccttgcgaatgtcaacctggtgatttcctagggcacaatttcagctacagtgttcgacaggaagatacttacgaaagagtcgcgattagtaattacgcgaatctcacgacgatggagtcgttacaggcgaggaatccttttccggcgactaacatacctctctctgcgacgcttaatgtattggtgaattgttcttgtggtgatgagagtgtttcgaaagattttggtttgtttgttacgtatccgcttcgtcctgaagacagtctcagttctattgcgagatcttccggtgtatcggcggatattctgcagagatataatcccggtgttaattttaactccgggaatggaatcgtttatgtgcctggaagagatccaaatggtgcatttccaccattcaaatcaagtaaacaagatggtgttggtgctggagttattgctggtatagttataggagtgattgtggctttgttgttgatcttgtttatcgtatattatgcttaccggaagaataagtcgaagggtgattcgttttcttcttctattccgttgtctactaaggctgatcatgcttcttctactagtctccaaagtggaggtttgggtggtgccggagtgtctcctggcattgctgccataagcgtggacaaatctgttgagttttcgttggaggaactagcaaaggctactgataatttcaatttgtcttttaagattgggcaaggtggttttggggctgtttactatgcagagctgagaggagaaaaagctgcgattaagaagatggacatggaggcatcgaaacagttcttggcggaactaaaagtcttaacgcgtgtacatcatgtcaacctggttcgcctgattggatattgtgttgagggatcacttttcttggtgtatgaatatgttgagaatggtaaccttggacaacatttacatgggtcaggacgagaaccattaccgtggactaagagagtgcagattgcactagactcagctagaggtttagaatatatccacgagcacacggttccagtttatgtccatagggacattaaatctgccaatattttgatagaccagaaattccgagcaaaggtagcagatttcgggttaacaaaactgacagaagttggaggttcagcaactcggggtgcaatgggtacatttggttacatggcaccagagactgtttatggagaagtgtctgcaaaagtagatgtatatgcatttggagttgtcctttacgaattgatttctgcgaaaggtgcggttgtcaaaatgacagaagccgttggtgaatttagaggccttgttggtgtgttcgaagaatcattcaaggaaaccgacaaagaagaagcactacgcaagattatagacccgaggctcggtgatagttacccgtttgattcggtatacaagatggcggaattagggaaagcatgtacacaagagaatgcgcagctacgtccgagtatgagatacattgtggttgctttatccactctcttttcgtctaccggaaattgggatgttggaaacttccaaaacgaagatttagtcagtcttatgtccggccggtagactcgttttccggtttgctgttgttatatagaaatgattgttttttggtatgctcacgtatattttgtctgtctatacgaactttacatgtcacaactcacaagttgacttttatatgattttctataacgctctatatgtcaattattcaacgtctc

SEQ ID NO: 38773 - protein, 617 aa, Arabidopsis thaliana
  peptide (1)..(617): Ceres Seq. ID no. 12371495
MKLKISLIAPILLLFSFFFAVESKCRTSCPLALASYYLENGTTLSVINQNLNSSIAPYDQINFDPILRYNSNIKDKDRIQMGSRVLVPFPCECQPGDFLGHNFSYSVRQEDTYERVAISNYANLTTMESLQARNPFPATNIPLSATLNVLVNCSCGDESVSKDFGLFVTYPLRPEDSLSSIARSSGVSADILQRYNPGVNFNSGNGIVYVPGRDPNGAFPPFKSSKQDGVGAGVIAGIVIGVIVALLLILFIVYYAYRKNKSKGDSFSSSIPLSTKADHASSTSLQSGGLGGAGVSPGIAAISVDKSVEFSLEELAKATDNFNLSFKIGQGGFGAVYYAELRGEKAAIKKMDMEASKQFLAELKVLTRVHHVNLVRLIGYCVEGSLFLVYEYVENGNLGQHLHGSGREPLPWTKRVQIALDSARGLEYIHEHTVPVYVHRDIKSANILIDQKFRAKVADFGLTKLTEVGGSATRGAMGTFGYMAPETVYGEVSAKVDVYAFGVVLYELISAKGAVVKMTEAVGEFRGLVGVFEESFKETDKEEALRKIIDPRLGDSYPFDSVYKMAELGKACTQENAQLRPSMRYIVVALSTLFSSTGNWDVGNFQNEDLVSLMSGR

SEQ ID NO: 38774 - protein, 537 aa, Arabidopsis thaliana
  peptide (1)..(537): Ceres Seq. ID no. 12371496
MGSRVLVPFPCECQPGDFLGHNFSYSVRQEDTYERVAISNYANLTTMESLQARNPFPATNIPLSATLNVLVNCSCGDESVSKDFGLFVTYPLRPEDSLSSIARSSGVSADILQRYNPGVNFNSGNGIVYVPGRDPNGAFPPFKSSKQDGVGAGVIAGIVIGVIVALLLILFIVYYAYRKNKSKGDSFSSSIPLSTKADHASSTSLQSGGLGGAGVSPGIAAISVDKSVEFSLEELAKATDNFNLSFKIGQGGFGAVYYAELRGEKAAIKKMDMEASKQFLAELKVLTRVHHVNLVRLIGYCVEGSLFLVYEYVENGNLGQHLHGSGREPLPWTKRVQIALDSARGLEYIHEHTVPVYVHRDIKSANILIDQKFRAKVADFGLTKLTEVGGSATRGAMGTFGYMAPETVYGEVSAKVDVYAFGVVLYELISAKGAVVKMTEAVGEFRGLVGVFEESFKETDKEEALRKIIDPRLGDSYPFDSVYKMAELGKACTQENAQLRPSMRYIVVALSTLFSSTGNWDVGNFQNEDLVSLMSGR

SEQ ID NO: 38775 - protein, 491 aa, Arabidopsis thaliana
  peptide (1)..(491): Ceres Seq. ID no. 12371497
MESLQARNPFPATNIPLSATLNVLVNCSCGDESVSKDFGLFVTYPLRPEDSLSSIARSSGVSADILQRYNPGVNFNSGNGIVYVPGRDPNGAFPPFKSSKQDGVGAGVIAGIVIGVIVALLLILFIVYYAYRKNKSKGDSFSSSIPLSTKADHASSTSLQSGGLGGAGVSPGIAAISVDKSVEFSLEELAKATDNFNLSFKIGQGGFGAVYYAELRGEKAAIKKMDMEASKQFLAELKVLTRVHHVNLVRLIGYCVEGSLFLVYEYVENGNLGQHLHGSGREPLPWTKRVQIALDSARGLEYIHEHTVPVYVHRDIKSANILIDQKFRAKVADFGLTKLTEVGGSATRGAMGTFGYMAPETVYGEVSAKVDVYAFGVVLYELISAKGAVVKMTEAVGEFRGLVGVFEESFKETDKEEALRKIIDPRLGDSYPFDSVYKMAELGKACTQENAQLRPSMRYIVVALSTLFSSTGNWDVGNFQNEDLVSLMSGR

SEQ ID NO: 38776 - DNA, 1435 bp, Arabidopsis thaliana
  misc_feature (1)..(1435): Ceres Seq. ID no. 12328568
  misc_feature (1)..(1435): Ortholog of  Ceres SEQ ID NO 15226389 as cited in SEQ ID NO 52992
  misc_feature (1)..(1435): Ortholog of  Ceres SEQ ID NO 14312152 as cited in SEQ ID NO 57197
aattatatgtatatatatacgtacacaaaatcatacgtttttccacaaatggatcaagaagaggaagagatcgagattcctaattactttatctgcccaatctcactagagatcatgaaagatccagtcacgaccgtttctggcatcacttacgaccgtcaaaacatcgttaaatggctcgaaaaggtcccttcttgtcccgtcacgaagcaacctcttcccttagactccgatcttacacctaaccacatgcttcgccgtcttatccaacactggtgcgtcgagaacgagacacgtggcgttgtcagaatctctacacctcgagttcctcctggaaaacttaacgtcgtcgaagagatcaagaatctcaaaaagttcggccaagaagccttaggaagagaagaaacgttgcagaagcttgaagttttggcaatggacggaaataacagaagattgatgtgtgaatgtggcgtacataagtctttgatcttgttcgtagtcaagtgtactagtgaagacgaagacggacgacgtcgtatcaaaggactagatgagtctcttcgtcttcttcacttgatcggtattccatcaaacgacgcaaaaacaatcttgatggaaaacgatcgagttatggaatcgttgacttgggttttacaccaagaagactttctcagtaaggcttatacaattgtgctattgaggaatctaacggaatacacttcctctcatatcgtagagagattgaatcccgagatttttaaagggatcatagggtttctcaaggatgttgtaaatagtgttaatcggacgagccctaccgtgagagaaacggtacagtcatcatcaaggcctagcttgggaaaaacggaaccatcaaaacttgatcatagtttggtcatcaaacaagcggtgactgccgcgctgatgattcttttagagacttcttcgtggagccgaaaccgatcactccttgtggatctcggtgcggtttctgaactcatcgaactcgaaataagctacactggcgagaaaagaatcacagaacttatgttaggagttttatctcgtttatgttgctgtgcgaacggtagagccgagattcttgctcataggggcggaatcgcggttgtgacaaagcggctattgagggtttcacctgcggcagacgatagagctatctctatcctaactacagtgtcaaaattctcgccggaaaacatggtggtggaagagatggttaatgttgggacggtagagaagctctgttccgttctaggaatggattgtggtttgaacttgaaggagaaagcaaaagagatactaaaagatcattttgatgagtggaagaagtttccatgtattgacataactcttctcactaagctgctaagcatctcacccaaagggccaaagatctaagtaaataatctgctgc

SEQ ID NO: 38777 - protein, 472 aa, Arabidopsis thaliana
  peptide (1)..(472): Ceres Seq. ID no. 12328569
NYMYIYTYTKSYVFPQMDQEEEEIEIPNYFICPISLEIMKDPVTTVSGITYDRQNIVKWLEKVPSCPVTKQPLPLDSDLTPNHMLRRLIQHWCVENETRGVVRISTPRVPPGKLNVVEEIKNLKKFGQEALGREETLQKLEVLAMDGNNRRLMCECGVHKSLILFVVKCTSEDEDGRRRIKGLDESLRLLHLIGIPSNDAKTILMENDRVMESLTWVLHQEDFLSKAYTIVLLRNLTEYTSSHIVERLNPEIFKGIIGFLKDVVNSVNRTSPTVRETVQSSSRPSLGKTEPSKLDHSLVIKQAVTAALMILLETSSWSRNRSLLVDLGAVSELIELEISYTGEKRITELMLGVLSRLCCCANGRAEILAHRGGIAVVTKRLLRVSPAADDRAISILTTVSKFSPENMVVEEMVNVGTVEKLCSVLGMDCGLNLKEKAKEILKDHFDEWKKFPCIDITLLTKLLSISPKGPKI

SEQ ID NO: 38778 - protein, 470 aa, Arabidopsis thaliana
  peptide (1)..(470): Ceres Seq. ID no. 12328570
MYIYTYTKSYVFPQMDQEEEEIEIPNYFICPISLEIMKDPVTTVSGITYDRQNIVKWLEKVPSCPVTKQPLPLDSDLTPNHMLRRLIQHWCVENETRGVVRISTPRVPPGKLNVVEEIKNLKKFGQEALGREETLQKLEVLAMDGNNRRLMCECGVHKSLILFVVKCTSEDEDGRRRIKGLDESLRLLHLIGIPSNDAKTILMENDRVMESLTWVLHQEDFLSKAYTIVLLRNLTEYTSSHIVERLNPEIFKGIIGFLKDVVNSVNRTSPTVRETVQSSSRPSLGKTEPSKLDHSLVIKQAVTAALMILLETSSWSRNRSLLVDLGAVSELIELEISYTGEKRITELMLGVLSRLCCCANGRAEILAHRGGIAVVTKRLLRVSPAADDRAISILTTVSKFSPENMVVEEMVNVGTVEKLCSVLGMDCGLNLKEKAKEILKDHFDEWKKFPCIDITLLTKLLSISPKGPKI

SEQ ID NO: 38779 - protein, 456 aa, Arabidopsis thaliana
  peptide (1)..(456): Ceres Seq. ID no. 12328571
MDQEEEEIEIPNYFICPISLEIMKDPVTTVSGITYDRQNIVKWLEKVPSCPVTKQPLPLDSDLTPNHMLRRLIQHWCVENETRGVVRISTPRVPPGKLNVVEEIKNLKKFGQEALGREETLQKLEVLAMDGNNRRLMCECGVHKSLILFVVKCTSEDEDGRRRIKGLDESLRLLHLIGIPSNDAKTILMENDRVMESLTWVLHQEDFLSKAYTIVLLRNLTEYTSSHIVERLNPEIFKGIIGFLKDVVNSVNRTSPTVRETVQSSSRPSLGKTEPSKLDHSLVIKQAVTAALMILLETSSWSRNRSLLVDLGAVSELIELEISYTGEKRITELMLGVLSRLCCCANGRAEILAHRGGIAVVTKRLLRVSPAADDRAISILTTVSKFSPENMVVEEMVNVGTVEKLCSVLGMDCGLNLKEKAKEILKDHFDEWKKFPCIDITLLTKLLSISPKGPKI

SEQ ID NO: 38780 - DNA, 1325 bp, Arabidopsis thaliana
  misc_feature (1)..(1325): Ceres Seq. ID no. 12579499
  misc_feature (1)..(1325): Ortholog of  Ceres SEQ ID NO 14311207 as cited in SEQ ID NO 60304
accttttgactcttcttctctctctctctgcaaattcaaaacagtgaaaaaaacctctcttcattttttaactccctctctctctctctctatggagagacgaacgagacgagtgaaattcacagagaatcgtacggtcacaaacgtagcagctacaccatctaacgggtctccgagactggtccgtatcactgttactgatcctttcgctactgactcgtctagcgacgacgacgacaacaacaacgtcacggtggttccaagagtgaaacgatacgtgaaggagattagattctgccaaggtgaatcttcttcctccaccgcggcgaggaaaggtaagcacaaggaggaggaaagcgtagtggttgaagatgacgtgtcgacgtcggtgaagcctaaaaagtacagaggcgtgagacagagaccttggggaaaattcgcggcggagattagagatccgtcgagccgtactcggatttggcttgggacttttgtcacggcggaggaagctgctatagcgtacgatagagccgcgattcatctcaaaggacctaaagcgctcacgaatttcctaactccgccgacgccaacgccggttatcgatctccaaacggtttccgcctgcgattacggtagagattctcggcagagccttcattcaccgacctctgttctaagattcaacgtcaacgaggaaacagagcatgagattgaagcgatcgagctatctccgagagaaagtcgacggttataaaagaagaagaagaatcgtcggcgggtttggtgttcccggatccgtatctgttaccggatttatctctcgccggcgaatgtttttgggataccgaaattgcccctgaccttttgtttctcgatgaagaaaccaaaatccaatcaacgttgttaccaaacacagaggtttcgaaacaaggagaaaacgaaactgaagatttcgagtttggtttgattgatgatttcgagtcttctccatgggatgtggatcatttcttcgaccatcatcatcactctttcgattaaaaatctcttcttttttggggaaatttttgtgtggtgatgatgacgtggatacatcgtgaccgtcggcttaccttttttagtctgaatgacgtggactgttcagatcaactgaagcgcaaacaaaaaaaaactagggttttgttttattaatttgtgggtaaatattttagttaagaagaagataagtatgttaatgtttatcaaggttggacctttcgttgttttggttcctctctctcagattgtctcaacggtaggaagcagtatataaatgtgtttctatgtcc

SEQ ID NO: 38781 - protein, 250 aa, Arabidopsis thaliana
  peptide (1)..(250): Ceres Seq. ID no. 12579500
PFDSSSLSLCKFKTVKKTSLHFLTPSLSLSMERRTRRVKFTENRTVTNVAATPSNGSPRLVRITVTDPFATDSSSDDDDNNNVTVVPRVKRYVKEIRFCQGESSSSTAARKGKHKEEESVVVEDDVSTSVKPKKYRGVRQRPWGKFAAEIRDPSSRTRIWLGTFVTAEEAAIAYDRAAIHLKGPKALTNFLTPPTPTPVIDLQTVSACDYGRDSRQSLHSPTSVLRFNVNEETEHEIEAIELSPRESRRL

SEQ ID NO: 38782 - protein, 220 aa, Arabidopsis thaliana
  peptide (1)..(220): Ceres Seq. ID no. 12579501
MERRTRRVKFTENRTVTNVAATPSNGSPRLVRITVTDPFATDSSSDDDDNNNVTVVPRVKRYVKEIRFCQGESSSSTAARKGKHKEEESVVVEDDVSTSVKPKKYRGVRQRPWGKFAAEIRDPSSRTRIWLGTFVTAEEAAIAYDRAAIHLKGPKALTNFLTPPTPTPVIDLQTVSACDYGRDSRQSLHSPTSVLRFNVNEETEHEIEAIELSPRESRRL

SEQ ID NO: 38783 - DNA, 873 bp, Arabidopsis thaliana
  misc_feature (1)..(873): Ceres Seq. ID no. 12328483
  misc_feature (1)..(873): Ortholog of  Ceres SEQ ID NO 15177475 as cited in SEQ ID NO 0
aacaaaaaaccctaacaaaaatggaatcgaaagcaatttgcttagggtttcttcctccaagacttcgattttcatctccacgtttaccctctcttcctccttctcctcctgtaagtgaaatttaaccatcaaaatttcatttttttccatttcgattcttccaaaaccttatcctaaaatttgtcaatatctcctgattctataggcttcttccacatttgcgacgcgtcacaaacttgattccagacaaaccctcctttggaacaaaccgcaattgagccgaggccgtgtagcgtgttcttcttctcaatctgactcaagacctgacaagaagcaatcggataagagtaactatgctcgagctgagctgttccgtgggaaatcaggttctgtttctttcaatggtctgactcatcagctggttgaagaaagtaaactggtttcagctccgtttcaagaagagaaaggttctttcttgtgggttttggctcctgttgttttgatttcttcgttgattcttcctcagttctttctaagtggtatcattgaagctaccttcaaaaacgacactgttgctgaaattgttacttctttttgctttgagacggtgttttatgctggtcttgcgatattcctgtctgtgactgaccgagtgcagaggccgtacttagacttcagctccaagagatggggtctgatcactggactgaggggataccttacgtctgcattcctcacgatgggtttaaaagttgtagttcccgtatttgctgtttacatgacttggccagctcttggaatagatgctttgattgcagtgcttcctttcttggttggctgtgcagttcaaagagttttcgagaagagtccagc

SEQ ID NO: 38784 - protein, 62 aa, Arabidopsis thaliana
  peptide (1)..(62): Ceres Seq. ID no. 12328484
MGSDHWTEGIPYVCIPHDGFKSCSSRICCLHDLASSWNRCFDCSASFLGWLCSSKSFREESS

SEQ ID NO: 38785 - protein, 44 aa, Arabidopsis thaliana
  peptide (1)..(44): Ceres Seq. ID no. 12328485
MGLKVVVPVFAVYMTWPALGIDALIAVLPFLVGCAVQRVFEKSP

SEQ ID NO: 38786 - protein, 40 aa, Arabidopsis thaliana
  peptide (1)..(40): Ceres Seq. ID no. 12328486
QKTLTKMESKAICLGFLPPRLRFSSPRLPSLPPSPPVSEI

SEQ ID NO: 38787 - DNA, 1316 bp, Arabidopsis thaliana
  misc_feature (1)..(1316): Ceres Seq. ID no. 12329162
  misc_feature (1)..(1316): Ortholog of  Ceres SEQ ID NO 13638402 as cited in SEQ ID NO 60300
  misc_feature (1)..(1316): Ortholog of  Ceres SEQ ID NO 12618349 as cited in SEQ ID NO 64838
  misc_feature (1)..(1316): Ortholog of  Ceres SEQ ID NO 15176161 as cited in SEQ ID NO 0
cttgccgttccatgctccaagtaaggacctgatttctctcgttttctctttctctctctctctctctcattctctcaacgaaatctcgatctcgtcgaggaagaagaagaacccagatcagaaaacataacaacaatgtcgtcgtctgcgaagaaacaaaccctgttcatatcgacattaatcatctcatggtactcttcaaacatcggtgttcttctcctcaacaagttccttctctcgaattacggattcaaattcccgatttttctcacaatgtgtcacatgtccgcttgcgctatccttagctacatctccattgttttcctcaagcttgttcctctccaacatctcaaatctcgttctcaattccttaaggttgctactctcagcatcgtcttttgtgcttccgtcgtcggtggtaacatctcccttcgttaccttcctgtctctttcaatcaagccgtcggtgctacgacgccgtttttcacggctctgtttgcttatcttatgacctttaagagagaagcttgggttacttatggtgctctcgtccctgtcgtcgccggtgtcgtcatcgccagtgggggtgagccaggatttcactggtttgggttcataatgtgcattagtgctactgcggcaagagcctttaaatctgttcttcaaggcatcttactttcttcagagggggaaaaattgaactcaatgaatttgatgttgtatatgtctcccatagctgtcattgctcttcttcccgttacgctatttatggaaccagacgtgatcagtgtgaccttgacgcttgcaaaacaacatcagtacatgtggatacttcttctggttaactctgtcatggcttattcagccaatctgttgaattttctggttaccaaacacacaagcgccctcaccctccaggttcttggaaatgctaaaggagcagttgcagtggtgatttctatcttgatctttcaaaacccggttacggttatgggaattggcgggtactccataaccgtccttggggtggttgcttatggagagacaaaacgcagatttagatgaactctcagacattagcaagtgagacaacatagcttctctatgtttgtttcttcatctgttcaagactcatccttaggacctgaaatttttgggcatttaggagatgagaatttatcaatagtgattttttgtaactattttatacgcactttatcatgtaatatgtatttggactatgttagatttgatggtgagataatcatttttgtgtgtttcctggttgaaataccattttggttattgaacttatt

SEQ ID NO: 38788 - protein, 309 aa, Arabidopsis thaliana; identical to SEQ ID NO: 36702
  peptide (1)..(309): Ceres Seq. ID no. 12329163

SEQ ID NO: 38789 - protein, 263 aa, Arabidopsis thaliana; identical to SEQ ID NO: 36703
  peptide (1)..(263): Ceres Seq. ID no. 12329164

SEQ ID NO: 38790 - protein, 260 aa, Arabidopsis thaliana
  peptide (1)..(260): Ceres Seq. ID no. 12329165
MSACAILSYISIVFLKLVPLQHLKSRSQFLKVATLSIVFCASVVGGNISLRYLPVSFNQAVGATTPFFTALFAYLMTFKREAWVTYGALVPVVAGVVIASGGEPGFHWFGFIMCISATAARAFKSVLQGILLSSEGEKLNSMNLMLYMSPIAVIALLPVTLFMEPDVISVTLTLAKQHQYMWILLLVNSVMAYSANLLNFLVTKHTSALTLQVLGNAKGAVAVVISILIFQNPVTVMGIGGYSITVLGVVAYGETKRRFR

SEQ ID NO: 38791 - DNA, 1016 bp, Arabidopsis thaliana
  misc_feature (1)..(1016): Ceres Seq. ID no. 13576736
  misc_feature (1)..(1016): Ortholog of  Ceres SEQ ID NO 12611994 as cited in SEQ ID NO 54063
caaaatagttctcaatcagttggatcatctttttattcctaaataaataaactccaaaagcatctctctgtttcttctcctctcttcaagctttttgtttcgtctcagtcgtcgtcatcatctctgacagcaaggttattcacataggcaaagaagtcattcttttgcatgctgttttccaataaagttaattctctaacagaacaagtttcgagattggatattgacgacaacgatatgggacttggaggtagtgaaacaatggaatgcaagtgtggtatgcctctgtgtatctgtgtagctcctcccaaatcaactgataaaccaaacccacctgctaccattgctcctgtggttcttcctcagttgaagtcagaggcttcagcaaaaagtaaaggttccacttccagcagcaatgctagatcagctctaaatgctggactagacaccccccaaagagactatgaagccagtggggagggattaagagaagcgattaagaatggtgacagtgctggtgcgaaaaagcttctaaaagagggcgtagatgcaaattaccgagacaggcaaggaatgtcggtgcttcatctggctgtcctgttcaaccaaactgatattgcgttgatgttgatggatcatggagcaagccttgagtacaagaatgcacaaggagaaacaccgctagattgtgccccggcaacactgcaatacaagatgcgggaaaagatgaagtccacttaacagcatgcctcagacagagctacaaatcattcctcaaatctttttcagataagggaaagatttgtaatggaaaaaatcaagggatcatgaatttgcttgtaactttagttgcattctgtgtgcaattttccatgttatgtgatctttgaaccatgtcttcttccgctatgacataaaaactcccttttgtttttatgtcatcaaaatgtgacaatgcagaaacaaataccagcattgttatcatacgaattcatttatcttacaaactttgtttt

SEQ ID NO: 38792 - protein, 190 aa, Arabidopsis thaliana
  peptide (1)..(190): Ceres Seq. ID no. 13576737
MLFSNKVNSLTEQVSRLDIDDNDMGLGGSETMECKCGMPLCICVAPPKSTDKPNPPATIAPVVLPQLKSEASAKSKGSTSSSNARSALNAGLDTPQRDYEASGEGLREAIKNGDSAGAKKLLKEGVDANYRDRQGMSVLHLAVLFNQTDIALMLMDHGASLEYKNAQGETPLDCAPATLQYKMREKMKST

SEQ ID NO: 38793 - protein, 167 aa, Arabidopsis thaliana
  peptide (1)..(167): Ceres Seq. ID no. 13576738
MGLGGSETMECKCGMPLCICVAPPKSTDKPNPPATIAPVVLPQLKSEASAKSKGSTSSSNARSALNAGLDTPQRDYEASGEGLREAIKNGDSAGAKKLLKEGVDANYRDRQGMSVLHLAVLFNQTDIALMLMDHGASLEYKNAQGETPLDCAPATLQYKMREKMKST

SEQ ID NO: 38794 - protein, 159 aa, Arabidopsis thaliana
  peptide (1)..(159): Ceres Seq. ID no. 13576739
MECKCGMPLCICVAPPKSTDKPNPPATIAPVVLPQLKSEASAKSKGSTSSSNARSALNAGLDTPQRDYEASGEGLREAIKNGDSAGAKKLLKEGVDANYRDRQGMSVLHLAVLFNQTDIALMLMDHGASLEYKNAQGETPLDCAPATLQYKMREKMKST

SEQ ID NO: 38795 - DNA, 641 bp, Arabidopsis thaliana
  misc_feature (1)..(641): Ceres Seq. ID no. 13576537
  misc_feature (1)..(641): Ortholog of  Ceres SEQ ID NO 15173047 as cited in SEQ ID NO 61816
  misc_feature (1)..(641): Ortholog of  Ceres SEQ ID NO 13591134 as cited in SEQ ID NO 63820
  misc_feature (1)..(641): Ortholog of  Ceres SEQ ID NO 15178530 as cited in SEQ ID NO 67823
  misc_feature (1)..(641): Ortholog of  Ceres SEQ ID NO 13599565 as cited in SEQ ID NO 0
aatagctttttttgtattctctccatttgcttaatctcattttcgtttcaccgccgtctctctctatatcaaaatgggtcgccgtagctcaggaggaagatctgcccctcgccctcgtcctgctgctgcacgcagcccagctcctcaacctgtacaccgtgcacctcctccagctccagctcaggccagcggtggtggtggtggcatgttctcaggcattggttcaaccattgctcagggtatggcttttggtactggaagtgcagttgcacacagggctgttgattctgtgatgggtccacgaaccattcagcatgaggctgttgaggctgcttctgcatctgcagcccctgctggaagcgccatgctttctagcacctgtgacattcatgctaaggctttccaagattgcatcggcagctatggaagcgagattagcaaatgtcagttctacatggacatgttgtccgagtgcaggaagaactctggttccgtgattggtgcctagagtttccatttctcctatttgttttatcttaaagaattatccagctgtgatgatgctgagaatttggatatgatgatatgatcaaataacagtattatgtttccagaacctgaaactgcatggttgaagtctt

SEQ ID NO: 38796 - protein, 144 aa, Arabidopsis thaliana
  peptide (1)..(144): Ceres Seq. ID no. 13576538
MGRRSSGGRSAPRPRPAAARSPAPQPVHRAPPPAPAQASGGGGGMFSGIGSTIAQGMAFGTGSAVAHRAVDSVMGPRTIQHEAVEAASASAAPAGSAMLSSTCDIHAKAFQDCIGSYGSEISKCQFYMDMLSECRKNSGSVIGA

SEQ ID NO: 38797 - protein, 100 aa, Arabidopsis thaliana
  peptide (1)..(100): Ceres Seq. ID no. 13576539
MFSGIGSTIAQGMAFGTGSAVAHRAVDSVMGPRTIQHEAVEAASASAAPAGSAMLSSTCDIHAKAFQDCIGSYGSEISKCQFYMDMLSECRKNSGSVIGA

SEQ ID NO: 38798 - protein, 88 aa, Arabidopsis thaliana
  peptide (1)..(88): Ceres Seq. ID no. 13576540
MAFGTGSAVAHRAVDSVMGPRTIQHEAVEAASASAAPAGSAMLSSTCDIHAKAFQDCIGSYGSEISKCQFYMDMLSECRKNSGSVIGA

SEQ ID NO: 38799 - DNA, 2181 bp, Arabidopsis thaliana; identical to SEQ ID NO: 37605
  misc_feature (1)..(2181): Ceres Seq. ID no. 13646180
  misc_feature (1)..(2181): Ortholog of  Ceres SEQ ID NO 14303366 as cited in SEQ ID NO 54418
  misc_feature (1)..(2181): Ortholog of  Ceres SEQ ID NO 13503610 as cited in SEQ ID NO 62416
  misc_feature (1)..(2181): Ortholog of  Ceres SEQ ID NO 13657610 as cited in SEQ ID NO 66165
  misc_feature (1)..(2181): Ortholog of  Ceres SEQ ID NO 13598312 as cited in SEQ ID NO 68448
  misc_feature (1)..(2181): Ortholog of  Ceres SEQ ID NO 13596100 as cited in SEQ ID NO 68573

SEQ ID NO: 38800 - protein, 497 aa, Arabidopsis thaliana; identical to SEQ ID NO: 23374
  peptide (1)..(497): Ceres Seq. ID no. 13646181

SEQ ID NO: 38801 - protein, 492 aa, Arabidopsis thaliana; identical to SEQ ID NO: 23375
  peptide (1)..(492): Ceres Seq. ID no. 13646182

SEQ ID NO: 38802 - protein, 460 aa, Arabidopsis thaliana; identical to SEQ ID NO: 23376
  peptide (1)..(460): Ceres Seq. ID no. 13646183

SEQ ID NO: 38803 - DNA, 1807 bp, Arabidopsis thaliana
  misc_feature (1)..(1807): Ceres Seq. ID no. 13489575
  misc_feature (1)..(1807): Ortholog of  Ceres SEQ ID NO 13594037 as cited in SEQ ID NO 55666
  misc_feature (1)..(1807): Ortholog of  Ceres SEQ ID NO 13657707 as cited in SEQ ID NO 66407
gatatcatcaaaaaccacaaaactttcttttctttttctaactattttatttattattcctacaaaatgtcatgtttgaagtatttcttgatcttattgatgttgggactgtgtgtctcatcggaggagaattttcaatatgactacttgaaagttccggcaagcgagtttgtgagctccataaacacaattgtggtagtgataagacaagtgagttcaattttgtctcagttcgctgatttcagcggagatcgccggctgcagaatgcggtttccgattgccttgatctgcttgacttttcttcagaggagctcacttggtctgcttctgcttctgagaatccaaaaggtaagggcaacggaacaggggacgttggatcggacacaaggacatggttaagtgctgctctctccaaccaagccacttgtatggaaggcttcgatggtacctctggtctcgtaaaatcccttgtcgctggcagtctcgatcaactatattctatgcttagggaattgttaccacttgtgcaaccagagcagaaacccaaggctgtttctaaacctggccctattgctaaaggaccgaaggcaccacctggccgtaaactcagagacaccgacgaagacgaaagccttcaattcccagactgggtcagaccggacgatcgtaaactattagaatcaaacggtaggacttacgacgttagtgtagcattggatgggacaggcaacttcacaaagataatggacgccataaagaaagctcctgattatagctcgacacgtttcgtcatatacattaaaaaaggtttatatttggagaatgttgagatcaagaagaagaaatggaacattgtaatgttaggtgatggcattgacgtgactgttatttccggtaaccgcagcttcatcgatggttggaccactttccgatcagctacattcgcggtaagcggaagaggattcttagcaagagatataacgttccagaacacagcagggccagagaagcatcaggcggtagcactgagatcagactctgacctctctgtgttcttcagatgtgcgatgaggggttatcaagatacactctacacgcacaccatgcgtcagttctaccgtgagtgcaccatcacgggaacagtagattttatatttggggatgggactgttgtgtttcaaaactgtcaaattttggctaaaagaggactccctaaccaaaagaacaccatcactgcacaaggccggaaagatgtcaaccaaccctcaggattctcaattcaattcagcaatatctcggcggacgcagatttggtcccatacctaaacacgacaaggacgtatctaggaaggccatggaagctatattcgagaacggttttcattaggaacaatatgagcgacgttgtgagacccgaaggatggcttgagtggaacgctgattttgcgttggacacactcttctacggagagttcatgaactacgggcctggttcaggactcagcagccgagtcaaatggcctggttaccacgtctttaacaactcggatcaggctaacaacttcaccgtttctcagttcattaaaggaaatctttggctgccttctacgggagtaacgtttagtgatggcttgtatatctaaactggctcagtgtttctattgtgaatgttcctgttttttgttccttttcattttgttttgcgttttcttgtcatgttcttctaagttggtttgttgtggtatttcacggttttggaaaaatattgataaatggggaatttaagtcgatcggctgaagttgaac

SEQ ID NO: 38804 - protein, 547 aa, Arabidopsis thaliana
  peptide (1)..(547): Ceres Seq. ID no. 13489576
DIIKNHKTFFSFSNYFIYYSYKMSCLKYFLILLMLGLCVSSEENFQYDYLKVPASEFVSSINTIVVVIRQVSSILSQFADFSGDRRLQNAVSDCLDLLDFSSEELTWSASASENPKGKGNGTGDVGSDTRTWLSAALSNQATCMEGFDGTSGLVKSLVAGSLDQLYSMLRELLPLVQPEQKPKAVSKPGPIAKGPKAPPGRKLRDTDEDESLQFPDWVRPDDRKLLESNGRTYDVSVALDGTGNFTKIMDAIKKAPDYSSTRFVIYIKKGLYLENVEIKKKKWNIVMLGDGIDVTVISGNRSFIDGWTTFRSATFAVSGRGFLARDITFQNTAGPEKHQAVALRSDSDLSVFFRCAMRGYQDTLYTHTMRQFYRECTITGTVDFIFGDGTVVFQNCQILAKRGLPNQKNTITAQGRKDVNQPSGFSIQFSNISADADLVPYLNTTRTYLGRPWKLYSRTVFIRNNMSDVVRPEGWLEWNADFALDTLFYGEFMNYGPGSGLSSRVKWPGYHVFNNSDQANNFTVSQFIKGNLWLPSTGVTFSDGLYI

SEQ ID NO: 38805 - protein, 525 aa, Arabidopsis thaliana
  peptide (1)..(525): Ceres Seq. ID no. 13489577
MSCLKYFLILLMLGLCVSSEENFQYDYLKVPASEFVSSINTIVVVIRQVSSILSQFADFSGDRRLQNAVSDCLDLLDFSSEELTWSASASENPKGKGNGTGDVGSDTRTWLSAALSNQATCMEGFDGTSGLVKSLVAGSLDQLYSMLRELLPLVQPEQKPKAVSKPGPIAKGPKAPPGRKLRDTDEDESLQFPDWVRPDDRKLLESNGRTYDVSVALDGTGNFTKIMDAIKKAPDYSSTRFVIYIKKGLYLENVEIKKKKWNIVMLGDGIDVTVISGNRSFIDGWTTFRSATFAVSGRGFLARDITFQNTAGPEKHQAVALRSDSDLSVFFRCAMRGYQDTLYTHTMRQFYRECTITGTVDFIFGDGTVVFQNCQILAKRGLPNQKNTITAQGRKDVNQPSGFSIQFSNISADADLVPYLNTTRTYLGRPWKLYSRTVFIRNNMSDVVRPEGWLEWNADFALDTLFYGEFMNYGPGSGLSSRVKWPGYHVFNNSDQANNFTVSQFIKGNLWLPSTGVTFSDGLYI

SEQ ID NO: 38806 - protein, 514 aa, Arabidopsis thaliana
  peptide (1)..(514): Ceres Seq. ID no. 13489578
MLGLCVSSEENFQYDYLKVPASEFVSSINTIVVVIRQVSSILSQFADFSGDRRLQNAVSDCLDLLDFSSEELTWSASASENPKGKGNGTGDVGSDTRTWLSAALSNQATCMEGFDGTSGLVKSLVAGSLDQLYSMLRELLPLVQPEQKPKAVSKPGPIAKGPKAPPGRKLRDTDEDESLQFPDWVRPDDRKLLESNGRTYDVSVALDGTGNFTKIMDAIKKAPDYSSTRFVIYIKKGLYLENVEIKKKKWNIVMLGDGIDVTVISGNRSFIDGWTTFRSATFAVSGRGFLARDITFQNTAGPEKHQAVALRSDSDLSVFFRCAMRGYQDTLYTHTMRQFYRECTITGTVDFIFGDGTVVFQNCQILAKRGLPNQKNTITAQGRKDVNQPSGFSIQFSNISADADLVPYLNTTRTYLGRPWKLYSRTVFIRNNMSDVVRPEGWLEWNADFALDTLFYGEFMNYGPGSGLSSRVKWPGYHVFNNSDQANNFTVSQFIKGNLWLPSTGVTFSDGLYI

SEQ ID NO: 38807 - DNA, 609 bp, Arabidopsis thaliana
  misc_feature (1)..(609): Ceres Seq. ID no. 12323160
  misc_feature (1)..(609): Ortholog of  Ceres SEQ ID NO 15171175 as cited in SEQ ID NO 57476
  misc_feature (1)..(609): Ortholog of  Ceres SEQ ID NO 15178436 as cited in SEQ ID NO 57919
  misc_feature (1)..(609): Ortholog of  Ceres SEQ ID NO 13655808 as cited in SEQ ID NO 64901
atggcggaacttgagaatccaagtgtaatgtcgaagctgatagcattcttatcttcattgctagagcgagttgctgagtcaaacgatctgacccgacgagtcgcgactcagtcacagagagtttcggtgtttcatggactgagtcgaccaacgataacgattcagagctatctagagaggatcttcaaatacgcaaattgtagtccttcttgcttcgtcgttgcttacgtttatctcgatcgtttcactcacagacaaccttcacttcccatcaattcctttaacgtccatcgtcttctcatcactagtgtcatggtcgctgctaaattcctcgatgatctgtactacaacaatgcgtattacgcgaaagtgggaggaataagcacgaaggagatgaattttctagagctggatttcttattcgggttaggatttgaattaaacgtgacgccaaacacattcaacgcctacttctcttatcttcaaaaggaaatgactcttcttcaacctctctctctcgttgttgtcccatcatcaagatctctcattaccttcaacgacgatgaagcttctcatcagaaacaacaacaacaacaactcgctgtttga

SEQ ID NO: 38808 - protein, 202 aa, Arabidopsis thaliana
  peptide (1)..(202): Ceres Seq. ID no. 12323161
MAELENPSVMSKLIAFLSSLLERVAESNDLTRRVATQSQRVSVFHGLSRPTITIQSYLERIFKYANCSPSCFVVAYVYLDRFTHRQPSLPINSFNVHRLLITSVMVAAKFLDDLYYNNAYYAKVGGISTKEMNFLELDFLFGLGFELNVTPNTFNAYFSYLQKEMTLLQPLSLVVVPSSRSLITFNDDEASHQKQQQQQLAV

SEQ ID NO: 38809 - protein, 193 aa, Arabidopsis thaliana
  peptide (1)..(193): Ceres Seq. ID no. 12323162
MSKLIAFLSSLLERVAESNDLTRRVATQSQRVSVFHGLSRPTITIQSYLERIFKYANCSPSCFVVAYVYLDRFTHRQPSLPINSFNVHRLLITSVMVAAKFLDDLYYNNAYYAKVGGISTKEMNFLELDFLFGLGFELNVTPNTFNAYFSYLQKEMTLLQPLSLVVVPSSRSLITFNDDEASHQKQQQQQLAV

SEQ ID NO: 38810 - DNA, 1382 bp, Arabidopsis thaliana
  misc_feature (1)..(1382): Ceres Seq. ID no. 12323163
  misc_feature (1)..(1382): Ortholog of  Ceres SEQ ID NO 13596338 as cited in SEQ ID NO 68005
aagaacgtccaatccaatctataaatctccttgatggaatttccgtacatattacttgttcctttctgatctcttcttcatcggttttatgtttcatcgagtttgaatatttctttgattctctgtttgatgattgctagttctttagaagagcaatgagttattctggagccggactcggaaagcctggctcaggtaaaaggagaataagggatcttttaactcaatctgataaccgagtctgcgctgattgtggcgctccagatcctaagtgggcgtcagctaatattggagtgtttatatgcttaaaatgttgtggtgtccacagaagccttggcagtcatatctcaaaggtcttatccgtgacattggatgaatggtcagatgaagaagtcgattcgatgattgaaattggaggaaatgcctctgcaaattcaatttacgaggcgtttattcctgaaggtagctctaagcctggacctgatgctagtcatgaccagcgtatgaggttcattaggtcgaaatatgagcaccaagagtttctgaaaccaagcttgcggatcacatccgtgaggggctctagtacaaagactccagcatttctttcatcgagtctatctaaaaagattgttgatagctttcgcactaattcatcatcgcaacagccgcaacttgaaggcatggttgagtttattggattgttgaaggtgactattaaaaagggtaccaatatggccatccgagatatgatgtcaagtgatccctatgttgtgttgactctaggacaacagaaggctcaatctactgtagtgaagagcaacttaaaccctgtctggaatgaggaactcatgctctctgttcctcataactatggctcagtgaaattgcaagtgtttgactatgacacattttctgctgatgacataatgggagaagctgagattgatatccagcctctgattacatctgcaatggcttttggagaccctgaaatgtttggagatatgcagattggaaaatggctgaaatcgcacgacaatgctcttatagaagatagcatcatcaacattgcagatggtaaagtgaagcaagaggttcaaatcaagcttcagaatgttgaatctggtgaactagaactagaaatggagtggctacctcttgagcaataaataatcaactatataatagggtcattatatataaccaaacaaattttattactgtattcattattttaacattcccccttggttcttgtttgacaaatttttgaaactttgatctcattgaaaactttctttcgtactttgttgttgtaatgttcttttggcagattagatatttgtataactcatatgattatatgttttgactcatgttct

SEQ ID NO: 38811 - protein, 337 aa, Arabidopsis thaliana; identical to SEQ ID NO: 27546
  peptide (1)..(337): Ceres Seq. ID no. 12323164

SEQ ID NO: 38812 - protein, 255 aa, Arabidopsis thaliana; identical to SEQ ID NO: 27547
  peptide (1)..(255): Ceres Seq. ID no. 12323165

SEQ ID NO: 38813 - protein, 221 aa, Arabidopsis thaliana; identical to SEQ ID NO: 27548
  peptide (1)..(221): Ceres Seq. ID no. 12323166

SEQ ID NO: 38814 - DNA, 1077 bp, Arabidopsis thaliana
  misc_feature (1)..(1077): Ceres Seq. ID no. 13487185
  misc_feature (1)..(1077): Ortholog of  Ceres SEQ ID NO 14315060 as cited in SEQ ID NO 60039
  misc_feature (1)..(1077): Ortholog of  Ceres SEQ ID NO 13597809 as cited in SEQ ID NO 64598
  misc_feature (1)..(1077): Ortholog of  Ceres SEQ ID NO 12617960 as cited in SEQ ID NO 69051
  misc_feature (1)..(1077): Ortholog of  Ceres SEQ ID NO 13589401 as cited in SEQ ID NO 0
acaaccaatcccatctcttgtttcacttccgccctccatctttcttcgtgattgagagaatcttcaacgaaagaaagcaactttttttgggtgaaattcacagaacaaccaaggtttttcttcttcttcttcttctccagttcctacagaatcatgcctgacaagaacatcgtagaggacgttatcggtgatttggtggataacttcacggagactgttcagaagaacaaacatggttcctccttcttcgaacaagaagattccgtcagttctcgtttcaaccgtttgtttgatcgccagaagccaattcatcatgtcttaggcggtggcaaatctgctgatgtgttgttatggaggaacaagaagatctctgcaagtgttttgatgggagctaccgcaatttgggtgctttttgaatggatcaatttccatttcctgtctctcgtttgctatgccctcttgcttggtatgattgcacaattcgtttggtctaacgcctctggattcttaaaccgctcacagtctagagtgcctcgcctagttcttccaaaggatttctttgctgaagtcggtgtggccgttggaaaagaagttaaccgcggtttgttgtttcttcaggacttggcttgtaaagggaatttgaaacagttcctcatggctgtaatcggactatgggtagctgcaatggtcgggagctgttgcaatttcctaactgttttgtatatcgggtttgttggggcacacacaatgccggttctgtatgagagatacgaagacgaagtggatggttttatggattctatgatcatgaagtttcatagtcattacaagaagcttgatactgggtttctcagtagaatcccaagtggaaagtttggattaaagaagcgtgagtgactaaatcactcaagcattttcttattttaccttgtttgttgttagaacaatatggattatggtttgctaaatgaatgttttgagaatattattcattcatgtagattttgtgtatttccttactaaacaataccttgtccatgtatttgtcaataccttggttaataagagaatcatcat

SEQ ID NO: 38815 - protein, 247 aa, Arabidopsis thaliana; identical to SEQ ID NO: 29724
  peptide (1)..(247): Ceres Seq. ID no. 13487186

SEQ ID NO: 38816 - protein, 170 aa, Arabidopsis thaliana; identical to SEQ ID NO: 29725
  peptide (1)..(170): Ceres Seq. ID no. 13487187

SEQ ID NO: 38817 - protein, 142 aa, Arabidopsis thaliana; identical to SEQ ID NO: 29726
  peptide (1)..(142): Ceres Seq. ID no. 13487188

SEQ ID NO: 38818 - DNA, 2414 bp, Arabidopsis thaliana
  misc_feature (1)..(2414): Ceres Seq. ID no. 12325652
  misc_feature (1)..(2414): Ortholog of  Ceres SEQ ID NO 14313151 as cited in SEQ ID NO 54664
aagaactttcccagttttgttttttaatcatatcaaagcaaactgtgtgatggataagtacaaagtcgccggaaaatttggtctcccggacatcacggtggcagagatggaatctttagctagcttttgtgaagctgtcttgccttcagtgcagccaccgccggaagagctttccggtgaaggtgataaccatcggaacaaagaggctctccggtcattttactcaacttctgggtctaaaactcctgtccttcgccagagcattgagctggtcacgaaacgagggacaatagaagcttatattgctactaggcttatattgttcttgcttgctactcggcttgggacgcttctcatttgtggaaccgagtgtttggtctcaagatggccttttgtcgagaaatttagtgagctctcgttggagaagagagaaagagtacttcagaaacaattcaagaattggattctgactccaattagagctgcttttgtctacatcaaagttgcattcctcttctgtttcttctcccgggtgaatccaaatggcgaaaacccggcatgggaagccatagggtatcgtgttaaccccgatgagaacaaaccttctgaaactcataacgaaagaccacttgagaaagggatagtggagacgatggaagaaacagagcagactcttcttgaatcacttgctcataaaggcctagaagcggttcttgacacggagcatgatgcgatcagaataaaatgtgatgttgtggtcgtcgggtctggttcaggaggaggcgtagcagcttctgttctagcgaaatctggtttaaaagtggttgttcttgaaaaaggaagctactttacgccttctgaacatcgtcctttcgaaggtcctggcttggataaactctacgagaatggagggattctcccgagtgttgatgggagttttatggtgttggctggagcaactgtaggtggtggatctgctgtgaactggtctgcgtgtatcaaaaccccgaagtcggttcttcaagaatggtcagaggatcaaaatatacctcttttcggtactaaagaatatctaacggctatggaagttgtgtggaagaggatgggtgtcacggagaaatgtgaactggagagttttcagaatcagattctgagaaaaggttgcgaaaatctcgggttcaatgttgaaaacgtgccaagaaactcctcggagagtcattactgtggatcttgcgggtatggatgtagacaaggagacaagaaaggaagtgaccggacttggcttgtcgatgcggtggggcacggtgccgtgattcttactggatgtaaagcggagagattcatactcgaaaagaacggtagtaacaaaggaggcaagcaaatgaaatgtttgggagtgatggctaaatctttaaacggaaacatagcaaagatgttaaagattgaagctaaagtaacggtttcagcagggggtgctcttttaacacctccgttgatgatatctagcgggttgagaaaccgaaacatcggtaaaaaccttcacttacaccctgttttaatggcgtggggttacttcccggacaaggaatcttctaacatcagtttcaagggaaattcatatgaaggcgggatcataacatcagtgagcaaagtgttatcagaagattctgaagtcagagcaatcatagagacaccgcaactaggaccaggttcgttctccgttttaactccttggacctctgggcttgacatgaagaaaagaatggctagatactcaagaaccgcgagtctcataaccatagttagagaccgcgggtcaggagaagttaaaaccgaaggcagaataaactacaccgtggacaaaaccgacagagataatctcaaagctgggcttagagagtcgctaaggatactaatagcagctggagcagaggaagtgggaactcacagaagcgacgggcagagactaatatgcaaaggtgtcaatgagaattcgatccaagagtttttagactcggtgagtacagaggaaggagcaaagggaatgactgagaaatggaacgtttatagctcagctcatcagatgggaagctgtagaattggagaaaatgaaaaagaaggtgcaatagatttgaatggagagagttgggaagcagagaagttgtttgtgtgcgatgcaagtgcgttgcctagtgctgttggtgttaaccctatgatcacagtcatgtctacggcttattgtatctccacaagaatcgctaagtccatgaccactggtttatctcattgaactaaaataacgtatactttctattcatcctaatcaaatttatgtgtaaccaacatgataattcatagttaaagactcttctattgatcatgtctactaataaaatccatgttttggaaacgtt

SEQ ID NO: 38819 - protein, 762 aa, Arabidopsis thaliana
  peptide (1)..(762): Ceres Seq. ID no. 12325653
RTFPVLFFNHIKANCVMDKYKVAGKFGLPDITVAEMESLASFCEAVLPSVQPPPEELSGEGDNHRNKEALRSFYSTSGSKTPVLRQSIELVTKRGTIEAYIATRLILFLLATRLGTLLICGTECLVSRWPFVEKFSELSLEKRERVLQKQFKNWILTPIRAAFVYIKVAFLFCFFSRVNPNGENPAWEAIGYRVNPDENKPSETHNERPLEKGIVETMEETEQTLLESLAHKGLEAVLDTEHDAIRIKCDVVVVGSGSGGGVAASVLAKSGLKVVVLEKGSYFTPSEHRPFEGPGLDKLYENGGILPSVDGSFMVLAGATVGGGSAVNWSACIKTPKSVLQEWSEDQNIPLFGTKEYLTAMEVVWKRMGVTEKCELESFQNQILRKGCENLGFNVENVPRNSSESHYCGSCGYGCRQGDKKGSDRTWLVDAVGHGAVILTGCKAERFILEKNGSNKGGKQMKCLGVMAKSLNGNIAKMLKIEAKVTVSAGGALLTPPLMISSGLRNRNIGKNLHLHPVLMAWGYFPDKESSNISFKGNSYEGGIITSVSKVLSEDSEVRAIIETPQLGPGSFSVLTPWTSGLDMKKRMARYSRTASLITIVRDRGSGEVKTEGRINYTVDKTDRDNLKAGLRESLRILIAAGAEEVGTHRSDGQRLICKGVNENSIQEFLDSVSTEEGAKGMTEKWNVYSSAHQMGSCRIGENEKEGAIDLNGESWEAEKLFVCDASALPSAVGVNPMITVMSTAYCISTRIAKSMTTGLSH

SEQ ID NO: 38820 - protein, 746 aa, Arabidopsis thaliana
  peptide (1)..(746): Ceres Seq. ID no. 12325654
MDKYKVAGKFGLPDITVAEMESLASFCEAVLPSVQPPPEELSGEGDNHRNKEALRSFYSTSGSKTPVLRQSIELVTKRGTIEAYIATRLILFLLATRLGTLLICGTECLVSRWPFVEKFSELSLEKRERVLQKQFKNWILTPIRAAFVYIKVAFLFCFFSRVNPNGENPAWEAIGYRVNPDENKPSETHNERPLEKGIVETMEETEQTLLESLAHKGLEAVLDTEHDAIRIKCDVVVVGSGSGGGVAASVLAKSGLKVVVLEKGSYFTPSEHRPFEGPGLDKLYENGGILPSVDGSFMVLAGATVGGGSAVNWSACIKTPKSVLQEWSEDQNIPLFGTKEYLTAMEVVWKRMGVTEKCELESFQNQILRKGCENLGFNVENVPRNSSESHYCGSCGYGCRQGDKKGSDRTWLVDAVGHGAVILTGCKAERFILEKNGSNKGGKQMKCLGVMAKSLNGNIAKMLKIEAKVTVSAGGALLTPPLMISSGLRNRNIGKNLHLHPVLMAWGYFPDKESSNISFKGNSYEGGIITSVSKVLSEDSEVRAIIETPQLGPGSFSVLTPWTSGLDMKKRMARYSRTASLITIVRDRGSGEVKTEGRINYTVDKTDRDNLKAGLRESLRILIAAGAEEVGTHRSDGQRLICKGVNENSIQEFLDSVSTEEGAKGMTEKWNVYSSAHQMGSCRIGENEKEGAIDLNGESWEAEKLFVCDASALPSAVGVNPMITVMSTAYCISTRIAKSMTTGLSH

SEQ ID NO: 38821 - protein, 727 aa, Arabidopsis thaliana
  peptide (1)..(727): Ceres Seq. ID no. 12325655
MESLASFCEAVLPSVQPPPEELSGEGDNHRNKEALRSFYSTSGSKTPVLRQSIELVTKRGTIEAYIATRLILFLLATRLGTLLICGTECLVSRWPFVEKFSELSLEKRERVLQKQFKNWILTPIRAAFVYIKVAFLFCFFSRVNPNGENPAWEAIGYRVNPDENKPSETHNERPLEKGIVETMEETEQTLLESLAHKGLEAVLDTEHDAIRIKCDVVVVGSGSGGGVAASVLAKSGLKVVVLEKGSYFTPSEHRPFEGPGLDKLYENGGILPSVDGSFMVLAGATVGGGSAVNWSACIKTPKSVLQEWSEDQNIPLFGTKEYLTAMEVVWKRMGVTEKCELESFQNQILRKGCENLGFNVENVPRNSSESHYCGSCGYGCRQGDKKGSDRTWLVDAVGHGAVILTGCKAERFILEKNGSNKGGKQMKCLGVMAKSLNGNIAKMLKIEAKVTVSAGGALLTPPLMISSGLRNRNIGKNLHLHPVLMAWGYFPDKESSNISFKGNSYEGGIITSVSKVLSEDSEVRAIIETPQLGPGSFSVLTPWTSGLDMKKRMARYSRTASLITIVRDRGSGEVKTEGRINYTVDKTDRDNLKAGLRESLRILIAAGAEEVGTHRSDGQRLICKGVNENSIQEFLDSVSTEEGAKGMTEKWNVYSSAHQMGSCRIGENEKEGAIDLNGESWEAEKLFVCDASALPSAVGVNPMITVMSTAYCISTRIAKSMTTGLSH

SEQ ID NO: 38822 - DNA, 1371 bp, Arabidopsis thaliana
  misc_feature (1)..(1371): Ceres Seq. ID no. 12340245
  misc_feature (1)..(1371): Ortholog of  Ceres SEQ ID NO 13584271 as cited in SEQ ID NO 63893
aacgtagaagaagctgatttaaatcccaaatccatttcaacgtagaagcttctacagattcgatttgggtgtctttggttttggatttggtaaagcttctcggtcacttgcttggtgattgaaattgaatcgattgtgattgtgattgtgagggaattatggctcaagccgtagaagaatggtacaagcagatgccgattataacccggtcgtatctcacggcggctgtagtcaccaccgtcgggtgttcgctcgaggtttgaagttttctgactcatgaaagcctttagctttgctctgattgatctgattagtttttccttgaaaaattgaatctttgtgtttctgttatgtatgtggatggttttgtttttttgatgtaaaaggtagctctttattggaattggggtagctaacgaatggttaagtttagagctaagtgttgtggtgttatggcttatgatgtaacattttgtggaacatttttttgttttgcagattatatctccttataatctctacctaaatcctacccttgtggtgaagcaataccagttctggcgtcttgttaccaatttcctttatttcagaaagatggatttggactttttgttccatatgttttttctagctcgatactgcaaactgctcgaagaaaactccttcaggggaaagactgcggatttcctttacatgctcttattcggggcaactgttctaactggtattgttctcattggcggaatgataccttatttgtccgtttcattctccaaaatcatcttcctcagcaattcattgactttcatgatggtctatgtatggagtaaacaaaatccttacatccacatgagtttccttggcctcttcactttcacagcagcttatttaccatgggtacttcttggattctctatccttgttggtgcaagtgcatggggggattttctgggaatgatagcgggccacgcatactacttcttggcgtttgtgtatccacgaatgacggatcgacgtcccttgaaaactccatctttcctcaaagccctatttgctgatgagccagtcgtgattgcaaggccagaagatgtgagatttgctcatgcgccttttgatgaaatccaccaagactgaatcttgatcctccacaaaacaccagccacaacgcacagttcaagtgtactcagataatgttattgattcttgacctttatagttgtggataatgtggaagtgagatagtgttggctctgatttttttccctagttttccgtcttcttttcttgtccgatacaaatgtgtttcctccttgtgcatatgaactcaaattgtgtacaaagtcttcaaaagtactagtttatagtttcgtc

SEQ ID NO: 38823 - protein, 179 aa, Arabidopsis thaliana; identical to SEQ ID NO: 21060
  peptide (1)..(179): Ceres Seq. ID no. 12340246

SEQ ID NO: 38824 - protein, 171 aa, Arabidopsis thaliana
  peptide (1)..(171): Ceres Seq. ID no. 12340247
MFFLARYCKLLEENSFRGKTADFLYMLLFGATVLTGIVLIGGMIPYLSVSFSKIIFLSNSLTFMMVYVWSKQNPYIHMSFLGLFTFTAAYLPWVLLGFSILVGASAWGDFLGMIAGHAYYFLAFVYPRMTDRRPLKTPSFLKALFADEPVVIARPEDVRFAHAPFDEIHQD

SEQ ID NO: 38825 - protein, 146 aa, Arabidopsis thaliana
  peptide (1)..(146): Ceres Seq. ID no. 12340248
MLLFGATVLTGIVLIGGMIPYLSVSFSKIIFLSNSLTFMMVYVWSKQNPYIHMSFLGLFTFTAAYLPWVLLGFSILVGASAWGDFLGMIAGHAYYFLAFVYPRMTDRRPLKTPSFLKALFADEPVVIARPEDVRFAHAPFDEIHQD

SEQ ID NO: 38826 - DNA, 2701 bp, Arabidopsis thaliana
  misc_feature (1)..(2701): Ceres Seq. ID no. 12599860
  misc_feature (1)..(2701): Ortholog of  Ceres SEQ ID NO 14313284 as cited in SEQ ID NO 67146
  misc_feature (1)..(2701): Ortholog of  Ceres SEQ ID NO 14308925 as cited in SEQ ID NO 0
gagtaacccgaaagcaaagactgagagaaccaaggctccgatctaacaatgaggaagaggacgctcgtgtccgttttgttccttttctcgcttctgtttcttcttccagatcaaggaagaaagttacacgcgaatgcagaagagagttccgatgatgttacagatccaccaaaagttgaggagaaaattggtggtcacggtggtttatcgacggattccgatgtagttcatagagagtctgagtcgatgtcaaagaagacgcttcgcagtaacgcggagaagtttgagttccaagctgaggtttctcggcttatggacattattatcaactctctatacagtaacaaggacattttcttaagagagttgatctccaatgcttctgatgccttggacaaaattaggttccttgcactcactgacaaagacgttttgggtgaaggtgacactgctaagcttgagatccagattaagctagacaaagccaagaagattctttctattcgagaccggggaattggtatgactaaggaagacttaatcaagaaccttggtaccatagcaaaatctggaacgtcagcttttgttgagaaaatgcaatcaagtggggatttgaaccttattggacaatttggagttggattctactctgcctatcttgttgctgactacattgaagtcattagcaagcacaatgatgacagccagtatgtatgggaatcaaaggctaacggtaaatttgctgtttccgaggatacatggaatgagcctcttggacgtggaaccgagattagattacatcttagggatgaagctggcgagtacctagaagaaagtaaacttaaggaattggtgaagagatattctgaattcattaacttccctatctccctctgggctagcaaagaggttgaaaccgaggtcccagttgaggaagatgaatcagctgatgaggaaactgaaaccacctctaccgaggaagaaaaggaagaagatgctgaggaggaagatggtgagaaaaagcagaaaaccaagaaggtgaaagaaacagtttatgaatgggagcttctgaatgatgttaaggctatatggctgagaagtccaaaggaggtgacagaggaagagtacactaaattctaccactctctctcaaaggattttaccgacgagaagccaatggcttggagtcactttaatgctgaaggtgatgttgaattcaaggctgtgttgtatgttcctccgaaagctccccatgatctatacgagagctattacaacagcaacaaggcgaacttgaagctatatgtcaggagggtgttcatctcagatgaatttgatgagcttctgcctaagtatttgagtttcttgaagggtcttgttgactctgacacattgcctctaaatgtatcaagagaaatgcttcaacaacacagcagcttaaagacaattaagaagaagcttatccgaaaggcgcttgatatgatccgcaagcttgctgaagaagatcctgatgaaatccatgatgatgagaaaaaagatgtggagaagtctggtgagaacgatgagaagaagggtcaatacacaaaattctggaacgagtttggcaagtctgtcaaactaggtatcattgaggatgctgctaacaggaaccgcttggcaaaacttcttcgttttgagacaacaaagtccgatggaaaattgacttccctggatcagtacattaagagaatgaaaaagagccaaaaggacatattttacatcacaggaagcagcaaggaacagctagagaaatctccattcctggagaggctcatcaagaagggctatgaggtcatcttcttcacagacccagttgatgaatacttgatgcaatacctgatggattacgaagacaaaaagttccagaatgtgtccaaggaaggactgaaggttgggaaagattcaaaagacaaggagctgaaggaagcattcaaggagctaacaaagtggtggaaaggaaatctcgctagcgaaaacgtagacgatgtcaaaatcagcaaccgtttggctgacactccatgtgtagtcgtaacatccaagtttggatggagtgctaatatggagaggatcatgcagtcccaaactctctcggatgctaataagcaagcttacatgcgcggaaagagagtcctcgagatcaacccacgacaccctatcatcaaagaactcaaggatagaattgcaagtgacccagaggatgagagtgtgaaggaaacagcacagctcatgtaccagacagctttgatcgagagtggattcatactcaccgacccaaaagactttgctgcccgtatttataactcagtcaagagcggtctgaacatcagccctgatgcagtagccgacgaggaaatcgaggcagcagaggaaccagagaccagtgaggcaactgagacgaaatcagatgacttggctggtggtctaaacattgaagccgaacccgttgagcaacaagaagagaacaccaaggacgaactgtagatttcacttctgatgtttctcctttgtgtttacctctttagtttaaagcagaacatcgttttactcgaatatcaagattagtttaattaagcagtttttgatggattatgtaaacgcactacttgcattctagagatcaaggaacctaaacttcttcttttcaatgtatgagttttttatc

SEQ ID NO: 38827 - protein, 823 aa, Arabidopsis thaliana
  peptide (1)..(823): Ceres Seq. ID no. 12599861
MRKRTLVSVLFLFSLLFLLPDQGRKLHANAEESSDDVTDPPKVEEKIGGHGGLSTDSDVVHRESESMSKKTLRSNAEKFEFQAEVSRLMDIIINSLYSNKDIFLRELISNASDALDKIRFLALTDKDVLGEGDTAKLEIQIKLDKAKKILSIRDRGIGMTKEDLIKNLGTIAKSGTSAFVEKMQSSGDLNLIGQFGVGFYSAYLVADYIEVISKHNDDSQYVWESKANGKFAVSEDTWNEPLGRGTEIRLHLRDEAGEYLEESKLKELVKRYSEFINFPISLWASKEVETEVPVEEDESADEETETTSTEEEKEEDAEEEDGEKKQKTKKVKETVYEWELLNDVKAIWLRSPKEVTEEEYTKFYHSLSKDFTDEKPMAWSHFNAEGDVEFKAVLYVPPKAPHDLYESYYNSNKANLKLYVRRVFISDEFDELLPKYLSFLKGLVDSDTLPLNVSREMLQQHSSLKTIKKKLIRKALDMIRKLAEEDPDEIHDDEKKDVEKSGENDEKKGQYTKFWNEFGKSVKLGIIEDAANRNRLAKLLRFETTKSDGKLTSLDQYIKRMKKSQKDIFYITGSSKEQLEKSPFLERLIKKGYEVIFFTDPVDEYLMQYLMDYEDKKFQNVSKEGLKVGKDSKDKELKEAFKELTKWWKGNLASENVDDVKISNRLADTPCVVVTSKFGWSANMERIMQSQTLSDANKQAYMRGKRVLEINPRHPIIKELKDRIASDPEDESVKETAQLMYQTALIESGFILTDPKDFAARIYNSVKSGLNISPDAVADEEIEAAEEPETSEATETKSDDLAGGLNIEAEPVEQQEENTKDEL

SEQ ID NO: 38828 - protein, 757 aa, Arabidopsis thaliana
  peptide (1)..(757): Ceres Seq. ID no. 12599862
MSKKTLRSNAEKFEFQAEVSRLMDIIINSLYSNKDIFLRELISNASDALDKIRFLALTDKDVLGEGDTAKLEIQIKLDKAKKILSIRDRGIGMTKEDLIKNLGTIAKSGTSAFVEKMQSSGDLNLIGQFGVGFYSAYLVADYIEVISKHNDDSQYVWESKANGKFAVSEDTWNEPLGRGTEIRLHLRDEAGEYLEESKLKELVKRYSEFINFPISLWASKEVETEVPVEEDESADEETETTSTEEEKEEDAEEEDGEKKQKTKKVKETVYEWELLNDVKAIWLRSPKEVTEEEYTKFYHSLSKDFTDEKPMAWSHFNAEGDVEFKAVLYVPPKAPHDLYESYYNSNKANLKLYVRRVFISDEFDELLPKYLSFLKGLVDSDTLPLNVSREMLQQHSSLKTIKKKLIRKALDMIRKLAEEDPDEIHDDEKKDVEKSGENDEKKGQYTKFWNEFGKSVKLGIIEDAANRNRLAKLLRFETTKSDGKLTSLDQYIKRMKKSQKDIFYITGSSKEQLEKSPFLERLIKKGYEVIFFTDPVDEYLMQYLMDYEDKKFQNVSKEGLKVGKDSKDKELKEAFKELTKWWKGNLASENVDDVKISNRLADTPCVVVTSKFGWSANMERIMQSQTLSDANKQAYMRGKRVLEINPRHPIIKELKDRIASDPEDESVKETAQLMYQTALIESGFILTDPKDFAARIYNSVKSGLNISPDAVADEEIEAAEEPETSEATETKSDDLAGGLNIEAEPVEQQEENTKDEL

SEQ ID NO: 38829 - protein, 735 aa, Arabidopsis thaliana
  peptide (1)..(735): Ceres Seq. ID no. 12599863
MDIIINSLYSNKDIFLRELISNASDALDKIRFLALTDKDVLGEGDTAKLEIQIKLDKAKKILSIRDRGIGMTKEDLIKNLGTIAKSGTSAFVEKMQSSGDLNLIGQFGVGFYSAYLVADYIEVISKHNDDSQYVWESKANGKFAVSEDTWNEPLGRGTEIRLHLRDEAGEYLEESKLKELVKRYSEFINFPISLWASKEVETEVPVEEDESADEETETTSTEEEKEEDAEEEDGEKKQKTKKVKETVYEWELLNDVKAIWLRSPKEVTEEEYTKFYHSLSKDFTDEKPMAWSHFNAEGDVEFKAVLYVPPKAPHDLYESYYNSNKANLKLYVRRVFISDEFDELLPKYLSFLKGLVDSDTLPLNVSREMLQQHSSLKTIKKKLIRKALDMIRKLAEEDPDEIHDDEKKDVEKSGENDEKKGQYTKFWNEFGKSVKLGIIEDAANRNRLAKLLRFETTKSDGKLTSLDQYIKRMKKSQKDIFYITGSSKEQLEKSPFLERLIKKGYEVIFFTDPVDEYLMQYLMDYEDKKFQNVSKEGLKVGKDSKDKELKEAFKELTKWWKGNLASENVDDVKISNRLADTPCVVVTSKFGWSANMERIMQSQTLSDANKQAYMRGKRVLEINPRHPIIKELKDRIASDPEDESVKETAQLMYQTALIESGFILTDPKDFAARIYNSVKSGLNISPDAVADEEIEAAEEPETSEATETKSDDLAGGLNIEAEPVEQQEENTKDEL

SEQ ID NO: 38830 - DNA, 1453 bp, Arabidopsis thaliana
  misc_feature (1)..(1453): Ceres Seq. ID no. 13574966
  misc_feature (1)..(1453): Ortholog of  Ceres SEQ ID NO 14304823 as cited in SEQ ID NO 54902
gaaattttccccagaaacaacaacagttcgagcaacaaaaccctgaactctctgtttctgttaaactcgtaaagtctcaatctttacgatttgttcttaaaaattctttcatttaaagttcttaaattggtcaacagtgtttatttttcctccaagtttgttaataatttaagatttccccacatgcattgaatatttgtcttttcttcttctttcttccatttcaaagttgtgagatttgattcgatgcttatgcagattcacaattttatgagaaattggacaaaaccctgatgtcggattccgtcaaaacgacggtggatccgcttttgaaagatttggatgggaaaaaagagagtttcaggcggaacgttgtgtctatggcagctgagttaaagcaagtgagaggtcgtttggtttctcaagaacaattctttgttaaagaaagcttttgtagaaaagaagcagagaagaaagctaagaacatggaaatggagatctgtaaattgcagaagaagttggaagatagaaattgtgagcttgtagcttcaacttctgctgctgaaaagtttctagaagaagtggacgatctgagatcacagctagctttaacaaaggacattgcagaaacaagtgctgcttctgctcaatccgcacagcttcaatgctcagtgctaacagaacaacttgacgacaaaacacgttctctaagagaacacgaagaccgtgtaactcatctcggtcaccagcttgataatcttcagagagatttgaagacaagagaatgttctcaaaaacagctgagagaggaagttatgagaatcgagcgtgagataactgaagctgttgcaaagtctgggaaaggcacagaatgtgagctcaggaaacttcttgaagaggtttctccaaagaactttgagagaatgaacatgttattggcggtaaaagacgaagagattgcaaagttaaaagatgatgtgaagttaatgtcagctcattggaaactcaaaactaaggaacttgaatctcagttggagagacaaagaagagcagatcaagagttgaagaagaaggtactgaaactagagttttgcctgcaagaagctcgtagtcagacaagaaagctacagagggcgggggagagacgagacaaggcaatcaaagagctaagtgatcagattactggaaaacagttgaatgaatcggtttcaggggagaaacaaaacttctgggatacttcagggttcaagatcgttgtgtcaatgtcgatgttgatattagttattatctccaaaagatgagttcttttgtcttgaactctctttctttttgttggtgtgtaaatgcagtagttgcagatagtagtcagataatggtgcatattattactccttgaggtttagcgaagagaaatcttgcttccctttgttaagttataagtttgttcatgtgt

SEQ ID NO: 38831 - protein, 335 aa, Arabidopsis thaliana
  peptide (1)..(335): Ceres Seq. ID no. 13574967
MSDSVKTTVDPLLKDLDGKKESFRRNVVSMAAELKQVRGRLVSQEQFFVKESFCRKEAEKKAKNMEMEICKLQKKLEDRNCELVASTSAAEKFLEEVDDLRSQLALTKDIAETSAASAQSAQLQCSVLTEQLDDKTRSLREHEDRVTHLGHQLDNLQRDLKTRECSQKQLREEVMRIEREITEAVAKSGKGTECELRKLLEEVSPKNFERMNMLLAVKDEEIAKLKDDVKLMSAHWKLKTKELESQLERQRRADQELKKKVLKLEFCLQEARSQTRKLQRAGERRDKAIKELSDQITGKQLNESVSGEKQNFWDTSGFKIVVSMSMLILVIISKR

SEQ ID NO: 38832 - protein, 306 aa, Arabidopsis thaliana
  peptide (1)..(306): Ceres Seq. ID no. 13574968
MAAELKQVRGRLVSQEQFFVKESFCRKEAEKKAKNMEMEICKLQKKLEDRNCELVASTSAAEKFLEEVDDLRSQLALTKDIAETSAASAQSAQLQCSVLTEQLDDKTRSLREHEDRVTHLGHQLDNLQRDLKTRECSQKQLREEVMRIEREITEAVAKSGKGTECELRKLLEEVSPKNFERMNMLLAVKDEEIAKLKDDVKLMSAHWKLKTKELESQLERQRRADQELKKKVLKLEFCLQEARSQTRKLQRAGERRDKAIKELSDQITGKQLNESVSGEKQNFWDTSGFKIVVSMSMLILVIISKR

SEQ ID NO: 38833 - protein, 271 aa, Arabidopsis thaliana
  peptide (1)..(271): Ceres Seq. ID no. 13574969
MEMEICKLQKKLEDRNCELVASTSAAEKFLEEVDDLRSQLALTKDIAETSAASAQSAQLQCSVLTEQLDDKTRSLREHEDRVTHLGHQLDNLQRDLKTRECSQKQLREEVMRIEREITEAVAKSGKGTECELRKLLEEVSPKNFERMNMLLAVKDEEIAKLKDDVKLMSAHWKLKTKELESQLERQRRADQELKKKVLKLEFCLQEARSQTRKLQRAGERRDKAIKELSDQITGKQLNESVSGEKQNFWDTSGFKIVVSMSMLILVIISKR

SEQ ID NO: 38834 - DNA, 596 bp, Arabidopsis thaliana
  misc_feature (1)..(596): Ceres Seq. ID no. 12422420
  misc_feature (1)..(596): Ortholog of  Ceres SEQ ID NO 14304353 as cited in SEQ ID NO 20380
atcacttacttaacatactaagagagttattagatcttgaaaaacatggcttccaaggctttgattctgttgggtctcttcgcaattcttctggtggtctccgaagtttctgccgcaaggcagtcgggcatggtgaagccagagagtgaggaaactgtgcaacctgaaggttatcacggaggacatggtggtcacggagggggaggccactacggaggaggaggccacgggcatggaggacacaacggaggagggggccacggacttaacggatacggaggaggacatggaggacactacggaggaggaggaggacactacggaggaggaggaggccacggtggtggtggacactatggaggtggaggacaccatggaggaggaggtcacgggctgaacgaacctgttcagacgaagccgggtgtttaaaagttataactatcaaataaattcaccatgcataattgcatctctatatacacttatgtcttatatgtatccatcaaaataaaccatggtgagtttgtaatgcagttccttcagaaatgtgtggaataatgtttcacaataataatagaatatctctgttgattctg

SEQ ID NO: 38835 - protein, 127 aa, Arabidopsis thaliana
  peptide (1)..(127): Ceres Seq. ID no. 12422421
MASKALILLGLFAILLVVSEVSAARQSGMVKPESEETVQPEGYHGGHGGHGGGGHYGGGGHGHGGHNGGGGHGLNGYGGGHGGHYGGGGGHYGGGGGHGGGGHYGGGGHHGGGGHGLNEPVQTKPGV

SEQ ID NO: 38836 - protein, 99 aa, Arabidopsis thaliana
  peptide (1)..(99): Ceres Seq. ID no. 12422422
MVKPESEETVQPEGYHGGHGGHGGGGHYGGGGHGHGGHNGGGGHGLNGYGGGHGGHYGGGGGHYGGGGGHGGGGHYGGGGHHGGGGHGLNEPVQTKPGV

SEQ ID NO: 38837 - protein, 70 aa, Arabidopsis thaliana; identical to SEQ ID NO: 28937
  peptide (1)..(70): Ceres Seq. ID no. 12422423

SEQ ID NO: 38838 - DNA, 1248 bp, Arabidopsis thaliana
  misc_feature (1)..(1248): Ceres Seq. ID no. 13492921
  misc_feature (1)..(1248): Ortholog of  Ceres SEQ ID NO 13596474 as cited in SEQ ID NO 62169
  misc_feature (1)..(1248): Ortholog of  Ceres SEQ ID NO 13598714 as cited in SEQ ID NO 62656
  misc_feature (1)..(1248): Ortholog of  Ceres SEQ ID NO 13596969 as cited in SEQ ID NO 63375
  misc_feature (1)..(1248): Ortholog of  Ceres SEQ ID NO 13597519 as cited in SEQ ID NO 64759
  misc_feature (1)..(1248): Ortholog of  Ceres SEQ ID NO 13597870 as cited in SEQ ID NO 64982
  misc_feature (1)..(1248): Ortholog of  Ceres SEQ ID NO 13587054 as cited in SEQ ID NO 0
accaactcctctaataagcttcttctttctatccctcacttttacaaacaaagggagaccaaaaatgggtctaagcaaaactattcccttagtgttactcccgattttgatgtttggggttttgagtaacgctcagcttacctctgatttttactccacgacatgccctaacgtcacagccattgctcggggactgatcgagcgagcaagccgtaacgacgtcagactcactgctaaagtcatgcgtcttcactttcatgactgtttcgtgaacgggtgcgatggttcggtactattggacgctgctccagcggatggggtagagggtgaaaaggaggctttccaaaacgcgggttctcttgatggattcgaagtgatcgatgatatcaaaaccgccctcgagaatgtttgtcccggagttgtctcttgtgctgatatcctcgctatcgcagctgaaatctctgttgcactggcgggagggccgtcattggacgtattgctaggaaggagagatggccggacagcgatccgtgcggacgcagtggctgcacttccactaggacctgattctctcgagattcttacttccaaattctccgtacataatcttgacactaccgatctcgtcgctttatctggtgctcataccttcgggagggttcagtgtggagtgataaacaatcgtctacacaactttagtggtaacagcggacagtccgacccaagtatcgaaccggagttcttgcaaacgttacgacgacaatgcccgcaaggcggagatctcaccgcaagggcgaatcttgatcctacgagccccgactcatttgataacgactatttcaagaaccttcaaaacaaccgcggagtgattgaatcagatcaaatcttgttctcttcgacaggagcgcctactgtgtctttggtgaatcgttttgctgagaaccaaaatgagttctttacaaattttgcgagatcaatgatcaagatgggaaatgtgaggattctcacaggacgtgagggagagatacgtagagactacagacgcgtcaattaataagttttgcatggttaaatgatcaaacgtaacttattgttattcatgaaataagtgttctttagtttgtgcttctccacaattaattgtttttcttcttttgattttatttactgttaagcatgccattgttacttgtaattgtaaatcttatataatatttttctttttgaaaaaatccactatcatgtctg

SEQ ID NO: 38839 - protein, 350 aa, Arabidopsis thaliana
  peptide (1)..(350): Ceres Seq. ID no. 13492922
PTPLISFFFLSLTFTNKGRPKMGLSKTIPLVLLPILMFGVLSNAQLTSDFYSTTCPNVTAIARGLIERASRNDVRLTAKVMRLHFHDCFVNGCDGSVLLDAAPADGVEGEKEAFQNAGSLDGFEVIDDIKTALENVCPGVVSCADILAIAAEISVALAGGPSLDVLLGRRDGRTAIRADAVAALPLGPDSLEILTSKFSVHNLDTTDLVALSGAHTFGRVQCGVINNRLHNFSGNSGQSDPSIEPEFLQTLRRQCPQGGDLTARANLDPTSPDSFDNDYFKNLQNNRGVIESDQILFSSTGAPTVSLVNRFAENQNEFFTNFARSMIKMGNVRILTGREGEIRRDYRRVN

SEQ ID NO: 38840 - protein, 329 aa, Arabidopsis thaliana
  peptide (1)..(329): Ceres Seq. ID no. 13492923
MGLSKTIPLVLLPILMFGVLSNAQLTSDFYSTTCPNVTAIARGLIERASRNDVRLTAKVMRLHFHDCFVNGCDGSVLLDAAPADGVEGEKEAFQNAGSLDGFEVIDDIKTALENVCPGVVSCADILAIAAEISVALAGGPSLDVLLGRRDGRTAIRADAVAALPLGPDSLEILTSKFSVHNLDTTDLVALSGAHTFGRVQCGVINNRLHNFSGNSGQSDPSIEPEFLQTLRRQCPQGGDLTARANLDPTSPDSFDNDYFKNLQNNRGVIESDQILFSSTGAPTVSLVNRFAENQNEFFTNFARSMIKMGNVRILTGREGEIRRDYRRVN

SEQ ID NO: 38841 - protein, 314 aa, Arabidopsis thaliana
  peptide (1)..(314): Ceres Seq. ID no. 13492924
MFGVLSNAQLTSDFYSTTCPNVTAIARGLIERASRNDVRLTAKVMRLHFHDCFVNGCDGSVLLDAAPADGVEGEKEAFQNAGSLDGFEVIDDIKTALENVCPGVVSCADILAIAAEISVALAGGPSLDVLLGRRDGRTAIRADAVAALPLGPDSLEILTSKFSVHNLDTTDLVALSGAHTFGRVQCGVINNRLHNFSGNSGQSDPSIEPEFLQTLRRQCPQGGDLTARANLDPTSPDSFDNDYFKNLQNNRGVIESDQILFSSTGAPTVSLVNRFAENQNEFFTNFARSMIKMGNVRILTGREGEIRRDYRRVN

SEQ ID NO: 38842 - DNA, 1401 bp, Arabidopsis thaliana
  misc_feature (1)..(1401): Ceres Seq. ID no. 12482593
  misc_feature (1)..(1401): Ortholog of  Ceres SEQ ID NO 13597476 as cited in SEQ ID NO 65132
agaagaagtagacgatgttggaagaacaatagaggaagagactgtgtttgaaaaaagagaaagaggagaggaagctgaaacattgactccatgggagcaacactccagcatcataagcatccctcgattcggctacaaagctccctcttctctgcttcatcattctcattccggattcctcgtcacctgcaacatcaaaagggagaaaagtgctactaaagaggtcatgtccatccttggaaaggtatcgtcacaattctccatcattagtgaggcaaaagtttggatttttgttccttcatttagaagataactcagagtgattgataaccaattgtggtagagaaacactatatttgaaacgaaagtgattataagtgcagtggtgggggttctctaatgttcagcttgtctcacggaaatcaaacttttgatttgttcagtatattgggtccatgcatgaggagaaacctgaagttctaaactctactgcatccaaaaaacaaaaagtttgtgcacaagagacagaggaaggcggagagaagactgtacctcttgagaatgatgccttgcaggaaacaggtgaaaatccaaatgttgaggatcttaaattagcaaatgaagaacacaattctctcatgtcattggttaagctaacaaagagtggcttgcttctctttactttccctgttgaaaactctcccaatacaacgaatatcgtatcacgagtcttccagtctatggaatctggagctttgaaggcaccaatctggtgccatcggatattcccagttcaagctacttgtggtttgacagagaaagaacttcgggaaacagtatcaaagcttgttcagcggtttgtcaatgataaagacaatacactatcaaaacctgtgaagtttgcagctgggtatcaacgtagaggtgcggaggagacgaaaggaaagattcggaaagacgcttcagatgttctagttcaatgtccgttgctggaccgcattaaatgctttgaaactgtggcagctggagtgaaagacattgtaccagattcagttgtggatctcaaatctccagagttatgtgttctggtggaactgttaccgctctctagaatatcaagtggctcctttgtagctgctgtttcagtgcttccacatagactcgttagcacaaagccgaaactctgcatcaagcctctagtccctgaatccaaacacaaaaagggaccaaactgacaggtgcaaaggctgatcgctgcattcgattttcgagagccaaagatatcaatagaagttgtaatctctctgtttttgtttagatatgtcttttgctttcagtatctctaatggagttaacaacaatgtctgacctatgttattcaagagaacaaagataaaccct

SEQ ID NO: 38843 - protein, 259 aa, Arabidopsis thaliana
  peptide (1)..(259): Ceres Seq. ID no. 12482594
MHEEKPEVLNSTASKKQKVCAQETEEGGEKTVPLENDALQETGENPNVEDLKLANEEHNSLMSLVKLTKSGLLLFTFPVENSPNTTNIVSRVFQSMESGALKAPIWCHRIFPVQATCGLTEKELRETVSKLVQRFVNDKDNTLSKPVKFAAGYQRRGAEETKGKIRKDASDVLVQCPLLDRIKCFETVAAGVKDIVPDSVVDLKSPELCVLVELLPLSRISSGSFVAAVSVLPHRLVSTKPKLCIKPLVPESKHKKGPN

SEQ ID NO: 38844 - protein, 198 aa, Arabidopsis thaliana
  peptide (1)..(198): Ceres Seq. ID no. 12482595
MSLVKLTKSGLLLFTFPVENSPNTTNIVSRVFQSMESGALKAPIWCHRIFPVQATCGLTEKELRETVSKLVQRFVNDKDNTLSKPVKFAAGYQRRGAEETKGKIRKDASDVLVQCPLLDRIKCFETVAAGVKDIVPDSVVDLKSPELCVLVELLPLSRISSGSFVAAVSVLPHRLVSTKPKLCIKPLVPESKHKKGPN

SEQ ID NO: 38845 - protein, 164 aa, Arabidopsis thaliana
  peptide (1)..(164): Ceres Seq. ID no. 12482596
MESGALKAPIWCHRIFPVQATCGLTEKELRETVSKLVQRFVNDKDNTLSKPVKFAAGYQRRGAEETKGKIRKDASDVLVQCPLLDRIKCFETVAAGVKDIVPDSVVDLKSPELCVLVELLPLSRISSGSFVAAVSVLPHRLVSTKPKLCIKPLVPESKHKKGPN

SEQ ID NO: 38846 - DNA, 1234 bp, Arabidopsis thaliana
  misc_feature (1)..(1234): Ceres Seq. ID no. 12562567
  misc_feature (1)..(1234): Ortholog of  Ceres SEQ ID NO 13596030 as cited in SEQ ID NO 62043
aagattgtcgctttagcttctccggtttttaagcaaagaagggtatatgagtttgttggagatgggtggagatatgatggaagatgattgggaatttgcgtcatcatcaaaccctaaaagaaccctagttcttgtgggccgtactggaaacggaaagagtgcgacaggtaacagtatccttgggaggaaagcttttaggtcaagagctagaactgtaggagtgacaagcacgtgcgagtcacagagagttgttcaagaagatggtgatatcattaatgttgttgatactcctggtttgtttgatttgtctactgcagctgattttattggtaaagagattgtgaggtgtataagtttggcagaagatgggattcatgcgatcttgttggtattctctgtgaggcggcttgctgaagaggaacaaactgtgcttagtttcttgcaagcgttattcggcagtaagatcgctgactatatgatcgttgtttttaccggtggtgatgagttggaagagaatgaggagacattggaggagtatttggctgactattgccctgagtttcttaaagaaattcttgggatatgtgacaatcggttggtgttgtttaataacaagactactgataatgtcaaaaaggctgagcaagttcagaagcttctctcgcttgttgaatctgttgtcaaacagaacaatggaaaaccgtattcagatgagttgttccatgagctacaggaagaggctatcaagctaagggaccagaaaaaggaggttgagttacttcagggttactctaataatgagatagatgagttcaagaagcaaatcgatatgtcctatgacaggcagcttagccgcatcaccgagatggtggagactaagctgagagacactgctaagagactagagcagcaactaggtgaagagcaagctgcaagacttgaagcggagaagagggcaaacgaagttcagaagcggtcaagcgatgagattaagaaactcagagagaatctggagagggcggagaaagagacgaaggaactccagaagaaactgggaaagtgcatcaatctatgatatattgagatgttgtagctccagtgaaatctgataagattattcatgtcaagttttttatgtagtttattttttcttttggttttttaacaatatggttttattaaagacagtgtgttataaggtttgcttaaatcatactaccccttaaatcttccc

SEQ ID NO: 38847 - protein, 342 aa, Arabidopsis thaliana
  peptide (1)..(342): Ceres Seq. ID no. 12562568
MSLLEMGGDMMEDDWEFASSSNPKRTLVLVGRTGNGKSATGNSILGRKAFRSRARTVGVTSTCESQRVVQEDGDIINVVDTPGLFDLSTAADFIGKEIVRCISLAEDGIHAILLVFSVRRLAEEEQTVLSFLQALFGSKIADYMIVVFTGGDELEENEETLEEYLADYCPEFLKEILGICDNRLVLFNNKTTDNVKKAEQVQKLLSLVESVVKQNNGKPYSDELFHELQEEAIKLRDQKKEVELLQGYSNNEIDEFKKQIDMSYDRQLSRITEMVETKLRDTAKRLEQQLGEEQAARLEAEKRANEVQKRSSDEIKKLRENLERAEKETKELQKKLGKCINL

SEQ ID NO: 38848 - protein, 337 aa, Arabidopsis thaliana
  peptide (1)..(337): Ceres Seq. ID no. 12562569
MGGDMMEDDWEFASSSNPKRTLVLVGRTGNGKSATGNSILGRKAFRSRARTVGVTSTCESQRVVQEDGDIINVVDTPGLFDLSTAADFIGKEIVRCISLAEDGIHAILLVFSVRRLAEEEQTVLSFLQALFGSKIADYMIVVFTGGDELEENEETLEEYLADYCPEFLKEILGICDNRLVLFNNKTTDNVKKAEQVQKLLSLVESVVKQNNGKPYSDELFHELQEEAIKLRDQKKEVELLQGYSNNEIDEFKKQIDMSYDRQLSRITEMVETKLRDTAKRLEQQLGEEQAARLEAEKRANEVQKRSSDEIKKLRENLERAEKETKELQKKLGKCINL

SEQ ID NO: 38849 - protein, 333 aa, Arabidopsis thaliana
  peptide (1)..(333): Ceres Seq. ID no. 12562570
MMEDDWEFASSSNPKRTLVLVGRTGNGKSATGNSILGRKAFRSRARTVGVTSTCESQRVVQEDGDIINVVDTPGLFDLSTAADFIGKEIVRCISLAEDGIHAILLVFSVRRLAEEEQTVLSFLQALFGSKIADYMIVVFTGGDELEENEETLEEYLADYCPEFLKEILGICDNRLVLFNNKTTDNVKKAEQVQKLLSLVESVVKQNNGKPYSDELFHELQEEAIKLRDQKKEVELLQGYSNNEIDEFKKQIDMSYDRQLSRITEMVETKLRDTAKRLEQQLGEEQAARLEAEKRANEVQKRSSDEIKKLRENLERAEKETKELQKKLGKCINL

SEQ ID NO: 38850 - DNA, 1204 bp, Arabidopsis thaliana; identical to SEQ ID NO: 26605
  misc_feature (1)..(1204): Ceres Seq. ID no. 12371447
  misc_feature (1)..(1204): Ortholog of  Ceres SEQ ID NO 12613953 as cited in SEQ ID NO 68388

SEQ ID NO: 38851 - protein, 326 aa, Arabidopsis thaliana [sequence omitted]

SEQ ID NO: 38852 - protein, 316 aa, Arabidopsis thaliana; identical to SEQ ID NO: 26607
  peptide (1)..(316): Ceres Seq. ID no. 12371449

SEQ ID NO: 38853 - protein, 310 aa, Arabidopsis thaliana; identical to SEQ ID NO: 26608
  peptide (1)..(310): Ceres Seq. ID no. 12371450

SEQ ID NO: 38854 - DNA, 1164 bp, Arabidopsis thaliana
  misc_feature (1)..(1164): Ceres Seq. ID no. 12395652
  misc_feature (1)..(1164): Ortholog of  Ceres SEQ ID NO 15226950 as cited in SEQ ID NO 68649
  misc_feature (1)..(1164): Ortholog of  Ceres SEQ ID NO 13502947 as cited in SEQ ID NO 69257
cagattctttcgaatccggagtttcttgctgaaggaactgctatcgctgatctttttaaccctgaccgtgttttgatcggagggcgagaaacacctgaaggattcaaagctgttcagacacttaaagaggtttatgctaattgggttcctgaaggtcagatcatcacaactaatctctggtctgctgagctttctaagctagctgcaaatgctttcttggctcagaggatttcatcagtcaatgccatgtctgctctttgtgaatccactggtgctgatgttactcaagtgtcttacgctgttggtactgattcaagaatcggttccaaattcttgaacgctagtgttggatttggcggttcttgtttccagaaggacattctgaatcttgtctacatctgtcaatcaacggacttccagaagtggcggaatactggaaacaagtgatcaagatcaacgattaccaaaagaaccggttcgtgaacagaatcgtgtcctctatgttcaacactgtctccaacaagaaggttgcgattcttggattcgcattcaagaaagacactggtgacacaagggaaacacctgccattgatgtgtgtaaaggtctattaggagacaaagcacagatcagtatctatgatcctcaagtcacagaggaacatattcagagagatctctcgatgaaaaagttcgactgggaccatcctcttcacttgcagccaatgagtccaaccacagtgaaacaagtgagtgtgacttgggacgcatatgaagctacaaaagacgcacacgcggtttgcgttttgactgagtgggacgagtttaagtcgttagattaccagaagatcttcgacaacatgcagaaaccggcttttatcttcgacggaagaaacattatgaatgttaacaagttaagagagattggtttcattgtttactccattggtaagccacttgacccatggctcaaggacatgcctgcctttgtctaatcacaaggcaaaacctggttgattcttgtttcttactttcattgtttgtgcttttttgctttcgttttcatataaattttagtctcaagattcgatttgtgaagtcttgaagagttgtttcttacattttacaatgtgtttcttatgctaagctcttataattttgtgttcc

SEQ ID NO: 38855 - protein, 163 aa, Arabidopsis thaliana
  peptide (1)..(163): Ceres Seq. ID no. 12395653
MFNTVSNKKVAILGFAFKKDTGDTRETPAIDVCKGLLGDKAQISIYDPQVTEEHIQRDLSMKKFDWDHPLHLQPMSPTTVKQVSVTWDAYEATKDAHAVCVLTEWDEFKSLDYQKIFDNMQKPAFIFDGRNIMNVNKLREIGFIVYSIGKPLDPWLKDMPAFV

SEQ ID NO: 38856 - protein, 148 aa, Arabidopsis thaliana
  peptide (1)..(148): Ceres Seq. ID no. 12395654
QILSNPEFLAEGTAIADLFNPDRVLIGGRETPEGFKAVQTLKEVYANWVPEGQIITTNLWSAELSKLAANAFLAQRISSVNAMSALCESTGADVTQVSYAVGTDSRIGSKFLNASVGFGGSCFQKDILNLVYICQSTDFQKWRNTGNK

SEQ ID NO: 38857 - protein, 103 aa, Arabidopsis thaliana
  peptide (1)..(103): Ceres Seq. ID no. 12395655
MKKFDWDHPLHLQPMSPTTVKQVSVTWDAYEATKDAHAVCVLTEWDEFKSLDYQKIFDNMQKPAFIFDGRNIMNVNKLREIGFIVYSIGKPLDPWLKDMPAFV

SEQ ID NO: 38858 - DNA, 1378 bp, Arabidopsis thaliana
  misc_feature (1)..(1378): Ceres Seq. ID no. 12323175
  misc_feature (1)..(1378): Ortholog of  Ceres SEQ ID NO 14310880 as cited in SEQ ID NO 55342
  misc_feature (1)..(1378): Ortholog of  Ceres SEQ ID NO 14313451 as cited in SEQ ID NO 62474
attagtctttttcttcgtgagaccctttgaaacgaggacggaggaagtttcctttgaataatgcagcattttcaacatagaaaattctccaaacgcaacgcagaaatgacctctgctttctccaacgtcaaacttgtttagttttatctatgtcatctctctaattctcttgtaaatctcaataatacctcttcacttaatctttttaatatttttcttttggatggtgaggatttgtgttttcatggttttcttgttgttcttcgctccttctccagtctccgctggtttctatacaaactcctcagccattccgccgcagcttctccgaaacgccaccgggaacccctggaactcattcttgaatttcactggatgtcacgccggcaagaagtacgatggtctctatatgctcaaacaatattttcaacattttggctacatcaccgaaactaatctctccggaaacttcactgacgacttcgacgatattctcaagaacgccgtcgaaatgtaccagagaaacttccagctaaacgtcaccggagtactcgacgagctcactctcaaacacgttgtgatcccacgttgcggcaaccccgacgtagtcaacggcacctcaactatgcatagcggtaggaaaaccttcgaggtttccttcgccgggcggggacaacgcttccacgccgttaaacactactctttcttccccggagagccacggtggccgagaaatcgtcgtgatctaacctacgctttcgacccgcgaaacgcgttgaccgaagaggtcaagagcgtgttctcacgcgctttcactcgttgggaggaggtgactccactaacgttcacacgcgtggagaggttctcgacctctgacatcagcatcggattctactccggagagcacggagacggagaaccgttcgacggcccaatgagaacgctagcacatgcgttctcgcccccgacgggacacttccatctagacggagaagagaactggatcgtctccggcgaaggaggcgacggttttatctccgtgtctgaggctgttgatctagaatcggtggctgttcacgagattggacatcttctagggttaggccattcctcggtagaaggttcgatcatgtatccaaccatcaggacgggtaggcgtaaagttgatttaacgaccgatgacgtggaaggagtccaatatttgtacggtgcgaatcctaacttcaatggttctagatctccaccaccgtccactcaacaacgagacactggcgattctggtgctcctggtagaagcgacggttctagatcggttttgactaatctacttcagtattatttttggattatatttggattatttttgtatttagtgtag

SEQ ID NO: 38859 - protein, 384 aa, Arabidopsis thaliana
  peptide (1)..(384): Ceres Seq. ID no. 12323176
MVRICVFMVFLLFFAPSPVSAGFYTNSSAIPPQLLRNATGNPWNSFLNFTGCHAGKKYDGLYMLKQYFQHFGYITETNLSGNFTDDFDDILKNAVEMYQRNFQLNVTGVLDELTLKHVVIPRCGNPDVVNGTSTMHSGRKTFEVSFAGRGQRFHAVKHYSFFPGEPRWPRNRRDLTYAFDPRNALTEEVKSVFSRAFTRWEEVTPLTFTRVERFSTSDISIGFYSGEHGDGEPFDGPMRTLAHAFSPPTGHFHLDGEENWIVSGEGGDGFISVSEAVDLESVAVHEIGHLLGLGHSSVEGSIMYPTIRTGRRKVDLTTDDVEGVQYLYGANPNFNGSRSPPPSTQQRDTGDSGAPGRSDGSRSVLTNLLQYYFWIIFGLFLYLV

SEQ ID NO: 38860 - protein, 377 aa, Arabidopsis thaliana
  peptide (1)..(377): Ceres Seq. ID no. 12323177
MVFLLFFAPSPVSAGFYTNSSAIPPQLLRNATGNPWNSFLNFTGCHAGKKYDGLYMLKQYFQHFGYITETNLSGNFTDDFDDILKNAVEMYQRNFQLNVTGVLDELTLKHVVIPRCGNPDVVNGTSTMHSGRKTFEVSFAGRGQRFHAVKHYSFFPGEPRWPRNRRDLTYAFDPRNALTEEVKSVFSRAFTRWEEVTPLTFTRVERFSTSDISIGFYSGEHGDGEPFDGPMRTLAHAFSPPTGHFHLDGEENWIVSGEGGDGFISVSEAVDLESVAVHEIGHLLGLGHSSVEGSIMYPTIRTGRRKVDLTTDDVEGVQYLYGANPNFNGSRSPPPSTQQRDTGDSGAPGRSDGSRSVLTNLLQYYFWIIFGLFLYLV

SEQ ID NO: 38861 - protein, 322 aa, Arabidopsis thaliana
  peptide (1)..(322): Ceres Seq. ID no. 12323178
MLKQYFQHFGYITETNLSGNFTDDFDDILKNAVEMYQRNFQLNVTGVLDELTLKHVVIPRCGNPDVVNGTSTMHSGRKTFEVSFAGRGQRFHAVKHYSFFPGEPRWPRNRRDLTYAFDPRNALTEEVKSVFSRAFTRWEEVTPLTFTRVERFSTSDISIGFYSGEHGDGEPFDGPMRTLAHAFSPPTGHFHLDGEENWIVSGEGGDGFISVSEAVDLESVAVHEIGHLLGLGHSSVEGSIMYPTIRTGRRKVDLTTDDVEGVQYLYGANPNFNGSRSPPPSTQQRDTGDSGAPGRSDGSRSVLTNLLQYYFWIIFGLFLYLV

SEQ ID NO: 38862 - DNA, 850 bp, Arabidopsis thaliana
  misc_feature (1)..(850): Ceres Seq. ID no. 13487193
  misc_feature (1)..(850): Ortholog of  Ceres SEQ ID NO 14311934 as cited in SEQ ID NO 51605
tctttacctttttcattccaaaatatctctccttctctctctctttctctggctcgggaagaagatgtcacgtagttgctcacagtgtggaaacaacggccacaactctcgcacatgtccgacggacataactaccaccggtgacaacaacgacaaaggcggcggggagaaagccatcatgctttttggcgtccgcgtcacggaagcttcatcatcttgttttagaaaaagtgttagtatgaacaatctctctcaattcgatcaaactcctgatcccaacccaaccgatgacggtggttacgcttcagacgacgtcgttcacgcctccggtagaaaccgtgaacgcaaacgaggaactccatggacagaggaagaacatagattgtttcttactggattgcataaagttggaaaaggtgattggagaggaatctctagaaactttgttaaaactcgaacacctactcaggtagcgagtcatgctcagaaatattttctccggcggactaatcagaatcgtcgtcgtcgtagatcaagcctcttcgatatcactcccgattcgtttataggatcatcaaaagaagagaatcagttacagactccattggagctaatccgtccagttccgattcctattccgattccaccgtcgcggaagatggctgatttgaatcttaacaagaaaaaaactccagcgacaacggagatgtttccgctgtcgctgaatttgcagaggccgtcttcgtcgacatcgtcatcgtccaatgaacagaaggcacgtggctcacgtgcctcctcggggttcgaggcgatgtcgagtaatggagatagtataatgggagtggcttga

SEQ ID NO: 38863 - protein, 282 aa, Arabidopsis thaliana
  peptide (1)..(282): Ceres Seq. ID no. 13487194
LYLFHSKISLLLSLFLWLGKKMSRSCSQCGNNGHNSRTCPTDITTTGDNNDKGGGEKAIMLFGVRVTEASSSCFRKSVSMNNLSQFDQTPDPNPTDDGGYASDDVVHASGRNRERKRGTPWTEEEHRLFLTGLHKVGKGDWRGISRNFVKTRTPTQVASHAQKYFLRRTNQNRRRRRSSLFDITPDSFIGSSKEENQLQTPLELIRPVPIPIPIPPSRKMADLNLNKKKTPATTEMFPLSLNLQRPSSSTSSSSNEQKARGSRASSGFEAMSSNGDSIMGVA

SEQ ID NO: 38864 - protein, 261 aa, Arabidopsis thaliana
  peptide (1)..(261): Ceres Seq. ID no. 13487195
MSRSCSQCGNNGHNSRTCPTDITTTGDNNDKGGGEKAIMLFGVRVTEASSSCFRKSVSMNNLSQFDQTPDPNPTDDGGYASDDVVHASGRNRERKRGTPWTEEEHRLFLTGLHKVGKGDWRGISRNFVKTRTPTQVASHAQKYFLRRTNQNRRRRRSSLFDITPDSFIGSSKEENQLQTPLELIRPVPIPIPIPPSRKMADLNLNKKKTPATTEMFPLSLNLQRPSSSTSSSSNEQKARGSRASSGFEAMSSNGDSIMGVA

SEQ ID NO: 38865 - protein, 223 aa, Arabidopsis thaliana
  peptide (1)..(223): Ceres Seq. ID no. 13487196
MLFGVRVTEASSSCFRKSVSMNNLSQFDQTPDPNPTDDGGYASDDVVHASGRNRERKRGTPWTEEEHRLFLTGLHKVGKGDWRGISRNFVKTRTPTQVASHAQKYFLRRTNQNRRRRRSSLFDITPDSFIGSSKEENQLQTPLELIRPVPIPIPIPPSRKMADLNLNKKKTPATTEMFPLSLNLQRPSSSTSSSSNEQKARGSRASSGFEAMSSNGDSIMGVA

SEQ ID NO: 38866 - DNA, 1368 bp, Arabidopsis thaliana
  misc_feature (1)..(1368): Ceres Seq. ID no. 13574974
  misc_feature (1)..(1368): Ortholog of  Ceres SEQ ID NO 14311731 as cited in SEQ ID NO 51632
taggatcctctacacctatcaataagagatatattttagagtttcactttggtgcacaaacaaagctcgtacaacattcttcgtatatggctcttcgtcgctgcttacctcaatattcaacaacttcatcttatctctccaagatctggggatttcgtatgcatgggaccaaggcagcagcttctgttgtagaagaacatgtctcgggggcagaacgtgaggatgaagaatatgctgatgtagattgggacaaccttggattcagtcttgtacggacagatttcatgttcgccaccaaaagttgcagagacggaaacttcgaacagggttaccttagccgttacggcaacatcgagctcaaccctgctgctggaattctcaactatggccagggactaatagaggggatgaaagcgtacagaggagaagacggtagggttcttctcttccgtccagagctaaacgcgatgcgtatgaagataggagctgagagaatgtgtatgcattctccttctgttcatcagtttattgaaggtgttaagcagaccgttcttgcaaacaggcgttgggttcctcctccgggcaaaggctcgttgtatctcagaccgttgttgttcggaagtggagcaagcttgggtgtggctgcagcatcagagtacacgtttcttgtgtttggctctcctgttcaaaactacttcaaggaaggcacagcggcgttgaacctgtatgtggaggaggtgattccacgcgcttatcttggaggaactggtggtgtaaaggcaatatccaattacggtccagtgcttgaagtgatgagaagagcaaaatcaagagggttttcggatgttttgtatcttgatgcagatactgggaagaacatagaagaagtctctgctgctaatatattccttgtgaagggcaatacaatagtgacaccagctacgagcggaacgattctcggagggatcacacgtaagagcataatcgaaatcgcccttgatcttggttacaaagtggaagaacgaagtgttccggtagaagaactgaaggaagctgaagaagttttctgcactggaactgccgctggagttgcttctgttggaagcatcacttttaagaacacaaggactgagtacaaagttggagatgggattgttacacagcaacttcgatctattcttgtcggaatacaaactggttctatccaagacactaaagattgggttttgcagattgcctaagttactttcatatcctataaataatgttgcactctcttgatcacccatcaaaagcttttgaaatagtttttggtaaatttgtgacataaatttgtgatatatcaccacatcgtattagtatggatcc

SEQ ID NO: 38867 - protein, 412 aa, Arabidopsis thaliana
  peptide (1)..(412): Ceres Seq. ID no. 13574975
GSSTPINKRYILEFHFGAQTKLVQHSSYMALRRCLPQYSTTSSYLSKIWGFRMHGTKAAASVVEEHVSGAEREDEEYADVDWDNLGFSLVRTDFMFATKSCRDGNFEQGYLSRYGNIELNPAAGILNYGQGLIEGMKAYRGEDGRVLLFRPELNAMRMKIGAERMCMHSPSVHQFIEGVKQTVLANRRWVPPPGKGSLYLRPLLFGSGASLGVAAASEYTFLVFGSPVQNYFKEGTAALNLYVEEVIPRAYLGGTGGVKAISNYGPVLEVMRRAKSRGFSDVLYLDADTGKNIEEVSAANIFLVKGNTIVTPATSGTILGGITRKSIIEIALDLGYKVEERSVPVEELKEAEEVFCTGTAAGVASVGSITFKNTRTEYKVGDGIVTQQLRSILVGIQTGSIQDTKDWVLQIA

SEQ ID NO: 38868 - protein, 384 aa, Arabidopsis thaliana
  peptide (1)..(384): Ceres Seq. ID no. 13574976
MALRRCLPQYSTTSSYLSKIWGFRMHGTKAAASVVEEHVSGAEREDEEYADVDWDNLGFSLVRTDFMFATKSCRDGNFEQGYLSRYGNIELNPAAGILNYGQGLIEGMKAYRGEDGRVLLFRPELNAMRMKIGAERMCMHSPSVHQFIEGVKQTVLANRRWVPPPGKGSLYLRPLLFGSGASLGVAAASEYTFLVFGSPVQNYFKEGTAALNLYVEEVIPRAYLGGTGGVKAISNYGPVLEVMRRAKSRGFSDVLYLDADTGKNIEEVSAANIFLVKGNTIVTPATSGTILGGITRKSIIEIALDLGYKVEERSVPVEELKEAEEVFCTGTAAGVASVGSITFKNTRTEYKVGDGIVTQQLRSILVGIQTGSIQDTKDWVLQIA

SEQ ID NO: 38869 - protein, 360 aa, Arabidopsis thaliana
  peptide (1)..(360): Ceres Seq. ID no. 13574977
MHGTKAAASVVEEHVSGAEREDEEYADVDWDNLGFSLVRTDFMFATKSCRDGNFEQGYLSRYGNIELNPAAGILNYGQGLIEGMKAYRGEDGRVLLFRPELNAMRMKIGAERMCMHSPSVHQFIEGVKQTVLANRRWVPPPGKGSLYLRPLLFGSGASLGVAAASEYTFLVFGSPVQNYFKEGTAALNLYVEEVIPRAYLGGTGGVKAISNYGPVLEVMRRAKSRGFSDVLYLDADTGKNIEEVSAANIFLVKGNTIVTPATSGTILGGITRKSIIEIALDLGYKVEERSVPVEELKEAEEVFCTGTAAGVASVGSITFKNTRTEYKVGDGIVTQQLRSILVGIQTGSIQDTKDWVLQIA

SEQ ID NO: 38870 - DNA, 1370 bp, Arabidopsis thaliana; identical to SEQ ID NO: 30580
  misc_feature (1)..(1370): Ceres Seq. ID no. 13574978
  misc_feature (1)..(1370): Ortholog of  Ceres SEQ ID NO 12364737 as cited in SEQ ID NO 51089
  misc_feature (1)..(1370): Ortholog of  Ceres SEQ ID NO 14311515 as cited in SEQ ID NO 51680
  misc_feature (1)..(1370): Ortholog of  Ceres SEQ ID NO 13582301 as cited in SEQ ID NO 56509
  misc_feature (1)..(1370): Ortholog of  Ceres SEQ ID NO 14315035 as cited in SEQ ID NO 56880
  misc_feature (1)..(1370): Ortholog of  Ceres SEQ ID NO 13594276 as cited in SEQ ID NO 57728
  misc_feature (1)..(1370): Ortholog of  Ceres SEQ ID NO 13594147 as cited in SEQ ID NO 58975
  misc_feature (1)..(1370): Ortholog of  Ceres SEQ ID NO 13655302 as cited in SEQ ID NO 63307
  misc_feature (1)..(1370): Ortholog of  Ceres SEQ ID NO 13597380 as cited in SEQ ID NO 64054
  misc_feature (1)..(1370): Ortholog of  Ceres SEQ ID NO 12625474 as cited in SEQ ID NO 64169
  misc_feature (1)..(1370): Ortholog of  Ceres SEQ ID NO 13597502 as cited in SEQ ID NO 64681

SEQ ID NO: 38871 - protein, 362 aa, Arabidopsis thaliana; identical to SEQ ID NO: 30581
  peptide (1)..(362): Ceres Seq. ID no. 13574979

SEQ ID NO: 38872 - protein, 359 aa, Arabidopsis thaliana; identical to SEQ ID NO: 30582
  peptide (1)..(359): Ceres Seq. ID no. 13574980

SEQ ID NO: 38873 - protein, 356 aa, Arabidopsis thaliana; identical to SEQ ID NO: 30583
  peptide (1)..(356): Ceres Seq. ID no. 13574981

SEQ ID NO: 38874 - DNA, 1110 bp, Arabidopsis thaliana
  misc_feature (1)..(1110): Ceres Seq. ID no. 12338109
  misc_feature (1)..(1110): Ortholog of  Ceres SEQ ID NO 12617391 as cited in SEQ ID NO 64114
  misc_feature (1)..(1110): Ortholog of  Ceres SEQ ID NO 13595922 as cited in SEQ ID NO 69293
  misc_feature (1)..(1110): Ortholog of  Ceres SEQ ID NO 12635496 as cited in SEQ ID NO 0
acattctgagaagaagaagaagaaaataagaaaaaacaaaagatgaaaaccattatcctttttgtaacatttcttgctctttcttcttcatctctagccgatgagacagagactgaatttcattacaaacccggtgagatagccgatccctcgaaatggagcagtatcaaggctgaatggaaaatttgcgggacagggaagaggcaatcgccaatcaatcttactccaaaaatagctcgcattgttcacaattctacacagattcttcagacatattacaaacctgtagaggctattcttaagaaccgtggattcgacatgaaggttaagtgggaagacgatgcagggaagatcgtgatcaatgataccgactataaattggttcaaagccactggcacgcaccttcagagcattttctcgatggacagaggttggcaatggaacttcacatggtacacaaaagtgtagaagggcacttggcagtgattggagttctcttcagagaaggagaaccaaatgctttcatttcgcggatcatggacaagatccataagatcgcagacgtacaagatggagaggtcagcatcggaaagatagatccaagagaatttggatgggatcttacaaagttttatgaatacagaggttctctcactactcctccttgcacggaagatgtcatgtggaccatcatcaacaaggtggggactgtttcacgtgagcaaattgatgtattgacagatgctcgtcgcggtggttatgagaagaacgcgagaccagctcaacctctgaacggacgtctggtttatttaaacgagcagtccagtccaagtccaactccacggctaagaataccacgagttggtccggtctaagacagtcttataggacaaggcaactccgagccctaatttccatacaaagaaaattcggaaaagaattttgaagatgtatgaaaattgggagccataactatttttttttaactattcttttgattaaaagataaaactacgcaatattatatgcataaagtttttcttttatacatgtattccaataaacaagatgtaataatatccaaccataatgagttgtttgattatttt

SEQ ID NO: 38875 - protein, 277 aa, Arabidopsis thaliana
  peptide (1)..(277): Ceres Seq. ID no. 12338110
MKTIILFVTFLALSSSSLADETETEFHYKPGEIADPSKWSSIKAEWKICGTGKRQSPINLTPKIARIVHNSTQILQTYYKPVEAILKNRGFDMKVKWEDDAGKIVINDTDYKLVQSHWHAPSEHFLDGQRLAMELHMVHKSVEGHLAVIGVLFREGEPNAFISRIMDKIHKIADVQDGEVSIGKIDPREFGWDLTKFYEYRGSLTTPPCTEDVMWTIINKVGTVSREQIDVLTDARRGGYEKNARPAQPLNGRLVYLNEQSSPSPTPRLRIPRVGPV

SEQ ID NO: 38876 - protein, 185 aa, Arabidopsis thaliana; identical to SEQ ID NO: 38484
  peptide (1)..(185): Ceres Seq. ID no. 12338111

SEQ ID NO: 38877 - protein, 145 aa, Arabidopsis thaliana; identical to SEQ ID NO: 38485
  peptide (1)..(145): Ceres Seq. ID no. 12338112

SEQ ID NO: 38878 - DNA, 1586 bp, Arabidopsis thaliana
  misc_feature (1)..(1586): Ceres Seq. ID no. 13492196
  misc_feature (1)..(1586): Ortholog of  Ceres SEQ ID NO 13599520 as cited in SEQ ID NO 633
  misc_feature (1)..(1586): Ortholog of  Ceres SEQ ID NO 13595142 as cited in SEQ ID NO 56671
  misc_feature (1)..(1586): Ortholog of  Ceres SEQ ID NO 15168569 as cited in SEQ ID NO 58123
  misc_feature (1)..(1586): Ortholog of  Ceres SEQ ID NO 15226382 as cited in SEQ ID NO 63295
  misc_feature (1)..(1586): Ortholog of  Ceres SEQ ID NO 13598460 as cited in SEQ ID NO 63382
aatgaaatctgtcattttcacagaggaaaaaaacttacaaagacaaaatccattgcaaaagagcgagcaacaacgacgaaatttcgaaatgccatcgccaccgacgacgacttctctctcggtgacacagaccataaacggatcacacagcttcacaatcaaaggctattctttggctaaaggaatcgggatcggaaaacacatcgccagcgatactttcaccgtcgggggttatcaatgggctatctatttctatcctgatggcaagaatcctgaggataattcggcttatgtctccgttttcattgctttagctagcgatggtaccgatgttagggctctttttgagctttctttgcttgatcagagtggtaaagggaagcataaggttcatagccacttcgatcgtgctcttgagagcggtccttatactctcaagtatcgtggcagcatgtggggctacaagcgcttttttcgaagacttatgctggaaacatctgattttctgaaggatgattgtctgaaaattaattgcaccgtgggagttgtggtctcagaaatagattgcccacggttacattctattcatgtccctgcatctgatattggatctcatttcgggatgcttctagagaacgaggacggttcagatataacttttaacgtctctggtgaaaagttccgtgctcacaggttagtattggctgctcgatctcctgtctttgaaagcgagttcctcgatgttacgggagaagaagatcgtgatatcgaagttactgacatggagcctaaggttttcaaggctttgctccactacatatacaaggatgctctcattgaagatgcagagtcatcatcatcttccggttcatctgttggtccatctgcctcagacacattagctgcaaagctactaggagccgctgataaatacaagttgcctagattaagtctaatgtgcgagtcagtgctctgcaaggatatatcagtagattccgttgcaaatattttggcgcttgctgaccgttacaatgcttccgccttgaaatccgtttgtctgaaattcgcagcagaaaatctcatcgctgttatgaggtcagatgggtttgattatctaagggaacactgcccgtcacttcagtctgagcttctgaaaacagttgcgggttgcgaagaggagttaagcggaggaggagggaagacgagaagcgtatggggccaattctcagacggtggagctgagacaaacggaagacaagcacagacttggggagatatcaatggaggagcagagagaagccagagtgtttgggtcgaagttgtgaacgctaatggaagcggtagaaacaataatgacaacaataacagtgatgacccaatggcagaactagaagattgagcaaataaaaggtaataaaaaagccaaaggacaatccgagtaagctgaagttaggatcagacatcatgaagcggagatcttgtaacttagtgtttccactgtcgaatactatgtggatcataggagacgatttagtattgttgttgtaatacgctttccgtgtaataattggagttactagtatgat

SEQ ID NO: 38879 - protein, 465 aa, Arabidopsis thaliana
  peptide (1)..(465): Ceres Seq. ID no. 13492197
MKSVIFTEEKNLQRQNPLQKSEQQRRNFEMPSPPTTTSLSVTQTINGSHSFTIKGYSLAKGIGIGKHIASDTFTVGGYQWAIYFYPDGKNPEDNSAYVSVFIALASDGTDVRALFELSLLDQSGKGKHKVHSHFDRALESGPYTLKYRGSMWGYKRFFRRLMLETSDFLKDDCLKINCTVGVVVSEIDCPRLHSIHVPASDIGSHFGMLLENEDGSDITFNVSGEKFRAHRLVLAARSPVFESEFLDVTGEEDRDIEVTDMEPKVFKALLHYIYKDALIEDAESSSSSGSSVGPSASDTLAAKLLGAADKYKLPRLSLMCESVLCKDISVDSVANILALADRYNASALKSVCLKFAAENLIAVMRSDGFDYLREHCPSLQSELLKTVAGCEEELSGGGGKTRSVWGQFSDGGAETNGRQAQTWGDINGGAERSQSVWVEVVNANGSGRNNNDNNNSDDPMAELED

SEQ ID NO: 38880 - protein, 436 aa, Arabidopsis thaliana
  peptide (1)..(436): Ceres Seq. ID no. 13492198
MPSPPTTTSLSVTQTINGSHSFTIKGYSLAKGIGIGKHIASDTFTVGGYQWAIYFYPDGKNPEDNSAYVSVFIALASDGTDVRALFELSLLDQSGKGKHKVHSHFDRALESGPYTLKYRGSMWGYKRFFRRLMLETSDFLKDDCLKINCTVGVVVSEIDCPRLHSIHVPASDIGSHFGMLLENEDGSDITFNVSGEKFRAHRLVLAARSPVFESEFLDVTGEEDRDIEVTDMEPKVFKALLHYIYKDALIEDAESSSSSGSSVGPSASDTLAAKLLGAADKYKLPRLSLMCESVLCKDISVDSVANILALADRYNASALKSVCLKFAAENLIAVMRSDGFDYLREHCPSLQSELLKTVAGCEEELSGGGGKTRSVWGQFSDGGAETNGRQAQTWGDINGGAERSQSVWVEVVNANGSGRNNNDNNNSDDPMAELED

SEQ ID NO: 38881 - protein, 315 aa, Arabidopsis thaliana
  peptide (1)..(315): Ceres Seq. ID no. 13492199
MWGYKRFFRRLMLETSDFLKDDCLKINCTVGVVVSEIDCPRLHSIHVPASDIGSHFGMLLENEDGSDITFNVSGEKFRAHRLVLAARSPVFESEFLDVTGEEDRDIEVTDMEPKVFKALLHYIYKDALIEDAESSSSSGSSVGPSASDTLAAKLLGAADKYKLPRLSLMCESVLCKDISVDSVANILALADRYNASALKSVCLKFAAENLIAVMRSDGFDYLREHCPSLQSELLKTVAGCEEELSGGGGKTRSVWGQFSDGGAETNGRQAQTWGDINGGAERSQSVWVEVVNANGSGRNNNDNNNSDDPMAELED

SEQ ID NO: 38882 - DNA, 1171 bp, Arabidopsis thaliana
  misc_feature (1)..(1171): Ceres Seq. ID no. 13574986
  misc_feature (1)..(1171): Ortholog of  Ceres SEQ ID NO 12582076 as cited in SEQ ID NO 58448
  misc_feature (1)..(1171): Ortholog of  Ceres SEQ ID NO 14301839 as cited in SEQ ID NO 67150
atgtcatctctagccactgttgttgtctctttcctctgaatgcttagcagcgacagagctcgacgaagcagtaaaaccctagtagaataatggtgaagctcacggctgatttgatctggaaaagtcctcacttcttcaatgctatcaaggagcgagaattggatctacgaggtaacaagattcctgtaatcgaaaacttgggtgctactgaggaccagttcgataccattgatctgtctgataacgagatagttaagctagaaaacttcccatacctcaaccgtttaggaactttactcatcaataacaatcgtatcacccggataaatcctaaccttggagaattcctaccgaagcttcactctttggttcttacaaataacaggcttgtgaatttggttgagattgatccccttgcctccattcccaagctgcagtaccttagtttgttggataataatatcaccaaaaaggcaaattatcgcctttatgtgattcacaagctaaaatcacttcgagtactggatttcattaaaatcaaagccaaggagagagctgaagctgcatctttgttttcatccaaagaagcagaagaggaagttaaaaaggtttctcgggaggaggttaaaaaagtgtcagaaactgcagaaaatccagagactccgaaagtggtggcgccaacagcggagcaaatattagctatcaaggctgcaattatcaattctcagacgatagaagaaattgccagactcgaacaggctttgaagtttggacaggttcctgctggcctgataattcctgatccggccacaaatgactctgctcccatggaggaatagaaagcgtgactgttgcccctccaatcgttgtagctactgctccagaatgctcacagcaattgttttctctggcaatcctgtacggtttctgtcacttccttaggaactcatgcgcaacagttggaacctgtaaactatttactgctcgaggcatctgttttgaacccttaaaaagaatgccaaagaggattgtagtctttttaagtctctgcattggcatggagagcgagggtgcacacagaatttgcttatgctcttttcgcattagaatttcttcttagtattttgtatcttgtcactcaatatcatcaattaccgagaaactaatttag

SEQ ID NO: 38883 - protein, 249 aa, Arabidopsis thaliana
  peptide (1)..(249): Ceres Seq. ID no. 13574987
MVKLTADLIWKSPHFFNAIKERELDLRGNKIPVIENLGATEDQFDTIDLSDNEIVKLENFPYLNRLGTLLINNNRITRINPNLGEFLPKLHSLVLTNNRLVNLVEIDPLASIPKLQYLSLLDNNITKKANYRLYVIHKLKSLRVLDFIKIKAKERAEAASLFSSKEAEEEVKKVSREEVKKVSETAENPETPKVVAPTAEQILAIKAAIINSQTIEEIARLEQALKFGQVPAGLIIPDPATNDSAPMEE

SEQ ID NO: 38884 - DNA, 1135 bp, Arabidopsis thaliana; identical to SEQ ID NO: 29687
  misc_feature (1)..(1135): Ceres Seq. ID no. 12559930
  misc_feature (1)..(1135): Ortholog of  Ceres SEQ ID NO 15178873 as cited in SEQ ID NO 1103
  misc_feature (1)..(1135): Ortholog of  Ceres SEQ ID NO 15173557 as cited in SEQ ID NO 60031
  misc_feature (1)..(1135): Ortholog of  Ceres SEQ ID NO 13590940 as cited in SEQ ID NO 68653

SEQ ID NO: 38885 - protein, 269 aa, Arabidopsis thaliana; identical to SEQ ID NO: 24385
  peptide (1)..(269): Ceres Seq. ID no. 12559931

SEQ ID NO: 38886 - protein, 253 aa, Arabidopsis thaliana; identical to SEQ ID NO: 24386
  peptide (1)..(253): Ceres Seq. ID no. 12559932

SEQ ID NO: 38887 - protein, 146 aa, Arabidopsis thaliana; identical to SEQ ID NO: 24387
  peptide (1)..(146): Ceres Seq. ID no. 12559933

SEQ ID NO: 38888 - DNA, 1115 bp, Arabidopsis thaliana
  misc_feature (1)..(1115): Ceres Seq. ID no. 12339130
  misc_feature (1)..(1115): Ortholog of  Ceres SEQ ID NO 15177518 as cited in SEQ ID NO 1034
  misc_feature (1)..(1115): Ortholog of  Ceres SEQ ID NO 14313694 as cited in SEQ ID NO 54115
gttacaaacaaatattttaagaaaaatccccaaccccagagaaacccttcatcttccatcatctttcttattcaatctgcaaaaattccaagattcatggctacaacaagacttaacccctcttgccactttccagcgagcacaagactctcttgcgagagctatctcggtctgagaacgaccgggaggattagttatgcccgaaccctaactgctccacgtggctatcttgctgtaaaagcaaacggtggtcaagcttccgtggtgactgcggcggctataacggagaagcaacaaaagaagtatccaggagaatcaaagggttttgtggaggagatgagattcgtggcgatgagattgcatacgaaagatcaagcaagggaaggagaaaaagaatctagatctccagaggaaggtccggtggcgaaatgggagccgactgtggaaggatacttacattttcttgtggatagtaagttggtttacgacacgcttgaagggatcattgatggatccaatttcccaacttatgctggtttcaagaacacgggattagaaagagcagagagtttgcggaaagatttggagtggttcaaggaacaaggttatgagattccagagccaatggctcctggtaaaacatattctgagtatttaaaagatttagcagagaatgatcctcaagcattcatttgtcacttctacaacatttactttgctcatagcgccggtggccagatgattggaacaaaggtatctaagaagatactagataataaagaactcgagttctataaatgggacggtcaactttctcagttgttgcaaaatgtgaggcaaaaactgaacaaagttgcagagtggtggacaagagaagaaaagagtcattgcttggaagagactgagaaatcgtttaagttttcaggggagattcttcgactcatattgtcctgatttgattcataaaccttcagatcttcaatagtcaataaagccttctgctagtttcgtggaaccaatacgatttaagaggtttgtatgtgaaataactatgtgactattgtattaatgcgtaaaacatatcataataaccaaactataaaattattttcgtg

SEQ ID NO: 38889 - protein, 317 aa, Arabidopsis thaliana
  peptide (1)..(317): Ceres Seq. ID no. 12339132
VTNKYFKKNPQPQRNPSSSIIFLIQSAKIPRFMATTRLNPSCHFPASTRLSCESYLGLRTTGRISYARTLTAPRGYLAVKANGGQASVVTAAAITEKQQKKYPGESKGFVEEMRFVAMRLHTKDQAREGEKESRSPEEGPVAKWEPTVEGYLHFLVDSKLVYDTLEGIIDGSNFPTYAGFKNTGLERAESLRKDLEWFKEQGYEIPEPMAPGKTYSEYLKDLAENDPQAFICHFYNIYFAHSAGGQMIGTKVSKKILDNKELEFYKWDGQLSQLLQNVRQKLNKVAEWWTREEKSHCLEETEKSFKFSGEILRLILS

SEQ ID NO: 38890 - protein, 285 aa, Arabidopsis thaliana
  peptide (1)..(285): Ceres Seq. ID no. 12339133
MATTRLNPSCHFPASTRLSCESYLGLRTTGRISYARTLTAPRGYLAVKANGGQASVVTAAAITEKQQKKYPGESKGFVEEMRFVAMRLHTKDQAREGEKESRSPEEGPVAKWEPTVEGYLHFLVDSKLVYDTLEGIIDGSNFPTYAGFKNTGLERAESLRKDLEWFKEQGYEIPEPMAPGKTYSEYLKDLAENDPQAFICHFYNIYFAHSAGGQMIGTKVSKKILDNKELEFYKWDGQLSQLLQNVRQKLNKVAEWWTREEKSHCLEETEKSFKFSGEILRLILS

SEQ ID NO: 38891 - protein, 205 aa, Arabidopsis thaliana
  peptide (1)..(205): Ceres Seq. ID no. 12339134
MRFVAMRLHTKDQAREGEKESRSPEEGPVAKWEPTVEGYLHFLVDSKLVYDTLEGIIDGSNFPTYAGFKNTGLERAESLRKDLEWFKEQGYEIPEPMAPGKTYSEYLKDLAENDPQAFICHFYNIYFAHSAGGQMIGTKVSKKILDNKELEFYKWDGQLSQLLQNVRQKLNKVAEWWTREEKSHCLEETEKSFKFSGEILRLILS

SEQ ID NO: 38892 - DNA, 1048 bp, Arabidopsis thaliana
  misc_feature (1)..(1048): Ceres Seq. ID no. 12395524
  misc_feature (1)..(1048): Ortholog of  Ceres SEQ ID NO 15179676 as cited in SEQ ID NO 52442
  misc_feature (1)..(1048): Ortholog of  Ceres SEQ ID NO 13582807 as cited in SEQ ID NO 67806
aacacaccgaaaactgaatcaaatctcctagctcttctacgcaaaatcgagtgcatcgacaatggcggaacgtggtgtcgaacgtggtggagatcgcggcgatttcggacgtggattcggtggtcgcggcggtggaagaggtggtccgagaggtcgtggtcgccgtgcaggtcgtgctccagaggaggagaaatgggtgccagtgactaagcttggtcgtctcgtaaaggaaggtaagatcacaaagattgagcagatctacctccattctctcccagtcaaggagtaccagatcatagatttactcgtcggtccttcattgaaagacgaagtgatgaaaatcatgccggttcaaaaacaaaccagagccggtcagagaacgagattcaaggccttcatcgtcgtcggagatagtaacggtcacgtcggattaggagtcaaatgctccaaggaagttgcgacggcgatcagaggcgcgatcattctcgcgaaattgtctgtggttccgatacgaagaggttattggggtaacaagattggaaaaccacatacggttccgtgtaaggtaaccgggaaatgtggatctgttactgtacgtatggttccagctccgagaggttctggtattgtggcggctagagttcctaagaaggttcttcaattcgctggaattgatgatgtctttacttcttctagaggatccaccaaaactcttggaaacttcgtcaaggcaacatttgattgtctgcagaagacatacggattccttacaccggaattctggaaagagacgagattctcaaaatcaccataccaagagcacactgatttcttgcttatacctcctggcgtcaagatcagcgaggttgttgtagacaaaagcgtagagtaataccactttatcttgttacatgagacttgagtgttgtcaaaagctcaagtcagattttgttccaaccttggttttttgatttgtcggttataatgtctttagtaatctagatacgtatctgttttacactttgaattcaatcatacgaatcttctt

SEQ ID NO: 38893 - protein, 276 aa, Arabidopsis thaliana
  peptide (1)..(276): Ceres Seq. ID no. 12395525
MAERGVERGGDRGDFGRGFGGRGGGRGGPRGRGRRAGRAPEEEKWVPVTKLGRLVKEGKITKIEQIYLHSLPVKEYQIIDLLVGPSLKDEVMKIMPVQKQTRAGQRTRFKAFIVVGDSNGHVGLGVKCSKEVATAIRGAIILAKLSVVPIRRGYWGNKIGKPHTVPCKVTGKCGSVTVRMVPAPRGSGIVAARVPKKVLQFAGIDDVFTSSRGSTKTLGNFVKATFDCLQKTYGFLTPEFWKETRFSKSPYQEHTDFLLIPPGVKISEVVVDKSVE

SEQ ID NO: 38894 - protein, 185 aa, Arabidopsis thaliana
  peptide (1)..(185): Ceres Seq. ID no. 12395526
MKIMPVQKQTRAGQRTRFKAFIVVGDSNGHVGLGVKCSKEVATAIRGAIILAKLSVVPIRRGYWGNKIGKPHTVPCKVTGKCGSVTVRMVPAPRGSGIVAARVPKKVLQFAGIDDVFTSSRGSTKTLGNFVKATFDCLQKTYGFLTPEFWKETRFSKSPYQEHTDFLLIPPGVKISEVVVDKSVE

SEQ ID NO: 38895 - protein, 182 aa, Arabidopsis thaliana
  peptide (1)..(182): Ceres Seq. ID no. 12395527
MPVQKQTRAGQRTRFKAFIVVGDSNGHVGLGVKCSKEVATAIRGAIILAKLSVVPIRRGYWGNKIGKPHTVPCKVTGKCGSVTVRMVPAPRGSGIVAARVPKKVLQFAGIDDVFTSSRGSTKTLGNFVKATFDCLQKTYGFLTPEFWKETRFSKSPYQEHTDFLLIPPGVKISEVVVDKSVE

SEQ ID NO: 38896 - DNA, 1546 bp, Arabidopsis thaliana
  misc_feature (1)..(1546): Ceres Seq. ID no. 13497314
  misc_feature (1)..(1546): Ortholog of  Ceres SEQ ID NO 13582297 as cited in SEQ ID NO 56486
  misc_feature (1)..(1546): Ortholog of  Ceres SEQ ID NO 13586936 as cited in SEQ ID NO 0
ataaagaagtaaagctttgccggagatttagcaaacacaaacacaaaaaacaaaaccaactcagacgaatgtgattttttcttcttgagtgaattgttgtaaaaaaatgatgatcggagaatctcatcgtggttttaatccaacggttcatattcctccatggccactttctgaagatctaacggtgtctgatatttacggaagtccagacggaggaagtagtatgatggaagctttggctgagttacaacgttatcttccgtcaaacgaaccggatccggattcagatccggatctctcgggtccggattcaccaatcgatgcttatacatgcgatcattttcggatgtatgagtttaaagtgagacgttgtgctcgtggccggagccatgattggacggagtgtccttacgctcatcccggagaaaaagctcgccgtcgtgatccgaggaagtttcattactccggtacggcgtgtcctgagtttcgtaaaggttgttgcaagagaggagacgcatgtgagttttctcatggtgtttttgagtgttggcttcacccggcgcgttaccggactcagccgtgtaaagacggtggtaactgtcgccgtcgtgtttgtttctttgctcattcgccggatcagattagggttttgcctaatcaaagccctgatcgtgttgattcgttcgacgttttgtctcctacgattcgtagagcgtttcagttttcgatttctccgtcgtctaactcgccgccggtgagtccacgaggtgactcggactcgtcgtgttcgttactgagtcgttcactcgggtctaatctgggaaacgacgtcgttgcgtctctcaggaatctgcaacttaataaagtgaagtcttctctttcgtcgtcatacaacaatcaaatcggaggatacggatccggattcgggtcgcctcgtggatcggttttgggtcctggtttccgtagcttaccaactacaccgacccgacctggttttatgaacatttgggagaatggcttggaggaagaaccggcgatggaacgggtcgagtcgggtcgtgaactgcgagcgcagctgttcgagaagctgagcaaagagaattgcatgggtcggattgaaccggatccggatcagggagcgggtgatactcctgatgtcgggtgggtctctgacttggttatgtgatttgaaccggattcgtaaaccggagtgtctgaaatttctttgataaagattaattaaaggattattatcggcatgggaggttttttaatggatctcttcttaggaaaagaggagatttctctgcaagttttttttttgtatatttattatttcctaatttcgtataatctctgttccataatcgatgattcgagggagattcctcagtgtataggagttgcttaggatttttcattatgatggattcactaatattgatattgttggttattgttttttttatatattatgatgtaagatgcaagtcgcaatgtaattattaaatatcttatgaatgaaatgagaatgtaaattatttat

SEQ ID NO: 38897 - protein, 359 aa, Arabidopsis thaliana
  peptide (1)..(359): Ceres Seq. ID no. 13497315
MMIGESHRGFNPTVHIPPWPLSEDLTVSDIYGSPDGGSSMMEALAELQRYLPSNEPDPDSDPDLSGPDSPIDAYTCDHFRMYEFKVRRCARGRSHDWTECPYAHPGEKARRRDPRKFHYSGTACPEFRKGCCKRGDACEFSHGVFECWLHPARYRTQPCKDGGNCRRRVCFFAHSPDQIRVLPNQSPDRVDSFDVLSPTIRRAFQFSISPSSNSPPVSPRGDSDSSCSLLSRSLGSNLGNDVVASLRNLQLNKVKSSLSSSYNNQIGGYGSGFGSPRGSVLGPGFRSLPTTPTRPGFMNIWENGLEEEPAMERVESGRELRAQLFEKLSKENCMGRIEPDPDQGAGDTPDVGWVSDLVM

SEQ ID NO: 38898 - protein, 358 aa, Arabidopsis thaliana
  peptide (1)..(358): Ceres Seq. ID no. 13497316
MIGESHRGFNPTVHIPPWPLSEDLTVSDIYGSPDGGSSMMEALAELQRYLPSNEPDPDSDPDLSGPDSPIDAYTCDHFRMYEFKVRRCARGRSHDWTECPYAHPGEKARRRDPRKFHYSGTACPEFRKGCCKRGDACEFSHGVFECWLHPARYRTQPCKDGGNCRRRVCFFAHSPDQIRVLPNQSPDRVDSFDVLSPTIRRAFQFSISPSSNSPPVSPRGDSDSSCSLLSRSLGSNLGNDVVASLRNLQLNKVKSSLSSSYNNQIGGYGSGFGSPRGSVLGPGFRSLPTTPTRPGFMNIWENGLEEEPAMERVESGRELRAQLFEKLSKENCMGRIEPDPDQGAGDTPDVGWVSDLVM

SEQ ID NO: 38899 - protein, 320 aa, Arabidopsis thaliana
  peptide (1)..(320): Ceres Seq. ID no. 13497317
MMEALAELQRYLPSNEPDPDSDPDLSGPDSPIDAYTCDHFRMYEFKVRRCARGRSHDWTECPYAHPGEKARRRDPRKFHYSGTACPEFRKGCCKRGDACEFSHGVFECWLHPARYRTQPCKDGGNCRRRVCFFAHSPDQIRVLPNQSPDRVDSFDVLSPTIRRAFQFSISPSSNSPPVSPRGDSDSSCSLLSRSLGSNLGNDVVASLRNLQLNKVKSSLSSSYNNQIGGYGSGFGSPRGSVLGPGFRSLPTTPTRPGFMNIWENGLEEEPAMERVESGRELRAQLFEKLSKENCMGRIEPDPDQGAGDTPDVGWVSDLVM

SEQ ID NO: 38900 - DNA, 1212 bp, Arabidopsis thaliana
  misc_feature (1)..(1212): Ceres Seq. ID no. 12421334
  misc_feature (1)..(1212): Ortholog of  Ceres SEQ ID NO 13595556 as cited in SEQ ID NO 56727
atttttctgatattagaaatttagttgaaacattacctgcaaatttgcagttcttaactagatagcttgctcttttagcgatccttaaggtatctgaaattgggggactcttattataaaagatatgatgatttgttactctccaattacaacatgttctaggaatgctatcagtatcaagaggcatttaggctctcgcctctacggcgttgtggctcacggatcatctaaattctcctgctacagtcttttatcaggactttcaagaagacattataccggttttcgtgtatcggtctctaatagaccttctagttggcacgataaaggactttttgggtcagtattgatcaatcgaccaactgttgctcctaaggaaaagcttgaagtttctttcttgtcccctgaggctaatatgaaatgctcgaagatagaatctaacatgagaaatctctattgttattcaagatttgcatatacaggtgtgattgttagcttgcttgtttgttattcttcgacttcccaatcagcgtacgcagattcttcaagggataaagatgctaacaacgtgcatcatcattcgtctgatggtaaattccacaatgggaaaagagtttatactgattactctatcattggtattccgggggatggcagatgtttgtttcgttctgtagctcacggattctgcttacgctctgggaaactagctccaggcgagaagatgcagagagaactcgctgacgaattacgtaccagggttgctgatgagtttatccaaagaagacaggaaacagaatggttcgtggaaggagatttcgacacctacgtcagacaaattcgggatccacacgtgtggggaggtgaacctgaactcttcatggcttcacacgttctccagatgccaatcacagtgtatatgaaagacgataaagctggaggactgataagtattgcagaatatggtcaagaatacggtaaagacgacccaatccgagtcctataccatggttttggtcattacgatgcccttttgcttcacgagagtaaagcttcgattccaaaatctaaactttagtatacttagttttgcatctttgacttttgtcaggtgttgatgatgtttttgtttactgacacaaccactatctgtatgccttgtagaatgtaacctttttttaccttttactttgaataaaaattttcagtttc

SEQ ID NO: 38901 - protein, 317 aa, Arabidopsis thaliana; identical to SEQ ID NO: 21240
  peptide (1)..(317): Ceres Seq. ID no. 12421335

SEQ ID NO: 38902 - protein, 316 aa, Arabidopsis thaliana; identical to SEQ ID NO: 21241
  peptide (1)..(316): Ceres Seq. ID no. 12421336

SEQ ID NO: 38903 - protein, 220 aa, Arabidopsis thaliana; identical to SEQ ID NO: 21242
  peptide (1)..(220): Ceres Seq. ID no. 12421337

SEQ ID NO: 38904 - DNA, 1289 bp, Arabidopsis thaliana
  misc_feature (1)..(1289): Ceres Seq. ID no. 12580406
  misc_feature (1)..(1289): Ortholog of  Ceres SEQ ID NO 14313471 as cited in SEQ ID NO 64513
  misc_feature (1)..(1289): Ortholog of  Ceres SEQ ID NO 13591377 as cited in SEQ ID NO 66534
gaaacagaaggcttaatatcaacatcttaaaatttactaaaaattgaaaacactaaagaggaaattaagtgaccaagtcttcttcttctttactctctcctttctgttaccgtcgaaaaaatcgagctaatgtccggtgataaccagatccgaatcggactcttaagctgcacaaacaaagtccgcaaactctctcgagctataaatctctctccaaacgctactatatccgccatagccaccacaagctccatcgaagaagcaaaatcatttgctaaatccaacaatttccctccgaatacaaagatccacagctcctacgagtcacttctagaagatcccgacgtcgacgccgtctatttccctatccccactcgcctccacgtcgagtgggctacactcgccgctattaagggtaaacatatactccttgataagcctgttgctttaaacgtagctgagtttgatcagatcgttgaagcttgtgaggttaatggtgttcaatttatggatggaactcagtggatgcataaccctagaacggataagattaaggaatttgtgaatgatttagagacttttggtcagattaaatctttgtttctcatttgctgcgagtgatgatttcttaaaacatgatattcgtgtaaagcctggtcttgatggacttggagctctcggtgatgctggatggtatacgatccaagcgattcttcttgttaacaactttaaacttccaaagaccgttactgctttgtcctgttctgttttaaacgatgcggggattgttctttcttgtggtgcgttgtttgattgggaagatggggtcaatgcaacgatttactgttctttcttggcgaatttgacgatggagataactgcgattggtacgaaaggtagccttcgggttcatgattttgttataccgtatatggaaaccgaggctgtgtttactacaagtggtggaggttgtgttagtgaacataaagttatgactgtgcttccacaagagacgtgtatggttatggagtttgctcggttggttggagaaattaaaaacagaggagctaaaccggatgggttttggatgaggtttagccggaatacgcagttgcttgttgatgctgtgaaagagtcgattgataataaccttgaacccgtgtttctctccggccggtgagaaagagcttagaagttagattagctttgtatttttctataaaaaaaatatcatgacacatgtcaacatttaatcgataaatttggcataaaatatcgaaaacaatttc

SEQ ID NO: 38905 - protein, 163 aa, Arabidopsis thaliana
  peptide (1)..(163): Ceres Seq. ID no. 12580407
MSGDNQIRIGLLSCTNKVRKLSRAINLSPNATISAIATTSSIEEAKSFAKSNNFPPNTKIHSSYESLLEDPDVDAVYFPIPTRLHVEWATLAAIKGKHILLDKPVALNVAEFDQIVEACEVNGVQFMDGTQWMHNPRTDKIKEFVNDLETFGQIKSLFLICCE

SEQ ID NO: 38906 - protein, 103 aa, Arabidopsis thaliana
  peptide (1)..(103): Ceres Seq. ID no. 12580408
MEITAIGTKGSLRVHDFVIPYMETEAVFTTSGGGCVSEHKVMTVLPQETCMVMEFARLVGEIKNRGAKPDGFWMRFSRNTQLLVDAVKESIDNNLEPVFLSGR

SEQ ID NO: 38907 - protein, 82 aa, Arabidopsis thaliana
  peptide (1)..(82): Ceres Seq. ID no. 12580409
METEAVFTTSGGGCVSEHKVMTVLPQETCMVMEFARLVGEIKNRGAKPDGFWMRFSRNTQLLVDAVKESIDNNLEPVFLSGR

SEQ ID NO: 38908 - DNA, 1378 bp, Arabidopsis thaliana
  misc_feature (1)..(1378): Ceres Seq. ID no. 13574988
  misc_feature (1)..(1378): Ortholog of  Ceres SEQ ID NO 14313060 as cited in SEQ ID NO 59447
  misc_feature (1)..(1378): Ortholog of  Ceres SEQ ID NO 12624676 as cited in SEQ ID NO 61197
aagccgctgcattggatcatccgaacaaggaagacgttacccacgagaccgtaatcacacgtggcggattctcagatattctctctttttcttctttacccggaaaaataaagtttctgttcttcttttttcttctctgggtttgagaattggtgtaagagaaacgattgaggttttctcttattatctaaacccaccaagtctttcaggattttagccagagaagcttgagtctttgattagggacatgtcaacctccgccgcttccttgtgttgttcatcaacccaggtcaatgggtttggtcttaggcctgaaaggtcgcttctttaccaacccacttccttttctttctccagaaggagaactcatggaattgtcaaggcctcatctcgggttgataggttttcgaaaagtgatatcattgtttctccctctattctctcggctaatttcgccaaattaggcgagcaggtaaaagcagtggagttggcaggttgtgattggattcatgttgatgtcatggacggtcgttttgttcccaacattactatcggacctctcgtggttgatgctttgcgccctgtgacagatcttcctttggatgttcatctgatgatagtggaacccgagcagagagtaccggatttcatcaaagcaggtgcagatattgtcagtgtacattgtgaacagcaatccaccatccatttgcatcgtaccgtcaatcaaataaaaagcttaggggctaaagctggagttgttctaaaccctggaaccccattgagtgcaatagaatatgtcttggatatggtggatctggtcttgatcatgtcggtcaaccctggttttggtggacagagctttattgaaagccaagtaaagaaaatctcggacttgaggaaaatgtgtgcagagaagggagtaaacccatggattgaagttgatggtggtgtcactccagcgaatgcgtacaaggttattgaggctggagcaaatgctctagtggctggatcagctgtatttggagctaaggactacgcagaagctataaaaggaattaaggccagcaaacgaccagcagctgtagctgtgtaatgtgaagcaacagcaagcgaaaagactctgttaaacttaggaacagttaaaaagtgaatgacgatcaccagaagtcccagatgttgtcgttgtgtctccattcgccataacattcacaagaatcaaactcaatatcttcaaagtaggctcctctatactattctgtaccattgtcttgtaaattgaggatatgcagattccatacattttgcaatgaaacactgtgataagaaatatgttgttacatatgtgtttttgacttataataaagcatttcatttgtct

SEQ ID NO: 38909 - protein, 281 aa, Arabidopsis thaliana
  peptide (1)..(281): Ceres Seq. ID no. 13574989
MSTSAASLCCSSTQVNGFGLRPERSLLYQPTSFSFSRRRTHGIVKASSRVDRFSKSDIIVSPSILSANFAKLGEQVKAVELAGCDWIHVDVMDGRFVPNITIGPLVVDALRPVTDLPLDVHLMIVEPEQRVPDFIKAGADIVSVHCEQQSTIHLHRTVNQIKSLGAKAGVVLNPGTPLSAIEYVLDMVDLVLIMSVNPGFGGQSFIESQVKKISDLRKMCAEKGVNPWIEVDGGVTPANAYKVIEAGANALVAGSAVFGAKDYAEAIKGIKASKRPAAVAV

SEQ ID NO: 38910 - protein, 190 aa, Arabidopsis thaliana
  peptide (1)..(190): Ceres Seq. ID no. 13574990
MDGRFVPNITIGPLVVDALRPVTDLPLDVHLMIVEPEQRVPDFIKAGADIVSVHCEQQSTIHLHRTVNQIKSLGAKAGVVLNPGTPLSAIEYVLDMVDLVLIMSVNPGFGGQSFIESQVKKISDLRKMCAEKGVNPWIEVDGGVTPANAYKVIEAGANALVAGSAVFGAKDYAEAIKGIKASKRPAAVAV

SEQ ID NO: 38911 - protein, 159 aa, Arabidopsis thaliana
  peptide (1)..(159): Ceres Seq. ID no. 13574991
MIVEPEQRVPDFIKAGADIVSVHCEQQSTIHLHRTVNQIKSLGAKAGVVLNPGTPLSAIEYVLDMVDLVLIMSVNPGFGGQSFIESQVKKISDLRKMCAEKGVNPWIEVDGGVTPANAYKVIEAGANALVAGSAVFGAKDYAEAIKGIKASKRPAAVAV

SEQ ID NO: 38912 - DNA, 1402 bp, Arabidopsis thaliana
  misc_feature (1)..(1402): Ceres Seq. ID no. 12328386
  misc_feature (1)..(1402): Ortholog of  Ceres SEQ ID NO 13655881 as cited in SEQ ID NO 64426
aaaactttgtctcatcgcatctttttccccaaattctcacaaaccttctcttctcaattccaccaaaccctcagattctcaatctccgatcgtcggaaattctcagcgatggccggagctggcgtcgatgatttcgttaaaggaaatgtttttccgaatggtgtcgctctcatcactctcgatcgaaccaaagctctcaacgccatgaatttagatatggatataaagtataaaagctttcttgatgaatgggaatctgatccgagagtgaaatgtgttatcgttgaaggaagcacatctagggccttttgtgcagggatggatattaaaggagttgctgcagaaatccaaaaggacaaaaacacacctcttgtgcaaaaggtatttacagcagagtatacactgatatgtgcaattgctgcgtacaaaaagccatatatttcattgatggatggtataacaatgggatttggtcttggtctttctggacatggtcgctaccgtgtgataacagagaggacggttcttgccatgccagaaaatggaattggcttgttccctgatgtcgggttttcatatatagcagctcatagccctggaggaggatctgttggtgcttatcttggtttgactggtaaaaggatctccgcgccatcagacgcactgttcgttggtcttgggacgcattatgtaccatctgaaaagctagcttcattaaaggaagccattttgtcagctaacctttctgaggatcctaatcaagacatccaagcaactttatcaaaatacagcagcaatcctgaatctgaggcccatctcaaatcacttttgcctcacatagagtcagcctttagctcaaataagtctattaaggaaacaatagaagagctcaaaaagtaccagcaaagcactgagtcttcagttgtagaatgggctaatgaggcactcaaaggtttggaaaaaggagcaccattttctctttacctaacacaaaagtatttctccaatgttgcatgtgccaagagtaaacccgaaaacgaattagcaacacttaatggcgtaatgaaaactgagtatcgcattgcactaagatctgccctgcgtggtgattttgctgaaggtgttagagcagttttgattgacaaggatcagaatccaaaatggaacccgacaagcattgaagaggtagacgaaaacgaagtggaagctctgtttaaaccattaagtccagaagtggaagagttaaaagtctgattctcattttgctttctctgtttaagaactgtccaccaaagtattctatgaataaaaacaaatctttagccatgtgttgaagaagcttgttactgtataacctattcaataaattggcactttttttgaaccgttgcagattatcttt

SEQ ID NO: 38913 - protein, 417 aa, Arabidopsis thaliana
  peptide (1)..(417): Ceres Seq. ID no. 12328387
KTLSHRIFFPKFSQTFSSQFHQTLRFSISDRRKFSAMAGAGVDDFVKGNVFPNGVALITLDRTKALNAMNLDMDIKYKSFLDEWESDPRVKCVIVEGSTSRAFCAGMDIKGVAAEIQKDKNTPLVQKVFTAEYTLICAIAAYKKPYISLMDGITMGFGLGLSGHGRYRVITERTVLAMPENGIGLFPDVGFSYIAAHSPGGGSVGAYLGLTGKRISAPSDALFVGLGTHYVPSEKLASLKEAILSANLSEDPNQDIQATLSKYSSNPESEAHLKSLLPHIESAFSSNKSIKETIEELKKYQQSTESSVVEWANEALKGLEKGAPFSLYLTQKYFSNVACAKSKPENELATLNGVMKTEYRIALRSALRGDFAEGVRAVLIDKDQNPKWNPTSIEEVDENEVEALFKPLSPEVEELKV

SEQ ID NO: 38914 - protein, 381 aa, Arabidopsis thaliana
  peptide (1)..(381): Ceres Seq. ID no. 12328388
MAGAGVDDFVKGNVFPNGVALITLDRTKALNAMNLDMDIKYKSFLDEWESDPRVKCVIVEGSTSRAFCAGMDIKGVAAEIQKDKNTPLVQKVFTAEYTLICAIAAYKKPYISLMDGITMGFGLGLSGHGRYRVITERTVLAMPENGIGLFPDVGFSYIAAHSPGGGSVGAYLGLTGKRISAPSDALFVGLGTHYVPSEKLASLKEAILSANLSEDPNQDIQATLSKYSSNPESEAHLKSLLPHIESAFSSNKSIKETIEELKKYQQSTESSVVEWANEALKGLEKGAPFSLYLTQKYFSNVACAKSKPENELATLNGVMKTEYRIALRSALRGDFAEGVRAVLIDKDQNPKWNPTSIEEVDENEVEALFKPLSPEVEELKV

SEQ ID NO: 38915 - protein, 349 aa, Arabidopsis thaliana
  peptide (1)..(349): Ceres Seq. ID no. 12328389
MNLDMDIKYKSFLDEWESDPRVKCVIVEGSTSRAFCAGMDIKGVAAEIQKDKNTPLVQKVFTAEYTLICAIAAYKKPYISLMDGITMGFGLGLSGHGRYRVITERTVLAMPENGIGLFPDVGFSYIAAHSPGGGSVGAYLGLTGKRISAPSDALFVGLGTHYVPSEKLASLKEAILSANLSEDPNQDIQATLSKYSSNPESEAHLKSLLPHIESAFSSNKSIKETIEELKKYQQSTESSVVEWANEALKGLEKGAPFSLYLTQKYFSNVACAKSKPENELATLNGVMKTEYRIALRSALRGDFAEGVRAVLIDKDQNPKWNPTSIEEVDENEVEALFKPLSPEVEELKV

SEQ ID NO: 38916 - DNA, 1684 bp, Arabidopsis thaliana; identical to SEQ ID NO: 24902
  misc_feature (1)..(1684): Ceres Seq. ID no. 12331203
  misc_feature (1)..(1684): Ortholog of  Ceres SEQ ID NO 14307253 as cited in SEQ ID NO 54783
  misc_feature (1)..(1684): Ortholog of  Ceres SEQ ID NO 14312300 as cited in SEQ ID NO 58632
  misc_feature (1)..(1684): Ortholog of  Ceres SEQ ID NO 13654989 as cited in SEQ ID NO 63117
  misc_feature (1)..(1684): Ortholog of  Ceres SEQ ID NO 13584744 as cited in SEQ ID NO 69137

SEQ ID NO: 38917 - protein, 489 aa, Arabidopsis thaliana; identical to SEQ ID NO: 24903
  peptide (1)..(489): Ceres Seq. ID no. 12331204

SEQ ID NO: 38918 - protein, 423 aa, Arabidopsis thaliana; identical to SEQ ID NO: 24904
  peptide (1)..(423): Ceres Seq. ID no. 12331205

SEQ ID NO: 38919 - protein, 244 aa, Arabidopsis thaliana; identical to SEQ ID NO: 24905
  peptide (1)..(244): Ceres Seq. ID no. 12331206

SEQ ID NO: 38920 - DNA, 640 bp, Arabidopsis thaliana
  misc_feature (1)..(640): Ceres Seq. ID no. 12652846
  misc_feature (1)..(640): Ortholog of  Ceres SEQ ID NO 15174406 as cited in SEQ ID NO 0
atcatccatcactacacacatctcctattgcaaacgaacataaaacactacctaagagatcaatatggctggagtgatgaagttggcatgcttgctcttggcctgcatgattgtggccggtccaatcacatcgaacgctgcgctaagctgtggctcagttaacagcaacttggcagcgtgcattggctacgtgctccaaggtggtgtcattcccccagcgtgttgctccggcgttaaaaacctcaacagcatagccaagacgaccccagaccgtcagcaagcttgcaattgcattcaaggtgccgctagagccttaggctctggtctcaacgctggccgtgcagctggaattcctaaggcatgtggagtcaatattccttacaaaatcagcaccagcaccaactgcaaaaccgtgaggtgatgagctagcaacggtgagatgatgctactaccggaagtttcgaatccttattatataatggatgagattaatattaaataagatgttcgaatgtttgtttttagagtttttaatttcttgtctttttctattgtggtgttcttgttatatgggtttgtctgtactatgttcgcaggcaacaacgttatatgaaatttcagagtacttgaagtttaagtt

SEQ ID NO: 38921 - protein, 118 aa, Arabidopsis thaliana
  peptide (1)..(118): Ceres Seq. ID no. 12652847
MAGVMKLACLLLACMIVAGPITSNAALSCGSVNSNLAACIGYVLQGGVIPPACCSGVKNLNSIAKTTPDRQQACNCIQGAARALGSGLNAGRAAGIPKACGVNIPYKISTSTNCKTVR

SEQ ID NO: 38922 - protein, 114 aa, Arabidopsis thaliana
  peptide (1)..(114): Ceres Seq. ID no. 12652848
MKLACLLLACMIVAGPITSNAALSCGSVNSNLAACIGYVLQGGVIPPACCSGVKNLNSIAKTTPDRQQACNCIQGAARALGSGLNAGRAAGIPKACGVNIPYKISTSTNCKTVR

SEQ ID NO: 38923 - protein, 104 aa, Arabidopsis thaliana
  peptide (1)..(104): Ceres Seq. ID no. 12652849
MIVAGPITSNAALSCGSVNSNLAACIGYVLQGGVIPPACCSGVKNLNSIAKTTPDRQQACNCIQGAARALGSGLNAGRAAGIPKACGVNIPYKISTSTNCKTVR

SEQ ID NO: 38924 - DNA, 1230 bp, Arabidopsis thaliana
  misc_feature (1)..(1230): Ceres Seq. ID no. 12385150
  misc_feature (1)..(1230): Ortholog of  Ceres SEQ ID NO 13595747 as cited in SEQ ID NO 58679
tgatgaagtcaagaggctaaacgcagttcaatcccccttccaagacgctgaatcaatagcaaaagcgattggaaacgcgaccaaagttgttgttacggtcggggcaacagagaatggtccggacgcccaagtctcgacctcaaacgcattgctcgtggtccaagcagctgagctagccggcgtaagccacgtggcgatagtctacgacggcaccatcagcgggtctacatacaacgtgctcgacgggattacttcgtttttcggcaatcttttcgcaaaatctcagccattgactatctctgacctcatcgagaaagtagctcaaaccgacgtggcctacacactcataaagacgagtttgacggaggatttctctccggagaaagcttataacgtcgtcgtttcagctgaagggagtaacagcggcagtggcagtagttcgtccgaggcctacaaagttccgaagttgaagattgcgtcgctggtagcagacatttttgcgaatacggccgtggcagaaaataaggtggtggaagtttctacagatccatcagcaccatcgcggccagtggacgagcttttcagtgtaatcccggaagatgggaggagaaaagtgtacgcagatgcgatcgcaagggaaagagcagaggaagaagctaaagttgcagctgacaaagctcgagaggcagcagaagcagcgaaagagttcgagaaacaaatgcaaaagctctctgagaaagaagcagaagctgcaagcttagctgaggatgcgcagcagaaagcagatgccgtgggagtcacagtggacggtttatttaacaaggcgaaagatatcagctcaggtctctcctggaataaactcggctctcagttcgcaactgcgattcagaacgcttcagagacgcctaaagtacaggttgctacggtcagaggacaagcaaaagcgagaaacttgccacccaagaaagcagtggtgaagcagagaccatcatctccgtttgcatccaaaccgaaagaagaacgtccgaagaagccggagaaagaggtgaggaaagtgttcggaggattgtttaagcaagagaccatctacatcgacgatgattgaaaaggccatatgcgatgtcgttttgaagttccgtacagtttcctttttttctctttccttctgtttcaagttaaaattctgtaatcgtatgacaaaattatacataaaaaaccatcattctctcc

SEQ ID NO: 38925 - protein, 367 aa, Arabidopsis thaliana
  peptide (1)..(367): Ceres Seq. ID no. 12385151
DEVKRLNAVQSPFQDAESIAKAIGNATKVVVTVGATENGPDAQVSTSNALLVVQAAELAGVSHVAIVYDGTISGSTYNVLDGITSFFGNLFAKSQPLTISDLIEKVAQTDVAYTLIKTSLTEDFSPEKAYNVVVSAEGSNSGSGSSSSEAYKVPKLKIASLVADIFANTAVAENKVVEVSTDPSAPSRPVDELFSVIPEDGRRKVYADAIARERAEEEAKVAADKAREAAEAAKEFEKQMQKLSEKEAEAASLAEDAQQKADAVGVTVDGLFNKAKDISSGLSWNKLGSQFATAIQNASETPKVQVATVRGQAKARNLPPKKAVVKQRPSSPFASKPKEERPKKPEKEVRKVFGGLFKQETIYIDDD

SEQ ID NO: 38926 - DNA, 1702 bp, Arabidopsis thaliana
  misc_feature (1)..(1702): Ceres Seq. ID no. 12330215
  misc_feature (1)..(1702): Ortholog of  Ceres SEQ ID NO 14307156 as cited in SEQ ID NO 54069
  misc_feature (1)..(1702): Ortholog of  Ceres SEQ ID NO 15169651 as cited in SEQ ID NO 64156
ctgttgtttgttttatcatctctccataattgcttcgatttctctccaaagacacaacacaaaaagtgctttttttaatcagatattttctgggcttcactttaactctcttcgtgcttggttttccgatcttagtcgttactaattgagtcggagactgttcatttcctgattctgaagaaagttttggagaaggagaagatgtcaactctgcgagtgagctagggtttagtgtgttttccgatttttgagctcttggggattgttgttttctcttaaagagtcgattttgaatggcggtggagtatgtatgttgcagcccaaacttctttatacatatagctgtgattgtgtttcttgtcttgttcgctggactcatgtctggcttaacattgggtcttatgtctttgagtctcgttgatcttgaagttctcgctaaatccggtacacctgaacatcgtaaatatgcagcaaagatattgccagtggtaaagaatcagcacttgttgcttgtcactttacttatatgcaatgcagctgctatggagacgcttcctatttttcttgatggccttgtgacggcatggggtgccattttgatttcagttacattgattcttctctttggtgagattatacctcagtcgatttgttcacgttatggtttagcgattggtgcaacagtggctccgtttgtccgtgtcctagtctttatctgcttacctgttgcatggccaataagcaagcgctttttcgaagagctgagctgaaaacacttgtggattttcatggaaatgaggctggaaagggtggggagttgactcatgacgaaacgacaatcattgcaggagctcttgaactctctgagaaaatggtcaaagatgcaatgacaccaatatcggatatctttgtgattgatatcaatgccaaactagacagagacttgatgaacttgattcttgagaaagggcatagcagagttccagtatactatgagcagccaactaacataatcggccttgttctggtgaagaacttattaactatcaacccagatgaagaaatacctgtcaagaatgtcacgataagaaggattccaagagttccagaaatcttgcctttatatgacatattgaacgaattccagaaaggactcagccacatggctgttgttgtaagacagtgtgacaaaatccacccattaccttctaaaaatgggagtgttaaggaagcccgagtggatgtggatagtgagggaactcctactcctcaggagagaatgttaaggacaaaaagatcgcttcaaaagtggaagagctttccgaatcgagcaagttcgtttaaaggagggtcaaagagcaagaagtggtcaaaagacaatgatgcagacatcctgcaattgaatggcaatccgctgcctaaacttgctgaggaagaagaagcagtcggaatcattacgatggaggatgtcattgaagaacttctgcaggaggagatctttgacgaaactgatcaccattttgaagactcctaacacagagtgcatgaccactgaactggttatgaatgtcgaaaactttagtctttgttttcaactttcaaactgtcacttgtccggcgaatgtgtatcaatgtaggcatgaacaacaactttttctatggtttcaagatgttttctctctatatatatatcattggtctc

SEQ ID NO: 38927 - protein, 267 aa, Arabidopsis thaliana
  peptide (1)..(267): Ceres Seq. ID no. 12330216
MANKQALFRRAELKTLVDFHGNEAGKGGELTHDETTIIAGALELSEKMVKDAMTPISDIFVIDINAKLDRDLMNLILEKGHSRVPVYYEQPTNIIGLVLVKNLLTINPDEEIPVKNVTIRRIPRVPEILPLYDILNEFQKGLSHMAVVVRQCDKIHPLPSKNGSVKEARVDVDSEGTPTPQERMLRTKRSLQKWKSFPNRASSFKGGSKSKKWSKDNDADILQLNGNPLPKLAEEEEAVGIITMEDVIEELLQEEIFDETDHHFEDS

SEQ ID NO: 38928 - protein, 220 aa, Arabidopsis thaliana
  peptide (1)..(220): Ceres Seq. ID no. 12330217
MVKDAMTPISDIFVIDINAKLDRDLMNLILEKGHSRVPVYYEQPTNIIGLVLVKNLLTINPDEEIPVKNVTIRRIPRVPEILPLYDILNEFQKGLSHMAVVVRQCDKIHPLPSKNGSVKEARVDVDSEGTPTPQERMLRTKRSLQKWKSFPNRASSFKGGSKSKKWSKDNDADILQLNGNPLPKLAEEEEAVGIITMEDVIEELLQEEIFDETDHHFEDS

SEQ ID NO: 38929 - protein, 215 aa, Arabidopsis thaliana
  peptide (1)..(215): Ceres Seq. ID no. 12330218
MTPISDIFVIDINAKLDRDLMNLILEKGHSRVPVYYEQPTNIIGLVLVKNLLTINPDEEIPVKNVTIRRIPRVPEILPLYDILNEFQKGLSHMAVVVRQCDKIHPLPSKNGSVKEARVDVDSEGTPTPQERMLRTKRSLQKWKSFPNRASSFKGGSKSKKWSKDNDADILQLNGNPLPKLAEEEEAVGIITMEDVIEELLQEEIFDETDHHFEDS

SEQ ID NO: 38930 - DNA, 1391 bp, Arabidopsis thaliana; identical to SEQ ID NO: 21324
  misc_feature (1)..(1391): Ceres Seq. ID no. 13488285
  misc_feature (1)..(1391): Ortholog of  Ceres SEQ ID NO 13495628 as cited in SEQ ID NO 60727

SEQ ID NO: 38931 - protein, 381 aa, Arabidopsis thaliana; identical to SEQ ID NO: 21325
  peptide (1)..(381): Ceres Seq. ID no. 13488286

SEQ ID NO: 38932 - protein, 372 aa, Arabidopsis thaliana; identical to SEQ ID NO: 21326
  peptide (1)..(372): Ceres Seq. ID no. 13488287

SEQ ID NO: 38933 - protein, 275 aa, Arabidopsis thaliana; identical to SEQ ID NO: 21327
  peptide (1)..(275): Ceres Seq. ID no. 13488288

SEQ ID NO: 38934 - DNA, 1720 bp, Arabidopsis thaliana
  misc_feature (1)..(1720): Ceres Seq. ID no. 12371256
  misc_feature (1)..(1720): Ortholog of  Ceres SEQ ID NO 13654928 as cited in SEQ ID NO 62546
actcttaatctttaaaaaaaagaaaaaaaaaaacagaacaatttcttcttcctctgggatccataagttttgaggtatgttgttgctgattttgtccttttatctctgcaaataacagagaagataaatgaggattttctcctaggttgaagttttatattttggtggtcagtgtctgatggagtgtaatgcaaagccaccgtttcaatgggaattggaaaacttgatatcttttggcacttctacagctgaagttcctagaaagctaaagccaatggagtgggaaattgatggatttgattgcacctctctgtattcttcaagctttgatgcagtagcttatggtggtagttcaggttctgatatagctcatgctttctctaaaagctcaaagtcaacttccattagctcttcatcaactgaagttagaacacacaattttacatcagaaactggtgaaagtcttcctggagaatttgcaaaggggattgatacttctccaactcttgaactttcttttggctctggtgatccggttctcggtttaaagcttggtaaacgaacgtactttgaagacttttgggaagtggagaatgctaaaggtttgggacttcccgtgagccttgcttcgtcttctgtttctccggtgaagaaatcgaaatccattcctcagaggttacaaactcctcactgtcaagttgaaggctgtaatcttgatctttcatcagctaaagactatcatcggaaacataggatttgtgaaaaccattcaaagtttcctaaagtcgttgtgagtggcgtagagcgtcggttctgccaacaatgtagcaggttccactgtctctccgagtttgatgagaagaaacgtagctgtcgccgacgtctctcagatcacaatgcaagacgtcgcaagccaaatcctggaaggacatatgatgggaaaccacaggtggattttgtatggaacagatttgcacttatccatccaagaagtgaggaaaagtttctatggcccagttcaaagcctgtaccatcaagagtcttaatgccgcagcctgcaaagaccgagatttccaataagctgttcaccgagcacagtagatttggattgttggaccccaaaacaaaatccgcaagagcggagttattcagtaaagaaaaggtcacaatctcttcacacatgggtgcttctcaagatcttgatggtgctctctctcttctgtcaaattcaacaacatgggtttcttcctctgaccaaccaagacgttttacccttgatcaccatccctcaagcaacctccaacccatagctaaccggtctgcggctcaactcagttcagtgtccggctattggcagccggacccacccgcagttgaaggcccgaccgctctgcatagaaatggggcaggccagtttaatgaaaactacttcagcttgaaccagttttataactgaaagctgtatgcctttaaatcctatttaggatcaagcaagctagtgataagttaagataggagctgtgaaacttgcaagacaccaaatcctctcttatttctttgtccaaatattttcatgggttagagagctttgacaattgtctttaatatcaactttatcgtgttatacattaggattataaatcttgatggtgtactacgaaattgatatatagcatgctaagtattatatgattagaattagaagtatttttcgtttggg

SEQ ID NO: 38935 - protein, 425 aa, Arabidopsis thaliana
  peptide (1)..(425): Ceres Seq. ID no. 12371257
MECNAKPPFQWELENLISFGTSTAEVPRKLKPMEWEIDGFDCTSLYSSSFDAVAYGGSSGSDIAHAFSKSSKSTSISSSSTEVRTHNFTSETGESLPGEFAKGIDTSPTLELSFGSGDPVLGLKLGKRTYFEDFWEVENAKGLGLPVSLASSSVSPVKKSKSIPQRLQTPHCQVEGCNLDLSSAKDYHRKHRICENHSKFPKVVVSGVERRFCQQCSRFHCLSEFDEKKRSCRRRLSDHNARRRKPNPGRTYDGKPQVDFVWNRFALIHPRSEEKFLWPSSKPVPSRVLMPQPAKTEISNKLFTEHSRFGLLDPKTKSARAELFSKEKVTISSHMGASQDLDGALSLLSNSTTWVSSSDQPRRFTLDHHPSSNLQPIANRSAAQLSSVSGYWQPDPPAVEGPTALHRNGAGQFNENYFSLNQFYN

SEQ ID NO: 38936 - protein, 393 aa, Arabidopsis thaliana
  peptide (1)..(393): Ceres Seq. ID no. 12371258
MEWEIDGFDCTSLYSSSFDAVAYGGSSGSDIAHAFSKSSKSTSISSSSTEVRTHNFTSETGESLPGEFAKGIDTSPTLELSFGSGDPVLGLKLGKRTYFEDFWEVENAKGLGLPVSLASSSVSPVKKSKSIPQRLQTPHCQVEGCNLDLSSAKDYHRKHRICENHSKFPKVVVSGVERRFCQQCSRFHCLSEFDEKKRSCRRRLSDHNARRRKPNPGRTYDGKPQVDFVWNRFALIHPRSEEKFLWPSSKPVPSRVLMPQPAKTEISNKLFTEHSRFGLLDPKTKSARAELFSKEKVTISSHMGASQDLDGALSLLSNSTTWVSSSDQPRRFTLDHHPSSNLQPIANRSAAQLSSVSGYWQPDPPAVEGPTALHRNGAGQFNENYFSLNQFYN

SEQ ID NO: 38937 - DNA, 1244 bp, Arabidopsis thaliana
  misc_feature (1)..(1244): Ceres Seq. ID no. 13491334
  misc_feature (1)..(1244): Ortholog of  Ceres SEQ ID NO 13659033 as cited in SEQ ID NO 66372
  misc_feature (1)..(1244): Ortholog of  Ceres SEQ ID NO 12625899 as cited in SEQ ID NO 69079
gctcagtttcctggtcaaatggctacctcagagactcgagtcttgttcttatctttgtgtctcatccttggcaaagtagttttgtctcagtttgatgagttatggctagtaggggacgatgatccactcaacgccttgcagacgaggcgtgaaagaagagaggagaggtgtgattactcggtggggaaatggacgttcgatgaaacgtatccgctctatgattcaagctgtccatatctgagttctgcactaagttgccaaagaaatggaagacccgactcttattaccagaaatggagatggatccctaaggcttgttcactaccaaggtttgacgcattgaaatttcttgggaaaatgagaggaaaaagaataatgctggttggagattcaatgatgagaaaccagtgggaatctcttgtctgcttagtacagtctgttcttcccactcatcgtaagaagctcacttacaatggtcctacgatgtctttccattctctggattttgagacatcaattgagttttgttgggctcctctgcttgtggaactcaagagaggagttgaccgtaaaagggtgttacatttggactcaatcgaagacaatgctagatattggcgtggtgtagatgttcttgtattcgattccgctcactggtggactcactctcagagatggagttcgtgggattattacatggatgggaataagatcttcaaagctatggacccaatggttgcttatgagagaggactaaccacatgggctaaatgggttgagataaatcttgatccatccaaaacaaaagtcattttccgcactgtctcaccgagagagagtggtcagatgtgctacaaccagaaacatcccttgccttctttatcttcttccaccaaaccccacgtgcctcaacagtcaagagtgttgaacaaagtgctaaggacaatgaaataccgagtgtatttatacgatatcacaacaatgtctgcgtatagaagagacggtcatccttcggtgttcaagagagcaatgcacgaggaagagaagcaccatcgtatcgctggaccttcatcagattgcagtcattggtgcttgcccggtgtcccggatatttggaatgagatgctttcttcaattatcttaaccaatgctgtatgagctataataagagtctgtttttactcatgaacaatggtgttacttatatgaatcagtggtttatatattacatatcctttcccagc

SEQ ID NO: 38938 - protein, 385 aa, Arabidopsis thaliana
  peptide (1)..(385): Ceres Seq. ID no. 13491335
AQFPGQMATSETRVLFLSLCLILGKVVLSQFDELWLVGDDDPLNALQTRRERREERCDYSVGKWTFDETYPLYDSSCPYLSSALSCQRNGRPDSYYQKWRWIPKACSLPRFDALKFLGKMRGKRIMLVGDSMMRNQWESLVCLVQSVLPTHRKKLTYNGPTMSFHSLDFETSIEFCWAPLLVELKRGVDRKRVLHLDSIEDNARYWRGVDVLVFDSAHWWTHSQRWSSWDYYMDGNKIFKAMDPMVAYERGLTTWAKWVEINLDPSKTKVIFRTVSPRESGQMCYNQKHPLPSLSSSTKPHVPQQSRVLNKVLRTMKYRVYLYDITTMSAYRRDGHPSVFKRAMHEEEKHHRIAGPSSDCSHWCLPGVPDIWNEMLSSIILTNAV

SEQ ID NO: 38939 - protein, 379 aa, Arabidopsis thaliana
  peptide (1)..(379): Ceres Seq. ID no. 13491336
MATSETRVLFLSLCLILGKVVLSQFDELWLVGDDDPLNALQTRRERREERCDYSVGKWTFDETYPLYDSSCPYLSSALSCQRNGRPDSYYQKWRWIPKACSLPRFDALKFLGKMRGKRIMLVGDSMMRNQWESLVCLVQSVLPTHRKKLTYNGPTMSFHSLDFETSIEFCWAPLLVELKRGVDRKRVLHLDSIEDNARYWRGVDVLVFDSAHWWTHSQRWSSWDYYMDGNKIFKAMDPMVAYERGLTTWAKWVEINLDPSKTKVIFRTVSPRESGQMCYNQKHPLPSLSSSTKPHVPQQSRVLNKVLRTMKYRVYLYDITTMSAYRRDGHPSVFKRAMHEEEKHHRIAGPSSDCSHWCLPGVPDIWNEMLSSIILTNAV

SEQ ID NO: 38940 - protein, 266 aa, Arabidopsis thaliana
  peptide (1)..(266): Ceres Seq. ID no. 13491337
MRGKRIMLVGDSMMRNQWESLVCLVQSVLPTHRKKLTYNGPTMSFHSLDFETSIEFCWAPLLVELKRGVDRKRVLHLDSIEDNARYWRGVDVLVFDSAHWWTHSQRWSSWDYYMDGNKIFKAMDPMVAYERGLTTWAKWVEINLDPSKTKVIFRTVSPRESGQMCYNQKHPLPSLSSSTKPHVPQQSRVLNKVLRTMKYRVYLYDITTMSAYRRDGHPSVFKRAMHEEEKHHRIAGPSSDCSHWCLPGVPDIWNEMLSSIILTNAV

SEQ ID NO: 38941 - DNA, 1657 bp, Arabidopsis thaliana
  misc_feature (1)..(1657): Ceres Seq. ID no. 13492212
  misc_feature (1)..(1657): Ortholog of  Ceres SEQ ID NO 13589042 as cited in SEQ ID NO 60626
  misc_feature (1)..(1657): Ortholog of  Ceres SEQ ID NO 14302887 as cited in SEQ ID NO 66146
gatcttctcaaaaacttcacctttttttgtttttccagtttctcagaggagatcttccttcaaagctcaaatccttttgtctgaattgtgatactgctgtccccatttttctgcaagttgggaaatttctgtcaaagttttgtgggtctgttaaaaagatctgagctttgaacatggggagctcaatggaggagaaagtggtggctgtgatcatggtcggtggtccaaccaaaggcactcgatttcggccattgtcgctgaatattccaaagcctctgtttcctattgcgggacaaccaatggtgcatcatccaatttcagcttgtaaaagaattccaaatttagctcaaatatatcttgttggcttctatgaggaaagggaatttgcactttatgtttcagccatctctaatgaacttaaagttcctgttagatatctgcgagaagacaaaccacatggttcagctggtgggctgtatcactttagaaatcttattatggaagatagtccgtctcatatcttcctgcttaactgtgatgtttgctgcagtttccccttgcccaaaatgctcgaggctcacaggggatatggtggaattggaactcttcttgtgatcaaggtctctcctgaatcagccagccaatttggagaattggttgcagatccagttactaatgagctgcttcattacaccgagaaacccgaaacttttgtcagtgatcgaattaactgtggtgtttatgtatttacacctgaaatttttaatgccataggagatgtttctactcagaggaaagatagagcaactctaaaacgtgtttccagcttcgaagctcttcaaccggcaacaaggatcccgacagattttgtaagactggatcaagacatcctttcacctctagctgggaagaaacggctatatacttatgagactatggatttctgggagcaaatcaaatctcctgggatgtcgttgaggtgttcaggactctatctttcccaattccgcttgacatctccccaactgttggctagtggtgatggaacaaggagtgccattgtgattggtgatgtttacatacatccttctgcaaaagttcacccaactgcaaagattggtcccaacgtctcaatctctgcaaatgctcgtgttggaccgggcgtcaggcttatgagctgcatcatccttgacgatgttgagatcatggaaaatgcagtggtgactaacgcaattgttgggtggaaatcttctatcgggagatggtcccgcgtccaggctgagggagtctacaattcgaaactcggagttacaattctcggagactcggttgcagttgaagacgaggttgtggtgaccagcagtattgttcttccaaacaagacactgaacgtcagtgttcaagacgagatcattttgtaactgaaaaacggaagttgaaaaatggaaccaacccagtggggagcagccacactatctccctctgattcaatatctactggagaaccacataagcaaatatttgggaactaattcacatgtatcatttatttacaccaagaattttccaacattgtatcaattccattttctatactcacaacacagctactgtaaaaggcactgaatttttgcccagaataataaagcacttgtgc

SEQ ID NO: 38942 - protein, 415 aa, Arabidopsis thaliana
  peptide (1)..(415): Ceres Seq. ID no. 13492213
MGSSMEEKVVAVIMVGGPTKGTRFRPLSLNIPKPLFPIAGQPMVHHPISACKRIPNLAQIYLVGFYEEREFALYVSAISNELKVPVRYLREDKPHGSAGGLYHFRNLIMEDSPSHIFLLNCDVCCSFPLPKMLEAHRGYGGIGTLLVIKVSPESASQFGELVADPVTNELLHYTEKPETFVSDRINCGVYVFTPEIFNAIGDVSTQRKDRATLKRVSSFEALQPATRIPTDFVRLDQDILSPLAGKKRLYTYETMDFWEQIKSPGMSLRCSGLYLSQFRLTSPQLLASGDGTRSAIVIGDVYIHPSAKVHPTAKIGPNVSISANARVGPGVRLMSCIILDDVEIMENAVVTNAIVGWKSSIGRWSRVQAEGVYNSKLGVTILGDSVAVEDEVVVTSSIVLPNKTLNVSVQDEIIL

SEQ ID NO: 38943 - protein, 411 aa, Arabidopsis thaliana
  peptide (1)..(411): Ceres Seq. ID no. 13492214
MEEKVVAVIMVGGPTKGTRFRPLSLNIPKPLFPIAGQPMVHHPISACKRIPNLAQIYLVGFYEEREFALYVSAISNELKVPVRYLREDKPHGSAGGLYHFRNLIMEDSPSHIFLLNCDVCCSFPLPKMLEAHRGYGGIGTLLVIKVSPESASQFGELVADPVTNELLHYTEKPETFVSDRINCGVYVFTPEIFNAIGDVSTQRKDRATLKRVSSFEALQPATRIPTDFVRLDQDILSPLAGKKRLYTYETMDFWEQIKSPGMSLRCSGLYLSQFRLTSPQLLASGDGTRSAIVIGDVYIHPSAKVHPTAKIGPNVSISANARVGPGVRLMSCIILDDVEIMENAVVTNAIVGWKSSIGRWSRVQAEGVYNSKLGVTILGDSVAVEDEVVVTSSIVLPNKTLNVSVQDEIIL

SEQ ID NO: 38944 - protein, 402 aa, Arabidopsis thaliana
  peptide (1)..(402): Ceres Seq. ID no. 13492215
MVGGPTKGTRFRPLSLNIPKPLFPIAGQPMVHHPISACKRIPNLAQIYLVGFYEEREFALYVSAISNELKVPVRYLREDKPHGSAGGLYHFRNLIMEDSPSHIFLLNCDVCCSFPLPKMLEAHRGYGGIGTLLVIKVSPESASQFGELVADPVTNELLHYTEKPETFVSDRINCGVYVFTPEIFNAIGDVSTQRKDRATLKRVSSFEALQPATRIPTDFVRLDQDILSPLAGKKRLYTYETMDFWEQIKSPGMSLRCSGLYLSQFRLTSPQLLASGDGTRSAIVIGDVYIHPSAKVHPTAKIGPNVSISANARVGPGVRLMSCIILDDVEIMENAVVTNAIVGWKSSIGRWSRVQAEGVYNSKLGVTILGDSVAVEDEVVVTSSIVLPNKTLNVSVQDEIIL

SEQ ID NO: 38945 - DNA, 1679 bp, Arabidopsis thaliana
  misc_feature (1)..(1679): Ceres Seq. ID no. 13489356
  misc_feature (1)..(1679): Ortholog of  Ceres SEQ ID NO 15169603 as cited in SEQ ID NO 65772
  misc_feature (1)..(1679): Ortholog of  Ceres SEQ ID NO 14308003 as cited in SEQ ID NO 65919
  misc_feature (1)..(1679): Ortholog of  Ceres SEQ ID NO 14303087 as cited in SEQ ID NO 66569
acaaatcaaaacaacataattaacttacccaaacaagaaacccaagaatccaaaatggaaatgctcaacgcaataattctcatcctatttccaatcatagggtttgtattaatcttctcattcccaacaaaaaccctaaaagccaaaaccgcatcaccctctaatccgacatcgtaccaactcatcggctctattctctccttcaacaaaaaccgccaccgtcttctccaatggtacacagatctcctccgtctctctccgtctcaaaccatcaccgtcgatctcctcttcggtcgtcggactatcatcactgcaaaccctgaaaacgttgagcacattctcaaaacaaatttttataacttccctaaaggcaaacctttcaccgacctcctaggagatctactcggcggcggaatctttaattctgacggcgagttatggagctcacagcgtaaactcgcgagccacgagtttacaatgcgttctcttagggaattcactttcgaaatcctccgtgaagaagtccaaaaccgcctcattccggtgctttcctccgccgtggactgtggagagacggttgattttcaggaggttttgaagcgctttgctttcgatgttgtatgcaaagtgtcgttgggttgggatccggattgtttggatttgacccgacccgttccagaacttgttaaggcttttgatgtagcggcggagatcagcgctcgccgcgccacggagccggtttacgccgtgtggaaagtaaagcgtttcttgaacgtagggagcgagaagaggttgagagaagccatcaagaccgtacacttgtctgtgtctgagatcatccgggccaaaaagaaaagcctcgatatcggtggtgacgtgtcggacaagcaggacctgctgtcgaggtttctcgccgctggccacggggaagaagccgtgagggatagtgtaatcagctttattatggcgggaagggatacaacgtcggcagcgatgacgtggctgttttggttgttgagtcaaaatgatgacgtggagacgaagatactcgacgaattgagaaacaaagggtctttagggttagggtttgaggatttgagagagatgagttacacaaaagcttgtctgtgtgaagcaatgaggctttacccaccagtggcttgggactcaaagcatgcagcaaacgacgacattttgccagatggaacacctctcaaaaagggagacaaagtcacttatttcccttacggtatgggaaggatggagaaggtgtggggtaaagattgggacgagtttaaaccaaaccggtggtttgaggaagaaccgagttacggtacaaaaccggttttgaaaagtgtgagttcgttcaagtttccggttttccaagccggaccaagggtttgcataggtaaagaaatggcttttacacaaatgaaagacgtggttggttcagttttgagtcggtttaagattataccggtttgcaataaccggccggtctttgttcctcttctaaccgctcacatggctggtgggctaaaggtgaagatcaagaggagagagcaatgtgattcgatgtatatttaattaattgattaatcaagtcatgtccttgtagaatatccaactaatatgtaaaatgtgtggtttataaattaaatcaaataaatatattatat

SEQ ID NO: 38946 - protein, 528 aa, Arabidopsis thaliana
  peptide (1)..(528): Ceres Seq. ID no. 13489357
TNQNNIINLPKQETQESKMEMLNAIILILFPIIGFVLIFSFPTKTLKAKTASPSNPTSYQLIGSILSFNKNRHRLLQWYTDLLRLSPSQTITVDLLFGRRTIITANPENVEHILKTNFYNFPKGKPFTDLLGDLLGGGIFNSDGELWSSQRKLASHEFTMRSLREFTFEILREEVQNRLIPVLSSAVDCGETVDFQEVLKRFAFDVVCKVSLGWDPDCLDLTRPVPELVKAFDVAAEISARRATEPVYAVWKVKRFLNVGSEKRLREAIKTVHLSVSEIIRAKKKSLDIGGDVSDKQDLLSRFLAAGHGEEAVRDSVISFIMAGRDTTSAAMTWLFWLLSQNDDVETKILDELRNKGSLGLGFEDLREMSYTKACLCEAMRLYPPVAWDSKHAANDDILPDGTPLKKGDKVTYFPYGMGRMEKVWGKDWDEFKPNRWFEEEPSYGTKPVLKSVSSFKFPVFQAGPRVCIGKEMAFTQMKDVVGSVLSRFKIIPVCNNRPVFVPLLTAHMAGGLKVKIKRREQCDSMYI

SEQ ID NO: 38947 - protein, 510 aa, Arabidopsis thaliana
  peptide (1)..(510): Ceres Seq. ID no. 13489358
MEMLNAIILILFPIIGFVLIFSFPTKTLKAKTASPSNPTSYQLIGSILSFNKNRHRLLQWYTDLLRLSPSQTITVDLLFGRRTIITANPENVEHILKTNFYNFPKGKPFTDLLGDLLGGGIFNSDGELWSSQRKLASHEFTMRSLREFTFEILREEVQNRLIPVLSSAVDCGETVDFQEVLKRFAFDVVCKVSLGWDPDCLDLTRPVPELVKAFDVAAEISARRATEPVYAVWKVKRFLNVGSEKRLREAIKTVHLSVSEIIRAKKKSLDIGGDVSDKQDLLSRFLAAGHGEEAVRDSVISFIMAGRDTTSAAMTWLFWLLSQNDDVETKILDELRNKGSLGLGFEDLREMSYTKACLCEAMRLYPPVAWDSKHAANDDILPDGTPLKKGDKVTYFPYGMGRMEKVWGKDWDEFKPNRWFEEEPSYGTKPVLKSVSSFKFPVFQAGPRVCIGKEMAFTQMKDVVGSVLSRFKIIPVCNNRPVFVPLLTAHMAGGLKVKIKRREQCDSMYI

SEQ ID NO: 38948 - protein, 508 aa, Arabidopsis thaliana
  peptide (1)..(508): Ceres Seq. ID no. 13489359
MLNAIILILFPIIGFVLIFSFPTKTLKAKTASPSNPTSYQLIGSILSFNKNRHRLLQWYTDLLRLSPSQTITVDLLFGRRTIITANPENVEHILKTNFYNFPKGKPFTDLLGDLLGGGIFNSDGELWSSQRKLASHEFTMRSLREFTFEILREEVQNRLIPVLSSAVDCGETVDFQEVLKRFAFDVVCKVSLGWDPDCLDLTRPVPELVKAFDVAAEISARRATEPVYAVWKVKRFLNVGSEKRLREAIKTVHLSVSEIIRAKKKSLDIGGDVSDKQDLLSRFLAAGHGEEAVRDSVISFIMAGRDTTSAAMTWLFWLLSQNDDVETKILDELRNKGSLGLGFEDLREMSYTKACLCEAMRLYPPVAWDSKHAANDDILPDGTPLKKGDKVTYFPYGMGRMEKVWGKDWDEFKPNRWFEEEPSYGTKPVLKSVSSFKFPVFQAGPRVCIGKEMAFTQMKDVVGSVLSRFKIIPVCNNRPVFVPLLTAHMAGGLKVKIKRREQCDSMYI

SEQ ID NO: 38949 - DNA, 925 bp, Arabidopsis thaliana
  misc_feature (1)..(925): Ceres Seq. ID no. 13575729
  misc_feature (1)..(925): Ortholog of  Ceres SEQ ID NO 12563124 as cited in SEQ ID NO 57104
  misc_feature (1)..(925): Ortholog of  Ceres SEQ ID NO 12617639 as cited in SEQ ID NO 65219
atctcactgctcactactctcactgtaatcccttagatcttcttttcaaatttcaatggcgtccggtgatgtagagtatcggtgcttcgttggaggtctagcatgggccactgatgacagagctcttgagactgccttcgctcaatacggcgacgttattgattccaaggtctgttacacgccgagatcggactccgagtgatatcgatgatctcatcctcgacggatctgttccgatcttgtgtttctctgttacttgattcgattactctgttactattctcgttctttgttactactactactactactgttacttgtattttcccaaatcgatcattaacgatcgtgagactggaagatcaaggggattcggattcgtcaccttcaaggatgagaaagccatgaaggatgcgattgagggaatgaacggacaagatctcgatggccgtagcatcactgttaacgaggctcagtcacgaggaagcggtggcggcggaggccaccgtggaggtggtggcggtggataccgcagcggcggtggtggagggtacttccggtggaggtggtagctacggaggtggcggcggtagacgcgagggtggaggaggatacagcggcggcggcggttactcctcaagaggtggtggtggcggaagctacggtggtggaagacgtgagggaggaggaggatacggtggtggtgaaggaggaggttacggaggaagcggtggtggtggaggatggtaattcctttaattaggtttgggattaccaatgaatgttctctctctcgcttgttatgcttctacttggttttgtgtgttctctattttgttctggttctgctttagatttgatgtaacagttcgtgattaggtattttggtatctggaaacgtaatgttaagtcacttgtcattctc

SEQ ID NO: 38950 - protein, 101 aa, Arabidopsis thaliana
  peptide (1)..(101): Ceres Seq. ID no. 13575730
MAVASLLTRLSHEEAVAAEATVEVVAVDTAAAVVEGTSGGGGSYGGGGGRREGGGGYSGGGGYSSRGGGGGSYGGGRREGGGGYGGGEGGGYGGSGGGGGW

SEQ ID NO: 38951 - protein, 66 aa, Arabidopsis thaliana
  peptide (1)..(66): Ceres Seq. ID no. 13575731
MISSSTDLFRSCVSLLLDSITLLLFSFFVTTTTTTVTCIFPNRSLTIVRLEDQGDSDSSPSRMRKP

SEQ ID NO: 38952 - protein, 55 aa, Arabidopsis thaliana
  peptide (1)..(55): Ceres Seq. ID no. 13575732
MKDAIEGMNGQDLDGRSITVNEAQSRGSGGGGGHRGGGGGGYRSGGGGGYFRWRW

SEQ ID NO: 38953 - DNA, 1366 bp, Arabidopsis thaliana
  misc_feature (1)..(1366): Ceres Seq. ID no. 12325610
  misc_feature (1)..(1366): Ortholog of  Ceres SEQ ID NO 14305026 as cited in SEQ ID NO 52980
  misc_feature (1)..(1366): Ortholog of  Ceres SEQ ID NO 15175670 as cited in SEQ ID NO 55204
  misc_feature (1)..(1366): Ortholog of  Ceres SEQ ID NO 13595598 as cited in SEQ ID NO 56822
atattgaaaagaaccattgctctctagattaaaagcttctctctctctctctctctctcttttggactttctcaatccatatccctctctctgttttttctaatttgagcctctaaagtctcctcgttttgttcatgttgttgttcaagtgaagaagctcaattatgtttacaacattgttgtaatttcaaaacttcataagaatttctctgaaaataaagaaaaagctggagtagaactattttaaagtgtcatcatgaagagactaagcagctcagattcaatgtgtggtctaatctccacttctacagatgaacagagtccaagagggtacggaagtaattaccaatctatgcttgaaggttacgatgaagatgctacactaatcgaggaatattccggcaaccaccaccacatgggtctatcggagaagaagagaagattaaaagttgaccaagtcaaagctcttgagaagaatttcgaacttgagaataaactcgaacctgagaggaaaactaaattagcacaagagcttggacttcaacctcgtcaagtagctgtttggtttcagaaccgtcgtgcacggtggaaaacaaaacagcttgaaaaagattacggtgttcttaagggtcaatacgattctctccgccacaatttcgattctctccgccgtgacaatgattcccttctccaagagattagtaaaatcaaagctaaggtaaacggtgaagaagataacaacaacaacaaagctattacggagggtgttaaggaagaggaagttcacaagacggattcgattccttcgtctcctctgcagtttctagaacattcctctggttttaactaccggcgaagcttcactgacctccgtgaccttctaccgaattccaccgttgtcgaggctggatcttccgatagttgcgattcaagcgccgttcttaacgacgaaacaagttctgataacggaagattgacgccgcctgtgacggttactggcgggagtttcttacagtttgtgaaaacagagcaaacagaggatcacgaggattttctaagcggtgaagaagcttgtggtttcttctccgatgaacagccgccgtcacttcattggtactctgcttcagatcattggacttgagaattgtttatcaaattggtgctctgtttagtctcaatgggaaaacagagaagagggcaaaggtggaataattgataaataaggattaaggatgaaggggattattaaattaaatccgcgggagaagttaattttgggtttaagattgtaatggctcttcatgtaattaacgatgtcgagaggggctttcacagaaataggaatcaatggggacactctgatatg

SEQ ID NO: 38954 - protein, 294 aa, Arabidopsis thaliana
  peptide (1)..(294): Ceres Seq. ID no. 12325611
MKRLSSSDSMCGLISTSTDEQSPRGYGSNYQSMLEGYDEDATLIEEYSGNHHHMGLSEKKRRLKVDQVKALEKNFELENKLEPERKTKLAQELGLQPRQVAVWFQNRRARWKTKQLEKDYGVLKGQYDSLRHNFDSLRRDNDSLLQEISKIKAKVNGEEDNNNNKAITEGVKEEEVHKTDSIPSSPLQFLEHSSGFNYRRSFTDLRDLLPNSTVVEAGSSDSCDSSAVLNDETSSDNGRLTPPVTVTGGSFLQFVKTEQTEDHEDFLSGEEACGFFSDEQPPSLHWYSASDHWT

SEQ ID NO: 38955 - protein, 285 aa, Arabidopsis thaliana
  peptide (1)..(285): Ceres Seq. ID no. 12325612
MCGLISTSTDEQSPRGYGSNYQSMLEGYDEDATLIEEYSGNHHHMGLSEKKRRLKVDQVKALEKNFELENKLEPERKTKLAQELGLQPRQVAVWFQNRRARWKTKQLEKDYGVLKGQYDSLRHNFDSLRRDNDSLLQEISKIKAKVNGEEDNNNNKAITEGVKEEEVHKTDSIPSSPLQFLEHSSGFNYRRSFTDLRDLLPNSTVVEAGSSDSCDSSAVLNDETSSDNGRLTPPVTVTGGSFLQFVKTEQTEDHEDFLSGEEACGFFSDEQPPSLHWYSASDHWT

SEQ ID NO: 38956 - protein, 262 aa, Arabidopsis thaliana
  peptide (1)..(262): Ceres Seq. ID no. 12325613
MLEGYDEDATLIEEYSGNHHHMGLSEKKRRLKVDQVKALEKNFELENKLEPERKTKLAQELGLQPRQVAVWFQNRRARWKTKQLEKDYGVLKGQYDSLRHNFDSLRRDNDSLLQEISKIKAKVNGEEDNNNNKAITEGVKEEEVHKTDSIPSSPLQFLEHSSGFNYRRSFTDLRDLLPNSTVVEAGSSDSCDSSAVLNDETSSDNGRLTPPVTVTGGSFLQFVKTEQTEDHEDFLSGEEACGFFSDEQPPSLHWYSASDHWT

SEQ ID NO: 38957 - DNA, 641 bp, Arabidopsis thaliana
  misc_feature (1)..(641): Ceres Seq. ID no. 12325617
  misc_feature (1)..(641): Ortholog of  Ceres SEQ ID NO 14306303 as cited in SEQ ID NO 56884
aaatataataataagccattgaaaaaaatggcggaggagagcagagtcccatcatcggtgtcggtaacagtcgcccacgaccttcttctagccggccaccgctatctagacgtcaggactccagaagagttcagccagggacatgcctgtggggcgatcaacgtgccttacatgaatcgaggagcatcaggtatgtttttatttggttagttgataactgagtgatggatataattttgtgattgtgaaacagggatgtcaaagaaccccgacttcctggaacaagtctcctcccatttcggacaatccgataacatcattgttggctgccagagcggtggtagatctatcaaagccaccaccgatcttctccatgcaggtttcacgggagtcaaagatatcgtcggtggctatagtgcctgggccaagaatggccttcctacaaaggcttgatgactcaccattcaccaaacatctttccttatctcttcgtctccttcttcttcaataatgcatcctttccgcatgtaatcatcaataaatgaccctcctttctctttgctgtctgatgtgatagcttggagggaggggctcatcgcatctttttaaaatatataaaaatacgagtgtgtgttgattgc

SEQ ID NO: 38958 - protein, 69 aa, Arabidopsis thaliana
  peptide (1)..(69): Ceres Seq. ID no. 12325618
KYNNKPLKKMAEESRVPSSVSVTVAHDLLLAGHRYLDVRTPEEFSQGHACGAINVPYMNRGASGMFLFG

SEQ ID NO: 38959 - protein, 65 aa, Arabidopsis thaliana
  peptide (1)..(65): Ceres Seq. ID no. 12325619
MSKNPDFLEQVSSHFGQSDNIIVGCQSGGRSIKATTDLLHAGFTGVKDIVGGYSAWAKNGLPTKA

SEQ ID NO: 38960 - protein, 60 aa, Arabidopsis thaliana
  peptide (1)..(60): Ceres Seq. ID no. 12325620
MAEESRVPSSVSVTVAHDLLLAGHRYLDVRTPEEFSQGHACGAINVPYMNRGASGMFLFG

SEQ ID NO: 38961 - DNA, 1207 bp, Arabidopsis thaliana
  misc_feature (1)..(1207): Ceres Seq. ID no. 12329847
  misc_feature (1)..(1207): Ortholog of  Ceres SEQ ID NO 12609965 as cited in SEQ ID NO 55883
  misc_feature (1)..(1207): Ortholog of  Ceres SEQ ID NO 13596393 as cited in SEQ ID NO 62144
  misc_feature (1)..(1207): Ortholog of  Ceres SEQ ID NO 13591076 as cited in SEQ ID NO 63757
  misc_feature (1)..(1207): Ortholog of  Ceres SEQ ID NO 13599575 as cited in SEQ ID NO 0
cgaaaaacgattgtgtgttcttgctttgagcgaaaccctagaatcggtcttaacccatttgagcagagatgctgcgagtagcaggaaggaggcttttttctgtttcgcagagatcatcgacggcgacctccttcgtcctttcccgtgaccataccctttccgatggaggcaactcctcttccgcttctagatctgtcccctctgcagatctctcatctttcaattcttaccaccggagcgttataagaggttttgcttctcaagtcattactcagggaaatgagataggttttggttcggaagtcccagccacagtcgaagctgtcaaaacacctaactcaaagattgtctatgacgaccataaccatgagcgttacccacctggtgaccctagcaagcgggcattcgcctattttgtcttgtcgggtggaaggtttgtttatgcctctgttctccgcctgcttgttctgaagcttattgtgagcatgtctgcaagtaaagatgtccttgcccttgcatccctcgaggttgacctagggagcatagaaccaggaactaccgtgacagtcaagtggcgtggaaagcccgtcttcatcaggcgaagaacagaagatgacatcaagctggccaatagtgtggatgttggatccctgagggacccacaagaagactcggttagagtcaagaatccagaatggttgatcgtggttggagtatgcactcatttggggtgcatccccttgcctaatgctggtgattatggtggttggttttgtccgtgtcacggatcacattacgatatatctggaagaattaggaaaggtcctgcaccatacaacctggaagtaccgacctacagcttcttggaagagaataaattactcattggttaatgaataaagcacaacagtccgagtgtcatggtctggatgatcttaaatctgtttttgtttttatattttccggcattttagcgtgcaagttcgctttcctcacactttgggctcagcaaaaattggcttgttttgctgaataatacaaacttgtcattgtatgacttagtatctgtctcatctggtgaaaatacattgttcatacttcatagtctctgtttattatttgaaaagagttttgaatagtatcatccctatttttcttatgtttgtaattttgtaacatatcgtttgtaagagagtttcctttcctt

SEQ ID NO: 38962 - protein, 274 aa, Arabidopsis thaliana
  peptide (1)..(274): Ceres Seq. ID no. 12329848
MLRVAGRRLFSVSQRSSTATSFVLSRDHTLSDGGNSSSASRSVPSADLSSFNSYHRSVIRGFASQVITQGNEIGFGSEVPATVEAVKTPNSKIVYDDHNHERYPPGDPSKRAFAYFVLSGGRFVYASVLRLLVLKLIVSMSASKDVLALASLEVDLGSIEPGTTVTVKWRGKPVFIRRRTEDDIKLANSVDVGSLRDPQEDSVRVKNPEWLIVVGVCTHLGCIPLPNAGDYGGWFCPCHGSHYDISGRIRKGPAPYNLEVPTYSFLEENKLLIG

SEQ ID NO: 38963 - DNA, 1702 bp, Arabidopsis thaliana
  misc_feature (1)..(1702): Ceres Seq. ID no. 12422092
  misc_feature (1)..(1702): Ortholog of  Ceres SEQ ID NO 13594536 as cited in SEQ ID NO 51382
  misc_feature (1)..(1702): Ortholog of  Ceres SEQ ID NO 15172549 as cited in SEQ ID NO 57185
gcattgcgattaacgaaattcgaaaaatgtctcgtcttctccaaacacccttcttaccttcagtttccctccccacaaaaacacgatcttccgttacgggtttccgggtaaagcccagaatcatcccaatccaagcaaagatccgagaaatcttcatgcctgcactaagttctacaatgaccgaaggaaaaatcgtctcttgggttaaatcagaaggcgataaactcaacaaaggagagagtgttgttgttgttgaatccgataaagctgatatggatgttgagactttctatgatggttatctagctgcaatcatggttgaagaaggtggtgttgctcctgttggttctgctattgctttgttagctgaaactgaagatgagattgctgatgctaaggctaaagcttctggtggtggaggtgattctaaggctcctcctccggcttctcctcctacggctacagttgtagcacctgtggctgttgagaagaagattgcagctcctcctgtggcgattaaggcggtggcggcttctgcggtgcatccggcgtctgaaggagggaagaggattgtggcgtctccttatgctaagaagttagctaaggaattgaatgtggaattggctggtttagttggaagtggaccaatgggaaggattgtggctaaagatgttgaggcggttgcagctggaggaggagttcaagctgctgtagctgttaaggaggtagtggcagttcctggtgtggagttgggatcagtggttccgtttacgacaatgcagggggctgtgagtaggaatatggtggagagtcttgctgttcctacttttagagtcggttacacgattagtacggatgctcttgatgctctctacaagaagattaagtcgaaaggtgtgacaatgacggcactcctagcaaaggcaactgcacttgcactggcgaaacatccagttgtaaactcgtcctgtagagatggtaacagttttgtgtataacagtagcatcaacgttgctgttgctgttgctattgatggtggtctgataactcctgtgcttcagaacgctgataaggttgacatttattcgttatctagaaaatggaaagaattggttgataaggctcgagccaagcagctgcagcctcaggagtacaacactggtaccttcactctctctaacctaggaatgtttggcgttgatcggtttgatgctattctaccccctggaacaggagcgattatggctgtaggagcatctcaaccttcagtggttgcaactaaagacggccgcattggcatgaaaaaccagatgcaggtgaatgtgacggcagatcatcgtgtcatctatggtgctgatcttgcacagttcttgcaaacattggcaagcattatagaggacccaaaggaccttacattctaggccaaattactacttttcgcagcccagtcttctctgttcttgattccatgggagcttgtatttctgcggtaatcagtttctttgatagaatcgaacttttaagagtaatgttgaacataatcatttctttgtttgagatatatcttctgcaacattttctgcatggaaaggccgtcccacatgattttgctactgacttcatatatttccacttcatgtgatgaatcttatatgaactgataactttagcatgattaataacatgaatcttatatggactg

SEQ ID NO: 38964 - protein, 472 aa, Arabidopsis thaliana
  peptide (1)..(472): Ceres Seq. ID no. 12422093
IAINEIRKMSRLLQTPFLPSVSLPTKTRSSVTGFRVKPRIIPIQAKIREIFMPALSSTMTEGKIVSWVKSEGDKLNKGESVVVVESDKADMDVETFYDGYLAAIMVEEGGVAPVGSAIALLAETEDEIADAKAKASGGGGDSKAPPPASPPTATVVAPVAVEKKIAAPPVAIKAVAASAVHPASEGGKRIVASPYAKKLAKELNVELAGLVGSGPMGRIVAKDVEAVAAGGGVQAAVAVKEVVAVPGVELGSVVPFTTMQGAVSRNMVESLAVPTFRVGYTISTDALDALYKKIKSKGVTMTALLAKATALALAKHPVVNSSCRDGNSFVYNSSINVAVAVAIDGGLITPVLQNADKVDIYSLSRKWKELVDKARAKQLQPQEYNTGTFTLSNLGMFGVDRFDAILPPGTGAIMAVGASQPSVVATKDGRIGMKNQMQVNVTADHRVIYGADLAQFLQTLASIIEDPKDLTF

SEQ ID NO: 38965 - protein, 464 aa, Arabidopsis thaliana
  peptide (1)..(464): Ceres Seq. ID no. 12422094
MSRLLQTPFLPSVSLPTKTRSSVTGFRVKPRIIPIQAKIREIFMPALSSTMTEGKIVSWVKSEGDKLNKGESVVVVESDKADMDVETFYDGYLAAIMVEEGGVAPVGSAIALLAETEDEIADAKAKASGGGGDSKAPPPASPPTATVVAPVAVEKKIAAPPVAIKAVAASAVHPASEGGKRIVASPYAKKLAKELNVELAGLVGSGPMGRIVAKDVEAVAAGGGVQAAVAVKEVVAVPGVELGSVVPFTTMQGAVSRNMVESLAVPTFRVGYTISTDALDALYKKIKSKGVTMTALLAKATALALAKHPVVNSSCRDGNSFVYNSSINVAVAVAIDGGLITPVLQNADKVDIYSLSRKWKELVDKARAKQLQPQEYNTGTFTLSNLGMFGVDRFDAILPPGTGAIMAVGASQPSVVATKDGRIGMKNQMQVNVTADHRVIYGADLAQFLQTLASIIEDPKDLTF

SEQ ID NO: 38966 - protein, 421 aa, Arabidopsis thaliana
  peptide (1)..(421): Ceres Seq. ID no. 12422095
MPALSSTMTEGKIVSWVKSEGDKLNKGESVVVVESDKADMDVETFYDGYLAAIMVEEGGVAPVGSAIALLAETEDEIADAKAKASGGGGDSKAPPPASPPTATVVAPVAVEKKIAAPPVAIKAVAASAVHPASEGGKRIVASPYAKKLAKELNVELAGLVGSGPMGRIVAKDVEAVAAGGGVQAAVAVKEVVAVPGVELGSVVPFTTMQGAVSRNMVESLAVPTFRVGYTISTDALDALYKKIKSKGVTMTALLAKATALALAKHPVVNSSCRDGNSFVYNSSINVAVAVAIDGGLITPVLQNADKVDIYSLSRKWKELVDKARAKQLQPQEYNTGTFTLSNLGMFGVDRFDAILPPGTGAIMAVGASQPSVVATKDGRIGMKNQMQVNVTADHRVIYGADLAQFLQTLASIIEDPKDLTF

SEQ ID NO: 38967 - DNA, 1025 bp, Arabidopsis thaliana
  misc_feature (1)..(1025): Ceres Seq. ID no. 12325137
  misc_feature (1)..(1025): Ortholog of  Ceres SEQ ID NO 13660094 as cited in SEQ ID NO 60820
  misc_feature (1)..(1025): Ortholog of  Ceres SEQ ID NO 13656436 as cited in SEQ ID NO 69154
aaaaataatagtcacaaaagaaattagaagacagatcaggaacagctagaagactcttcagggcacagagaaaacacccaccacaccgtcttcttcaacaaaatttaccaccagagatcgcagatatttcttcattctatctctctcttttagatccgattcgatgccgtcccgtagacgtaccctcctcaaggtcatcatcctcggtgatagcggggtgggaaaaacctctttgatgaatcagtatgttaataaaaagttcagcaaccagtacaaggcaaccattggagccgacttcttgaccaaggaagtacagtttgaagatcgacttttcactttacagatctgggatacagctggacaggaaaggtttcagagccttggtgtagccttttaccgtggtgctgattgctgtgttcttgtatatgatgtcaattccatgaaatcatttgaaaatctgaacaactggagggaagaatttctgatccaggcgagtccatcagatccagagaattttccatttgttcttatcggaaacaaggttgacgtggatgatggaaacagcagagtggtttcagagaaaaaggctaaagcttggtgtgcttcaaaggggaacattccttactttgagacctctgccaaggtaggtactaatgtggaggaagctttccaatgcattgccaaggacgcattgaagagcggagaagaagaagaactatacttgccagacacaatcgatgtagggacgagcaatcaacagaggtctacagggtgtgaatgctaaggagtatcaccagaaggaaacgaggcctctcctcccattatctcttttcgcaagttatgtctacattattactatgttgtaaattttttcttttgtgtggaaaagggatgagaacaaaaaaagaaggaaccctaaaaaaaaaagagatttgtttagtgttatttgtggggattttcatttatcatgctagctaaataaatactcactttcatcttaattttaagtgatgtttcttgtttgc

SEQ ID NO: 38968 - protein, 206 aa, Arabidopsis thaliana
  peptide (1)..(206): Ceres Seq. ID no. 12325138
MPSRRRTLLKVIILGDSGVGKTSLMNQYVNKKFSNQYKATIGADFLTKEVQFEDRLFTLQIWDTAGQERFQSLGVAFYRGADCCVLVYDVNSMKSFENLNNWREEFLIQASPSDPENFPFVLIGNKVDVDDGNSRVVSEKKAKAWCASKGNIPYFETSAKVGTNVEEAFQCIAKDALKSGEEEELYLPDTIDVGTSNQQRSTGCEC

SEQ ID NO: 38969 - protein, 182 aa, Arabidopsis thaliana
  peptide (1)..(182): Ceres Seq. ID no. 12325139
MNQYVNKKFSNQYKATIGADFLTKEVQFEDRLFTLQIWDTAGQERFQSLGVAFYRGADCCVLVYDVNSMKSFENLNNWREEFLIQASPSDPENFPFVLIGNKVDVDDGNSRVVSEKKAKAWCASKGNIPYFETSAKVGTNVEEAFQCIAKDALKSGEEEELYLPDTIDVGTSNQQRSTGCEC

SEQ ID NO: 38970 - protein, 114 aa, Arabidopsis thaliana
  peptide (1)..(114): Ceres Seq. ID no. 12325140
MKSFENLNNWREEFLIQASPSDPENFPFVLIGNKVDVDDGNSRVVSEKKAKAWCASKGNIPYFETSAKVGTNVEEAFQCIAKDALKSGEEEELYLPDTIDVGTSNQQRSTGCEC

SEQ ID NO: 38971 - DNA, 336 bp, Arabidopsis thaliana
  misc_feature (1)..(336): Ceres Seq. ID no. 13487990
  misc_feature (1)..(336): Ortholog of  Ceres SEQ ID NO 14309353 as cited in SEQ ID NO 0
aaagattcttattacagcgacacacaactcttttccatttagatttttgattttttttggttctctaaaggaggagagaaatgttggctatcttccacgaggcgtttgctcatccgccggaggaactcaacagtccggcatctgagaaatgctctaaacaaccaaaacttccagaagaaaccctaaatgatttcttattacgttaccctctcaacactttctccatgtctttcggacaagctgctgttcttgcttacgttcgtccctctgcttccttctccatccaccagaggttgttttgtggaagatagccaacatttctctcctcctttagag

SEQ ID NO: 38972 - protein, 76 aa, Arabidopsis thaliana
  peptide (1)..(76): Ceres Seq. ID no. 13487991
MLAIFHEAFAHPPEELNSPASEKCSKQPKLPEETLNDFLLRYPLNTFSMSFGQAAVLAYVRPSASFSIHQRLFCGR

SEQ ID NO: 38973 - protein, 50 aa, Arabidopsis thaliana
  peptide (1)..(50): Ceres Seq. ID no. 13487992
MISYYVTLSTLSPCLSDKLLFLLTFVPLLPSPSTRGCFVEDSQHFSPPLE

SEQ ID NO: 38974 - protein, 47 aa, Arabidopsis thaliana
  peptide (1)..(47): Ceres Seq. ID no. 13487993
KILITATHNSFPFRFLIFFGSLKEERNVGYLPRGVCSSAGGTQQSGI

SEQ ID NO: 38975 - DNA, 2001 bp, Arabidopsis thaliana
  misc_feature (1)..(2001): Ceres Seq. ID no. 13591393
  misc_feature (1)..(2001): Ortholog of  Ceres SEQ ID NO 14308723 as cited in SEQ ID NO 58758
atgtcttccatcaatttatcctcatcatctccttccaccatctctctttcccgctcaagactaagccaaagctctactacattactccatggactacatcgtgttactttaccatctaaccatccattgtcaaccttttccattaaaaccaatactggaaaagttaaggctgcagtgatctctagagaagatgatctgctctcattcaccaacggaaacactcctctctcaaatgggtctctcattgatgatcggaccgaagagccattagaggctgattcggtttcacttggaacacttgctgctgattctgctcctgcaccagccaatggttttgttgctgaagatgatgactttgagttggatttaccaactcctggtttctcttctatccctgaggccattgaagatatacgccaaggaaagcttgtggtggttgtggatgatgaagatagggaaaatgaaggggatttggtgatggctgctcagttagcaacacctgaagctatggcttttattgtgagacatggaactgggatagtttgtgtgagcatgaaagaagatgatctcgagaggttgcaccttcctctaatggtgaatcagaaggaaaacgaagaaaagctctctactgcatttacagtgactgtggatgcaaaacatggtacaacaacgggagtatcagctcgtgacagggcaacaaccatattgtctcttgcatcaagagattcaaagcctgaggatttcaatcgtccaggtcatatcttcccactgaagtatcgggaaggtggggttctgaaaagggctggacacactgaagcatctgttgatctcactgttttagctggactggatcctgttggagtactttgtgaaattgttgatgatgatggttccatggctagattaccaaaacttcgtgaatttgccgccgagaacaacctgaaagttgtttccatcgcagatttgatcaggtatagaagaaagagagataaattagtggaacgtgcttctgcggctcggatcccaacaatgtggggacctttcactgcttactgctataggtccatattagacggaatagagcacatagcaatggttaagggtgagattggtgacggtcaagacattctcgtgagggttcattctgaatgtctaacaggggacatatttgggtctgcaaggtgtgattgcgggaaccagctagcactctcgatgcagcagatcgaggctactggtcgcggtgtgctggtttacctacgtggacatgaaggaagagggatcggtttaggacacaagcttcgagcttacaatctgcaagatgctggtcgagacacggttgaagctaatgaggaattaggacttcctgttgattctagagagtatggaattggtgcacagataataagggatttaggtgttaggacaatgaagctgatgacaaataatcccgcaaagtatgttggtttgaagggatatggattagccattgttgggagagtccctctattgagtcttatcacgaaggagaataagagatatctggagacaaagcggaccaagatgggtcacatgtatggcttgaagttcaaaggggatgttgtggagaagattgagtctgaatctgagtcctaagcttaaaaaccaggacgaaccgaatggaatcaagaactatagatataatacttcacaaaaaacaaggaaagaaattgacacagaagaagaggaaaaagacatttgatctgtctgagaaacttgattagattggtttatgttctaatctaatctgatttgatttttttttattttgtctacgattcttgagttacgaaatgttcatcatttgttacttcttgttgtcgggattgagtagttgcatttttttagttgtggagctgtgacaaagaggccagctagtgtgtggaatgtggatcatcatcctttggttgattccttgtagaatcctttttgtaaacatttaaactataataaagtgttatgatt

SEQ ID NO: 38976 - protein, 543 aa, Arabidopsis thaliana
  peptide (1)..(543): Ceres Seq. ID no. 13591394
MSSINLSSSSPSTISLSRSRLSQSSTTLLHGLHRVTLPSNHPLSTFSIKTNTGKVKAAVISREDDLLSFTNGNTPLSNGSLIDDRTEEPLEADSVSLGTLAADSAPAPANGFVAEDDDFELDLPTPGFSSIPEAIEDIRQGKLVVVVDDEDRENEGDLVMAAQLATPEAMAFIVRHGTGIVCVSMKEDDLERLHLPLMVNQKENEEKLSTAFTVTVDAKHGTTTGVSARDRATTILSLASRDSKPEDFNRPGHIFPLKYREGGVLKRAGHTEASVDLTVLAGLDPVGVLCEIVDDDGSMARLPKLREFAAENNLKVVSIADLIRYRRKRDKLVERASAARIPTMWGPFTAYCYRSILDGIEHIAMVKGEIGDGQDILVRVHSECLTGDIFGSARCDCGNQLALSMQQIEATGRGVLVYLRGHEGRGIGLGHKLRAYNLQDAGRDTVEANEELGLPVDSREYGIGAQIIRDLGVRTMKLMTNNPAKYVGLKGYGLAIVGRVPLLSLITKENKRYLETKRTKMGHMYGLKFKGDVVEKIESESES

SEQ ID NO: 38977 - protein, 384 aa, Arabidopsis thaliana
  peptide (1)..(384): Ceres Seq. ID no. 13591395
MAAQLATPEAMAFIVRHGTGIVCVSMKEDDLERLHLPLMVNQKENEEKLSTAFTVTVDAKHGTTTGVSARDRATTILSLASRDSKPEDFNRPGHIFPLKYREGGVLKRAGHTEASVDLTVLAGLDPVGVLCEIVDDDGSMARLPKLREFAAENNLKVVSIADLIRYRRKRDKLVERASAARIPTMWGPFTAYCYRSILDGIEHIAMVKGEIGDGQDILVRVHSECLTGDIFGSARCDCGNQLALSMQQIEATGRGVLVYLRGHEGRGIGLGHKLRAYNLQDAGRDTVEANEELGLPVDSREYGIGAQIIRDLGVRTMKLMTNNPAKYVGLKGYGLAIVGRVPLLSLITKENKRYLETKRTKMGHMYGLKFKGDVVEKIESESES

SEQ ID NO: 38978 - protein, 374 aa, Arabidopsis thaliana
  peptide (1)..(374): Ceres Seq. ID no. 13591396
MAFIVRHGTGIVCVSMKEDDLERLHLPLMVNQKENEEKLSTAFTVTVDAKHGTTTGVSARDRATTILSLASRDSKPEDFNRPGHIFPLKYREGGVLKRAGHTEASVDLTVLAGLDPVGVLCEIVDDDGSMARLPKLREFAAENNLKVVSIADLIRYRRKRDKLVERASAARIPTMWGPFTAYCYRSILDGIEHIAMVKGEIGDGQDILVRVHSECLTGDIFGSARCDCGNQLALSMQQIEATGRGVLVYLRGHEGRGIGLGHKLRAYNLQDAGRDTVEANEELGLPVDSREYGIGAQIIRDLGVRTMKLMTNNPAKYVGLKGYGLAIVGRVPLLSLITKENKRYLETKRTKMGHMYGLKFKGDVVEKIESESES

SEQ ID NO: 38979 - DNA, 1527 bp, Arabidopsis thaliana
  misc_feature (1)..(1527): Ceres Seq. ID no. 12482552
  misc_feature (1)..(1527): Ortholog of  Ceres SEQ ID NO 13597407 as cited in SEQ ID NO 64106
  misc_feature (1)..(1527): Ortholog of  Ceres SEQ ID NO 14303309 as cited in SEQ ID NO 67739
atggttcatgctgatggtcataattttcccggttcggatccaaaccctcatatgaacaagttcgctttcgggtgtgccattgttgcttccatcatttctatcatctttggatatgatacgggagttatgagcggagctcagatatttataagagatgatctaaaaataaacgacactcagattgaagttttggccggaatcttgaatctttgtgcactcgtcggatcactaacggcggggaaaacgtctgacgtcatcggccgacgttacaccatagctctctccgccgtgatattcttagtgggctcagttcttatgggttacggcccaaactatcctgttttgatggtcggacgatgtattgccggagttggtgtagggtttgctctcatgatagctccggtttactctgccgagatatcctctgcgtcacatagaggctttctcacttctctacctgagctttgtattagtcttgggattttactaggctatgtctcgaattactgttttgggaaactgacgttgaaacttggatggagattgatgcttggaatcgcagcgttcccgtctttgatattggcttttgggattacaagaatgcccgagtcgccgaggtggcttgtgatgcaaggtaggttagaagaagccaagaaaataatggttttggtatccaatacggaagaagaagctgaagaacggttcagagacatcttaaccgctgcggaagtagatgtgacagagataaaagaagttggtggcggcgttaagaagaagaatcacggtaaaagtgtttggagggagttggtgataaaaccgcgacctgcggtgcgtttgatcttgatagcggccgttgggatacactttttcgagcatgcgacggggattgaggccgtcgtgttgtacagcccgagaattttcaagaaagccggagttgtttcgaaagacaagctcttactagccacggtcggtgtaggtttaactaaggcctttttcataataatagccactttcttgctcgacaaggtaggtcgtagaaagctcctgttgaccagtacgggtgggatggtcttcgcattgaccagtttagcggttagtctcacgatggttcagcgatttgggcggttagcgtgggcattgagtttaagcatcgtctctacgtatgcatttgtagcttttttctccatagggcttggacctatcacatgggtgtacagctccgagatattcccgttgagacttagggctcagggagcgagtataggtgttgcggttaataggatcatgaacgcgacggtctcaatgagttttctgtcgatgacgaaggcgatcacgacagggggcgtgttcttcgtattcgccggaatagcggtggcggcatggtggttcttcttctttatgttgccggagacgaaaggattgccattggaggagatggagaagctttttggtggtgggggtcctcgtggtgatcgtgacggacttgagattcaaactaaaaccatctctattgggggtttctcataa

SEQ ID NO: 38980 - protein, 508 aa, Arabidopsis thaliana
  peptide (1)..(508): Ceres Seq. ID no. 12482553
MVHADGHNFPGSDPNPHMNKFAFGCAIVASIISIIFGYDTGVMSGAQIFIRDDLKINDTQIEVLAGILNLCALVGSLTAGKTSDVIGRRYTIALSAVIFLVGSVLMGYGPNYPVLMVGRCIAGVGVGFALMIAPVYSAEISSASHRGFLTSLPELCISLGILLGYVSNYCFGKLTLKLGWRLMLGIAAFPSLILAFGITRMPESPRWLVMQGRLEEAKKIMVLVSNTEEEAEERFRDILTAAEVDVTEIKEVGGGVKKKNHGKSVWRELVIKPRPAVRLILIAAVGIHFFEHATGIEAVVLYSPRIFKKAGVVSKDKLLLATVGVGLTKAFFIIIATFLLDKVGRRKLLLTSTGGMVFALTSLAVSLTMVQRFGRLAWALSLSIVSTYAFVAFFSIGLGPITWVYSSEIFPLRLRAQGASIGVAVNRIMNATVSMSFLSMTKAITTGGVFFVFAGIAVAAWWFFFFMLPETKGLPLEEMEKLFGGGGPRGDRDGLEIQTKTISIGGFS

SEQ ID NO: 38981 - protein, 491 aa, Arabidopsis thaliana
  peptide (1)..(491): Ceres Seq. ID no. 12482554
MNKFAFGCAIVASIISIIFGYDTGVMSGAQIFIRDDLKINDTQIEVLAGILNLCALVGSLTAGKTSDVIGRRYTIALSAVIFLVGSVLMGYGPNYPVLMVGRCIAGVGVGFALMIAPVYSAEISSASHRGFLTSLPELCISLGILLGYVSNYCFGKLTLKLGWRLMLGIAAFPSLILAFGITRMPESPRWLVMQGRLEEAKKIMVLVSNTEEEAEERFRDILTAAEVDVTEIKEVGGGVKKKNHGKSVWRELVIKPRPAVRLILIAAVGIHFFEHATGIEAVVLYSPRIFKKAGVVSKDKLLLATVGVGLTKAFFIIIATFLLDKVGRRKLLLTSTGGMVFALTSLAVSLTMVQRFGRLAWALSLSIVSTYAFVAFFSIGLGPITWVYSSEIFPLRLRAQGASIGVAVNRIMNATVSMSFLSMTKAITTGGVFFVFAGIAVAAWWFFFFMLPETKGLPLEEMEKLFGGGGPRGDRDGLEIQTKTISIGGFS

SEQ ID NO: 38982 - protein, 466 aa, Arabidopsis thaliana
  peptide (1)..(466): Ceres Seq. ID no. 12482555
MSGAQIFIRDDLKINDTQIEVLAGILNLCALVGSLTAGKTSDVIGRRYTIALSAVIFLVGSVLMGYGPNYPVLMVGRCIAGVGVGFALMIAPVYSAEISSASHRGFLTSLPELCISLGILLGYVSNYCFGKLTLKLGWRLMLGIAAFPSLILAFGITRMPESPRWLVMQGRLEEAKKIMVLVSNTEEEAEERFRDILTAAEVDVTEIKEVGGGVKKKNHGKSVWRELVIKPRPAVRLILIAAVGIHFFEHATGIEAVVLYSPRIFKKAGVVSKDKLLLATVGVGLTKAFFIIIATFLLDKVGRRKLLLTSTGGMVFALTSLAVSLTMVQRFGRLAWALSLSIVSTYAFVAFFSIGLGPITWVYSSEIFPLRLRAQGASIGVAVNRIMNATVSMSFLSMTKAITTGGVFFVFAGIAVAAWWFFFFMLPETKGLPLEEMEKLFGGGGPRGDRDGLEIQTKTISIGGFS

SEQ ID NO: 38983 - DNA, 1337 bp, Arabidopsis thaliana; identical to SEQ ID NO: 35207
  misc_feature (1)..(1337): Ceres Seq. ID no. 12562139
  misc_feature (1)..(1337): Ortholog of  Ceres SEQ ID NO 14310547 as cited in SEQ ID NO 55132
  misc_feature (1)..(1337): Ortholog of  Ceres SEQ ID NO 13596261 as cited in SEQ ID NO 67817
  misc_feature (1)..(1337): Ortholog of  Ceres SEQ ID NO 13662360 as cited in SEQ ID NO 68830

SEQ ID NO: 38984 - protein, 314 aa, Arabidopsis thaliana; identical to SEQ ID NO: 35208
  peptide (1)..(314): Ceres Seq. ID no. 12562140
  misc_feature (37)..(37): Xaa is any aa, unknown or other

SEQ ID NO: 38985 - protein, 242 aa, Arabidopsis thaliana; identical to SEQ ID NO: 35209
  peptide (1)..(242): Ceres Seq. ID no. 12562141

SEQ ID NO: 38986 - protein, 233 aa, Arabidopsis thaliana; identical to SEQ ID NO: 35210
  peptide (1)..(233): Ceres Seq. ID no. 12562142

SEQ ID NO: 38987 - DNA, 1074 bp, Arabidopsis thaliana
  misc_feature (1)..(1074): Ceres Seq. ID no. 12343425
  misc_feature (1)..(1074): Ortholog of  Ceres SEQ ID NO 13639109 as cited in SEQ ID NO 51131
  misc_feature (1)..(1074): Ortholog of  Ceres SEQ ID NO 13596346 as cited in SEQ ID NO 60879
  misc_feature (1)..(1074): Ortholog of  Ceres SEQ ID NO 15178104 as cited in SEQ ID NO 0
taatcgaaaaaattctcacacattcttctgcttcgttaattttctactcgatttcgctcttcagaaatttgacaatgaagcttgacactagtggattggagacaactatgcctgtgattggctttggatcaaacagtgagatgcttgatgggttttcgtctgcaccttcgtttgatcttcctcgtaccactgattttgatgggtttcagaaaaaagctgtggagatggtgaagcctgcaaagggtacaactacacttgcgtttatctttaaggaaggtgttatggtagctgctgattctcgagctagcatgggaggatatatctcgtcgcaatctgtgaagaagattattgaaattaatccttatatgcttggtacaatggctggtggtgctgctgattgtcaattctggcacagaaatctgggaattaagtgccgtctacatgagctggcaaacaaaaggagaatctctgtttcaggagcttcaaagcttcttgctaacatgctctattcatatcgtggaatgggactttctgttggcacaatgattgctggatgggatgaaacaggccctggattgtactatgttgacaacgaaggaggacggcttaagggagacagattctctgtcggttcaggttcaccatacgcttatggtgttctggacagcggatacaaattcgatatgtcggttgaagaagcctcagagttagcaaggagatccatctaccatgctacattccgtgatggagctagtggtggagttgctagcgtgtaccacgttgggccgcaaggatggacgaaactctctggagacgacgttggcgagctacattaccattattaccccgtggctccaatcaccgcggaacatgtgatggaagaggctgccgaataagtactgtgattcttgtctatcttactaagagttttattacatcacttatgttttgttcatcaatgaacagaatcatagattcaagtttcttttgtattgcgaatgatgtagacgttagtttggccacaatgatcacgttgcataatagataacataatagataacctgtttctttctt

SEQ ID NO: 38988 - protein, 297 aa, Arabidopsis thaliana
  peptide (1)..(297): Ceres Seq. ID no. 12343426
IEKILTHSSASLIFYSISLFRNLTMKLDTSGLETTMPVIGFGSNSEMLDGFSSAPSFDLPRTTDFDGFQKKAVEMVKPAKGTTTLAFIFKEGVMVAADSRASMGGYISSQSVKKIIEINPYMLGTMAGGAADCQFWHRNLGIKCRLHELANKRRISVSGASKLLANMLYSYRGMGLSVGTMIAGWDETGPGLYYVDNEGGRLKGDRFSVGSGSPYAYGVLDSGYKFDMSVEEASELARRSIYHATFRDGASGGVASVYHVGPQGWTKLSGDDVGELHYHYYPVAPITAEHVMEEAAE

SEQ ID NO: 38989 - protein, 273 aa, Arabidopsis thaliana; identical to SEQ ID NO: 30157
  peptide (1)..(273): Ceres Seq. ID no. 12343427

SEQ ID NO: 38990 - protein, 262 aa, Arabidopsis thaliana; identical to SEQ ID NO: 30158
  peptide (1)..(262): Ceres Seq. ID no. 12343428

SEQ ID NO: 38991 - DNA, 1134 bp, Arabidopsis thaliana
  misc_feature (1)..(1134): Ceres Seq. ID no. 12579539
  misc_feature (1)..(1134): Ortholog of  Ceres SEQ ID NO 15171329 as cited in SEQ ID NO 51748
acgaataccattaccttagaacattcttaatcgaaaaaacgagggcgagagatatcttcttatccatggcggctattgctagtctgcaagcagttaatctcacatttaggcgacgtagcactcgatgtggaattgctgagccgagcggagagccagctccgatggggctgaagactagatacgaggatgggctggtggagagagtgttcatgggtctcttcgcgaggaagatggacaagttcgggtcgaagaagaagaaggacacgaaggagaagggtttttgggagtacgattacgagagcttcgtggaggtgtcaaagagagtgatgcagggacggtccagagtgcagcagcaagaggccgtgagggaggttcttctctctatgctgcctcctggtgctcctgaacagtttaggaaattgttcccaccaacgaaatgggctgcagagttcaatgccgctcttacagtgcctttctttcactggttggttggtccatctcaggtcatagaagtggaagtgaatggtgtgaaacagaagtggagttcttatcaagaaatgcaggtatctggagaacagtgggtgtgtaggaatgtgtgtgaatatgtgcaagattccaacccaagatttcttcaccaatgagtttggcctcccactcaccatgaacccaaattatgaagacatgagctgcgagatgatatacgggcaagcacctccggcctttgaggaggatgtagccaccaagcaaccttgtctagcagatatatgttctatgtcgaatccaagctccccaatctgccctaaactagaggcatgagtggagtggatcagcagccacttctttgacgggatgtgcaatttccaagcgatatacatactttttttcttttccaaacacatacattacatataaaagacagttgtgaagacgagttagtgttctttgttactattctggttgggttgtgtaaagtatacgataatacacttgagcttactcatcttctttatgttttaagtttgaactcgccatgttggttataacttggatctcaagtgttacttgcagtttgtattgtaatataaaaccaaaaactgagattagcttagctttaaagtaaccctctctgcttat

SEQ ID NO: 38992 - protein, 212 aa, Arabidopsis thaliana
  peptide (1)..(212): Ceres Seq. ID no. 12579540
EYHYLRTFLIEKTRARDIFLSMAAIASLQAVNLTFRRRSTRCGIAEPSGEPAPMGLKTRYEDGLVERVFMGLFARKMDKFGSKKKKDTKEKGFWEYDYESFVEVSKRVMQGRSRVQQQEAVREVLLSMLPPGAPEQFRKLFPPTKWAAEFNAALTVPFFHWLVGPSQVIEVEVNGVKQKWSSYQEMQVSGEQWVCRNVCEYVQDSNPRFLHQ

SEQ ID NO: 38993 - protein, 191 aa, Arabidopsis thaliana
  peptide (1)..(191): Ceres Seq. ID no. 12579541
MAAIASLQAVNLTFRRRSTRCGIAEPSGEPAPMGLKTRYEDGLVERVFMGLFARKMDKFGSKKKKDTKEKGFWEYDYESFVEVSKRVMQGRSRVQQQEAVREVLLSMLPPGAPEQFRKLFPPTKWAAEFNAALTVPFFHWLVGPSQVIEVEVNGVKQKWSSYQEMQVSGEQWVCRNVCEYVQDSNPRFLHQ

SEQ ID NO: 38994 - protein, 159 aa, Arabidopsis thaliana
  peptide (1)..(159): Ceres Seq. ID no. 12579542
MGLKTRYEDGLVERVFMGLFARKMDKFGSKKKKDTKEKGFWEYDYESFVEVSKRVMQGRSRVQQQEAVREVLLSMLPPGAPEQFRKLFPPTKWAAEFNAALTVPFFHWLVGPSQVIEVEVNGVKQKWSSYQEMQVSGEQWVCRNVCEYVQDSNPRFLHQ

SEQ ID NO: 38995 - DNA, 1488 bp, Arabidopsis thaliana
  misc_feature (1)..(1488): Ceres Seq. ID no. 13509260
  misc_feature (1)..(1488): Ortholog of  Ceres SEQ ID NO 15179641 as cited in SEQ ID NO 56414
  misc_feature (1)..(1488): Ortholog of  Ceres SEQ ID NO 14316049 as cited in SEQ ID NO 67036
  misc_feature (1)..(1488): Ortholog of  Ceres SEQ ID NO 14313252 as cited in SEQ ID NO 67134
  misc_feature (1)..(1488): Ortholog of  Ceres SEQ ID NO 14302220 as cited in SEQ ID NO 69121
aagaaaccctagaaaattccgattcatcaactgagagagaagaagaattgagaaatgatgaagcgtctgatcccaacgttcaaccgcatcttggtgcagagagtcatccagcccgctaaaaccgaaagcggcattctcctacctgagaaatcctccaagctgcggttgaacgttgggatcagacgcttcatcattttcacattctcttctctctcgatatcatctaaatctctctcgatctcaatttcgcaaaatggctgacaagaagatcagaatcggaatcaacggtttcggaagaatcggtcgtttggttgctagagttgttcttcagagggatgatgttgagctcgtcgctgttaacgatcctttcatcaccaccgagtacatgacatacatgtttaagtatgacagtgttcacggtcagtggaagcaccatgagcttaaggtgaaggatgacaaaactcttctcttcggtgagaagccagtcactgttttcggcatcaggaaccctgaggacatcccatggggtgaggctggagctgactttgttgttgagtctactggtgtcttcactgacaaagacaaggctgctgctcacttgaagggtggtgctaaaaaggttgtcatctctgccccaagcaaagatgcgcccatgttcgttgttggtgtcaacgagcacgagtacaagtctgaccttgacattgtttccaacgctagttgcaccactaactgccttgctcctcttgccaaggttattaatgacaggtttggcattgttgagggactcatgaccactgtccactctatcactgctactcagaagacagttgatggtccatcaatgaaggactggagaggtggaagagctgcttccttcaacattattcctagcagcactggtgccgccaaggctgttgggaaagtgttgccatccctcaatggaaaattgaccggaatgtctttccgtgttccaaccgttgatgtctcagttgttgatctcaccgttagacttgagaaagctgcaacatacgacgaaatcaagaaggccatcaaggaggaatctgaaggcaaaatgaagggaattttgggatacactgaggatgatgttgtgtctaccgactttgttggtgacaacaggtcaagcattttcgatgccaaggctgggattgcattgagcgacaagtttgtgaagttggtgtcatggtacgacaacgaatggggttacagttctcgtgtcgttgaccttatcgttcacatgtcaaaggcctaagcttacaccggcgagagtttgtgtgtggttgagttcgtactgttctgaataaaaaaaaggagaaaagaaaactcgagttgttatgttttttcactgattccatgcgcagtcatgagagtttgtagcttttgtctttttgctttctcttaatgtttccctgctttatttactgaaaccattggtttggttttttatgttaattaagtttttagttcatt

SEQ ID NO: 38996 - protein, 338 aa, Arabidopsis thaliana; identical to SEQ ID NO: 22717
  peptide (1)..(338): Ceres Seq. ID no. 13509261

SEQ ID NO: 38997 - protein, 294 aa, Arabidopsis thaliana; identical to SEQ ID NO: 22718
  peptide (1)..(294): Ceres Seq. ID no. 13509262

SEQ ID NO: 38998 - protein, 291 aa, Arabidopsis thaliana; identical to SEQ ID NO: 22719
  peptide (1)..(291): Ceres Seq. ID no. 13509263

SEQ ID NO: 38999 - DNA, 1649 bp, Arabidopsis thaliana; identical to SEQ ID NO: 28343
  misc_feature (1)..(1649): Ceres Seq. ID no. 13645741
  misc_feature (1)..(1649): Ortholog of  Ceres SEQ ID NO 14301413 as cited in SEQ ID NO 53524

SEQ ID NO: 39000 - protein, 444 aa, Arabidopsis thaliana; identical to SEQ ID NO: 28344
  peptide (1)..(444): Ceres Seq. ID no. 13645742

SEQ ID NO: 39001 - protein, 400 aa, Arabidopsis thaliana; identical to SEQ ID NO: 28345
  peptide (1)..(400): Ceres Seq. ID no. 13645743

SEQ ID NO: 39002 - protein, 395 aa, Arabidopsis thaliana; identical to SEQ ID NO: 28346
  peptide (1)..(395): Ceres Seq. ID no. 13645744

SEQ ID NO: 39003 - DNA, 1578 bp, Arabidopsis thaliana
  misc_feature (1)..(1578): Ceres Seq. ID no. 12329047
  misc_feature (1)..(1578): Ortholog of  Ceres SEQ ID NO 13594209 as cited in SEQ ID NO 59089
  misc_feature (1)..(1578): Ortholog of  Ceres SEQ ID NO 13502874 as cited in SEQ ID NO 66298
  misc_feature (1)..(1578): Ortholog of  Ceres SEQ ID NO 12614124 as cited in SEQ ID NO 68392
aatcaccaaagaaagaagtacaaaatgtttaactatgtgattattcttcctttagctctcttcctcttggcttacaaattcttctttacatctaaaaagcagcgttactatctccctccctctccatcttactctctcccaatcctcggccaccacctcctcatcaaaccgccggttcaccgtctcttccaccgcctttccaatatccatggcccaatcttctacctccgacttggttcccgccgtgccgtcgtcatatcttcctcctcgctggcaagagaatgcttcacaggtcaaaacgatgtcattgtatcaaaccgccctcgttttctaacctccaaatacattgcttacaactacacaaccatcgcaacaacatcttacggtgaccactggcgtaacctccgccgcatttgctccctcgaaatcgtctcctcaaaacgtctcgccaactttctccacatccgcaaagaggagatccagcgcatgctaacgagactctcacgtgacgcccgtgtcggcaaagaggtcgagctcgagtctatcttgtacgacctaacgttcaacaatatcgtgaggatggttacagggaagatatactacggcgacgatgtcagcgacaaagaagaagcagagttgttcaagaagctttttactttcatcaccactaatagtggcgcgaggcatcctggagaatacttgcccttcatgaagatattcggagggagctttgagaaggaggtgaaagctgcagcaaaagtcatcgatgaaatgttgcagcgtctgcttgacgagtgcaagagtgataaagacggtaacactatggttaatcacttgctctctttgcaacaggacgaccctgagtactacactgacatcattatcaaaggcttaatgctgggtataatggttgcctcatcagagacctccgctttgacaatagagtgggcgatggcgagtttgttgaaccacccaaaagttttggacaaagtaaaattagagatcgacgagataatcggacaagaccgtttgatcgaagaatcagacatagcaaaccttccttacctccaaaacgtagtatccgagacactccggctacatccagcagcgccggttcttgtgccaagatcaacagcagaagacatcaagatcggaggatacgatgtgccacgtgacacaatggtaatggtgaacgcgtgggcgatacatagagatccagatctttggaccgaaccggagaggtttaaccctgagaggttcaacggtggagaaggagaaaaagatgatgttcgtatgctgatagcgtttggaagcggacggagaatatgtcccggtgttggactagcgcacaagattgtgacattagcgttaggatcgttaattcaatgctttgattggaaaaaggtgaacgaaaaagagattgatatgagtgagggtccggggatggctatgcgtatgatggtgccgttacgagccttgtgtaagactcgacccataatgaataagctcccggcctacacgaaagtttagttatgtttttgtatttttcaatggaaaaattgttacattatgttgtgt

SEQ ID NO: 39004 - protein, 509 aa, Arabidopsis thaliana
  peptide (1)..(509): Ceres Seq. ID no. 12329048
NHQRKKYKMFNYVIILPLALFLLAYKFFFTSKKQRYYLPPSPSYSLPILGHHLLIKPPVHRLFHRLSNIHGPIFYLRLGSRRAVVISSSSLARECFTGQNDVIVSNRPRFLTSKYIAYNYTTIATTSYGDHWRNLRRICSLEIVSSKRLANFLHIRKEEIQRMLTRLSRDARVGKEVELESILYDLTFNNIVRMVTGKIYYGDDVSDKEEAELFKKLFTFITTNSGARHPGEYLPFMKIFGGSFEKEVKAAAKVIDEMLQRLLDECKSDKDGNTMVNHLLSLQQDDPEYYTDIIIKGLMLGIMVASSETSALTIEWAMASLLNHPKVLDKVKLEIDEIIGQDRLIEESDIANLPYLQNVVSETLRLHPAAPVLVPRSTAEDIKIGGYDVPRDTMVMVNAWAIHRDPDLWTEPERFNPERFNGGEGEKDDVRMLIAFGSGRRICPGVGLAHKIVTLALGSLIQCFDWKKVNEKEIDMSEGPGMAMRMMVPLRALCKTRPIMNKLPAYTKV

SEQ ID NO: 39005 - protein, 501 aa, Arabidopsis thaliana
  peptide (1)..(501): Ceres Seq. ID no. 12329049
MFNYVIILPLALFLLAYKFFFTSKKQRYYLPPSPSYSLPILGHHLLIKPPVHRLFHRLSNIHGPIFYLRLGSRRAVVISSSSLARECFTGQNDVIVSNRPRFLTSKYIAYNYTTIATTSYGDHWRNLRRICSLEIVSSKRLANFLHIRKEEIQRMLTRLSRDARVGKEVELESILYDLTFNNIVRMVTGKIYYGDDVSDKEEAELFKKLFTFITTNSGARHPGEYLPFMKIFGGSFEKEVKAAAKVIDEMLQRLLDECKSDKDGNTMVNHLLSLQQDDPEYYTDIIIKGLMLGIMVASSETSALTIEWAMASLLNHPKVLDKVKLEIDEIIGQDRLIEESDIANLPYLQNVVSETLRLHPAAPVLVPRSTAEDIKIGGYDVPRDTMVMVNAWAIHRDPDLWTEPERFNPERFNGGEGEKDDVRMLIAFGSGRRICPGVGLAHKIVTLALGSLIQCFDWKKVNEKEIDMSEGPGMAMRMMVPLRALCKTRPIMNKLPAYTKV

SEQ ID NO: 39006 - protein, 347 aa, Arabidopsis thaliana
  peptide (1)..(347): Ceres Seq. ID no. 12329050
MLTRLSRDARVGKEVELESILYDLTFNNIVRMVTGKIYYGDDVSDKEEAELFKKLFTFITTNSGARHPGEYLPFMKIFGGSFEKEVKAAAKVIDEMLQRLLDECKSDKDGNTMVNHLLSLQQDDPEYYTDIIIKGLMLGIMVASSETSALTIEWAMASLLNHPKVLDKVKLEIDEIIGQDRLIEESDIANLPYLQNVVSETLRLHPAAPVLVPRSTAEDIKIGGYDVPRDTMVMVNAWAIHRDPDLWTEPERFNPERFNGGEGEKDDVRMLIAFGSGRRICPGVGLAHKIVTLALGSLIQCFDWKKVNEKEIDMSEGPGMAMRMMVPLRALCKTRPIMNKLPAYTKV

SEQ ID NO: 39007 - DNA, 1205 bp, Arabidopsis thaliana
  misc_feature (1)..(1205): Ceres Seq. ID no. 12329051
  misc_feature (1)..(1205): Ortholog of  Ceres SEQ ID NO 13595626 as cited in SEQ ID NO 51116
actaaaagccctaatctctgcttctgtaaagttcaacatttggccgagtcaaagaaaccgagtgattctctgatccgattccggcgaaagaggacgaaacaaacggaacttgttcatcatcttctccagaaatgacgtcgtttcaggtgatgcgttcttcaaattctagaaactcggatctatctcgtcgtatctctacttcttcttcgtctgtaagacctcaacaacagttccggcgagatctaacaagtgtcggttacggcggaagaaacgacggattatacagttcaaattcgatgacggtggaagggattttacacgatactttcgcatcagatccaccagcaccaacggaatcttcactcttagatgcgtcgataaatctgatggatgcttctccagcaccaatggagataacaacaacgacgggttctgatgttgtagatcacggcggaggaacggagacgacgcgtagtgggaagagtgtcgatgaggtttggagagagatggtctcaggagaaggtaaagggatgaaggaagagacgtcggaagagataatgacgttagaggattttctagcgaaagctgcggtggaagacgaaacagcggtgacggcgtcggcggaggatttggatgtgaagattccggtgacgaattacggattcgatcattctgcaccgccgcataatccgtttcagatgattgataaagtagaaggatcaatagttgcgtttgggaatggtttagatgtttacggaggaggagctagagggaagagagcgagagtgatggttgagccattggataaagcagctgcacagagacagagaaggatgattaagaatcgtgaatctgcagctaggtctagagagaggaaacaagcttatcaagttgagttagaagctttggctgcgaagcttgaggaagagaatgagttgctttctaaggagattgaagataagaggaaagagagataccagaagttgatggagtttgtgattcctgttgttgagaaaccgaagcagcagccaccacggtttttacgcaggattcggtctttggaatggtgataagaggtatagacttttgaggattttagggtcttaatgttacttactttgtgtatgtgtgtgtgagagttgattcataatctgcagtagagtgtaatgattatggttaataacttatatattatattagattgc

SEQ ID NO: 39008 - protein, 312 aa, Arabidopsis thaliana
  peptide (1)..(312): Ceres Seq. ID no. 12329052
MTSFQVMRSSNSRNSDLSRRISTSSSSVRPQQQFRRDLTSVGYGGRNDGLYSSNSMTVEGILHDTFASDPPAPTESSLLDASINLMDASPAPMEITTTTGSDVVDHGGGTETTRSGKSVDEVWREMVSGEGKGMKEETSEEIMTLEDFLAKAAVEDETAVTASAEDLDVKIPVTNYGFDHSAPPHNPFQMIDKVEGSIVAFGNGLDVYGGGARGKRARVMVEPLDKAAAQRQRRMIKNRESAARSRERKQAYQVELEALAAKLEEENELLSKEIEDKRKERYQKLMEFVIPVVEKPKQQPPRFLRRIRSLEW

SEQ ID NO: 39009 - protein, 306 aa, Arabidopsis thaliana
  peptide (1)..(306): Ceres Seq. ID no. 12329053
MRSSNSRNSDLSRRISTSSSSVRPQQQFRRDLTSVGYGGRNDGLYSSNSMTVEGILHDTFASDPPAPTESSLLDASINLMDASPAPMEITTTTGSDVVDHGGGTETTRSGKSVDEVWREMVSGEGKGMKEETSEEIMTLEDFLAKAAVEDETAVTASAEDLDVKIPVTNYGFDHSAPPHNPFQMIDKVEGSIVAFGNGLDVYGGGARGKRARVMVEPLDKAAAQRQRRMIKNRESAARSRERKQAYQVELEALAAKLEEENELLSKEIEDKRKERYQKLMEFVIPVVEKPKQQPPRFLRRIRSLEW

SEQ ID NO: 39010 - protein, 257 aa, Arabidopsis thaliana
  peptide (1)..(257): Ceres Seq. ID no. 12329054
MTVEGILHDTFASDPPAPTESSLLDASINLMDASPAPMEITTTTGSDVVDHGGGTETTRSGKSVDEVWREMVSGEGKGMKEETSEEIMTLEDFLAKAAVEDETAVTASAEDLDVKIPVTNYGFDHSAPPHNPFQMIDKVEGSIVAFGNGLDVYGGGARGKRARVMVEPLDKAAAQRQRRMIKNRESAARSRERKQAYQVELEALAAKLEEENELLSKEIEDKRKERYQKLMEFVIPVVEKPKQQPPRFLRRIRSLEW

SEQ ID NO: 39011 - DNA, 1056 bp, Arabidopsis thaliana
  misc_feature (1)..(1056): Ceres Seq. ID no. 12329132
  misc_feature (1)..(1056): Ortholog of  Ceres SEQ ID NO 12558659 as cited in SEQ ID NO 20727
  misc_feature (1)..(1056): Ortholog of  Ceres SEQ ID NO 14314534 as cited in SEQ ID NO 52434
  misc_feature (1)..(1056): Ortholog of  Ceres SEQ ID NO 15175034 as cited in SEQ ID NO 62432
  misc_feature (1)..(1056): Ortholog of  Ceres SEQ ID NO 12619999 as cited in SEQ ID NO 66123
  misc_feature (1)..(1056): Ortholog of  Ceres SEQ ID NO 13656436 as cited in SEQ ID NO 69154
gtttgatattttccaattccgcgtctttctctgttgaaatcgaaaaaattttcaaaacaaaatctaaggaaaaaagagcaacaagtttcaaatctcatttgggtttttcattttgaaaagaaggacccatttttatctctctctttgttttgttttctcgaatctgaaggagtaaagttaaaagctttgaaggagagaatcaatggcgggttacagagcagatgatgaatacgattacctattcaaggttgttctgataggtgattcaggtgtgggcaaatccaatttgctttcacgattcacgaagaacgagtttagtctcgagtcaaaatccacgatcggggtcgagttcgcgactcggagtttgaatgttgatgataaagtcatcaaagctcagatttgggatactgctggtcaagaaaggtaccgagccatcactagtgcgtattaccgaggagctgttggagcgcttcttgtctacgatgtaacccgacactcaacatttgaaaacgttgagacttggctgaaagaactcagaaaccacactgatccaaacattgtagtcatgctcgtgggcaacaaatctgaccttcgccatctcgtggctgttcagactgaagatgctaagtcattcgccgagaaagaatctctctacttcatggaaacctcggctctcgaagccaccaatgttgagaacgctttcgccgaagtcctcactcagattcaccacattgtgagcaagaaggcgatggaagctgcgagcgaatccgctaatgttccatcgaaaggagacaagatcgatatcggtaaagatgtttcagctgtgaagaaaggtggatgctgctcgaactaatcagagagtagaattattgttaacaacctaaggatcggtttttgttaacggttctatcgaatatgaagattgcttttaggttgagtaatgcccatttggcgtatttctgttatttatctgatctatcaatgttattgtttgaaaatgctatgtcaaattttcagaaccctaaattatatttatctcaaacaatagaattgttg

SEQ ID NO: 39012 - protein, 216 aa, Arabidopsis thaliana
  peptide (1)..(216): Ceres Seq. ID no. 12329133
MAGYRADDEYDYLFKVVLIGDSGVGKSNLLSRFTKNEFSLESKSTIGVEFATRSLNVDDKVIKAQIWDTAGQERYRAITSAYYRGAVGALLVYDVTRHSTFENVETWLKELRNHTDPNIVVMLVGNKSDLRHLVAVQTEDAKSFAEKESLYFMETSALEATNVENAFAEVLTQIHHIVSKKAMEAASESANVPSKGDKIDIGKDVSAVKKGGCCSN

SEQ ID NO: 39013 - DNA, 778 bp, Arabidopsis thaliana
  misc_feature (1)..(778): Ceres Seq. ID no. 12396902
  misc_feature (1)..(778): Ortholog of  Ceres SEQ ID NO 14309373 as cited in SEQ ID NO 0
gttttccttaagagcttcatcgtcatcatccgagaattggagcagagatacgaagatttggcgaaaaatggggagcgagccaacaaaagtgatggtggcggtgaacgcttcgacgatcaaagactatcctaacccttcgattagctgcaaaagagcattcgaatggactctggagaagatcgtaaggtccaacacttccgatttcaagattctcttgctccacgtacaagtcgtcgacgaagacggttttgatgacgtggatagcatttatgcttcccctgaggatttccgagacatgagacaatctaacaaggcaaaaggtcttcaccttctcgagtttttcgttaataaatgtcatgagattggggttggttgcgaggcctggattaagacaggtgatcccaaggatgtcatatgccaagaagtgaagcgagttcgaccagattttctggtcgtgggaagtcgtggacttggccggtttcaaaaggtctttgtggggactgtgagtgcgttctgtgtgaaacatgcggagtgtccagttatgacgatcaaacgcaatgccgatgaaactcccagtgatccagctgatgactaaacaataacaacgtcccttccttctttgatctatacagagagagagtgcttttgtgtgtacaaaatccaaattcctacccctatatgtatttgtatctgtgtatgtatgtgtgtgtgcagcttgttccgttttctgaattggttttcaaactgaaccaaactgctatatatttggtttctttgc

SEQ ID NO: 39014 - protein, 197 aa, Arabidopsis thaliana
  peptide (1)..(197): Ceres Seq. ID no. 12396903
FSLRASSSSSENWSRDTKIWRKMGSEPTKVMVAVNASTIKDYPNPSISCKRAFEWTLEKIVRSNTSDFKILLLHVQVVDEDGFDDVDSIYASPEDFRDMRQSNKAKGLHLLEFFVNKCHEIGVGCEAWIKTGDPKDVICQEVKRVRPDFLVVGSRGLGRFQKVFVGTVSAFCVKHAECPVMTIKRNADETPSDPADD

SEQ ID NO: 39015 - protein, 175 aa, Arabidopsis thaliana
  peptide (1)..(175): Ceres Seq. ID no. 12396904
MGSEPTKVMVAVNASTIKDYPNPSISCKRAFEWTLEKIVRSNTSDFKILLLHVQVVDEDGFDDVDSIYASPEDFRDMRQSNKAKGLHLLEFFVNKCHEIGVGCEAWIKTGDPKDVICQEVKRVRPDFLVVGSRGLGRFQKVFVGTVSAFCVKHAECPVMTIKRNADETPSDPADD

SEQ ID NO: 39016 - protein, 167 aa, Arabidopsis thaliana
  peptide (1)..(167): Ceres Seq. ID no. 12396905
MVAVNASTIKDYPNPSISCKRAFEWTLEKIVRSNTSDFKILLLHVQVVDEDGFDDVDSIYASPEDFRDMRQSNKAKGLHLLEFFVNKCHEIGVGCEAWIKTGDPKDVICQEVKRVRPDFLVVGSRGLGRFQKVFVGTVSAFCVKHAECPVMTIKRNADETPSDPADD

SEQ ID NO: 39017 - DNA, 2066 bp, Arabidopsis thaliana
  misc_feature (1)..(2066): Ceres Seq. ID no. 13495924
  misc_feature (1)..(2066): Ortholog of  Ceres SEQ ID NO 12460981 as cited in SEQ ID NO 65146
ttccaaattcctctgttttcttcttttaaaagcctcctcttcttcctcttctctctcctcacaactcaaaactctctccatctctcttctaaaatcagacaagaaagatggctcaagaggaagtacagaaatcggctgatgtcgctgctgctccggtggtgaaggagaaacctattaccgataaggaggttactattcctacccctgtggcagagaaagaggaagttgctgctcctgtctctgatgagaaggcggttccagagaaggaggtgactccggagaaggaagccccagcggcggaagcggagaaatctgtttcggtgaaggaggaagagacggttgttgtagctgagaaggttgttgttttaactgctgaggaagttcagaagaaggcacttgaggagtttaaggagcttgtaagggaggctttgaacaaacgtgaattcactgctccggtgacgccggttaaggaagagaaaacagaggagaagaaaacagaggaggaaactaaagaggaagagaaaacagaggagaagaaagaagagacaacgactgaggttaaggttgaagaagagaaaccggcggttccagcggcggaggaggagaaatcatcagaggctgctccggttgagaccaaatctgaggagaaacctgaagagaaagcagaggtaacaaccgagaaagcatccagtgccgaagaagatggaaccaagaccgtggaagcaatcgaagaatctatcgtctctgtttcaccacctgaatccgccgtagcacctgtcgtggtagagactgtcgccgttgctgaggcagagccagtggagccggaagaagtctcgatctggggagttccactactccaagacgagagatctgacgtgatcctcacgaaattcctccgtgcaagagactttaaggtcaaagaagctttaaccatgcttaaaaacaccgtccagtggcgtaaagaaaacaaaatcgacgaactcgttgaatccggagaagaagtgagtgagttcgagaagatggtgtttgctcacggtgttgacaaagaaggacacgtcgtgatctacagttcttacggtgagtttcagaacaaggagcttttctccgacaaggagaagcttaacaagttcctcagctggaggattcagctacaagagaagtgtgtgagagctattgatttcagcaaccctgaagcgaagtcttcgtttgtgttcgtcagcgacttcaggaacgctccaggacttggtaaaagagccttgtggcaattcatcagacgcgctgttaaacaattcgaggacaattatcctgaattcgccgctaaagagctattcatcaatgtcccatggtggtacattccatactacaaaacattcggatctatcatcacatccccaaggactaggagcaagatggtccttgctggtccatccaaatctgccgatactattttcaaatacatagctcctgaacaagttcccgttaaatacggtggacttagcaaagatactcctttgaccgaagaaaccataacggaagccatcgttaaaccggcagcaaactacactattgaattgcctgcttctgaggcttgcacgctttcatgggagcttagggttttgggtgctgatgtgagctacggagctcagtttgagccaaccaccgaaggaagctatgctgtgatcgtctctaagacacggaagattggatcaaccgatgaaccggtgataaccgattcttttaaggtgggtgaaccgggaaagattgtgatcacaatcgacaaccagacttccaagaagaagaaagtgctctacaggttcaaaactcaataaaaggtctgatctttgaaatccaaatccaaggaagaagcaaaaaaaatgttattttgttatttgggggaaacaaattttaattaattaatttagtttgttatttattatgtaattttgaaatctcaagatgtggttgtgtttttgctttgttttggtattgggggttgttttcgtgtgtggagaatatgtgattaaaattcaaaagaaagtaaagaacactttgtttcatgatttctt

SEQ ID NO: 39018 - protein, 573 aa, Arabidopsis thaliana
  peptide (1)..(573): Ceres Seq. ID no. 13495925
MAQEEVQKSADVAAAPVVKEKPITDKEVTIPTPVAEKEEVAAPVSDEKAVPEKEVTPEKEAPAAEAEKSVSVKEEETVVVAEKVVVLTAEEVQKKALEEFKELVREALNKREFTAPVTPVKEEKTEEKKTEEETKEEEKTEEKKEETTTEVKVEEEKPAVPAAEEEKSSEAAPVETKSEEKPEEKAEVTTEKASSAEEDGTKTVEAIEESIVSVSPPESAVAPVVVETVAVAEAEPVEPEEVSIWGVPLLQDERSDVILTKFLRARDFKVKEALTMLKNTVQWRKENKIDELVESGEEVSEFEKMVFAHGVDKEGHVVIYSSYGEFQNKELFSDKEKLNKFLSWRIQLQEKCVRAIDFSNPEAKSSFVFVSDFRNAPGLGKRALWQFIRRAVKQFEDNYPEFAAKELFINVPWWYIPYYKTFGSIITSPRTRSKMVLAGPSKSADTIFKYIAPEQVPVKYGGLSKDTPLTEETITEAIVKPAANYTIELPASEACTLSWELRVLGADVSYGAQFEPTTEGSYAVIVSKTRKIGSTDEPVITDSFKVGEPGKIVITIDNQTSKKKKVLYRFKTQ

SEQ ID NO: 39019 - protein, 298 aa, Arabidopsis thaliana
  peptide (1)..(298): Ceres Seq. ID no. 13495926
MLKNTVQWRKENKIDELVESGEEVSEFEKMVFAHGVDKEGHVVIYSSYGEFQNKELFSDKEKLNKFLSWRIQLQEKCVRAIDFSNPEAKSSFVFVSDFRNAPGLGKRALWQFIRRAVKQFEDNYPEFAAKELFINVPWWYIPYYKTFGSIITSPRTRSKMVLAGPSKSADTIFKYIAPEQVPVKYGGLSKDTPLTEETITEAIVKPAANYTIELPASEACTLSWELRVLGADVSYGAQFEPTTEGSYAVIVSKTRKIGSTDEPVITDSFKVGEPGKIVITIDNQTSKKKKVLYRFKTQ

SEQ ID NO: 39020 - DNA, 809 bp, Arabidopsis thaliana
  misc_feature (1)..(809): Ceres Seq. ID no. 12559194
  misc_feature (1)..(809): Ortholog of  Ceres SEQ ID NO 12556910 as cited in SEQ ID NO 39
acacgaatcttgtttagtaaaaagcgcagctgcaaaaaaaatcgagtagagaagaagtaggcagacaaagaagaagaagaagaagttctcggcgtgcttcaatggcgatatcagtagcagcttcgtcctctatggccgtgatggttccacgtgttcccgccgtatccacccgttgctccgccgtcccttatcttcctcctcgctcctttggccgatcctctttcaccgttccgttgaagcttgtttcagggaatggattgcaaaaagttgaattgttgaagacaagagcttcttcagaagagacctcgtccattgataccaacgaactcatcacagatttgaaggaaaagtgggatggtcttgagaacaaatctactgtacttatatatggaggaggagccattgttgctgtttggttatcttccattgttgttggtgccatcaactctgttcctctggtaacaacactctctatataattcttttgagattagaaaatgtgtaatgagtttgagttaaagtgatgtttccatttcttgtgtttgtagcttccgaaagttatggaacttgtcggtctcgggtacactggatggtttgtctacagataccttctcttcaagtcaagccagaaaggaattggctggaggatattgaatccttaaagaaaaagatcgcaggaagcgaatagattcattttcaaataaaaccagctttctctctgtatgttttcctgtaatatcgtgttatattatacaatgtctctgtttcaacattgtatctgttgcatctgaaactattatcttggatcc

SEQ ID NO: 39021 - protein, 125 aa, Arabidopsis thaliana
  peptide (1)..(125): Ceres Seq. ID no. 12559195
MAISVAASSSMAVMVPRVPAVSTRCSAVPYLPPRSFGRSSFTVPLKLVSGNGLQKVELLKTRASSEETSSIDTNELITDLKEKWDGLENKSTVLIYGGGAIVAVWLSSIVVGAINSVPLVTTLSI

SEQ ID NO: 39022 - protein, 115 aa, Arabidopsis thaliana
  peptide (1)..(115): Ceres Seq. ID no. 12559196
MAVMVPRVPAVSTRCSAVPYLPPRSFGRSSFTVPLKLVSGNGLQKVELLKTRASSEETSSIDTNELITDLKEKWDGLENKSTVLIYGGGAIVAVWLSSIVVGAINSVPLVTTLSI

SEQ ID NO: 39023 - protein, 112 aa, Arabidopsis thaliana
  peptide (1)..(112): Ceres Seq. ID no. 12559197
MVPRVPAVSTRCSAVPYLPPRSFGRSSFTVPLKLVSGNGLQKVELLKTRASSEETSSIDTNELITDLKEKWDGLENKSTVLIYGGGAIVAVWLSSIVVGAINSVPLVTTLSI

SEQ ID NO: 39024 - DNA, 2566 bp, Arabidopsis thaliana
  misc_feature (1)..(2566): Ceres Seq. ID no. 13497704
  misc_feature (1)..(2566): Ortholog of  Ceres SEQ ID NO 13600595 as cited in SEQ ID NO 629
atatatatatatatataactccaaaacaatcatttaatccaaacccaacatatccttttaacagaatcttctttatctgaaaatatctaaagaaaatggtattgaactttagagataagtcctgcatttttctggcaattctttgttgtttatcattgagttgtatagtaaaagcatcagtctcttatgatcgtaaagctgtgatcatcaatggacaaagaagaatccttctctccggttccattcactatccacgaagcacccctgagatgtggcctggcctaatacagaaagccaaagaaggaggcttggatgttattgagacttatgttttttggaatggccatgaaccttctcctggacaatattattttggagacaggtatgatttggttaagttcatcaagttggtgcaccaagctggtctctatgttaatctcagaattggcccttatgtttgtgctgaatggaattttgggggatttccggtttggctcaaatttgttcccggtatggcttttaggacggataatgaacctttcaaggctgcaatgaagaaattcactgaaaagattgtatggatgatgaaagcagaaaagttgtttcaaactcaaggaggacccatcattcttgcacagattgagaatgaatatggaccagtggaatgggaaataggagcaccgggaaaggcttatacaaaatgggtagctcaaatggcattaggactctcaactggtgttccatggattatgtgcaagcaagaagatgctcctggtcctatcatagacacatgcaatggttattactgtgaagatttcaaaccgaactcaatcaacaagccaaagatgtggacagagaattggactggttggtacacagattttggaggtgcggtaccatacagaccagtcgaagatattgcatactccgttgcacgatttatccaaaaaggaggttccctcatcaattactatatgtatcatggaggaacaaatttcgacagaacagccggtgagttcatggcttcaagctatgactatgacgctcctctcgatgaatacggcttaccaagagaaccaaagtatagtcacttgaaagcattgcataaagccatcaaacttagtgagccagctttgctttctgctgatgctaccgttacatcgcttggagctaagcaagaagcttatgtgttctggtctaaatcatcttgtgctgcgtttttatcgaacaaagatgagaactctgcagcgagagttctgttccgtggattcccatatgatttgcctccttggtcagtcagtattttacctgattgcaaaacagaggtttacaacactgcaaaggtcaatgcaccaagcgtacacaggaatatggttcctactggtactaaattctcttggggatcattcaacgaagcgactcctacagcgaatgaagctggtacgtttgcaagaaacgggcttgtggaacaaataagcatgacttgggacaaatctgactatttttggtatataacagacattacaatcggttccggtgagacatttttgaagactggtgattcacctcttcttacagttatgtcagctggacatgctcttcatgtgtttgtcaatggtcagctttcaggaactgcttatggaggacttgaccacccaaaactaacctttagccagaagatcaaactacatgcaggtgtcaacaagattgctcttctgagtgttgcagtgggtctcccgaacgttggtacacattttgaacagtggaataaaggagttcttggtccggtcacattgaagggagtaaactcaggaacatgggacatgtcgaaatggaaatggtcctataagattggtgtaaagggtgaggctttgagtcttcataccaacacagagagttccggtgtgagatggactcaaggatcatttgtggcgaagaagcaaccattaacctggtacaagtctacgtttgctacaccagcaggaaatgaaccattggctttagacatgaacacaatgggaaaaggtcaagtttggataaacggtagaaatattggacgtcattggcctgcatataaagctcaaggatcttgtggacgttgtaactacgctggaactttcgacgcaaagaaatgcttaagtaattgtggtgaagcttcacaaagatggtaccatgtacctcgttcatggcttaagtctcaaaaccttatagttgtgttcgaagagttaggtggtgatcctaacggaatctctttggttaaaagaacatgaaaagcttcttctgattccgagttttcaggacagaagcaagctgtttgattcgtttgtctatatctttctctggctttgctttgaagatagagacagagctggaattttttttcttttatggctttgtgcagtgattacaaaaattatacaacatgtatatgtataactgtatcctactactagtcatcatctatggctaaataaaattcacagaataaaggagtgtttctatttaccataacattttcgtttgttcaagcaaataactgtttcaatcatctcttgaagttggaacc

SEQ ID NO: 39025 - protein, 724 aa, Arabidopsis thaliana
  peptide (1)..(724): Ceres Seq. ID no. 13497705
MVLNFRDKSCIFLAILCCLSLSCIVKASVSYDRKAVIINGQRRILLSGSIHYPRSTPEMWPGLIQKAKEGGLDVIETYVFWNGHEPSPGQYYFGDRYDLVKFIKLVHQAGLYVNLRIGPYVCAEWNFGGFPVWLKFVPGMAFRTDNEPFKAAMKKFTEKIVWMMKAEKLFQTQGGPIILAQIENEYGPVEWEIGAPGKAYTKWVAQMALGLSTGVPWIMCKQEDAPGPIIDTCNGYYCEDFKPNSINKPKMWTENWTGWYTDFGGAVPYRPVEDIAYSVARFIQKGGSLINYYMYHGGTNFDRTAGEFMASSYDYDAPLDEYGLPREPKYSHLKALHKAIKLSEPALLSADATVTSLGAKQEAYVFWSKSSCAAFLSNKDENSAARVLFRGFPYDLPPWSVSILPDCKTEVYNTAKVNAPSVHRNMVPTGTKFSWGSFNEATPTANEAGTFARNGLVEQISMTWDKSDYFWYITDITIGSGETFLKTGDSPLLTVMSAGHALHVFVNGQLSGTAYGGLDHPKLTFSQKIKLHAGVNKIALLSVAVGLPNVGTHFEQWNKGVLGPVTLKGVNSGTWDMSKWKWSYKIGVKGEALSLHTNTESSGVRWTQGSFVAKKQPLTWYKSTFATPAGNEPLALDMNTMGKGQVWINGRNIGRHWPAYKAQGSCGRCNYAGTFDAKKCLSNCGEASQRWYHVPRSWLKSQNLIVVFEELGGDPNGISLVKRT

SEQ ID NO: 39026 - protein, 666 aa, Arabidopsis thaliana
  peptide (1)..(666): Ceres Seq. ID no. 13497706
MWPGLIQKAKEGGLDVIETYVFWNGHEPSPGQYYFGDRYDLVKFIKLVHQAGLYVNLRIGPYVCAEWNFGGFPVWLKFVPGMAFRTDNEPFKAAMKKFTEKIVWMMKAEKLFQTQGGPIILAQIENEYGPVEWEIGAPGKAYTKWVAQMALGLSTGVPWIMCKQEDAPGPIIDTCNGYYCEDFKPNSINKPKMWTENWTGWYTDFGGAVPYRPVEDIAYSVARFIQKGGSLINYYMYHGGTNFDRTAGEFMASSYDYDAPLDEYGLPREPKYSHLKALHKAIKLSEPALLSADATVTSLGAKQEAYVFWSKSSCAAFLSNKDENSAARVLFRGFPYDLPPWSVSILPDCKTEVYNTAKVNAPSVHRNMVPTGTKFSWGSFNEATPTANEAGTFARNGLVEQISMTWDKSDYFWYITDITIGSGETFLKTGDSPLLTVMSAGHALHVFVNGQLSGTAYGGLDHPKLTFSQKIKLHAGVNKIALLSVAVGLPNVGTHFEQWNKGVLGPVTLKGVNSGTWDMSKWKWSYKIGVKGEALSLHTNTESSGVRWTQGSFVAKKQPLTWYKSTFATPAGNEPLALDMNTMGKGQVWINGRNIGRHWPAYKAQGSCGRCNYAGTFDAKKCLSNCGEASQRWYHVPRSWLKSQNLIVVFEELGGDPNGISLVKRT

SEQ ID NO: 39027 - protein, 585 aa, Arabidopsis thaliana
  peptide (1)..(585): Ceres Seq. ID no. 13497707
MAFRTDNEPFKAAMKKFTEKIVWMMKAEKLFQTQGGPIILAQIENEYGPVEWEIGAPGKAYTKWVAQMALGLSTGVPWIMCKQEDAPGPIIDTCNGYYCEDFKPNSINKPKMWTENWTGWYTDFGGAVPYRPVEDIAYSVARFIQKGGSLINYYMYHGGTNFDRTAGEFMASSYDYDAPLDEYGLPREPKYSHLKALHKAIKLSEPALLSADATVTSLGAKQEAYVFWSKSSCAAFLSNKDENSAARVLFRGFPYDLPPWSVSILPDCKTEVYNTAKVNAPSVHRNMVPTGTKFSWGSFNEATPTANEAGTFARNGLVEQISMTWDKSDYFWYITDITIGSGETFLKTGDSPLLTVMSAGHALHVFVNGQLSGTAYGGLDHPKLTFSQKIKLHAGVNKIALLSVAVGLPNVGTHFEQWNKGVLGPVTLKGVNSGTWDMSKWKWSYKIGVKGEALSLHTNTESSGVRWTQGSFVAKKQPLTWYKSTFATPAGNEPLALDMNTMGKGQVWINGRNIGRHWPAYKAQGSCGRCNYAGTFDAKKCLSNCGEASQRWYHVPRSWLKSQNLIVVFEELGGDPNGISLVKRT

SEQ ID NO: 39028 - DNA, 3083 bp, Arabidopsis thaliana
  misc_feature (1)..(3083): Ceres Seq. ID no. 13488125
  misc_feature (1)..(3083): Ortholog of  Ceres SEQ ID NO 13532807 as cited in SEQ ID NO 53012
  misc_feature (1)..(3083): Ortholog of  Ceres SEQ ID NO 13663060 as cited in SEQ ID NO 60964
  misc_feature (1)..(3083): Ortholog of  Ceres SEQ ID NO 13598532 as cited in SEQ ID NO 65204
  misc_feature (1)..(3083): Ortholog of  Ceres SEQ ID NO 13656849 as cited in SEQ ID NO 65764
  misc_feature (1)..(3083): Ortholog of  Ceres SEQ ID NO 13656501 as cited in SEQ ID NO 69206
acttgacaaaattgaaaaacgcgtctccgagaggaaaatttagagaaaagcttctcgcgatcgcatcgggctcgtagatcgatctcctcctccatccaatcttccgttttcgtattcaccgtccggtaagaccttccggtacttgtgaatcggagaagaggaaggagaaaaattatcgcgttcctggaaattgaatttctagggtttcgtttttttctgaattattctgattctgatttcgtcaagggtgtttttcttaattggttgattgatcgtctttctagttcaattgttgaaaagtaattgaacatctattgaaatctgcttctcgtgatttgattctgggtttcgttgattggtttttttcgaggggtttgtttgttttatccttttttatttctataagatcaatttctcattgagaagaatacgatggcagcagggggtgttgatgtttccagaagttccgttgctgtcaaaaaagactacgacttttacaggaatggttctcgtgatgtgtatgttcgacagagtggtagagatgacgagaggcgtcaaatcaaaaggcctagtgaccatgatctcaggaggaatgatgggcgtcaccgatcacggttggcatatgagaaaggggaactacgggaggaagcagaggttcagagaccctctgagaaaaggaggaagttttcacccatcgtgtggaatgcagaaaaagtgggtagagctccatctagggagaagaccaagtctcctttccctgttccgactacaactgtgatatccaatcaggctgttgctggtaagactacttcaaacgatcaagtgaatgccttgatgtcgccagaacctagttatcttgctccagtgcagccttcagaagccctgctggctgtgaaacatcctgttgatgatttggaggagggtcagttggaggaagaacaggtgatgcaggaggatgtaaaggagggtctgttggaggaagaacaagtgatgcaggaaccaaatataaagacatctaggtgggggacaggtttgacttccccaaaggaggagttaatatctgttaacgtttccaagactaatagatggaacaggagcagtttgacaccggagtgcgaggaagtaatggtgtctgaagaacagcagtgctattcgtctggatctggcagtggacatctcagcgtagagaagcttagtgcagatggaaattctggtcgtgagtattatagttctgatcatgatgagttagaacatgaagatcaagattctttaactccgggagagatgaacatgatgtttgggagcaggtctgtgaatgaatttcagaagctaaacaagataaatgaaggaacatatggaattgtttacaaagcaagggatgagaaaacaaaagagattgttgcgctcaaaaagatcaagatgaaggaagataggttcgaagaagagtatggattccctttgacatcattgagggaaattaacatacttttgtcatgcaatcaccctgcgattgtgaacgtgaaggaggttgtggttggagggaaaaacgataatgatgtttatatggtcatggaacacttagaacacgacctgaggggagtaatggatagaaggaaggaaccttttagcactagcgaagtcaagtgcttgatgatgcagctgttggatggtttgaaatacctccacacaaattggattatccacagggatctgaagccatctaatcttctgatgaacaattgtggggagttaaaaatatgtgattttgggatggcgcgccagtatgggagccctatcaagccttacacccagatggttattacccagtggtacaggccacctgaacttcttctaggagcaaaagagtactctacagcagttgatatgtggtcagtgggttgcattatggctgaactgttgtctcaaaagcctttgttcccgggtaagagtgagcttgaccaacttcagaagatctttgcggtccttggaacaccaaacgaagcaatatggcctgggttctcatcatttccgaatgctaaagccaagtttcctacacagccttacaatatgttacgtaagaagtttccagctatttcatttgtaggtggtcaaattctttctgaacgtggatttgatttgctgaacagtctactaactttggaccctgagaaacgtctaacagtggaagatgctctcaaccatggttggttccatgaagtcccgttaccaaaatccaaagatttcatgccgacatatcctccaaagcggtaactgagaaaaaacgtgctatcatttggacgagaggatgtcaacaaatacacagggaagtcgactggtcgtattttggtattttcctttttactcaaaagacttgctttcatctattcttaactcagttgcgttgctttgttgcctggagattcagggcattctagtgtaccatttattcggattcatgtgtaaatatgagtggtccgtaaaactgaaaggtgtgtttctctcttttcgttaggaccctaatgttattgctatcaagagttgtacacactattgactcacatgctttaatggaagagatctcagtattcactttctctctctagtaattgggttgggatggttattgtttatgtcctcatatttcttctgtgcattgtttttattcacgaggtaaacgcaaagagtttatcacaaacgtgagaatggaagttgacatcagtaagtttattttgattacttatttaccacgctctgttatcaatgttggtttgttgttcgacgtccctttgtctttgaggtgctcgtatttggtctgttggcagtgagaaaaagatgattcatgatgagtttctgtggacataggaggtatggcagtggtttttttcatgttaatccgagaattaagggatttgggataaaaagctatatagaaagaagctaaaataagtttgtcttcaacactataaccctttgtcctcctttctttttaacttctgtaaacagctaagctaaatcaagttcatttcaataacgaataaactagaatcagcattacctttgacgaggccataaacagaaaggag

SEQ ID NO: 39029 - protein, 612 aa, Arabidopsis thaliana
  peptide (1)..(612): Ceres Seq. ID no. 13488126
MAAGGVDVSRSSVAVKKDYDFYRNGSRDVYVRQSGRDDERRQIKRPSDHDLRRNDGRHRSRLAYEKGELREEAEVQRPSEKRRKFSPIVWNAEKVGRAPSREKTKSPFPVPTTTVISNQAVAGKTTSNDQVNALMSPEPSYLAPVQPSEALLAVKHPVDDLEEGQLEEEQVMQEDVKEGLLEEEQVMQEPNIKTSRWGTGLTSPKEELISVNVSKTNRWNRSSLTPECEEVMVSEEQQCYSSGSGSGHLSVEKLSADGNSGREYYSSDHDELEHEDQDSLTPGEMNMMFGSRSVNEFQKLNKINEGTYGIVYKARDEKTKEIVALKKIKMKEDRFEEEYGFPLTSLREINILLSCNHPAIVNVKEVVVGGKNDNDVYMVMEHLEHDLRGVMDRRKEPFSTSEVKCLMMQLLDGLKYLHTNWIIHRDLKPSNLLMNNCGELKICDFGMARQYGSPIKPYTQMVITQWYRPPELLLGAKEYSTAVDMWSVGCIMAELLSQKPLFPGKSELDQLQKIFAVLGTPNEAIWPGFSSFPNAKAKFPTQPYNMLRKKFPAISFVGGQILSERGFDLLNSLLTLDPEKRLTVEDALNHGWFHEVPLPKSKDFMPTYPPKR

SEQ ID NO: 39030 - protein, 478 aa, Arabidopsis thaliana
  peptide (1)..(478): Ceres Seq. ID no. 13488127
MSPEPSYLAPVQPSEALLAVKHPVDDLEEGQLEEEQVMQEDVKEGLLEEEQVMQEPNIKTSRWGTGLTSPKEELISVNVSKTNRWNRSSLTPECEEVMVSEEQQCYSSGSGSGHLSVEKLSADGNSGREYYSSDHDELEHEDQDSLTPGEMNMMFGSRSVNEFQKLNKINEGTYGIVYKARDEKTKEIVALKKIKMKEDRFEEEYGFPLTSLREINILLSCNHPAIVNVKEVVVGGKNDNDVYMVMEHLEHDLRGVMDRRKEPFSTSEVKCLMMQLLDGLKYLHTNWIIHRDLKPSNLLMNNCGELKICDFGMARQYGSPIKPYTQMVITQWYRPPELLLGAKEYSTAVDMWSVGCIMAELLSQKPLFPGKSELDQLQKIFAVLGTPNEAIWPGFSSFPNAKAKFPTQPYNMLRKKFPAISFVGGQILSERGFDLLNSLLTLDPEKRLTVEDALNHGWFHEVPLPKSKDFMPTYPPKR

SEQ ID NO: 39031 - protein, 441 aa, Arabidopsis thaliana
  peptide (1)..(441): Ceres Seq. ID no. 13488128
MQEDVKEGLLEEEQVMQEPNIKTSRWGTGLTSPKEELISVNVSKTNRWNRSSLTPECEEVMVSEEQQCYSSGSGSGHLSVEKLSADGNSGREYYSSDHDELEHEDQDSLTPGEMNMMFGSRSVNEFQKLNKINEGTYGIVYKARDEKTKEIVALKKIKMKEDRFEEEYGFPLTSLREINILLSCNHPAIVNVKEVVVGGKNDNDVYMVMEHLEHDLRGVMDRRKEPFSTSEVKCLMMQLLDGLKYLHTNWIIHRDLKPSNLLMNNCGELKICDFGMARQYGSPIKPYTQMVITQWYRPPELLLGAKEYSTAVDMWSVGCIMAELLSQKPLFPGKSELDQLQKIFAVLGTPNEAIWPGFSSFPNAKAKFPTQPYNMLRKKFPAISFVGGQILSERGFDLLNSLLTLDPEKRLTVEDALNHGWFHEVPLPKSKDFMPTYPPKR

SEQ ID NO: 39032 - DNA, 1418 bp, Arabidopsis thaliana; identical to SEQ ID NO: 25846
  misc_feature (1)..(1418): Ceres Seq. ID no. 12562549
  misc_feature (1)..(1418): Ortholog of  Ceres SEQ ID NO 13639243 as cited in SEQ ID NO 56820
  misc_feature (1)..(1418): Ortholog of  Ceres SEQ ID NO 13496409 as cited in SEQ ID NO 65697

SEQ ID NO: 39033 - protein, 328 aa, Arabidopsis thaliana; identical to SEQ ID NO: 25847
  peptide (1)..(328): Ceres Seq. ID no. 12562550

SEQ ID NO: 39034 - DNA, 701 bp, Arabidopsis thaliana
  misc_feature (1)..(701): Ceres Seq. ID no. 13488129
  misc_feature (1)..(701): Ortholog of  Ceres SEQ ID NO 15176693 as cited in SEQ ID NO 1078
  misc_feature (1)..(701): Ortholog of  Ceres SEQ ID NO 12615074 as cited in SEQ ID NO 62676
  misc_feature (1)..(701): Ortholog of  Ceres SEQ ID NO 13598819 as cited in SEQ ID NO 0
  misc_feature (1)..(701): Ortholog of  Ceres SEQ ID NO 13600371 as cited in SEQ ID NO 0
atgccattgccacacactcactcactcgtagtttcgacgctatctctagaacattccgataaaccacaaagaagaagcagagcaaaagtaaagaagaagaagaaaacaaacatgtcgtggcagacttacgtcgacgatcacttaatgtgcgatgttgcaggcaaccgcctcaccgccgccgcaattctcggccaagacggtagcgtctgggctcagagcaacaattttcctcaggtgaagcctgaggaaattcagggcatcaaagacgattttactacacctggaacacttgccccaacaggattgttccttggtggtaacaagtacatggtaatccaaggagagcctaatgccgtcattcgaggaaagaagggagctggtggtgttaccatcaagaagaccaccttagctttggtatttggtatctatgatgaaccaatgactcctggacaatgcaatatggttgtggagaatctcggtgagtacctgattgaatcggggctctgaaacttaagctgctactatattcatattgctttatgtaatcttctagttgtgtcgtgagagaaaaactattcgataatccgactgtgtattacctaccttgtgatggatcttggggttgtatgattatttctaaaacaatatagtattgtctacatttgtgtcgagttgaaatatttaatgaatggcagtgtggt

SEQ ID NO: 39035 - protein, 168 aa, Arabidopsis thaliana
  peptide (1)..(168): Ceres Seq. ID no. 13488130
MPLPHTHSLVVSTLSLEHSDKPQRRSRAKVKKKKKTNMSWQTYVDDHLMCDVAGNRLTAAAILGQDGSVWAQSNNFPQVKPEEIQGIKDDFTTPGTLAPTGLFLGGNKYMVIQGEPNAVIRGKKGAGGVTIKKTTLALVFGIYDEPMTPGQCNMVVENLGEYLIESGL

SEQ ID NO: 39036 - protein, 131 aa, Arabidopsis thaliana
  peptide (1)..(131): Ceres Seq. ID no. 13488131
MSWQTYVDDHLMCDVAGNRLTAAAILGQDGSVWAQSNNFPQVKPEEIQGIKDDFTTPGTLAPTGLFLGGNKYMVIQGEPNAVIRGKKGAGGVTIKKTTLALVFGIYDEPMTPGQCNMVVENLGEYLIESGL

SEQ ID NO: 39037 - protein, 120 aa, Arabidopsis thaliana
  peptide (1)..(120): Ceres Seq. ID no. 13488132
MCDVAGNRLTAAAILGQDGSVWAQSNNFPQVKPEEIQGIKDDFTTPGTLAPTGLFLGGNKYMVIQGEPNAVIRGKKGAGGVTIKKTTLALVFGIYDEPMTPGQCNMVVENLGEYLIESGL

SEQ ID NO: 39038 - DNA, 2006 bp, Arabidopsis thaliana
  misc_feature (1)..(2006): Ceres Seq. ID no. 12562143
  misc_feature (1)..(2006): Ortholog of  Ceres SEQ ID NO 13586013 as cited in SEQ ID NO 1182
ataaaatgtaaagaccgacccgaaataatactcatgtttaaattatcagcaaagagccaagagaggaaacatcacacattggtgacaaaaattcttaggaaaaccaattaatggaggtgcacaaggtggttgctccgccgcataagagcacggtggcaaagctaaagacaaaactgaaggagactttcttcccggacgatcccttaagacagttcagaggacaaccaaaccgtaccaagctcatacgcgccgctcaatacatttttccaatcctccaatggtgtcctgagtacagcttcagcctactcaaatccgacgtcgtttcaggtcttaccatcgctagtttagctattcctcaggggattagttacgcgaagctagcaaatttgccaccaatcgttggtctatactcgagcttcgtgccaccgttggtttatgcggtcttgggaagctcaagagatctagcagtgggaccagtctccatagcgtcgttaatcttaggatccatgctaaggcaacaagtatctcccgtagacgatcctgttctctttctacagctagccttctcttctaccttctttgctggtctctttcaagcctctcttggaatcctcaggctgggatttataatagactttctatcaaaagcgacgctaatagggtttatgggtggagcagccataattgtatcactccaacagctaaagggtctgcttgggataactcatttcacaaagcatatgagtgtagtccctgttctctcctctgttttccaacacaccaacgagtggtcatggcaaacaattgtgatgggagtttgcttcttgctcttcttgctctcgacacgtcacctcagcatgaagaagccgaagctgttttgggtctcagccggagcaccacttctttccgttatcgtctctacacttcttgtctttgttttcagagccgagcgtcacggaatcagcgtcatcgggaaattaccagaaggtttgaatccaccgtcttggaacatgcttcagtttcacggtagtcatctcgcactcgtcgccaaaaccggactcgtcaccggaatcgtctccctcacggaaggaatcgcagtgggaagaacatttgcagcgctaaagaactaccacgtagatggaaacaaagagatgatcgccattggtctgatgaacgtagtaggctctgccacatcttgctacgtcacaaccggagcattctctagatcagcggtcaacaacaacgcgggagctaaaaccgcagtttcaaacattgttatgtcggtcactgttatggttacgcttctcttcctaatgccgcttttcgaatacactcccaatgtggtcctcggtgccatcattgtgaccgcggtcattggtctcatcgaccttcccgcggcctgtcacatatggaagatcgataaatttgatttcttggtgatgctttgcgcgttctttggtgtcattttcctatccgttcaaaacggtctagccattgcggtggggctatcgttgttcaagatattgatgcaagtaacaaggccgaaaatggttataatgggtaatattcctggaacggatatataccgagatcttcatcattacaaagaagcacaaaggatcccgggatttcttgttttaagcatcgaatctcctgtcaatttcgccaattctaactacctcactgaaagaacatctcgttggattgaagaatgcgaagaagaggaagctcaagagaagcattctagcctacagttcttgattcttgaaatgtcagccgtgagcggtgtagacacaaacggagtgtccttttttaaggaacttaagaaaacaaccgccaagaaggacatcgagcttgtgtttgtgaaccctctaagcgaagtggtggagaagcttcaaagagctgacgaacaaaaagagttcatgaggcccgagtttctcttcttaaccgtcgctgaggccgttgcgtcgctctctcttaaagggccatctctcagtaacgtttaa

SEQ ID NO: 39039 - protein, 631 aa, Arabidopsis thaliana
  peptide (1)..(631): Ceres Seq. ID no. 12562144
MEVHKVVAPPHKSTVAKLKTKLKETFFPDDPLRQFRGQPNRTKLIRAAQYIFPILQWCPEYSFSLLKSDVVSGLTIASLAIPQGISYAKLANLPPIVGLYSSFVPPLVYAVLGSSRDLAVGPVSIASLILGSMLRQQVSPVDDPVLFLQLAFSSTFFAGLFQASLGILRLGFIIDFLSKATLIGFMGGAAIIVSLQQLKGLLGITHFTKHMSVVPVLSSVFQHTNEWSWQTIVMGVCFLLFLLSTRHLSMKKPKLFWVSAGAPLLSVIVSTLLVFVFRAERHGISVIGKLPEGLNPPSWNMLQFHGSHLALVAKTGLVTGIVSLTEGIAVGRTFAALKNYHVDGNKEMIAIGLMNVVGSATSCYVTTGAFSRSAVNNNAGAKTAVSNIVMSVTVMVTLLFLMPLFEYTPNVVLGAIIVTAVIGLIDLPAACHIWKIDKFDFLVMLCAFFGVIFLSVQNGLAIAVGLSLFKILMQVTRPKMVIMGNIPGTDIYRDLHHYKEAQRIPGFLVLSIESPVNFANSNYLTERTSRWIEECEEEEAQEKHSSLQFLILEMSAVSGVDTNGVSFFKELKKTTAKKDIELVFVNPLSEVVEKLQRADEQKEFMRPEFLFLTVAEAVASLSLKGPSLSNV

SEQ ID NO: 39040 - protein, 499 aa, Arabidopsis thaliana
  peptide (1)..(499): Ceres Seq. ID no. 12562145
MLRQQVSPVDDPVLFLQLAFSSTFFAGLFQASLGILRLGFIIDFLSKATLIGFMGGAAIIVSLQQLKGLLGITHFTKHMSVVPVLSSVFQHTNEWSWQTIVMGVCFLLFLLSTRHLSMKKPKLFWVSAGAPLLSVIVSTLLVFVFRAERHGISVIGKLPEGLNPPSWNMLQFHGSHLALVAKTGLVTGIVSLTEGIAVGRTFAALKNYHVDGNKEMIAIGLMNVVGSATSCYVTTGAFSRSAVNNNAGAKTAVSNIVMSVTVMVTLLFLMPLFEYTPNVVLGAIIVTAVIGLIDLPAACHIWKIDKFDFLVMLCAFFGVIFLSVQNGLAIAVGLSLFKILMQVTRPKMVIMGNIPGTDIYRDLHHYKEAQRIPGFLVLSIESPVNFANSNYLTERTSRWIEECEEEEAQEKHSSLQFLILEMSAVSGVDTNGVSFFKELKKTTAKKDIELVFVNPLSEVVEKLQRADEQKEFMRPEFLFLTVAEAVASLSLKGPSLSNV

SEQ ID NO: 39041 - protein, 446 aa, Arabidopsis thaliana
  peptide (1)..(446): Ceres Seq. ID no. 12562146
MGGAAIIVSLQQLKGLLGITHFTKHMSVVPVLSSVFQHTNEWSWQTIVMGVCFLLFLLSTRHLSMKKPKLFWVSAGAPLLSVIVSTLLVFVFRAERHGISVIGKLPEGLNPPSWNMLQFHGSHLALVAKTGLVTGIVSLTEGIAVGRTFAALKNYHVDGNKEMIAIGLMNVVGSATSCYVTTGAFSRSAVNNNAGAKTAVSNIVMSVTVMVTLLFLMPLFEYTPNVVLGAIIVTAVIGLIDLPAACHIWKIDKFDFLVMLCAFFGVIFLSVQNGLAIAVGLSLFKILMQVTRPKMVIMGNIPGTDIYRDLHHYKEAQRIPGFLVLSIESPVNFANSNYLTERTSRWIEECEEEEAQEKHSSLQFLILEMSAVSGVDTNGVSFFKELKKTTAKKDIELVFVNPLSEVVEKLQRADEQKEFMRPEFLFLTVAEAVASLSLKGPSLSNV

SEQ ID NO: 39042 - DNA, 1795 bp, Arabidopsis thaliana
  misc_feature (1)..(1795): Ceres Seq. ID no. 12579714
  misc_feature (1)..(1795): Ortholog of  Ceres SEQ ID NO 14316451 as cited in SEQ ID NO 57956
  misc_feature (1)..(1795): Ortholog of  Ceres SEQ ID NO 15224799 as cited in SEQ ID NO 0
aacatcctaatcgaaaaaacaatctatcttttgggtccctaaaaaagctccttcgtttatcttgttttctaagttatctttttgtatgagtttcaaagcttatcattatctcactcttcttccatagctatgactactttaacgaagattcaagtgtacccacaagtcttggagcaccgtctcttcttcagagatccgatacgggtcgggtcaagattgacttgtagagaacgtagtaatagggtttatgtgcatcggtgtgagaaaaaagttgaaagaaagagaaaagttgagaaatttaagggaaatgggtcgtgggattctttgaaatctgggtttttagggtttagtaaattagggttcttgtctaaagatgagtataatcagaaagttgaaaacttggagatggttttctcttcggttgctgttcaaattgcgagatacattgtgacgatgacaagtactggagctattcttttgattgggtttcaattatcaggtggagatagttcgatgaactcattggtttggtatagttggcttggtggaattatcattggaaccatgactggtgctaacatggttttggaagatcattatcgagccggtccacggaatgttgttataaccggaagcactaggggactagggaaagctcttgctagagagtttcttctctctggagacagagtcattgtcacatctcgcagttctgaatctgttgatatgactgtcaaagagctagagcaaaatctcaaagagattatgagtaacgctagcgagtcagctagaaagaaactgagtgatgctaaggtagttggtattgcctgtgatgtttgcaaacccgaagacgttgagaagctgtcgaatttcgctgtaaaagagcttggttccatcaacatatggataaacaatgctggtactaacaaaggttttagaccgctactcgagttcacggaagaagatatcacacagattgtctccacaaatttgattggatcaattctatgtacacgaggggctatggatgtgatgagcagacagcacagtggtggacacatctttaacatggatggtgctggctctggaggttcaagtactcctctcactgccgtatatggttcaacaaaatgtggacttaggcagtttcatgggtctatagtgaaagaaagccaaaaaacaaacgttggccttcacactgcatcccctggcatggttctgacagaacttcttctcagtggttcgagcattaaaaacaagcagatgtttaacataatctgtgagcttcctgagacagtagctagaactttggtaccacgaatgcgagttgtgaaaggttcgggaaaagccgtcaattacctaactcctcctcggatattgttagctattgtcacttcctggctaaggagaggccgatggtttgatgaccaaggacgggcgttatatgcagcagaagcagatagactaaggaactgggcagagaacaggacgaggttgtcgttaacagacgcgatggagatgtatacagagaatacttgggtctctgttttctctctttctgttgtttgcgctttcatcatcttacaaagcacaacacctagctcttttccaggcacataacaaacatcttcctcggatgtgttttaagaaaattgtaaacgtacatgttatgtataaaaaacatatatataacagaaccgatttgttcatgtaaacacttcttatagttgtagaatgtgtcgttgttgaaaacaatgaaaaaatagattgtaataaacttttatcagattgtagt

SEQ ID NO: 39043 - protein, 496 aa, Arabidopsis thaliana
  peptide (1)..(496): Ceres Seq. ID no. 12579715
MTTLTKIQVYPQVLEHRLFFRDPIRVGSRLTCRERSNRVYVHRCEKKVERKRKVEKFKGNGSWDSLKSGFLGFSKLGFLSKDEYNQKVENLEMVFSSVAVQIARYIVTMTSTGAILLIGFQLSGGDSSMNSLVWYSWLGGIIIGTMTGANMVLEDHYRAGPRNVVITGSTRGLGKALAREFLLSGDRVIVTSRSSESVDMTVKELEQNLKEIMSNASESARKKLSDAKVVGIACDVCKPEDVEKLSNFAVKELGSINIWINNAGTNKGFRPLLEFTEEDITQIVSTNLIGSILCTRGAMDVMSRQHSGGHIFNMDGAGSGGSSTPLTAVYGSTKCGLRQFHGSIVKESQKTNVGLHTASPGMVLTELLLSGSSIKNKQMFNIICELPETVARTLVPRMRVVKGSGKAVNYLTPPRILLAIVTSWLRRGRWFDDQGRALYAAEADRLRNWAENRTRLSLTDAMEMYTENTWVSVFSLSVVCAFIILQSTTPSSFPGT

SEQ ID NO: 39044 - protein, 404 aa, Arabidopsis thaliana
  peptide (1)..(404): Ceres Seq. ID no. 12579716
MVFSSVAVQIARYIVTMTSTGAILLIGFQLSGGDSSMNSLVWYSWLGGIIIGTMTGANMVLEDHYRAGPRNVVITGSTRGLGKALAREFLLSGDRVIVTSRSSESVDMTVKELEQNLKEIMSNASESARKKLSDAKVVGIACDVCKPEDVEKLSNFAVKELGSINIWINNAGTNKGFRPLLEFTEEDITQIVSTNLIGSILCTRGAMDVMSRQHSGGHIFNMDGAGSGGSSTPLTAVYGSTKCGLRQFHGSIVKESQKTNVGLHTASPGMVLTELLLSGSSIKNKQMFNIICELPETVARTLVPRMRVVKGSGKAVNYLTPPRILLAIVTSWLRRGRWFDDQGRALYAAEADRLRNWAENRTRLSLTDAMEMYTENTWVSVFSLSVVCAFIILQSTTPSSFPGT

SEQ ID NO: 39045 - protein, 388 aa, Arabidopsis thaliana
  peptide (1)..(388): Ceres Seq. ID no. 12579717
MTSTGAILLIGFQLSGGDSSMNSLVWYSWLGGIIIGTMTGANMVLEDHYRAGPRNVVITGSTRGLGKALAREFLLSGDRVIVTSRSSESVDMTVKELEQNLKEIMSNASESARKKLSDAKVVGIACDVCKPEDVEKLSNFAVKELGSINIWINNAGTNKGFRPLLEFTEEDITQIVSTNLIGSILCTRGAMDVMSRQHSGGHIFNMDGAGSGGSSTPLTAVYGSTKCGLRQFHGSIVKESQKTNVGLHTASPGMVLTELLLSGSSIKNKQMFNIICELPETVARTLVPRMRVVKGSGKAVNYLTPPRILLAIVTSWLRRGRWFDDQGRALYAAEADRLRNWAENRTRLSLTDAMEMYTENTWVSVFSLSVVCAFIILQSTTPSSFPGT

SEQ ID NO: 39046 - DNA, 1399 bp, Arabidopsis thaliana
  misc_feature (1)..(1399): Ceres Seq. ID no. 12423140
  misc_feature (1)..(1399): Ortholog of  Ceres SEQ ID NO 14311934 as cited in SEQ ID NO 51605
  misc_feature (1)..(1399): Ortholog of  Ceres SEQ ID NO 13598313 as cited in SEQ ID NO 68293
agataaactgatattattgtctttcttccgctcctttgtctctctatctctttctcacaattagattctgtgcttcttctgcgatcaactaagatccgatccgcgagcgtttcagacttcgatcagatccgattaagagaagcaaatcgggtcgggtatgactcgtcgatgttctcactgcaatcacaatggccacaactctcggacttgtcccaatcgcggcgtgaagctctttggtgttcggctcaccgaaggttcgatccggaaaagtgcaagtatgggtaatcttagccattacacgggttctggatcgggtgggcatggaaccgggtccaacactccgggttctccgggtgatgtccctgaccatgtcgctggtgatggttacgcttctgaggatttcgttgctggctcttcctctagccgcgagagaaagaaaggaactccatggacagaggaagaacacaggatgttcttattaggtttacagaagctgggtaaaggtgattggagaggtatctcaagaaactatgtgaccactaggacacctacacaagttgctagccatgctcagaagtatttcatcagacaatccaatgtctctcgtcgcaaaagacgttctagtctctttgatatggttcctgatgaggttggagatattcccatggatttgcaagaaccagaggaagataatattcctgtggaaactgaaatgcaaggtgctgactctattcatcagacacttgctcctagctcacttcacgcaccgtcaatcttggaaatcgaagaatgtgaatcaatggactccacaaactctaccaccggggaaccaaccgcaactgccgctgctgcttcttcttcttccagactagaagaaaccacacaactgcaatcacaactgcaaccgcagccgcaactacctggctcattccccatactatatccgacctacttttcaccatattacccgtttccattcccaatatggcctgctggttatgttcctgaaccacccaagaaagaggaaactcatgaaattctcagaccaactgctgtgcactcgaaagctcctatcaatgttgacgagcttcttggtatgtctaagctcagccttgcagagtccaacaaacatggagaatccgatcagtctctttcattgaagctaggtggcgggtcatcttcaagacaatcagcatttcacccgaatcctagctctgatagttcagacatcaaaagcgtgatacacgctttataaaagacctgaggaagtgatggtctaaaatgggatctggtttggggtttacaggttagttgttggtcacagtaacttaaataagtttttctttgttaggttgtttaacttgggtaggatgttttagttcagctttgatcattaggg

SEQ ID NO: 39047 - protein, 365 aa, Arabidopsis thaliana
  peptide (1)..(365): Ceres Seq. ID no. 12423141
MTRRCSHCNHNGHNSRTCPNRGVKLFGVRLTEGSIRKSASMGNLSHYTGSGSGGHGTGSNTPGSPGDVPDHVAGDGYASEDFVAGSSSSRERKKGTPWTEEEHRMFLLGLQKLGKGDWRGISRNYVTTRTPTQVASHAQKYFIRQSNVSRRKRRSSLFDMVPDEVGDIPMDLQEPEEDNIPVETEMQGADSIHQTLAPSSLHAPSILEIEECESMDSTNSTTGEPTATAAAASSSSRLEETTQLQSQLQPQPQLPGSFPILYPTYFSPYYPFPFPIWPAGYVPEPPKKEETHEILRPTAVHSKAPINVDELLGMSKLSLAESNKHGESDQSLSLKLGGGSSSRQSAFHPNPSSDSSDIKSVIHAL

SEQ ID NO: 39048 - protein, 325 aa, Arabidopsis thaliana
  peptide (1)..(325): Ceres Seq. ID no. 12423142
MGNLSHYTGSGSGGHGTGSNTPGSPGDVPDHVAGDGYASEDFVAGSSSSRERKKGTPWTEEEHRMFLLGLQKLGKGDWRGISRNYVTTRTPTQVASHAQKYFIRQSNVSRRKRRSSLFDMVPDEVGDIPMDLQEPEEDNIPVETEMQGADSIHQTLAPSSLHAPSILEIEECESMDSTNSTTGEPTATAAAASSSSRLEETTQLQSQLQPQPQLPGSFPILYPTYFSPYYPFPFPIWPAGYVPEPPKKEETHEILRPTAVHSKAPINVDELLGMSKLSLAESNKHGESDQSLSLKLGGGSSSRQSAFHPNPSSDSSDIKSVIHAL

SEQ ID NO: 39049 - protein, 261 aa, Arabidopsis thaliana
  peptide (1)..(261): Ceres Seq. ID no. 12423143
MFLLGLQKLGKGDWRGISRNYVTTRTPTQVASHAQKYFIRQSNVSRRKRRSSLFDMVPDEVGDIPMDLQEPEEDNIPVETEMQGADSIHQTLAPSSLHAPSILEIEECESMDSTNSTTGEPTATAAAASSSSRLEETTQLQSQLQPQPQLPGSFPILYPTYFSPYYPFPFPIWPAGYVPEPPKKEETHEILRPTAVHSKAPINVDELLGMSKLSLAESNKHGESDQSLSLKLGGGSSSRQSAFHPNPSSDSSDIKSVIHAL

SEQ ID NO: 39050 - DNA, 2727 bp, Arabidopsis thaliana
  misc_feature (1)..(2727): Ceres Seq. ID no. 13574992
  misc_feature (1)..(2727): Ortholog of  Ceres SEQ ID NO 15176095 as cited in SEQ ID NO 59699
atagtactaggaatattttcgcagaagaaatatccaaagttgatgatttatctgagtaaactaacaattataaaagttattaatcaaaaatgaaaaaaagaagtaaagaatgatattttcctttataattatgagagcaccaatgtcatgtcggtaaaactccccccactcacttcactcgctccactccttcaatggcttcctccaccatcgttcttcttctcttcctctcttttccgtttatctctttcgcagcttctcaggccgcgaagactttcattttccgtatcgatggtggatctatgccttctattttcccgacgcactaccattggtatagcaccgagttcgccgaagaatctcgaatcgtccatgtttaccacacagtcttccatggtttctccgccgttgttactccagatgaagcagataatctccgtaaccacccagcagttcttgctgttttcgaagaccgacgtcgagagcttcacaccacacgttctcctcaatttcttggtttacaaaaccaaaaaggactatggtcagaatctgattacggatcagacgtaatcattggcgtttttgacaccggaatttggccggagcggaggagtttctcagatcttaacctcggtccaattccaaaaaggtggagaggcgtttgcgaatccggagccagattcagtcctcggaactgtaaccgtaaaattatcggagcaagattcttcgctaagggacaacaagccgctgtaatcggaggaatcaacaaaaccgttgagtttctatctcctcgtgacgccgatggacacggtactcacacttcctcaaccgccgctggccgtcacgcttttaaagcgagtatgtccggttacgcctccggtgtagccaaaggtgttgctccaaaagctcgtatcgccgcctacaaagtctgttggaaagattccggttgtctcgattccgatattctcgccgcctttgatgccgctgttagagacggtgtcgacgttatatcgatctcaatcggtggtggagacgggattacttcgccgtattacctcgatccaatcgctataggctcgtacggcgccgcgtcgaaaggaatcttcgtctcttcctctgccggaaacgaaggacctaacggtatgtcagttacgaacctcgcgccgtgggtaaccaccgttggtgctagtacaatcgatcggaatttcccagcggatgctattctcggcgacggacatcgtctcagaggagtgtctctttacgctggagtacctttaaacggtcgtatgtttccggtggtttatcccggtaaatcgggaatgtcatcagcgtctctatgtatggagaacacgcttgatccgaagcaagtgaggggtaaaatagtaatctgcgatagaggaagcagtccacgcgtagccaaaggattggttgtgaagaaagcaggtggtgtcggaatgattctcgctaatggagcatctaacggtgaaggattagtcggagatgctcatcttattccagcctgtgccgttggatcaaacgaaggagatagaatcaaagcatatgcttcttcacatccgaatccaattgcttcaattgatttcagaggaactatagttgggattaaaccggctccggttattgcttctttctccggtagaggaccaaacggtttaagcccggagattcttaaaccggatttgattgctcccggagttaacatcctcgccgcatggacagacgctgttggacctacaggtttgccgtcagatccaaggaaaacggaattcaacattctctccggtacttcaatggcatgtcctcacgttagtggtgcggcggcgcttctcaaatccgctcatccagattggagccctgccgtgatacgatcggcaatgatgacaacgactaacctcgtcgataactctaaccgctcgttgatcgatgaatccaccgggaaatcggctacgccttatgattacgggtcgggtcatttaaatttgggccgggctatgaatccgggtcttgtctacgatataactaatgatgattacattacgtttctttgctccatcgggtacggaccaaagacgatccaagtgataacaagaacaccggtgagatgtccgacgaccaggaaaccgtctcccgggaatttgaattatccttcgatcacggcggtgtttcctactaatagaagaggattggtgagtaaaactgttataaggacggcgacgaatgtcgggcaggctgaggcggtttatcgggcgaggatagagtcgccgagaggagtgacggtgacagtgaaaccacctaggcttgtgtttacttcggccgttaagagacggagctatgcggttacagtgacggttaatacaaggaatgttgtgttgggagaaacaggtgctgtgtttgggtcagtcacgtggtttgatggtgggaaacacgtggttcggagccccatcgtggtgacccaaatggatacgttgtgattccgggtcgggtttgggatgatcatgcggtcatgactcatgatcgtaaaccctttatgtggtgtagcaataactgtagaattttgagttagttggcttttatttataatcttaattatgttctgtgtttttcttattcctaatgagattttatcctatcttttatctatagttaagcaaaatgagaggaaacaatgtttaatacttgtattcattataaaaaagaaattatgaaggc

SEQ ID NO: 39051 - protein, 764 aa, Arabidopsis thaliana
  peptide (1)..(764): Ceres Seq. ID no. 13574993
MASSTIVLLLFLSFPFISFAASQAAKTFIFRIDGGSMPSIFPTHYHWYSTEFAEESRIVHVYHTVFHGFSAVVTPDEADNLRNHPAVLAVFEDRRRELHTTRSPQFLGLQNQKGLWSESDYGSDVIIGVFDTGIWPERRSFSDLNLGPIPKRWRGVCESGARFSPRNCNRKIIGARFFAKGQQAAVIGGINKTVEFLSPRDADGHGTHTSSTAAGRHAFKASMSGYASGVAKGVAPKARIAAYKVCWKDSGCLDSDILAAFDAAVRDGVDVISISIGGGDGITSPYYLDPIAIGSYGAASKGIFVSSSAGNEGPNGMSVTNLAPWVTTVGASTIDRNFPADAILGDGHRLRGVSLYAGVPLNGRMFPVVYPGKSGMSSASLCMENTLDPKQVRGKIVICDRGSSPRVAKGLVVKKAGGVGMILANGASNGEGLVGDAHLIPACAVGSNEGDRIKAYASSHPNPIASIDFRGTIVGIKPAPVIASFSGRGPNGLSPEILKPDLIAPGVNILAAWTDAVGPTGLPSDPRKTEFNILSGTSMACPHVSGAAALLKSAHPDWSPAVIRSAMMTTTNLVDNSNRSLIDESTGKSATPYDYGSGHLNLGRAMNPGLVYDITNDDYITFLCSIGYGPKTIQVITRTPVRCPTTRKPSPGNLNYPSITAVFPTNRRGLVSKTVIRTATNVGQAEAVYRARIESPRGVTVTVKPPRLVFTSAVKRRSYAVTVTVNTRNVVLGETGAVFGSVTWFDGGKHVVRSPIVVTQMDTL

SEQ ID NO: 39052 - protein, 728 aa, Arabidopsis thaliana
  peptide (1)..(728): Ceres Seq. ID no. 13574994
MPSIFPTHYHWYSTEFAEESRIVHVYHTVFHGFSAVVTPDEADNLRNHPAVLAVFEDRRRELHTTRSPQFLGLQNQKGLWSESDYGSDVIIGVFDTGIWPERRSFSDLNLGPIPKRWRGVCESGARFSPRNCNRKIIGARFFAKGQQAAVIGGINKTVEFLSPRDADGHGTHTSSTAAGRHAFKASMSGYASGVAKGVAPKARIAAYKVCWKDSGCLDSDILAAFDAAVRDGVDVISISIGGGDGITSPYYLDPIAIGSYGAASKGIFVSSSAGNEGPNGMSVTNLAPWVTTVGASTIDRNFPADAILGDGHRLRGVSLYAGVPLNGRMFPVVYPGKSGMSSASLCMENTLDPKQVRGKIVICDRGSSPRVAKGLVVKKAGGVGMILANGASNGEGLVGDAHLIPACAVGSNEGDRIKAYASSHPNPIASIDFRGTIVGIKPAPVIASFSGRGPNGLSPEILKPDLIAPGVNILAAWTDAVGPTGLPSDPRKTEFNILSGTSMACPHVSGAAALLKSAHPDWSPAVIRSAMMTTTNLVDNSNRSLIDESTGKSATPYDYGSGHLNLGRAMNPGLVYDITNDDYITFLCSIGYGPKTIQVITRTPVRCPTTRKPSPGNLNYPSITAVFPTNRRGLVSKTVIRTATNVGQAEAVYRARIESPRGVTVTVKPPRLVFTSAVKRRSYAVTVTVNTRNVVLGETGAVFGSVTWFDGGKHVVRSPIVVTQMDTL

SEQ ID NO: 39053 - protein, 542 aa, Arabidopsis thaliana
  peptide (1)..(542): Ceres Seq. ID no. 13574995
MSGYASGVAKGVAPKARIAAYKVCWKDSGCLDSDILAAFDAAVRDGVDVISISIGGGDGITSPYYLDPIAIGSYGAASKGIFVSSSAGNEGPNGMSVTNLAPWVTTVGASTIDRNFPADAILGDGHRLRGVSLYAGVPLNGRMFPVVYPGKSGMSSASLCMENTLDPKQVRGKIVICDRGSSPRVAKGLVVKKAGGVGMILANGASNGEGLVGDAHLIPACAVGSNEGDRIKAYASSHPNPIASIDFRGTIVGIKPAPVIASFSGRGPNGLSPEILKPDLIAPGVNILAAWTDAVGPTGLPSDPRKTEFNILSGTSMACPHVSGAAALLKSAHPDWSPAVIRSAMMTTTNLVDNSNRSLIDESTGKSATPYDYGSGHLNLGRAMNPGLVYDITNDDYITFLCSIGYGPKTIQVITRTPVRCPTTRKPSPGNLNYPSITAVFPTNRRGLVSKTVIRTATNVGQAEAVYRARIESPRGVTVTVKPPRLVFTSAVKRRSYAVTVTVNTRNVVLGETGAVFGSVTWFDGGKHVVRSPIVVTQMDTL

SEQ ID NO: 39054 - DNA, 739 bp, Arabidopsis thaliana
  misc_feature (1)..(739): Ceres Seq. ID no. 12482372
  misc_feature (1)..(739): Ortholog of  Ceres SEQ ID NO 15174108 as cited in SEQ ID NO 0
acataatcatcgctattctctctctctctctctctctctctctctctcgctctcatatttgcagttgacaattcgttctctttgggaaattagagatgcaggcatcaagagcgcgactgtttaaagaatacaaagaggtacagcgagagaaagtagcagatcctgatattcaattgatctgtgacgataccaacatattcaaatggaccgctcttatcaaaggaccttcggagactccttacgaaggcggtgtttttcagcttgctttttctgttcctgaaccttatcctttgcaacctcctcaagttcgattcttgaccaagatattccatcctaatgttcatttcaagacaggagaaatatgtctcgacattttgaagaatgcttggagtcctgcttggacgcttcagtctgtgtgtagagctatcatagcattgatggctcatcctgagccggacagtcctcttaactgcgactcagggaatcttctaagatctggtgatgtgagagggttcaattcaatggcacaaatgtatacacgcctcgccgctatgcctaagaaaggatgatgatgatgatgatcctcttgctttttttttgtttttttttttgaaatttgtaatgatattgatttgcgagagtgaatacattattaacgagaagaagatgattcttctttattagttcacaatattacaatctgtcaagttgtcatatcttcttgtttaaggaatttgtc

SEQ ID NO: 39055 - protein, 157 aa, Arabidopsis thaliana
  peptide (1)..(157): Ceres Seq. ID no. 12482373
MQASRARLFKEYKEVQREKVADPDIQLICDDTNIFKWTALIKGPSETPYEGGVFQLAFSVPEPYPLQPPQVRFLTKIFHPNVHFKTGEICLDILKNAWSPAWTLQSVCRAIIALMAHPEPDSPLNCDSGNLLRSGDVRGFNSMAQMYTRLAAMPKKG

SEQ ID NO: 39056 - DNA, 894 bp, Arabidopsis thaliana
  misc_feature (1)..(894): Ceres Seq. ID no. 12423070
  misc_feature (1)..(894): Ortholog of  Ceres SEQ ID NO 14314823 as cited in SEQ ID NO 52565
  misc_feature (1)..(894): Ortholog of  Ceres SEQ ID NO 14307324 as cited in SEQ ID NO 54131
actagttaattaatgtgtgatattaattggcaggtgagtgttcctccgagtagtttgttcaagacggtgacggtcagatgcggccactgttcgaaccttttgtcggtgaccgtgagcatgagagctcttcttcttccatccgtttccaaccttggccattcctttttacctccccctcctcctcctcctcctccaaatcttttggaggaaatgcgaagcggagggcagaatataaacatgaacatgatgatgagccatcacgcttcagctcaccacccgaacgagcatttggttatggcgactcgcaacggaagatcagtggatcatctacaagagatgcctcggccaccaccagccaatagacccccagagaagcgacaaagagtaccatctgcatacaaccgattcatcaaagaggagatccaacgtataaaggcaggcaaccctgatatcagccacagagaagccttcagtgctgctgccaaaaactgggctcatttccctcacatacactttggactcatggctgaccatcctcccacgaagaaggctaacgtgcgccaacaggaaggagaggatgggatgatgggaagagaagggttttacggttcagctgccaacgttggggtggcccataactagctacgaagactttcccaatcttttgtaatcttcaaaatgtggttactttcagctcaaacttaactttcttattactattttatgatatttgataatcgatcaggagaccttttttttttttcttaaagaaattttcggaactactagaattttctcttggaattgaaaatatattgttttctcagttgccgtgttatatatttaatatcaaaagcatgcagtagctaagctagctaggctttaccatacgtt

SEQ ID NO: 39057 - protein, 209 aa, Arabidopsis thaliana
  peptide (1)..(209): Ceres Seq. ID no. 12423071
MCDINWQVSVPPSSLFKTVTVRCGHCSNLLSVTVSMRALLLPSVSNLGHSFLPPPPPPPPPNLLEEMRSGGQNINMNMMMSHHASAHHPNEHLVMATRNGRSVDHLQEMPRPPPANRPPEKRQRVPSAYNRFIKEEIQRIKAGNPDISHREAFSAAAKNWAHFPHIHFGLMADHPPTKKANVRQQEGEDGMMGREGFYGSAANVGVAHN

SEQ ID NO: 39058 - protein, 174 aa, Arabidopsis thaliana
  peptide (1)..(174): Ceres Seq. ID no. 12423072
MRALLLPSVSNLGHSFLPPPPPPPPPNLLEEMRSGGQNINMNMMMSHHASAHHPNEHLVMATRNGRSVDHLQEMPRPPPANRPPEKRQRVPSAYNRFIKEEIQRIKAGNPDISHREAFSAAAKNWAHFPHIHFGLMADHPPTKKANVRQQEGEDGMMGREGFYGSAANVGVAHN

SEQ ID NO: 39059 - protein, 143 aa, Arabidopsis thaliana
  peptide (1)..(143): Ceres Seq. ID no. 12423073
MRSGGQNINMNMMMSHHASAHHPNEHLVMATRNGRSVDHLQEMPRPPPANRPPEKRQRVPSAYNRFIKEEIQRIKAGNPDISHREAFSAAAKNWAHFPHIHFGLMADHPPTKKANVRQQEGEDGMMGREGFYGSAANVGVAHN

SEQ ID NO: 39060 - DNA, 1112 bp, Arabidopsis thaliana
  misc_feature (1)..(1112): Ceres Seq. ID no. 12328337
  misc_feature (1)..(1112): Ortholog of  Ceres SEQ ID NO 14316367 as cited in SEQ ID NO 57626
  misc_feature (1)..(1112): Ortholog of  Ceres SEQ ID NO 14315039 as cited in SEQ ID NO 57668
  misc_feature (1)..(1112): Ortholog of  Ceres SEQ ID NO 13664189 as cited in SEQ ID NO 66834
  misc_feature (1)..(1112): Ortholog of  Ceres SEQ ID NO 13654321 as cited in SEQ ID NO 67850
aaacaatggatgagttataggtttggttaagacttgaaaagtcattgatcacggcttttgtccattattccgtgtttaaagtaatttacattctcttttaagatctctcagtccaaagacaatgcaaacaataataatttctccacttgtttctcatcgtctctgtcttgctcgtgctgttccttgcaaccgtcttctcaacaaccaccaccgtgctcctccttcgatccgcctctcaaaccaccgttcaaccacctcactccgcctcttctcctccgccgcagccagtcgggacagtgaaatggcgactgaagatgtgcaagatcccagaatcgctaagattgcctcttccattagagtcatccccgacttccctaaaccaggaatcatgtttcaggacataacgacgcttcttctcgacactgaggcctttaaggatactattgctttgtttgttgatagatacaaagataaaggcatatctgttgttgcaggtgttgaagctagaggtttcatttttggccctcctattgcgttggctattggtgccaaatttgttcccatgaggaagcccaagaagctacctgggaaggttatttcggaggagtattcgttggagtatggaacagatacgattgagatgcacgtaggtgcagtagagcctggtgagcgtgctattattattgatgacctcattgccacgggtgggactctcgctgctgcaatccgactacttgaacgagtaggagtgaagattgttgaatgtgcttgcgtaattgagttaccagagcttaagggaaaggagaaactaggagagacgtcgctatttgttcttgtaaagtcggctgcttaacaagaaactggaagagaaggttattggatcgagtgttgatgctatttttcatgtatggtgagacattttgcgtgggatttgatccttgttgtttcaacttatcataattggttcagactagaaaatggcatttgaatgtcaggattcgattgcagtttcctattgttccacttaaaatccccgattaataaggtgttatgggttttatttatagaatcaagttgtaatagtagactccaacaggggctaaagtcttggt

SEQ ID NO: 39061 - protein, 243 aa, Arabidopsis thaliana
  peptide (1)..(243): Ceres Seq. ID no. 12328338
MQTIIISPLVSHRLCLARAVPCNRLLNNHHRAPPSIRLSNHRSTTSLRLFSSAAASRDSEMATEDVQDPRIAKIASSIRVIPDFPKPGIMFQDITTLLLDTEAFKDTIALFVDRYKDKGISVVAGVEARGFIFGPPIALAIGAKFVPMRKPKKLPGKVISEEYSLEYGTDTIEMHVGAVEPGERAIIIDDLIATGGTLAAAIRLLERVGVKIVECACVIELPELKGKEKLGETSLFVLVKSAA

SEQ ID NO: 39062 - protein, 183 aa, Arabidopsis thaliana; identical to SEQ ID NO: 26647
  peptide (1)..(183): Ceres Seq. ID no. 12328339

SEQ ID NO: 39063 - protein, 154 aa, Arabidopsis thaliana; identical to SEQ ID NO: 26648
  peptide (1)..(154): Ceres Seq. ID no. 12328340

SEQ ID NO: 39064 - DNA, 807 bp, Arabidopsis thaliana
  misc_feature (1)..(807): Ceres Seq. ID no. 12338926
  misc_feature (1)..(807): Ortholog of  Ceres SEQ ID NO 14301742 as cited in SEQ ID NO 54857
actgcaaacgcttttgagacaaagttcgtcacttcgatctgaattataacacttcgtgcgagaatcgaaataatcgaaggttcaagatgggttggatcggagaaactgtagattctatcaaatctattcagattcgtcagcttttcactcaggccatcagtctagggatgattgtcacatctgctttgatcatatggaaagctttgatgtgtgtcactggaagcgaatctccggtggtggttgttctctctggaagcatggaacccggttttaagaggggggatatattgttcttgcacatgagtaaagacccgattcgagcaggtgaaattgttgttttcaatgttgatggtcgtgatattcccattgtccatcgtgtcattaaggttcacgaaagggaaaatacaggagaagttgatgttctaacgaaaggtgacaataactatggagatgacagacttctgtatgctgaaggacagctttggcttcatcgacatcatataatgggtcgtgctgtcgggttcttgccttatgttggatgggtgactattatcatgacagaaaagcctatcatcaagtatattctcataggtgcattgggtttactcgttataacgtcaaaggattgagtcttttggaaaggagtggactctgcagagtgcaaacccttaaagtcttgttatttcaatggaaaaaaagaaaaagacaaacaatttaaatactcgtttttgtggttagataattttaaagagtagaatcttctttttcctgtcaaactaaattataaacagtggaaagttaattttt

SEQ ID NO: 39065 - protein, 180 aa, Arabidopsis thaliana
  peptide (1)..(180): Ceres Seq. ID no. 12338927
MGWIGETVDSIKSIQIRQLFTQAISLGMIVTSALIIWKALMCVTGSESPVVVVLSGSMEPGFKRGDILFLHMSKDPIRAGEIVVFNVDGRDIPIVHRVIKVHERENTGEVDVLTKGDNNYGDDRLLYAEGQLWLHRHHIMGRAVGFLPYVGWVTIIMTEKPIIKYILIGALGLLVITSKD

SEQ ID NO: 39066 - protein, 153 aa, Arabidopsis thaliana
  peptide (1)..(153): Ceres Seq. ID no. 12338929
MIVTSALIIWKALMCVTGSESPVVVVLSGSMEPGFKRGDILFLHMSKDPIRAGEIVVFNVDGRDIPIVHRVIKVHERENTGEVDVLTKGDNNYGDDRLLYAEGQLWLHRHHIMGRAVGFLPYVGWVTIIMTEKPIIKYILIGALGLLVITSKD

SEQ ID NO: 39067 - protein, 140 aa, Arabidopsis thaliana
  peptide (1)..(140): Ceres Seq. ID no. 12338930
MCVTGSESPVVVVLSGSMEPGFKRGDILFLHMSKDPIRAGEIVVFNVDGRDIPIVHRVIKVHERENTGEVDVLTKGDNNYGDDRLLYAEGQLWLHRHHIMGRAVGFLPYVGWVTIIMTEKPIIKYILIGALGLLVITSKD

SEQ ID NO: 39068 - DNA, 928 bp, Arabidopsis thaliana
  misc_feature (1)..(928): Ceres Seq. ID no. 13487201
  misc_feature (1)..(928): Ortholog of  Ceres SEQ ID NO 13594828 as cited in SEQ ID NO 56431
  misc_feature (1)..(928): Ortholog of  Ceres SEQ ID NO 14316363 as cited in SEQ ID NO 57222
  misc_feature (1)..(928): Ortholog of  Ceres SEQ ID NO 15177754 as cited in SEQ ID NO 57945
  misc_feature (1)..(928): Ortholog of  Ceres SEQ ID NO 13594354 as cited in SEQ ID NO 58082
  misc_feature (1)..(928): Ortholog of  Ceres SEQ ID NO 14316408 as cited in SEQ ID NO 58228
  misc_feature (1)..(928): Ortholog of  Ceres SEQ ID NO 13528075 as cited in SEQ ID NO 60188
  misc_feature (1)..(928): Ortholog of  Ceres SEQ ID NO 13600483 as cited in SEQ ID NO 0
ataaatacgctttctacattttcggatcgttgaacaacatctctctctctctctctctaaacccattagagtaatttagctcctcatagattctcgagaagaacacttccatggcgactaaagtatatatcgtgtactactctatgtatggtcatgttgagaaattggctgaagaaataaggaaaggagctgcttctgttgaaggtgttgaagctaaactatggcaggtaccagagacgcttcacgaagaggcactctctaagatgagcgcaccaccaaagagtgaatccccaatcataaccccgaatgagctagctgaagctgatgggtttgtctttggtttcccaacaagatttggtatgatggctgctcagttcaaagcctttttggatgcaaccggtggactctggagggctcaggcactcgccggtaaaccagctggtatcttctacagcactggctctcaaggtggtggccaagaaaccacagcattgacggcaataactcagctggttcaccacgggatgttatttgtcccaatcggttacacatttggcgcgggaatgttcgaaatggagaatgtgaaaggtggaagcccatatggagctggaacatttgcaggagacggttcaaggcagccaacagagctggagctacagcaagcatttcaccaaggccagtacattgccagcatcaccaagaagctcaagggatctactgcttagagcttaaaaagattatggtatcaataagaaaaaaagaaaaaaacagtttggttctgcttttttttatattctttctctttgaatttgggggcttttgtgatttttcgggtttaattatcttaaaatacatgatattatttcacagcaataattcttatcttggttttacgtatagatgataatgtatgatttgtacttgtgtc

SEQ ID NO: 39069 - protein, 204 aa, Arabidopsis thaliana [sequence omitted]

SEQ ID NO: 39070 - protein, 193 aa, Arabidopsis thaliana
  peptide (1)..(193): Ceres Seq. ID no. 13487203
MYGHVEKLAEEIRKGAASVEGVEAKLWQVPETLHEEALSKMSAPPKSESPIITPNELAEADGFVFGFPTRFGMMAAQFKAFLDATGGLWRAQALAGKPAGIFYSTGSQGGGQETTALTAITQLVHHGMLFVPIGYTFGAGMFEMENVKGGSPYGAGTFAGDGSRQPTELELQQAFHQGQYIASITKKLKGSTA

SEQ ID NO: 39071 - protein, 153 aa, Arabidopsis thaliana
  peptide (1)..(153): Ceres Seq. ID no. 13487204
MSAPPKSESPIITPNELAEADGFVFGFPTRFGMMAAQFKAFLDATGGLWRAQALAGKPAGIFYSTGSQGGGQETTALTAITQLVHHGMLFVPIGYTFGAGMFEMENVKGGSPYGAGTFAGDGSRQPTELELQQAFHQGQYIASITKKLKGSTA

SEQ ID NO: 39072 - DNA, 1761 bp, Arabidopsis thaliana
  misc_feature (1)..(1761): Ceres Seq. ID no. 12328341
  misc_feature (1)..(1761): Ortholog of  Ceres SEQ ID NO 14316459 as cited in SEQ ID NO 57754
caacataatgtccattacaaacaacaacagcatcataaatctcatcacgacgaactttcttctctttctccgtcgattcaatcctccacttcccgattccttcctccgccgccggagaaaccttcacaacctccgtctcaaacctaaccatctcctcaatcccaaactccttagcgaaatctttcaaatacgccaaaacttcgccatgactcggaaacctcctcggatctctagacacaccggaacgaaccacgaacgggaaatctctgtatccggtactctctcgtgtaccgttgattcgtagagatctatagacgcttgaatgaacaacggatcgggtcgggtcaacacttaacggatccgattcgacttcatcggtgtagatccaggttcctccgacttgtttttgtttctcgaaaacgaccaccgagtgaccttctcgtcgaagctctcgtgccgctactagacctgcaggtccagcaccgataaccgccacgtggtgtgatctggttggtgataatgcaggtgccatttgtgtgttctttgattagaatctatgaatcacaatcacacacacttgttacaatttatgattacaatgtttttaataatcaatttggtgtgttagaaacttacacgaatctgttattacagacgtagattgccacgttttggttgatagagagaaatgcttttattatataacttgtgtcattgtatttcttctccaccgagacagtgaaacatcaatcaatatgagcaatcatcaaactgtgagatttcttttctctcatttaccattttgcccttccactttcttgatgattgtttgttttttttgtggacagaagcaggtattgaagcaattggagccatggtgtgaacttaaagataaagtggttcttgtgacaggtgcttcatctggtatagggagagagatctgtcttgatctatgcaaagctggttgtaagattgtagcagcagctcgtcgtgttgatcgtctcaactctctctgttctgaaatcaacagctttggtgcaatcggagtccaagccgcagctcttgagctagacgtttcatcagacgcagacactattcgaaaagcggttaaagaagcttgggaaatctttggaacgatcgatgttttgattaacaatgctggaatcagaggcaatgtcaagtctagtttggatttatcagaagaagaatgggacaaagtctttagaaccaacttgaccggatcttggttaatatccaaatacgtctgccttttgatgcgtgacgctaagcgcgggggctcggtgattaacgtctcgtcaatctctgggcttcatcgcggtttgttgcgcggtggactagcgtatgcttgttccaaaggtggtgttgacaccatgacaaggatgatggctattgagttagcggtttataatatcagagtgaactcgatcgcaccggggattttcaggtcagagatcacacaaggtcttttccagaaagagtggctcgagaaggttacggaaaagattgtaccattaaagatgcaacagactgtggatccggggcttacatctctcgttcgctatctcattcacgattcttctcaatatgtcaccgggaatacatacattgtcgattccggaactacactgcccggtgtgcccattttttcttctctttgaaaatcttagtcaaaatcttctgtgcttgtacatacaccgtgataagaatgatgtctttccaataaatggcagtactggcatt

SEQ ID NO: 39073 - protein, 307 aa, Arabidopsis thaliana
  peptide (1)..(307): Ceres Seq. ID no. 12328342
MSNHQTVRFLFSHLPFCPSTFLMIVCFFCGQKQVLKQLEPWCELKDKVVLVTGASSGIGREICLDLCKAGCKIVAAARRVDRLNSLCSEINSFGAIGVQAAALELDVSSDADTIRKAVKEAWEIFGTIDVLINNAGIRGNVKSSLDLSEEEWDKVFRTNLTGSWLISKYVCLLMRDAKRGGSVINVSSISGLHRGLLRGGLAYACSKGGVDTMTRMMAIELAVYNIRVNSIAPGIFRSEITQGLFQKEWLEKVTEKIVPLKMQQTVDPGLTSLVRYLIHDSSQYVTGNTYIVDSGTTLPGVPIFSSL

SEQ ID NO: 39074 - protein, 285 aa, Arabidopsis thaliana
  peptide (1)..(285): Ceres Seq. ID no. 12328343
MIVCFFCGQKQVLKQLEPWCELKDKVVLVTGASSGIGREICLDLCKAGCKIVAAARRVDRLNSLCSEINSFGAIGVQAAALELDVSSDADTIRKAVKEAWEIFGTIDVLINNAGIRGNVKSSLDLSEEEWDKVFRTNLTGSWLISKYVCLLMRDAKRGGSVINVSSISGLHRGLLRGGLAYACSKGGVDTMTRMMAIELAVYNIRVNSIAPGIFRSEITQGLFQKEWLEKVTEKIVPLKMQQTVDPGLTSLVRYLIHDSSQYVTGNTYIVDSGTTLPGVPIFSSL

SEQ ID NO: 39075 - DNA, 1216 bp, Arabidopsis thaliana
  misc_feature (1)..(1216): Ceres Seq. ID no. 13487632
  misc_feature (1)..(1216): Ortholog of  Ceres SEQ ID NO 13598387 as cited in SEQ ID NO 62757
  misc_feature (1)..(1216): Ortholog of  Ceres SEQ ID NO 13662984 as cited in SEQ ID NO 64419
aattttcaacaagcaaagttcatgatggggaataagcgaaatctcggatttgtgatcttcttctgggctctggtggttgcagtagtagccacggccatcgagcatcgtcgcaatgagaggactaaaggcgtcaatggtcttgacaagatcatcatccgcgaccgtcgtggccgatctgctgaggtttacttgtatggaggtcaagtcagttcttggaaaaatgagaatggagaggagttacttgttatgagtagcaaggctatattccagcctccaacaccgattcgtggaggaattccagtattgtttccgcaatacagtaacaccggtccacttccctcacatggatttgtaagacagaggttctgggaggttgagactaaaccacctcctttgccatcactttctactgctcatgttgacctgatcgtaagatcatccaatgaggatttgaagatctggccgcataagtttgagtatagactgagagtagcattgggacatgatggagatttgacgttaacatctcgtgttaagaatactgatacaaaaccatttaacttcacatttgctcttcacccctacttcgctgtttccaatatcagtgaaatccatgtcgaaggattacacaacttggattaccttgaccaacaaaagaacagaacacgtttcactgatcatgagaaggttataactttcaatgctcaacttgacaggttgtacctaagcactccagatcaactaagaatcgtggaccataagaaaaagaagactattgttgtacacaaggagggacaagttgatgccgtggtgtggaatccatgggataagaaagtatccgatttgggagttgaagactataagcgttttgtaacggtggaaagcgcggctgtcgcgaaaccgatcacagtgaaccccggcaaagaatggaaaggaatactccatgtttctgtggttccatcaaatcggaaagcttgaccctataaaagtcttgcattcatcatcctcatcctttaaaaaaaaaacttaaaactgtctttattaaagtatacttaatgttcccgagagacatcacatggtgaacacaaagttagttgggttccaaactggactcttgaccagttttattgttttgtaactttagcattcatgaataaaaaaagtgcgttaattacaataattgttaaatgtaattaaataaaagtgcgttaactac

SEQ ID NO: 39076 - protein, 325 aa, Arabidopsis thaliana
  peptide (1)..(325): Ceres Seq. ID no. 13487633
NFQQAKFMMGNKRNLGFVIFFWALVVAVVATAIEHRRNERTKGVNGLDKIIIRDRRGRSAEVYLYGGQVSSWKNENGEELLVMSSKAIFQPPTPIRGGIPVLFPQYSNTGPLPSHGFVRQRFWEVETKPPPLPSLSTAHVDLIVRSSNEDLKIWPHKFEYRLRVALGHDGDLTLTSRVKNTDTKPFNFTFALHPYFAVSNISEIHVEGLHNLDYLDQQKNRTRFTDHEKVITFNAQLDRLYLSTPDQLRIVDHKKKKTIVVHKEGQVDAVVWNPWDKKVSDLGVEDYKRFVTVESAAVAKPITVNPGKEWKGILHVSVVPSNRKA

SEQ ID NO: 39077 - protein, 318 aa, Arabidopsis thaliana
  peptide (1)..(318): Ceres Seq. ID no. 13487634
MMGNKRNLGFVIFFWALVVAVVATAIEHRRNERTKGVNGLDKIIIRDRRGRSAEVYLYGGQVSSWKNENGEELLVMSSKAIFQPPTPIRGGIPVLFPQYSNTGPLPSHGFVRQRFWEVETKPPPLPSLSTAHVDLIVRSSNEDLKIWPHKFEYRLRVALGHDGDLTLTSRVKNTDTKPFNFTFALHPYFAVSNISEIHVEGLHNLDYLDQQKNRTRFTDHEKVITFNAQLDRLYLSTPDQLRIVDHKKKKTIVVHKEGQVDAVVWNPWDKKVSDLGVEDYKRFVTVESAAVAKPITVNPGKEWKGILHVSVVPSNRKA

SEQ ID NO: 39078 - protein, 317 aa, Arabidopsis thaliana
  peptide (1)..(317): Ceres Seq. ID no. 13487635
MGNKRNLGFVIFFWALVVAVVATAIEHRRNERTKGVNGLDKIIIRDRRGRSAEVYLYGGQVSSWKNENGEELLVMSSKAIFQPPTPIRGGIPVLFPQYSNTGPLPSHGFVRQRFWEVETKPPPLPSLSTAHVDLIVRSSNEDLKIWPHKFEYRLRVALGHDGDLTLTSRVKNTDTKPFNFTFALHPYFAVSNISEIHVEGLHNLDYLDQQKNRTRFTDHEKVITFNAQLDRLYLSTPDQLRIVDHKKKKTIVVHKEGQVDAVVWNPWDKKVSDLGVEDYKRFVTVESAAVAKPITVNPGKEWKGILHVSVVPSNRKA

SEQ ID NO: 39079 - DNA, 1355 bp, Arabidopsis thaliana
  misc_feature (1)..(1355): Ceres Seq. ID no. 13491947
  misc_feature (1)..(1355): Ortholog of  Ceres SEQ ID NO 13662937 as cited in SEQ ID NO 64415
  misc_feature (1)..(1355): Ortholog of  Ceres SEQ ID NO 13595984 as cited in SEQ ID NO 68340
  misc_feature (1)..(1355): Ortholog of  Ceres SEQ ID NO 12635014 as cited in SEQ ID NO 0
gacacaacaacaacacatccactcgaattttctatttccgaataacaaaaccgatcggcggagacatgacggcggcacaagggaactctaacgagactctgttttcttcttacaagatgggaagattcgatctctctcatcgagtggttctggcgccgatgacgcggtgcagggcgttgaacggagtaccaaacgcggcgttggcagagtattatgctcaacggaccactcccggcggttttctcatctccgaaggcaccatggtctctcccggatccgcagggttcccacatgtgcctggaatctattcagatgaacaagtagaagcatggaagcaagttgtggaagcagttcacgctaagggaggtttcatcttttgtcaattatggcatgttggacgtgcttctcatgcagtgtatcaacctaatggaggatcaccaatatcgtcaacgaacaaaccaatctcggaaaacaggtggcgagttttgttgcccgatggttcccacgtgaagtacccgaaacctcgggctttagaagcttccgagatacctcgggtggtggaggattattgcctttctgctttgaatgcgattcgagctggtttcgatgggattgagatccacggggcgcatggttacctcattgatcagtttttgaaagacgggatcaatgaccgtactgaccaatacggaggatccattgcaaaccgttgtagattcttgaaacaagtagtggaaggtgtagtttcagccataggagctagtaaagttggtgtgagggtatctccagctatagatcacttggacgcaactgattctaacccattatcactcgggctagccgtggttgatatgctcaataagttacaagatgttaatggcttgaagctcgcttaccttcacgttacacaacctcgctaccacgcctatgggcaaacagagtcgggaaggcaagggagtgatgaggaagaagctaagctaatgaagagcttgagaatggcttataaaggaacctttatgtctagtggaggattcaataaggaactaggcatgcaagctgttcaacaaggtgatgctgatttggtttcatatggcaggctttttatcgcaaacccggatttggtttcgcggttcaagattgatggagagttgaataaatataatcggaagacgttttacactcaagatccagttgttggctacacggattatcctttcttggctccttcttcccgcctctgagtttgataatcggaggagaaaatgtattgatgttgtataaagacaatatattaatatgtaaaatgacaatgttattgttatccacttaatgaatagtcatgtatcttattgttt

SEQ ID NO: 39080 - protein, 412 aa, Arabidopsis thaliana
  peptide (1)..(412): Ceres Seq. ID no. 13491948
HNNNTSTRIFYFRITKPIGGDMTAAQGNSNETLFSSYKMGRFDLSHRVVLAPMTRCRALNGVPNAALAEYYAQRTTPGGFLISEGTMVSPGSAGFPHVPGIYSDEQVEAWKQVVEAVHAKGGFIFCQLWHVGRASHAVYQPNGGSPISSTNKPISENRWRVLLPDGSHVKYPKPRALEASEIPRVVEDYCLSALNAIRAGFDGIEIHGAHGYLIDQFLKDGINDRTDQYGGSIANRCRFLKQVVEGVVSAIGASKVGVRVSPAIDHLDATDSNPLSLGLAVVDMLNKLQDVNGLKLAYLHVTQPRYHAYGQTESGRQGSDEEEAKLMKSLRMAYKGTFMSSGGFNKELGMQAVQQGDADLVSYGRLFIANPDLVSRFKIDGELNKYNRKTFYTQDPVVGYTDYPFLAPSSRL

SEQ ID NO: 39081 - protein, 391 aa, Arabidopsis thaliana
  peptide (1)..(391): Ceres Seq. ID no. 13491949
MTAAQGNSNETLFSSYKMGRFDLSHRVVLAPMTRCRALNGVPNAALAEYYAQRTTPGGFLISEGTMVSPGSAGFPHVPGIYSDEQVEAWKQVVEAVHAKGGFIFCQLWHVGRASHAVYQPNGGSPISSTNKPISENRWRVLLPDGSHVKYPKPRALEASEIPRVVEDYCLSALNAIRAGFDGIEIHGAHGYLIDQFLKDGINDRTDQYGGSIANRCRFLKQVVEGVVSAIGASKVGVRVSPAIDHLDATDSNPLSLGLAVVDMLNKLQDVNGLKLAYLHVTQPRYHAYGQTESGRQGSDEEEAKLMKSLRMAYKGTFMSSGGFNKELGMQAVQQGDADLVSYGRLFIANPDLVSRFKIDGELNKYNRKTFYTQDPVVGYTDYPFLAPSSRL

SEQ ID NO: 39082 - protein, 374 aa, Arabidopsis thaliana
  peptide (1)..(374): Ceres Seq. ID no. 13491950
MGRFDLSHRVVLAPMTRCRALNGVPNAALAEYYAQRTTPGGFLISEGTMVSPGSAGFPHVPGIYSDEQVEAWKQVVEAVHAKGGFIFCQLWHVGRASHAVYQPNGGSPISSTNKPISENRWRVLLPDGSHVKYPKPRALEASEIPRVVEDYCLSALNAIRAGFDGIEIHGAHGYLIDQFLKDGINDRTDQYGGSIANRCRFLKQVVEGVVSAIGASKVGVRVSPAIDHLDATDSNPLSLGLAVVDMLNKLQDVNGLKLAYLHVTQPRYHAYGQTESGRQGSDEEEAKLMKSLRMAYKGTFMSSGGFNKELGMQAVQQGDADLVSYGRLFIANPDLVSRFKIDGELNKYNRKTFYTQDPVVGYTDYPFLAPSSRL

SEQ ID NO: 39083 - DNA, 1297 bp, Arabidopsis thaliana
  misc_feature (1)..(1297): Ceres Seq. ID no. 13488371
  misc_feature (1)..(1297): Ortholog of  Ceres SEQ ID NO 15170659 as cited in SEQ ID NO 67270
  misc_feature (1)..(1297): Ortholog of  Ceres SEQ ID NO 15177722 as cited in SEQ ID NO 0
gagagagcttgtgtgaagtgacgaagaagacgaagaagacgaagaagaagaacattaatggcggctactccgtggtactttgtcgcagtacttctcaccattcttaccagctctcaggggattctaacaactctttctcaaagtgatggaggttataagtatgattatgctactgttccctttcttgctgaagtttttaagctgatcatttctggtttatttctctggagagagatgcggacatcttcctcaacaacttcaaggattactacggattggaagagtgtgcgattatttgttattccgtctcttatttatctgatacataacaatgtgcagtttgctacattgacttatgtggatacgtccacttatcagataatgggtaatttgaagattgtgaccactggcatactgtttaggttatttttgaaaaggaaactatctaaacttcagtggatggcaattggtcttttagctgttggaacaactaccagccaggttaagggttgtggagaagcttcttgtgattctttattcacggcaccaatacaaggttatttgctgggcatcctctcagctggtttgtccgcgctagctggaatctacacagagtttctgatgaagagaaacaatgacaccttatactggcaaaacttgcagttatatacgtttggttcacttttcaacgtagctcgacttatagcagatgatttcagacacgggtttgaaaagggtccttggtggcaacgtatctttgatgggtacagcatcaccacttggctggtagttctgaatctcggatccactggcttactggtctcgtggttaatgaagtatgcagacaacatcgtcaaggtttattctacatcaatggcgatgctacttactatggttgcatccatatacctttttagcttcaaaccgacactgcagcttttcttgggtattgtcatatgcatcatgtcactccatatgtactttgctcctccacacacgctcgtggacttgcccgtgacaaacgaagcacatgccaagaccttaaagcaagttgtcgtagaagaaaagacagattcttgaattaaattggacgaaaaggttagttgaacttatagaaaacaatttgctaagtaaatgaacacaatgatcttcttctagcttcatttctattagagaatgagaaacttggatgtgagttcttttgaagaaatgatctgatagtttgtttattcacgtaccgattctattctttgtaaatgtacatcgaggtgcctagaaatagtaaattcgattgttg

SEQ ID NO: 39084 - protein, 340 aa, Arabidopsis thaliana
  peptide (1)..(340): Ceres Seq. ID no. 13488372
MAATPWYFVAVLLTILTSSQGILTTLSQSDGGYKYDYATVPFLAEVFKLIISGLFLWREMRTSSSTTSRITTDWKSVRLFVIPSLIYLIHNNVQFATLTYVDTSTYQIMGNLKIVTTGILFRLFLKRKLSKLQWMAIGLLAVGTTTSQVKGCGEASCDSLFTAPIQGYLLGILSAGLSALAGIYTEFLMKRNNDTLYWQNLQLYTFGSLFNVARLIADDFRHGFEKGPWWQRIFDGYSITTWLVVLNLGSTGLLVSWLMKYADNIVKVYSTSMAMLLTMVASIYLFSFKPTLQLFLGIVICIMSLHMYFAPPHTLVDLPVTNEAHAKTLKQVVVEEKTDS

SEQ ID NO: 39085 - protein, 281 aa, Arabidopsis thaliana
  peptide (1)..(281): Ceres Seq. ID no. 13488373
MRTSSSTTSRITTDWKSVRLFVIPSLIYLIHNNVQFATLTYVDTSTYQIMGNLKIVTTGILFRLFLKRKLSKLQWMAIGLLAVGTTTSQVKGCGEASCDSLFTAPIQGYLLGILSAGLSALAGIYTEFLMKRNNDTLYWQNLQLYTFGSLFNVARLIADDFRHGFEKGPWWQRIFDGYSITTWLVVLNLGSTGLLVSWLMKYADNIVKVYSTSMAMLLTMVASIYLFSFKPTLQLFLGIVICIMSLHMYFAPPHTLVDLPVTNEAHAKTLKQVVVEEKTDS

SEQ ID NO: 39086 - protein, 232 aa, Arabidopsis thaliana
  peptide (1)..(232): Ceres Seq. ID no. 13488374
MGNLKIVTTGILFRLFLKRKLSKLQWMAIGLLAVGTTTSQVKGCGEASCDSLFTAPIQGYLLGILSAGLSALAGIYTEFLMKRNNDTLYWQNLQLYTFGSLFNVARLIADDFRHGFEKGPWWQRIFDGYSITTWLVVLNLGSTGLLVSWLMKYADNIVKVYSTSMAMLLTMVASIYLFSFKPTLQLFLGIVICIMSLHMYFAPPHTLVDLPVTNEAHAKTLKQVVVEEKTDS

SEQ ID NO: 39087 - DNA, 1132 bp, Arabidopsis thaliana
  misc_feature (1)..(1132): Ceres Seq. ID no. 13503082
  misc_feature (1)..(1132): Ortholog of  Ceres SEQ ID NO 12612333 as cited in SEQ ID NO 56421
atccactctactcaacatggactcctccaaactctcatctctctctctttgcctcttcctcatttgcattatctatctcccccaacattctctcgcatgcggctcttgcaacccacggaagggcggaaagcactcccctaaagcccctaagctaccggttcctccggtgaccgtccctaagctacccgttcctcctgtgaccatccctaagctacccgttcctccagtgactgtacccaagctacccgttcctccagtgaccgtccccaagctacccgttcctccagtgacagtcccaaagctacccgttcccccagtaactgtccctaagctacccgttcctccggtaaccgtccctaagctacccgttcctccagtaaccgtccctaagctaccccttcctccgatttcagggctacccatacctccagtggtaggtcccaatctgccattgccacctttgccaattgtaggtcctattcttccaccgggaacaaccccaccagccacaggagggaaggactgtcctccaccgccagggagcgtaaagccaccatcagggggcgggaaggcgacatgtccaatagacacgctgaagttaggtgcttgcgtcgacttgttgggaggtttagtaaagatagggcttggggatccagcagttaacaaatgttgtccgttacttaaaggcctcgttgaaatcgaagccgcggcttgtctctgcactaccctcaagctcaaagctcttgacctcaatctttatgtccctgttgctcttcagcttctccttacctgtggcaaaaatccacctccgggctacacttgttccatatgataaactcactccacttataaaggatgctttggagaaaaaagtgagaagagaatggcagagctccaatctttcctgtcttggtttaccaaatacatcatatcaaatcctatccctttgattctttcctctatcgttcccttatgcttgtatcattaattaatgtgtgctttttagattaatgattcttctcttgtattaaagtatgatttgaaatcctttttttttctctatctctttttattgaattgattgaactgcgttcatgatactgtcaaaaagagagaaaaagagtacaatttt

SEQ ID NO: 39088 - protein, 276 aa, Arabidopsis thaliana
  peptide (1)..(276): Ceres Seq. ID no. 13503083
STLLNMDSSKLSSLSLCLFLICIIYLPQHSLACGSCNPRKGGKHSPKAPKLPVPPVTVPKLPVPPVTIPKLPVPPVTVPKLPVPPVTVPKLPVPPVTVPKLPVPPVTVPKLPVPPVTVPKLPVPPVTVPKLPLPPISGLPIPPVVGPNLPLPPLPIVGPILPPGTTPPATGGKDCPPPPGSVKPPSGGGKATCPIDTLKLGACVDLLGGLVKIGLGDPAVNKCCPLLKGLVEIEAAACLCTTLKLKALDLNLYVPVALQLLLTCGKNPPPGYTCSI

SEQ ID NO: 39089 - protein, 271 aa, Arabidopsis thaliana
  peptide (1)..(271): Ceres Seq. ID no. 13503084
MDSSKLSSLSLCLFLICIIYLPQHSLACGSCNPRKGGKHSPKAPKLPVPPVTVPKLPVPPVTIPKLPVPPVTVPKLPVPPVTVPKLPVPPVTVPKLPVPPVTVPKLPVPPVTVPKLPVPPVTVPKLPLPPISGLPIPPVVGPNLPLPPLPIVGPILPPGTTPPATGGKDCPPPPGSVKPPSGGGKATCPIDTLKLGACVDLLGGLVKIGLGDPAVNKCCPLLKGLVEIEAAACLCTTLKLKALDLNLYVPVALQLLLTCGKNPPPGYTCSI

SEQ ID NO: 39090 - DNA, 679 bp, Arabidopsis thaliana
  misc_feature (1)..(679): Ceres Seq. ID no. 12326166
  misc_feature (1)..(679): Ortholog of  Ceres SEQ ID NO 12638221 as cited in SEQ ID NO 0
cttttttaatccctttgtttctctgtggtattcaacaaatttgtctcgaatttatagagctcgaagcttcaaggaagttataatggctagtgaagatgaatcgattgaacaaaaagctgctgctcgtaaagaggcacttaaagctctaagggcagctcaggaactgtctgagaccaagagaggatgaagctgtcgaagaagatggtccagccatgaagtttagaaactatgttccccaagctaaggagcttcaggatggtaaactagcgccaccagagctacccaaattcgaagatccgatcgttgcacttccacctgctgtagagaagaaagaggacccatttgttaacatcgctccaaagaagccaaactgggacctccgaagagatgtgcaaaagaagcttgataagctcgaaaggcggactcaaaaggcaatgcataaactcatggaggagcaagagaaagaacgtgagatggctgaagctgatggtaacaccatagaaagttgaaacccaacgacgtcatcaaagaaagccaccactgaacagtatattctactcgattttgtttaactgttaaagcattcgaagtgagtagaccatgtaaaatcctacggccattggcatagacatagtaggtttatcttcttgtgtgaatcaaagaaagtcgcaatttattt

SEQ ID NO: 39091 - protein, 98 aa, Arabidopsis thaliana
  peptide (1)..(98): Ceres Seq. ID no. 12326167
MKFRNYVPQAKELQDGKLAPPELPKFEDPIVALPPAVEKKEDPFVNIAPKKPNWDLRRDVQKKLDKLERRTQKAMHKLMEEQEKEREMAEADGNTIES

SEQ ID NO: 39092 - protein, 61 aa, Arabidopsis thaliana
  peptide (1)..(61): Ceres Seq. ID no. 12326168
FFNPFVSLWYSTNLSRIYRARSFKEVIMASEDESIEQKAAARKEALKALRAAQELSETKRG

SEQ ID NO: 39093 - DNA, 1642 bp, Arabidopsis thaliana
  misc_feature (1)..(1642): Ceres Seq. ID no. 13645827
  misc_feature (1)..(1642): Ortholog of  Ceres SEQ ID NO 13600220 as cited in SEQ ID NO 0
gtatttgttcttgcttgctaaagtttttttgctctgtacggtgacaagaccagagagatgaagttattgagcaatagtctaatgttccttcctctgctggctttggctttaaccgcagtttcgtcgcttaaatacagcagaaatgacttccctccaggctttgtctttggctctggcacatcagcttatcaggtggaaggagctgctgacgaagatgggagaactcctagcatttgggatgtttttgctcatgccggacactccggagtagcagctggaaatgttgcatgtgaccagtatcacaaatacaaggaagatgtgaagctcatggcagacatgggattggaggcttacagattctctatatcctggtcaaggcttttaccaagtggaagaggaccaatcaatcccaaggggctacaatactacaacaatcttattgatgaattgatcactcatggaatccagccacatgttacattgcaccactttgatctcccacaggccttagaagatgagtatggaggttggctcagccaagaaatcgtgagagacttcacagcttatgcagatacttgcttcaaggagtttggagatagagtgtcacattggactactataaacgaggtcaatgtgtttgcccttggagggtatgaccagggaataacaccgcctgctcgatgctctcctccatttggacttaattgtaccaaaggaaactcttccattgagccttacattgccgtacacaacatgttgctcgcacacgcttctgcaacaatcttatacaagcaacagtacaaggcaacagctagagtgaatgacttctatattggttggattttacatccgttggtgtttggtgattatcctgagacgatgaagaccaatgttgggtctagattgccagcttttacagaggaggagtcagaacaagttaaaggcgcatttgatttcgttggagtgataaattacatggcgctttatgtcaaagacaactcttcctctctgaaacctaatctccaggatttcaacacagatatagccgtggaaatgaccttggttggaaacacatcaatcgagaatgagtatgcaaatacaccatggagtctgcaacagatacttttgtatgtcaaagaaacttatggaaaccctcctgtctatatcctagagaatggacaaatgactcctcacagctcatcacttgtggacacaacaagggtgaagtatctgagctcgtacattaaagcagtgcttcattcactcaggaaaggatcggacgtaaaagggtattttcagtggtcgttgatggatgtgtttgagctatttggtgggtacgagaggagctttggattattgtacgtggacttcaaggatccttctcttaagaggagccctaaactctctgctcactggtactcttccttcctcaagggaacactgcaccatccatcatatgcttcgtcttgatcatttgatttcaatggttataatgcttagttgtcggaaatgcaaaccattactatgttttatttttgctaaataaaatcattactatgtttttttctttatcatctttacaataaatcaagatataaacattgtatgttagaaaaagccaaataggtattagtctgttatt

SEQ ID NO: 39094 - protein, 470 aa, Arabidopsis thaliana
  peptide (1)..(470): Ceres Seq. ID no. 13645828
MKLLSNSLMFLPLLALALTAVSSLKYSRNDFPPGFVFGSGTSAYQVEGAADEDGRTPSIWDVFAHAGHSGVAAGNVACDQYHKYKEDVKLMADMGLEAYRFSISWSRLLPSGRGPINPKGLQYYNNLIDELITHGIQPHVTLHHFDLPQALEDEYGGWLSQEIVRDFTAYADTCFKEFGDRVSHWTTINEVNVFALGGYDQGITPPARCSPPFGLNCTKGNSSIEPYIAVHNMLLAHASATILYKQQYKATARVNDFYIGWILHPLVFGDYPETMKTNVGSRLPAFTEEESEQVKGAFDFVGVINYMALYVKDNSSSLKPNLQDFNTDIAVEMTLVGNTSIENEYANTPWSLQQILLYVKETYGNPPVYILENGQMTPHSSSLVDTTRVKYLSSYIKAVLHSLRKGSDVKGYFQWSLMDVFELFGGYERSFGLLYVDFKDPSLKRSPKLSAHWYSSFLKGTLHHPSYASS

SEQ ID NO: 39095 - protein, 462 aa, Arabidopsis thaliana
  peptide (1)..(462): Ceres Seq. ID no. 13645829
MFLPLLALALTAVSSLKYSRNDFPPGFVFGSGTSAYQVEGAADEDGRTPSIWDVFAHAGHSGVAAGNVACDQYHKYKEDVKLMADMGLEAYRFSISWSRLLPSGRGPINPKGLQYYNNLIDELITHGIQPHVTLHHFDLPQALEDEYGGWLSQEIVRDFTAYADTCFKEFGDRVSHWTTINEVNVFALGGYDQGITPPARCSPPFGLNCTKGNSSIEPYIAVHNMLLAHASATILYKQQYKATARVNDFYIGWILHPLVFGDYPETMKTNVGSRLPAFTEEESEQVKGAFDFVGVINYMALYVKDNSSSLKPNLQDFNTDIAVEMTLVGNTSIENEYANTPWSLQQILLYVKETYGNPPVYILENGQMTPHSSSLVDTTRVKYLSSYIKAVLHSLRKGSDVKGYFQWSLMDVFELFGGYERSFGLLYVDFKDPSLKRSPKLSAHWYSSFLKGTLHHPSYASS

SEQ ID NO: 39096 - protein, 380 aa, Arabidopsis thaliana
  peptide (1)..(380): Ceres Seq. ID no. 13645830
MADMGLEAYRFSISWSRLLPSGRGPINPKGLQYYNNLIDELITHGIQPHVTLHHFDLPQALEDEYGGWLSQEIVRDFTAYADTCFKEFGDRVSHWTTINEVNVFALGGYDQGITPPARCSPPFGLNCTKGNSSIEPYIAVHNMLLAHASATILYKQQYKATARVNDFYIGWILHPLVFGDYPETMKTNVGSRLPAFTEEESEQVKGAFDFVGVINYMALYVKDNSSSLKPNLQDFNTDIAVEMTLVGNTSIENEYANTPWSLQQILLYVKETYGNPPVYILENGQMTPHSSSLVDTTRVKYLSSYIKAVLHSLRKGSDVKGYFQWSLMDVFELFGGYERSFGLLYVDFKDPSLKRSPKLSAHWYSSFLKGTLHHPSYASS

SEQ ID NO: 39097 - DNA, 1157 bp, Arabidopsis thaliana
  misc_feature (1)..(1157): Ceres Seq. ID no. 12371955
  misc_feature (1)..(1157): Ortholog of  Ceres SEQ ID NO 13639476 as cited in SEQ ID NO 58353
atccttaaagatctcgttacggtttttgtcggaattgtttcgatttgttgtgtttctcaataagctctcgcttgtcagagaaacaccggcaacgccgttaaaatagtcaccggagaccatttagcatcgtagagttcgccttttatggcgttcacgtggggatctgctctccggatttctgttctccttatccttgtagctgcaattgtcttagcttgttattttctccctgttgagaagctattgaaggattttttgttatgggttgaacaagatctagggccttggggaccttttgccctagctgttgcgtacattcctcttacagttttggctgttcctgcctcggttctcacgctcggtggtggctacctttttgggctgccaattggttttgtggcggactcagtcggtgctacacttggctcaggagctgcatttctacttggccgtacgattggaaaaccttttgtagttgcaaaattaaaggattatcctcagtttcagtcagtggcactcgccattgagaaatccggcttcaagatatgcttgctgctccggcttgctcctcttctcccattcagcatgttgaactacctcttatctgtcacgccaattcggctaggtccatacttgctttcttcgtggttagggatgatgccaataacacttgcgttagtgtatgttggaacaactctaaaagacctttctgatgtaactcacaagtggagcgagttctcgccaggtcgctgggcgttcttaatttcgagccttgtaatatccgtgatattaatggtgtgtgttacaaaggtggcgaaagacgctctaagaaaagctttagcagagcacggaggagacataaacgaagcggttgcagccttaccggagctgaccgttactgatgatacttcgacggatttaagtgagcctctattgataaagatagatcctcaacaacctcaggatcaagtaaaccatagtcattaaaattaagatgatgaatacttactttgtataatctttattttaacatacaaagcttagttttcttggtttgtatgataataacatagattaaaaattatttttaaaaagttatttttcttagtaactttgagatgtaattattagttcacagggatttaaaatattggatg

SEQ ID NO: 39098 - protein, 280 aa, Arabidopsis thaliana
  peptide (1)..(280): Ceres Seq. ID no. 12371956
MAFTWGSALRISVLLILVAAIVLACYFLPVEKLLKDFLLWVEQDLGPWGPFALAVAYIPLTVLAVPASVLTLGGGYLFGLPIGFVADSVGATLGSGAAFLLGRTIGKPFVVAKLKDYPQFQSVALAIEKSGFKICLLLRLAPLLPFSMLNYLLSVTPIRLGPYLLSSWLGMMPITLALVYVGTTLKDLSDVTHKWSEFSPGRWAFLISSLVISVILMVCVTKVAKDALRKALAEHGGDINEAVAALPELTVTDDTSTDLSEPLLIKIDPQQPQDQVNHSH

SEQ ID NO: 39099 - DNA, 1133 bp, Arabidopsis thaliana; identical to SEQ ID NO: 29056
  misc_feature (1)..(1133): Ceres Seq. ID no. 12336045
  misc_feature (1)..(1133): Ortholog of  Ceres SEQ ID NO 14315989 as cited in SEQ ID NO 57571

SEQ ID NO: 39100 - protein, 285 aa, Arabidopsis thaliana; identical to SEQ ID NO: 29057
  peptide (1)..(285): Ceres Seq. ID no. 12336046

SEQ ID NO: 39101 - protein, 251 aa, Arabidopsis thaliana; identical to SEQ ID NO: 29058
  peptide (1)..(251): Ceres Seq. ID no. 12336047

SEQ ID NO: 39102 - protein, 235 aa, Arabidopsis thaliana; identical to SEQ ID NO: 29059
  peptide (1)..(235): Ceres Seq. ID no. 12336048

SEQ ID NO: 39103 - DNA, 2928 bp, Arabidopsis thaliana
  misc_feature (1)..(2928): Ceres Seq. ID no. 12330169
  misc_feature (1)..(2928): Ortholog of  Ceres SEQ ID NO 13593911 as cited in SEQ ID NO 52935
aaaaactcctaaaccaaattataattgttagtaagttaagtaacagagaacaaaataatactcgtaactcttgtttccaaactataacgtaacttttgttcatcatcttcacagtttctgtttctgtttctaaagattctaaattttgtgttttttttttcctttttctttcgattatttttgattttctgatggaattccgcaaaccctttaagtctcatagctcgtataaacagattataagcaccggaaatcaaaacgagaagacaaagaagaagaagaaactggcgaatcttgacgatggcgacattgctaaaactcagagctctgggtctagtttcgatggaaacagctataagttctggcaagacattgcaacagatgattatacaaagagcgggagtttcgatttcccgcaataccgtgaggagatcacactcgatgtaaacgaagaaacagaggaaacagaggatgtcagcaacaacaacaatttgtccggttctaaagaaacgagagtctctttcaaaataaacagttcaggaactaataatatgtctggttctgtacgttcttgtacatcttcgacttcgttttcatcggccacaatgcggttaaatttagagcagcagttggaggatgaaggagaggtggttgtaagatgttcatcggtgaggaaaacagagcttgtttcgagggcgaaggcgagatcgaggttgatagatccgccacaagaagaggaacaacaatactcgagctggatcgggacatcggatcagttaagatcaggtttacttgggagacactctgatgatattgatgaagaagatgattcttcggctgaagaagatgttccagtggaatatcgaaagttgaaaatggacgcgataacgttgcttcaatggatgagcttaatcgcactcgtagtggcgttagtgttgagtctagcgcttcatacttggagaaaaatgctactctatggagccttcatctgtggaaatgggaagtggtcttgctggttctcatctgcgggaggctggtttcgggatgcggaatacgaatcatcgtcttctttatcgaaagaaacttcctattgaggaaacgggttctttacttcgtatacggtgtgaagactgctgttcagaactgtctctggcttggcctcgtgctcgtcgcttggcatttcttgttcgacaagaaagtagaaagggaaacacaaagcgacgttcttcttctcgtatctaaaatattagtgtgtttcttgttgagcacggtcttatggctgatcaagacactggtggtgaaagttttagcatcttcgttccacgttagtacctactttgatcggattcaagaagctctgtttcatcattacttgatcgagacgttatctgtacctccaatgcttgagttaagcaggattgaggaagaggaagatcggacgcaagatgagatctacaaggtgcagaaaggaggagctgatttatcacccgaactttgttccgctgcgtttcctcaggaaaaaagtggaagtacaatgaacatgaagttctctccaatcattccgaagacgggtggtgataacggaatcacaatggatgatttacacaagatgaatcagaaaaacgtttcagcttggaacatgaagagactgatgaagattgtgagaaatatttccctgactacgttggacgaacaagcgcttcaaaacacgtgtgaagatgaatccactcgacagatacggagcgaaaaagaagctaaagcagctgcaaggaagattttcaagaacgtagctcaacctggcacaaaacacatatacctggaggacttgatgagatttttgcgagtagacgaggcgatgaagacaatgtgtctcttcgaaggcgccttagtgaccaaaaagattactaaatcagccttgaagaactggctggtaaatgctttcagagagagaagagcacttgccttaacactcaatgacaccaaaacagcagtgaacaaactccatcacatgattagttttctcactgccattgtcatcatagtcatatggctgatccttcttgaaatcgctacttccaagtatcttttatttttaacttcacaagttgtactcttagccttcatgtttgggaactctctcaagaccgtcttcgagtcaatcatcttcctcttcatcattcacccttacgatgttggtgatcggttactcatcgacactgtagagatggtggtggaggaaatgaacattctcacaacagttttcttgagagctgacaatctgaagattgtgtatccaaatattcttctatggcagaaagcgatccacaattacaaccgtagtccggatatgggagatgaagttacatgctgtgtccacattactactcctcctgaaaagattgctgcaatcaaacaaagaatatcaagctacattgatagcaagccagagtattggtatccaaaagctgatatcattgtaaaggatgtggaagatttgaacattgtgaggatagcaatatggctgtgtcataaaattaaccatcaaaacatgggagagagatttacaagaagagcgttgttgatcgaggaagtaatcaaaatcctcctcgaactcgacattcaataccggtttcatccacttgatatcaatgttaaaaccatgccaacagttgtctcgagcagagttccaccaggctggtcacaaaaccctgattcaaggtaattatagagatgatgtgaattgtgttatcttaactcttaagtgtgttttagtatgaggtttgattgttgtattttttttttctttttttgtaaaccggttgttgtatatatatgaaggtgaaagcaaagagtgggatcataaacttgtgttatagaaactttatgaaaatagaaactaatgatatttttagtaatgatttttttttt

SEQ ID NO: 39104 - protein, 607 aa, Arabidopsis thaliana
  peptide (1)..(607): Ceres Seq. ID no. 12330170
MDELNRTRSGVSVESSASYLEKNATLWSLHLWKWEVVLLVLICGRLVSGCGIRIIVFFIERNFLLRKRVLYFVYGVKTAVQNCLWLGLVLVAWHFLFDKKVERETQSDVLLLVSKILVCFLLSTVLWLIKTLVVKVLASSFHVSTYFDRIQEALFHHYLIETLSVPPMLELSRIEEEEDRTQDEIYKVQKGGADLSPELCSAAFPQEKSGSTMNMKFSPIIPKTGGDNGITMDDLHKMNQKNVSAWNMKRLMKIVRNISLTTLDEQALQNTCEDESTRQIRSEKEAKAAARKIFKNVAQPGTKHIYLEDLMRFLRVDEAMKTMCLFEGALVTKKITKSALKNWLVNAFRERRALALTLNDTKTAVNKLHHMISFLTAIVIIVIWLILLEIATSKYLLFLTSQVVLLAFMFGNSLKTVFESIIFLFIIHPYDVGDRLLIDTVEMVVEEMNILTTVFLRADNLKIVYPNILLWQKAIHNYNRSPDMGDEVTCCVHITTPPEKIAAIKQRISSYIDSKPEYWYPKADIIVKDVEDLNIVRIAIWLCHKINHQNMGERFTRRALLIEEVIKILLELDIQYRFHPLDINVKTMPTVVSSRVPPGWSQNPDSR

SEQ ID NO: 39105 - protein, 440 aa, Arabidopsis thaliana
  peptide (1)..(440): Ceres Seq. ID no. 12330171
MLELSRIEEEEDRTQDEIYKVQKGGADLSPELCSAAFPQEKSGSTMNMKFSPIIPKTGGDNGITMDDLHKMNQKNVSAWNMKRLMKIVRNISLTTLDEQALQNTCEDESTRQIRSEKEAKAAARKIFKNVAQPGTKHIYLEDLMRFLRVDEAMKTMCLFEGALVTKKITKSALKNWLVNAFRERRALALTLNDTKTAVNKLHHMISFLTAIVIIVIWLILLEIATSKYLLFLTSQVVLLAFMFGNSLKTVFESIIFLFIIHPYDVGDRLLIDTVEMVVEEMNILTTVFLRADNLKIVYPNILLWQKAIHNYNRSPDMGDEVTCCVHITTPPEKIAAIKQRISSYIDSKPEYWYPKADIIVKDVEDLNIVRIAIWLCHKINHQNMGERFTRRALLIEEVIKILLELDIQYRFHPLDINVKTMPTVVSSRVPPGWSQNPDSR

SEQ ID NO: 39106 - protein, 395 aa, Arabidopsis thaliana
  peptide (1)..(395): Ceres Seq. ID no. 12330172
MNMKFSPIIPKTGGDNGITMDDLHKMNQKNVSAWNMKRLMKIVRNISLTTLDEQALQNTCEDESTRQIRSEKEAKAAARKIFKNVAQPGTKHIYLEDLMRFLRVDEAMKTMCLFEGALVTKKITKSALKNWLVNAFRERRALALTLNDTKTAVNKLHHMISFLTAIVIIVIWLILLEIATSKYLLFLTSQVVLLAFMFGNSLKTVFESIIFLFIIHPYDVGDRLLIDTVEMVVEEMNILTTVFLRADNLKIVYPNILLWQKAIHNYNRSPDMGDEVTCCVHITTPPEKIAAIKQRISSYIDSKPEYWYPKADIIVKDVEDLNIVRIAIWLCHKINHQNMGERFTRRALLIEEVIKILLELDIQYRFHPLDINVKTMPTVVSSRVPPGWSQNPDSR

SEQ ID NO: 39107 - DNA, 1836 bp, Arabidopsis thaliana
  misc_feature (1)..(1836): Ceres Seq. ID no. 12329328
  misc_feature (1)..(1836): Ortholog of  Ceres SEQ ID NO 12625388 as cited in SEQ ID NO 63299
  misc_feature (1)..(1836): Ortholog of  Ceres SEQ ID NO 15179860 as cited in SEQ ID NO 66716
gttaatctttttcttcaatctctcgatctgatcgttatcgaaaccgcgcgattctaaccaagtccaggtgacaaatcagctctgctaaaatactcacaaagtctcgtgatcatattttgtggatcacatcattgtcttatttttggaattgcttatcctcgcactagttcactgatttgagatctgtgcagttaattttgtgctccatagcgattccatggcttctttaatgttatctctcggttccacttctctgttaccgcgcgagattaacaaggataagctaaagcttggaacttctgcttcgaacccgttcctaaaagcaaagtcttttagcagagtgactatgacggttgcagtgaagccttctcgtttcgagggtataactatggctccaccagaccctattcttggagtcagtgaagcattcaaagctgacactaacgggatgaaactcaatcttggtgttggtgcttatcgtactgaggaactccagccttatgtgcttaatgttgttaaaaaggcggagaatttgatgttggagagaggagataacaaagagtatcttccaattgaggggttggcagcattcaacaaggctactgctgagttgctatttggagctggtcatcctgttattaaggaacaaagagtagcaacaattcagggtctttcgggaacaggttcactgcgattagcagcggctcttatagagcgttatttccctggagcaaaagttgtgatctcatcaccaacctggggtaatcacaagaatatcttcaatgatgccaaagttccgtggtccgaataccgctactatgatccaaaaacaattggtttggattttgagggaatgatagcagatataaaggaagctccagaaggatccttcatcttgcttcacggatgtgctcacaacccaactggaattgacccaacaccagaacagtgggtaaaaattgctgatgtcattcaggaaaagaaccatatcccatttttcgatgttgcataccagggctttgctagtggaagccttgatgaagatgcagcatctgtgagattatttgctgagcggggaatggagttttttgttgctcagtcatatagtaaaaatttaggtttgtatgcagaaagaattggggcaatcaatgtcgtgtgctcctcagctgatgctgctacaagggtcaagagccagttgaaaaggattgctcggcctatgtactcgaatccaccagttcatggggcgagaatcgtggccaatgtagtgggtgatgtaactatgttcagtgaatggaaagcagagatggaaatgatggcaggaagaataaagacggttagacaagagctgtatgatagcctcgtttcaaaagacaagagcgggaaggactggtccttcattctgaagcaaattggcatgttctctttcaccggcctaaacaaagctcagagcgataacatgacggacaaatggcacgtgtatatgactaaagacgggaggatatcattggccggattatctctggccaaatgcgagtatcttgctgatgcgatcatcgactcataccataacgtaagctgagcttccatctcagtagatgacaataagaaacagttttatataccctttttagcttcttcttgatctttgattgaaaccagatggctaaattaataagctagcatcacactatgattgctagacaattttcaaggaaacttttgatttgatcgtgtttgacaggccttgttgtattgggagactcccatcgagttatagaagaacttgttacgattgtattttacataatttcacaactatacttgaccggaagagtt

SEQ ID NO: 39108 - protein, 453 aa, Arabidopsis thaliana
  peptide (1)..(453): Ceres Seq. ID no. 12329329
MASLMLSLGSTSLLPREINKDKLKLGTSASNPFLKAKSFSRVTMTVAVKPSRFEGITMAPPDPILGVSEAFKADTNGMKLNLGVGAYRTEELQPYVLNVVKKAENLMLERGDNKEYLPIEGLAAFNKATAELLFGAGHPVIKEQRVATIQGLSGTGSLRLAAALIERYFPGAKVVISSPTWGNHKNIFNDAKVPWSEYRYYDPKTIGLDFEGMIADIKEAPEGSFILLHGCAHNPTGIDPTPEQWVKIADVIQEKNHIPFFDVAYQGFASGSLDEDAASVRLFAERGMEFFVAQSYSKNLGLYAERIGAINVVCSSADAATRVKSQLKRIARPMYSNPPVHGARIVANVVGDVTMFSEWKAEMEMMAGRIKTVRQELYDSLVSKDKSGKDWSFILKQIGMFSFTGLNKAQSDNMTDKWHVYMTKDGRISLAGLSLAKCEYLADAIIDSYHNVS

SEQ ID NO: 39109 - protein, 449 aa, Arabidopsis thaliana
  peptide (1)..(449): Ceres Seq. ID no. 12329330
MLSLGSTSLLPREINKDKLKLGTSASNPFLKAKSFSRVTMTVAVKPSRFEGITMAPPDPILGVSEAFKADTNGMKLNLGVGAYRTEELQPYVLNVVKKAENLMLERGDNKEYLPIEGLAAFNKATAELLFGAGHPVIKEQRVATIQGLSGTGSLRLAAALIERYFPGAKVVISSPTWGNHKNIFNDAKVPWSEYRYYDPKTIGLDFEGMIADIKEAPEGSFILLHGCAHNPTGIDPTPEQWVKIADVIQEKNHIPFFDVAYQGFASGSLDEDAASVRLFAERGMEFFVAQSYSKNLGLYAERIGAINVVCSSADAATRVKSQLKRIARPMYSNPPVHGARIVANVVGDVTMFSEWKAEMEMMAGRIKTVRQELYDSLVSKDKSGKDWSFILKQIGMFSFTGLNKAQSDNMTDKWHVYMTKDGRISLAGLSLAKCEYLADAIIDSYHNVS

SEQ ID NO: 39110 - protein, 410 aa, Arabidopsis thaliana
  peptide (1)..(410): Ceres Seq. ID no. 12329331
MTVAVKPSRFEGITMAPPDPILGVSEAFKADTNGMKLNLGVGAYRTEELQPYVLNVVKKAENLMLERGDNKEYLPIEGLAAFNKATAELLFGAGHPVIKEQRVATIQGLSGTGSLRLAAALIERYFPGAKVVISSPTWGNHKNIFNDAKVPWSEYRYYDPKTIGLDFEGMIADIKEAPEGSFILLHGCAHNPTGIDPTPEQWVKIADVIQEKNHIPFFDVAYQGFASGSLDEDAASVRLFAERGMEFFVAQSYSKNLGLYAERIGAINVVCSSADAATRVKSQLKRIARPMYSNPPVHGARIVANVVGDVTMFSEWKAEMEMMAGRIKTVRQELYDSLVSKDKSGKDWSFILKQIGMFSFTGLNKAQSDNMTDKWHVYMTKDGRISLAGLSLAKCEYLADAIIDSYHNVS

SEQ ID NO: 39111 - DNA, 1160 bp, Arabidopsis thaliana
  misc_feature (1)..(1160): Ceres Seq. ID no. 13488715
  misc_feature (1)..(1160): Ortholog of  Ceres SEQ ID NO 14314628 as cited in SEQ ID NO 56888
aaaaaaacaaacttgtttgttagacaaaacatgaatttccggggaggttgttgtattgcgaggtacggtggtagtggtggtggaaatgatatgtcgaaggttgatcggattatgctccggtaccgtccgattgcaccgagacctgattctggtggatctcctgcttcaccgacggagaagaatggatcggtgataactaacgtttcgtcgagatcacggagaggtaagagaaaatattcaaaggagaataatagtagcagtaccggatccgttaatagtaacggtaacagcaaacgacagagaaacgatgagacgaagaacggatctggtggtggtagagagatcgtgacgttgcctcttcttccagagactcctgagaagaaagactcgccgttgaaggctaaggcggcgccggagttaggtgcggcggcgttgtggctgagttttaatgacggagctagttataacagacgttatcagacagagttaatgacggaaacggttgtgtcgtcgttgttgacggtggagtgtgtaacggagagattgatggagggagagtatgagttagggtgtacggacgaggagaggaagatgaatcttgagagagacacgtgtcctggttttatatcggacggtttagggagagtcatttggacgaacggttcttacagagagttggtggttgggaaagatcatgagcagtgtagtaagatgagtgtgtggcttgtgatgaaggagaagcctttggtaacgtaccggacttttacgtgtagaatgagattgcagtacacgtgtcgtgataaggaggtgagttcgattacttcgttctgtgatgtttggaggatgagtgacggtggctttgcgtggcggcttgatgttgatgctgcactttgccttggacggtgaggattgggccgttggattagagatgatgttagattgatgagatgaggatatttaataacgacatgcaagttagatagatatttggacttccaactttatgagtgtacatacatatttcgcaattttgtagcttttaagttttaacattttgatttcaatgttctgttttaatttgtagtgtttggtgttttattcttcttcttttttggggtttgtataaaaactcttggttagtcggtatctttcttttttcc

SEQ ID NO: 39112 - protein, 301 aa, Arabidopsis thaliana
  peptide (1)..(301): Ceres Seq. ID no. 13488716
KKTNLFVRQNMNFRGGCCIARYGGSGGGNDMSKVDRIMLRYRPIAPRPDSGGSPASPTEKNGSVITNVSSRSRRGKRKYSKENNSSSTGSVNSNGNSKRQRNDETKNGSGGGREIVTLPLLPETPEKKDSPLKAKAAPELGAAALWLSFNDGASYNRRYQTELMTETVVSSLLTVECVTERLMEGEYELGCTDEERKMNLERDTCPGFISDGLGRVIWTNGSYRELVVGKDHEQCSKMSVWLVMKEKPLVTYRTFTCRMRLQYTCRDKEVSSITSFCDVWRMSDGGFAWRLDVDAALCLGR

SEQ ID NO: 39113 - protein, 291 aa, Arabidopsis thaliana
  peptide (1)..(291): Ceres Seq. ID no. 13488717
MNFRGGCCIARYGGSGGGNDMSKVDRIMLRYRPIAPRPDSGGSPASPTEKNGSVITNVSSRSRRGKRKYSKENNSSSTGSVNSNGNSKRQRNDETKNGSGGGREIVTLPLLPETPEKKDSPLKAKAAPELGAAALWLSFNDGASYNRRYQTELMTETVVSSLLTVECVTERLMEGEYELGCTDEERKMNLERDTCPGFISDGLGRVIWTNGSYRELVVGKDHEQCSKMSVWLVMKEKPLVTYRTFTCRMRLQYTCRDKEVSSITSFCDVWRMSDGGFAWRLDVDAALCLGR

SEQ ID NO: 39114 - protein, 271 aa, Arabidopsis thaliana
  peptide (1)..(271): Ceres Seq. ID no. 13488718
MSKVDRIMLRYRPIAPRPDSGGSPASPTEKNGSVITNVSSRSRRGKRKYSKENNSSSTGSVNSNGNSKRQRNDETKNGSGGGREIVTLPLLPETPEKKDSPLKAKAAPELGAAALWLSFNDGASYNRRYQTELMTETVVSSLLTVECVTERLMEGEYELGCTDEERKMNLERDTCPGFISDGLGRVIWTNGSYRELVVGKDHEQCSKMSVWLVMKEKPLVTYRTFTCRMRLQYTCRDKEVSSITSFCDVWRMSDGGFAWRLDVDAALCLGR

SEQ ID NO: 39115 - DNA, 1247 bp, Arabidopsis thaliana
  misc_feature (1)..(1247): Ceres Seq. ID no. 12328176
  misc_feature (1)..(1247): Ortholog of  Ceres SEQ ID NO 15179026 as cited in SEQ ID NO 0
gccgttgacttcttttcctctgtaagtcaactctctgtttgtctctacatacatccatccatctatctttggatcgtcattttctctttgtggactaaagtttaagagagaacatgggtgtatttcctggatttggtagctggatcaatcaaaacactcaacagcttcctcacaaggcagagtccgagagatctgagaatgcgaaatttaagtcaaagtcagagacaaacactcatgaggcgagagatgaaatgaaacagcaattaaaactttggagagatacagagaagaaggaacaatggaatgatgctcctcctaatgtgaaggtggaaagaagaaatgatctagaatggggtatgtcaactatagaaatgcaatttacattaggattgcctcctcaagcagcttacaacgttttaactaatccagacaaccaaccatacttcagaatcatcaaaggacgccaacttttggtttcttcttttaacttatcatttcattgattcaaataaaataatgataacaagatttgagagtgtgtcatagttttcttcttatgaaaggaaaacatatcaagaaaagttgtgtcgccggataccgggaaagggcagcttgtggacaccaagaaagctgtggcctggaacttcctttggttatctggaactatcccgataattgcaaattttatcgaacaccgacaagtccttaccgtacaatatacggtaaaaaataagatgttcataaacatgtttgtcagtataaagtggagccgctatacgtagattcagaacgcttgtgcaaacaaaagaagccgaagagtacagaagaatacgaaagatgtagccgcggacaaggaaggattgggtcgaaagtgacattggaccagatgtttaagccttcttttatttttaatctgccaccgatttcttggtacgttcgtcggataaccatcaagaccatgaaaactctgatcgaagatcttcaaattacaagtgccatgatccgaggtatttgaaacgtcccaaatccgctacaaattgatagaacatcaaataaagttataaaatcactttttataaatttaaatagcagaatattacatatgactttagaagtgtatgttcttatggtcactttataacatcaaattaaatgtatagaaaatgtttctaaccaatagttcttaattagacgattatacatagtcaatttgtgtcttttcatattttttaatatcatatattttc

SEQ ID NO: 39116 - protein, 129 aa, Arabidopsis thaliana
  peptide (1)..(129): Ceres Seq. ID no. 12328177
MGVFPGFGSWINQNTQQLPHKAESERSENAKFKSKSETNTHEARDEMKQQLKLWRDTEKKEQWNDAPPNVKVERRNDLEWGMSTIEMQFTLGLPPQAAYNVLTNPDNQPYFRIIKGRQLLVSSFNLSFH

SEQ ID NO: 39117 - protein, 83 aa, Arabidopsis thaliana
  peptide (1)..(83): Ceres Seq. ID no. 12328178
MKQQLKLWRDTEKKEQWNDAPPNVKVERRNDLEWGMSTIEMQFTLGLPPQAAYNVLTNPDNQPYFRIIKGRQLLVSSFNLSFH

SEQ ID NO: 39118 - DNA, 1227 bp, Arabidopsis thaliana
  misc_feature (1)..(1227): Ceres Seq. ID no. 12395444
  misc_feature (1)..(1227): Ortholog of  Ceres SEQ ID NO 13582619 as cited in SEQ ID NO 56520
  misc_feature (1)..(1227): Ortholog of  Ceres SEQ ID NO 13660872 as cited in SEQ ID NO 60830
  misc_feature (1)..(1227): Ortholog of  Ceres SEQ ID NO 12616221 as cited in SEQ ID NO 63291
acgttctattttcttctcctttttctatctttagcaatgaacatatcagtaaacggacagtcacaagtacctcctggctttaggtttcacccaaccgaggaagagctcttgaagtattacctccgcaagaaaatctctaacatcaaaatcgatctcgatgttattcctgacattgatctcaacaagctcgagccttgggatattcaagagatgtgtaagattggaacgaccccgcaaaacgattggtatttctttagccataaggacaagaagtatcccacggggactagaaccaacagagccaccacggtgggattttggaaagcgacgggacgtgacaagaccatatataccaatgatgataggatcgggatgcgaaagacgcttgtcttctacaaaggtcgagcccctcatggtcagaaatccgattggatcatgcaaatatagactcgacgagagtgtattaatctcctcgtgtggcgatgatgacgtcaacgtagaaacgtgtgatgtcataggaagtgacgaaggatgggtggtgtgtcgtgttttcaagaaaaataacctttgcaaaaacatgattagtagtagcccggcgagttcggtgaaaacgccgtcgttcaatgaggagactatcgagcaacttctcgaagttatggggcaatcttgtaaaggagagatagttttagaccctttcttaaaactccctaacctcgaatgccataacaacaccaccatcacgagttatcagcggttaatcgacgaccaagtcaacaactgccacgtcagcaaagttatggatcccagcttcatcactagctgggccgctttggatcggctcgttgcctcacagttaaatgggcccaactcgtattcaataccagccgttagtgagacttcacaatcaccgtatcatggactgaaccggtccggttgtcataccggtttaacaccagattactatataccggagattgatttatggaacgaggcagatttcgcgagaacgacatgccacttgttgaacggtagtggataacggaaatggaagagaggaagtgactaagtgagtgacataccaaaacattgtgtagaaagatataataatcatcataccatatggtatagttgttgaaacttttacggtataaatggtcagattgtgataattacagtacgtagttatgtgatatcattacagaaaataaaagttgtctatatctgtgt

SEQ ID NO: 39119 - protein, 293 aa, Arabidopsis thaliana
  peptide (1)..(293): Ceres Seq. ID no. 12395445
MLFLTLISTSSSLGIFKRCVRLERPRKTIGISLAIRTRSIPRGLEPTEPPRWDFGKRRDVTRPYIPMMIGSGCERRLSSTKVEPLMVRNPIGSCKYRLDESVLISSCGDDDVNVETCDVIGSDEGWVVCRVFKKNNLCKNMISSSPASSVKTPSFNEETIEQLLEVMGQSCKGEIVLDPFLKLPNLECHNNTTITSYQRLIDDQVNNCHVSKVMDPSFITSWAALDRLVASQLNGPNSYSIPAVSETSQSPYHGLNRSGCHTGLTPDYYIPEIDLWNEADFARTTCHLLNGSG

SEQ ID NO: 39120 - protein, 227 aa, Arabidopsis thaliana
  peptide (1)..(227): Ceres Seq. ID no. 12395446
MMIGSGCERRLSSTKVEPLMVRNPIGSCKYRLDESVLISSCGDDDVNVETCDVIGSDEGWVVCRVFKKNNLCKNMISSSPASSVKTPSFNEETIEQLLEVMGQSCKGEIVLDPFLKLPNLECHNNTTITSYQRLIDDQVNNCHVSKVMDPSFITSWAALDRLVASQLNGPNSYSIPAVSETSQSPYHGLNRSGCHTGLTPDYYIPEIDLWNEADFARTTCHLLNGSG

SEQ ID NO: 39121 - protein, 226 aa, Arabidopsis thaliana
  peptide (1)..(226): Ceres Seq. ID no. 12395447
MIGSGCERRLSSTKVEPLMVRNPIGSCKYRLDESVLISSCGDDDVNVETCDVIGSDEGWVVCRVFKKNNLCKNMISSSPASSVKTPSFNEETIEQLLEVMGQSCKGEIVLDPFLKLPNLECHNNTTITSYQRLIDDQVNNCHVSKVMDPSFITSWAALDRLVASQLNGPNSYSIPAVSETSQSPYHGLNRSGCHTGLTPDYYIPEIDLWNEADFARTTCHLLNGSG

SEQ ID NO: 39122 - DNA, 578 bp, Arabidopsis thaliana
  misc_feature (1)..(578): Ceres Seq. ID no. 12323206
  misc_feature (1)..(578): Ortholog of  Ceres SEQ ID NO 12563124 as cited in SEQ ID NO 57104
acacataagtctctctcttacattttgaaaccctaatttctcaaaaaaaatgtctgaagttgagtacctgctttgtcggcggccttgcctgggccaccaatgatgaagatcttcaaaggacgttctcacagttcggcgacgttatcgattctaagatcattaacgaccgcgagagtggaagatcaaggggattcggattcgtcaccttcaaggacgagaaagccatgagggatgcgattgaagagatgaacggtaaagagctcgatggacgtgtcatcaccgtgaacgaggctcagtcgagaggtagcggcggtggcggaggaggccgtggtggacgccgtgagggaggtggctacggaggcggtgatggtggaagttacggcggcggtggtggcggctggtaatcaaagatagagttgtttgcgtgctgctgctctgtttttggtttagatttggatttgtgtcaccacttctggtttggttatcgttcgtttggtttacttttttgatgaaacagtttcgtttaagtcttctttgtctggatcgaaatgttaattcgcgtgttgtttactaaattt

SEQ ID NO: 39123 - protein, 59 aa, Arabidopsis thaliana
  peptide (1)..(59): Ceres Seq. ID no. 12323207
MRDAIEEMNGKELDGRVITVNEAQSRGSGGGGGGRGGRREGGGYGGGDGGSYGGGGGGW

SEQ ID NO: 39124 - protein, 52 aa, Arabidopsis thaliana
  peptide (1)..(52): Ceres Seq. ID no. 12323208
MNGKELDGRVITVNEAQSRGSGGGGGGRGGRREGGGYGGGDGGSYGGGGGGW

SEQ ID NO: 39125 - protein, 42 aa, Arabidopsis thaliana
  peptide (1)..(42): Ceres Seq. ID no. 12323209
MMKIFKGRSHSSATLSILRSLTTARVEDQGDSDSSPSRTRKP

SEQ ID NO: 39126 - DNA, 2337 bp, Arabidopsis thaliana
  misc_feature (1)..(2337): Ceres Seq. ID no. 13645846
  misc_feature (1)..(2337): Ortholog of  Ceres SEQ ID NO 14312594 as cited in SEQ ID NO 58686
  misc_feature (1)..(2337): Ortholog of  Ceres SEQ ID NO 13597706 as cited in SEQ ID NO 65326
caaattatcttctttctctttctctctgatcatttccaaattatttctaagctaagaaaatctttaaaaataacaaagcttctaaaataataatccgacctaccggattcaaaccattgatctgaagatcatctataaaccagtccttgatctataaactaaaataagggaagaaaaaaacaagagagagaaatagagaatgaagtcttttgcggctaaggtagaagagggagttaaaggaatagacggaaagccgtcggtaggtccggtgtaccggaatcttctgtcggaaaaaggttttcctccgattgattctgagatcaccactgcttgggacattttcagtaaatcagtggagaaattccctgacaataatatgcttggatggcgtcgaattgttgatgagaaggttggaccatatatgtggaaaacgtacaaggaagtatacgaagaagttttgcagattggctctgcactacgagccgccggagctgaacctgggagtcgagtggggatctacggtgttaattgtcctcagtggatcatagcaatggaggcttgtgcagctcacactctaatctgtgtacctctatatgatacattgggttcaggagcagtcgattacattgtagagcatgcggaaatcgactttgtgtttgtccaagacaccaaaattaaaggacttcttgagccagattgcaaatgtgctaaacggctaaaagctatagtttccttcactaacgtgagcgacgagcttagccacaaggcttcagaaattggagtcaaaacatactcctggatcgattttctccatatgggacgtgagaaaccggaagacacgaacccgcctaaggcgtttaacatatgcaccataatgtacaccagcggcacaagcggtgatcctaaaggtgtggttttgactcaccaagcggtcgcgacttttgttgttgggatggatctctatatggaccagtttgaagataagatgacacatgatgatgtgtatctctccttcttgccgttggctcatattcttgaccgtatgaatgaggaatacttctttcgcaaaggcgcttccgtcggctattaccatggaaatttgaacgtgttacgtgacgatattcaagaactgaaaccgacttatctagctggagtaccaagagtgtttgagagaatccatgaggggattcaaaaggctcttcaagaacttaatccaagaaggagattcatcttcaatgctctctacaaacacaagcttgcgtggttgaatcgtagatactctcatagtaaagcttcacccatggctgatttcattgctttcagaaagattagagacaaattgggaggtcgcatccggttgttagtatccggaggagcacctttgagccctgagattgaagagtttttgagagttacttgttgttgctttgtcgttcaaggctacggtctaacggagacgcttggaggaacggctttgggtttcccggacgagatgtgtatgctagggacagtcggtattccagcggtttacaacgagatacggcttgaggaggtgtctgaaatgggctatgacccgctcggagaaaatccggcaggagagatctgtataagaggacaatgtatgttttctgggtattacaagaaccctgaactcactgaagaagtcatgaaagatggatggttccacacaggagatataggtgagattcttccaaacggagtactcaagatcatcgatcgcaaaaagaatctgatcaaactttctcaaggagaatatgttgctctcgagcatttggaaaacatcttcgggcaaaactctgttgtccaagatatatgggtttatggagacagcttcaaatctatgcttgtcgcggtggttgttcccaacccagaaaccgtcaacaggtgggctaaagatctcggttttactaaaccattcgtagaactctgttctttcccggagcttaaagaacacatcatttcagaactgaagtccacggcagaaaagaacaagctaagaaagtttgagtacatcaaagcggtggcagtggagacaaaacctttcgacgtagagagagacttagtgactgcgacgctcaagaatcggaggaacaatcttctcaaatattatcaggtgcaaatcgacgaaatgtaccgcaaattggcctcaaagaaaatctgaaagtattgcgatgatgtgtgtgctgttattgatagttatatatgtacgttatatgtatcaataattcatagatatgagctttatgctttatgtaatattttatttttatgttgtatgacatttacatcataattatggattttttttttcttttg

SEQ ID NO: 39127 - protein, 660 aa, Arabidopsis thaliana
  peptide (1)..(660): Ceres Seq. ID no. 13645847
MKSFAAKVEEGVKGIDGKPSVGPVYRNLLSEKGFPPIDSEITTAWDIFSKSVEKFPDNNMLGWRRIVDEKVGPYMWKTYKEVYEEVLQIGSALRAAGAEPGSRVGIYGVNCPQWIIAMEACAAHTLICVPLYDTLGSGAVDYIVEHAEIDFVFVQDTKIKGLLEPDCKCAKRLKAIVSFTNVSDELSHKASEIGVKTYSWIDFLHMGREKPEDTNPPKAFNICTIMYTSGTSGDPKGVVLTHQAVATFVVGMDLYMDQFEDKMTHDDVYLSFLPLAHILDRMNEEYFFRKGASVGYYHGNLNVLRDDIQELKPTYLAGVPRVFERIHEGIQKALQELNPRRRFIFNALYKHKLAWLNRRYSHSKASPMADFIAFRKIRDKLGGRIRLLVSGGAPLSPEIEEFLRVTCCCFVVQGYGLTETLGGTALGFPDEMCMLGTVGIPAVYNEIRLEEVSEMGYDPLGENPAGEICIRGQCMFSGYYKNPELTEEVMKDGWFHTGDIGEILPNGVLKIIDRKKNLIKLSQGEYVALEHLENIFGQNSVVQDIWVYGDSFKSMLVAVVVPNPETVNRWAKDLGFTKPFVELCSFPELKEHIISELKSTAEKNKLRKFEYIKAVAVETKPFDVERDLVTATLKNRRNNLLKYYQVQIDEMYRKLASKKI

SEQ ID NO: 39128 - protein, 601 aa, Arabidopsis thaliana
  peptide (1)..(601): Ceres Seq. ID no. 13645848
MLGWRRIVDEKVGPYMWKTYKEVYEEVLQIGSALRAAGAEPGSRVGIYGVNCPQWIIAMEACAAHTLICVPLYDTLGSGAVDYIVEHAEIDFVFVQDTKIKGLLEPDCKCAKRLKAIVSFTNVSDELSHKASEIGVKTYSWIDFLHMGREKPEDTNPPKAFNICTIMYTSGTSGDPKGVVLTHQAVATFVVGMDLYMDQFEDKMTHDDVYLSFLPLAHILDRMNEEYFFRKGASVGYYHGNLNVLRDDIQELKPTYLAGVPRVFERIHEGIQKALQELNPRRRFIFNALYKHKLAWLNRRYSHSKASPMADFIAFRKIRDKLGGRIRLLVSGGAPLSPEIEEFLRVTCCCFVVQGYGLTETLGGTALGFPDEMCMLGTVGIPAVYNEIRLEEVSEMGYDPLGENPAGEICIRGQCMFSGYYKNPELTEEVMKDGWFHTGDIGEILPNGVLKIIDRKKNLIKLSQGEYVALEHLENIFGQNSVVQDIWVYGDSFKSMLVAVVVPNPETVNRWAKDLGFTKPFVELCSFPELKEHIISELKSTAEKNKLRKFEYIKAVAVETKPFDVERDLVTATLKNRRNNLLKYYQVQIDEMYRKLASKKI

SEQ ID NO: 39129 - protein, 586 aa, Arabidopsis thaliana
  peptide (1)..(586): Ceres Seq. ID no. 13645849
MWKTYKEVYEEVLQIGSALRAAGAEPGSRVGIYGVNCPQWIIAMEACAAHTLICVPLYDTLGSGAVDYIVEHAEIDFVFVQDTKIKGLLEPDCKCAKRLKAIVSFTNVSDELSHKASEIGVKTYSWIDFLHMGREKPEDTNPPKAFNICTIMYTSGTSGDPKGVVLTHQAVATFVVGMDLYMDQFEDKMTHDDVYLSFLPLAHILDRMNEEYFFRKGASVGYYHGNLNVLRDDIQELKPTYLAGVPRVFERIHEGIQKALQELNPRRRFIFNALYKHKLAWLNRRYSHSKASPMADFIAFRKIRDKLGGRIRLLVSGGAPLSPEIEEFLRVTCCCFVVQGYGLTETLGGTALGFPDEMCMLGTVGIPAVYNEIRLEEVSEMGYDPLGENPAGEICIRGQCMFSGYYKNPELTEEVMKDGWFHTGDIGEILPNGVLKIIDRKKNLIKLSQGEYVALEHLENIFGQNSVVQDIWVYGDSFKSMLVAVVVPNPETVNRWAKDLGFTKPFVELCSFPELKEHIISELKSTAEKNKLRKFEYIKAVAVETKPFDVERDLVTATLKNRRNNLLKYYQVQIDEMYRKLASKKI

SEQ ID NO: 39130 - DNA, 1917 bp, Arabidopsis thaliana
  misc_feature (1)..(1917): Ceres Seq. ID no. 12371118
  misc_feature (1)..(1917): Ortholog of  Ceres SEQ ID NO 12586556 as cited in SEQ ID NO 64667
  misc_feature (1)..(1917): Ortholog of  Ceres SEQ ID NO 13660894 as cited in SEQ ID NO 67475
gtacttgatatttaaaatcgatttctgatacacttgttagattgagacaatgagcaagggggcggcaataatagcttatgcaaatcccatctttcatattcgacatctaaagcttgaatctttcttgtggaacatcatcattcgtgccattgttcacaatgtttcgtcgcctcaacgacattctccgatctcagtctacctccgtatgcgcaaccatcgcgtctctcccgattttcatacctttccgtttcttctcccttctttccacaatccgcttcatcttcctcttgggcaacgaactcatgctcagattcttctttttggacttgacaaagacccatttgtccgaacttcactgctcaacatgtattcttcctgtggcgacttgagatcagctcagcgagttttcgatgactcgggctcgaaggatttaccggcctggaactctgtggtcaatgcttatgccaaagctgggttgatcgatgatgcgcggaaactgttcgacgaaatgcctgaaagaaacgtgatttcctggagctgcttgattaacggctacgttatgtgtgggaaatacaaagaagcgcttgatttgttccgggagatgcaattacctaaaccaaacgaagcattcgtcagacccaacgagtttacaatgtcgactgtactctcggcttgtgggcgattgggtgcgctcgagcaagggaaatgggttcacgcttacatcgataagtaccacgttgagattgacattgtcttaggcacagctctcattgatatgtacgccaaatgtgggagcctcgagagggcgaaaagggttttcaatgccttgggatccaagaaagatgtcaaagcttacagtgctatgatatgttgcttagcaatgtacggtctcacagatgagtgcttccaactgttctctgagatgaccacgagtgacaacataaacccaaactctgtgacatttgtgggcattctcggtgcttgtgtacatcgaggtctaataaacgaaggaaaatcttactttaaaatgatgattgaggaatttggtatacgccatcaatccagcattatggttgtatggttgatctctacggaagatctggtttgatcaaagaagcagagagctttatagcatctatgcctatggagcctgatgtacttatttgggggtctctcttaagcggatcaagaatgcttggggatatcaagacttgtgaaggtgccctcaagcgactcatcgagctagatcctatgaacagtggagcatatgtgcttctctctaacgtctatgccaaaacagggaggtggatggaagtcaagtgtatcagacacgaaatggaggcaatgcaaaactatttccctcttttccaactcttttcttaactgttgcacagtttctgaagtaaatacagattctctctacaggtaaagggcattaataaagttccgggatgtagctatgttgaagtagagggagtggttcacgagtttgttgtaggagacgaatctcaacaagagagcgaaaggatctatgctatgctcgatgagataatgcagaggctgagagaagctggatatgttacagacactaaggaggttttacttgatcttaacgagaaagataaagagatagctttgtcttaccacagtgagaaactggctattgcgttctgtttgatgaagacaaggcctggaactccagtgagaatcatcaagaacctcagaatctgtggagattgtcatcttgtaatgaagatgatctcgaagctttttagtagagaaattgttgtgagagattgtaatagatttcaccattttagagacgggtcttgctcttgcagagatttttggtgataacaattgcagcaatgtttgtgttggattgaataaacatattactgaattttggaggttttg

SEQ ID NO: 39131 - protein, 352 aa, Arabidopsis thaliana
  peptide (1)..(352): Ceres Seq. ID no. 12371119
MSKGAAIIAYANPIFHIRHLKLESFLWNIIIRAIVHNVSSPQRHSPISVYLRMRNHRVSPDFHTFPFLLPSFHNPLHLPLGQRTHAQILLFGLDKDPFVRTSLLNMYSSCGDLRSAQRVFDDSGSKDLPAWNSVVNAYAKAGLIDDARKLFDEMPERNVISWSCLINGYVMCGKYKEALDLFREMQLPKPNEAFVRPNEFTMSTVLSACGRLGALEQGKWVHAYIDKYHVEIDIVLGTALIDMYAKCGSLERAKRVFNALGSKKDVKAYSAMICCLAMYGLTDECFQLFSEMTTSDNINPNSVTFVGILGACVHRGLINEGKSYFKMMIEEFGIRHQSSIMVVWLISTEDLV

SEQ ID NO: 39132 - protein, 300 aa, Arabidopsis thaliana
  peptide (1)..(300): Ceres Seq. ID no. 12371120
MRNHRVSPDFHTFPFLLPSFHNPLHLPLGQRTHAQILLFGLDKDPFVRTSLLNMYSSCGDLRSAQRVFDDSGSKDLPAWNSVVNAYAKAGLIDDARKLFDEMPERNVISWSCLINGYVMCGKYKEALDLFREMQLPKPNEAFVRPNEFTMSTVLSACGRLGALEQGKWVHAYIDKYHVEIDIVLGTALIDMYAKCGSLERAKRVFNALGSKKDVKAYSAMICCLAMYGLTDECFQLFSEMTTSDNINPNSVTFVGILGACVHRGLINEGKSYFKMMIEEFGIRHQSSIMVVWLISTEDLV

SEQ ID NO: 39133 - protein, 247 aa, Arabidopsis thaliana
  peptide (1)..(247): Ceres Seq. ID no. 12371121
MYSSCGDLRSAQRVFDDSGSKDLPAWNSVVNAYAKAGLIDDARKLFDEMPERNVISWSCLINGYVMCGKYKEALDLFREMQLPKPNEAFVRPNEFTMSTVLSACGRLGALEQGKWVHAYIDKYHVEIDIVLGTALIDMYAKCGSLERAKRVFNALGSKKDVKAYSAMICCLAMYGLTDECFQLFSEMTTSDNINPNSVTFVGILGACVHRGLINEGKSYFKMMIEEFGIRHQSSIMVVWLISTEDLV

SEQ ID NO: 39134 - DNA, 2250 bp, Arabidopsis thaliana
  misc_feature (1)..(2250): Ceres Seq. ID no. 13497578
  misc_feature (1)..(2250): Ortholog of  Ceres SEQ ID NO 13656177 as cited in SEQ ID NO 64997
gtatcttgctctgtctccgataccaaaaggtttttgtattctattgaagattataaactaaagggaggagctttgagaatttgattgttgatatccaaggatttgcaagctagtttttttttttacgacgttatacttttcgattatgagtgcatcatgggctgatgtagctgactcagagaacacgggttctgggtcttctaatcagaattctcatccttcacgacctgcttatgttcctccacatctaaggaacaggccagcagcttctgagcctgttgctccattgccagctaatgatcgtgtaggttatggtggtccaccttctggctctcgatgggctcctggtggtagtggtgttggtgttggaggtggtggtggttatagggctgatgcaggtcgtcctggctctggctctggctatggtggacgaggaggtggtggttggaacaacagaagcggagggtgggaccgtagggaacgtgaagtaaacccctttgaaaatgatgattccgaaccagaaccagcttttactgagcaggataatacggttattaattttgatgcctatgaagatattccgattgagaccagtggggataatgtgcctcctcctgttaacacattcgcagagatagatctcggggaggcattgaatctaaatatccgtagatgcaaatatgttaagccaacacctgttcagcgtcatgcgattccgatattgcttgaagggagggatttgatggcctgtgctcagacagggtcggggaagacagctgctttttgctttccaatcattagtggaataatgaaagatcagcatgtacagagaccccgtggttcacgaacagtctaccctcttgcagttattctctcaccaacaagagagttggcaagtcagatacatgatgaggctaaaaggttctcttaccaaactggtgtgaaggtggttgttgcatatggaggaacacctattaaccagcagctccgggaacttgagaggggagtcgatattcttgtggcaacgcctggtcgattaaatgatttgctcgagagagctagagtctcaatgcagatgattagatttttagctcttgatgaggccgataggatgcttgacatgggttttgaaccacaaattagaaagattgtcgaacaaatggacatgcctccacgtggagttagacagacactgttgtttagtgctacatttccaagagaaattcagagactcgcagctgacttcctagcaaattatatatttttggctgtgggtagagtgggttcaagtaccgatttaattgtccaaagggttgagtttgtccttgactctgacaaaagaagtcatctcatggacctgcttcacgctcagagagagaatggcatccaaggcaagcaagccctgaccttagtttttgtggagacaaagagaggagctgactctttggaaaattggttgtgcatcaatgggtttccagcaacctccattcacggtgacagaacacagcaggaaagagaagtggcattgaaagccttcaagagtgggagaacaccgattttggttgcaactgatgtagcagcacgtggccttgacattccccacgtggctcatgtggtcaacttcgatctgccaaatgacattgatgactatgtccaccgtattggacgaacaggacgtgctggcaaatcaggactagcaactgccttcttcaacgatggcaacacctcactggccagaccgctcgctgagctgatgcaagaagctaaccaagaagtccctgagtggctcactcggtatgcgtcacggtcctcttttggtggtggtaagaaccggcggtctggtggtcgatttggtggccgtgactttagaagggaagggtctttcggtagcggtagaggaggctatggcggtggaggaggagggtatggcggcggaggaggctatggtggtggaggaggctatggcggcggaggaggctatggtggtggatatggtggtgcttcaagtggtggatatggtggagaacctccaagtgcttgggactaagcttccaatgttctttttgttttggttacaacttttgacaaaaaaaatatttcttctacattcacaaagagagtatgtattgccccttacacctatgagatttcactcaggagatggatatataacaattgttgatgttttaggtgttttgatctttttaggctattattaggggttgtcataaaaacagtcatcagtttcgc

SEQ ID NO: 39135 - protein, 633 aa, Arabidopsis thaliana
  peptide (1)..(633): Ceres Seq. ID no. 13497579
MSASWADVADSENTGSGSSNQNSHPSRPAYVPPHLRNRPAASEPVAPLPANDRVGYGGPPSGSRWAPGGSGVGVGGGGGYRADAGRPGSGSGYGGRGGGGWNNRSGGWDRREREVNPFENDDSEPEPAFTEQDNTVINFDAYEDIPIETSGDNVPPPVNTFAEIDLGEALNLNIRRCKYVKPTPVQRHAIPILLEGRDLMACAQTGSGKTAAFCFPIISGIMKDQHVQRPRGSRTVYPLAVILSPTRELASQIHDEAKRFSYQTGVKVVVAYGGTPINQQLRELERGVDILVATPGRLNDLLERARVSMQMIRFLALDEADRMLDMGFEPQIRKIVEQMDMPPRGVRQTLLFSATFPREIQRLAADFLANYIFLAVGRVGSSTDLIVQRVEFVLDSDKRSHLMDLLHAQRENGIQGKQALTLVFVETKRGADSLENWLCINGFPATSIHGDRTQQEREVALKAFKSGRTPILVATDVAARGLDIPHVAHVVNFDLPNDIDDYVHRIGRTGRAGKSGLATAFFNDGNTSLARPLAELMQEANQEVPEWLTRYASRSSFGGGKNRRSGGRFGGRDFRREGSFGSGRGGYGGGGGGYGGGGGYGGGGGYGGGGGYGGGYGGASSGGYGGEPPSAWD

SEQ ID NO: 39136 - protein, 434 aa, Arabidopsis thaliana
  peptide (1)..(434): Ceres Seq. ID no. 13497580
MACAQTGSGKTAAFCFPIISGIMKDQHVQRPRGSRTVYPLAVILSPTRELASQIHDEAKRFSYQTGVKVVVAYGGTPINQQLRELERGVDILVATPGRLNDLLERARVSMQMIRFLALDEADRMLDMGFEPQIRKIVEQMDMPPRGVRQTLLFSATFPREIQRLAADFLANYIFLAVGRVGSSTDLIVQRVEFVLDSDKRSHLMDLLHAQRENGIQGKQALTLVFVETKRGADSLENWLCINGFPATSIHGDRTQQEREVALKAFKSGRTPILVATDVAARGLDIPHVAHVVNFDLPNDIDDYVHRIGRTGRAGKSGLATAFFNDGNTSLARPLAELMQEANQEVPEWLTRYASRSSFGGGKNRRSGGRFGGRDFRREGSFGSGRGGYGGGGGGYGGGGGYGGGGGYGGGGGYGGGYGGASSGGYGGEPPSAWD

SEQ ID NO: 39137 - protein, 412 aa, Arabidopsis thaliana
  peptide (1)..(412): Ceres Seq. ID no. 13497581
MKDQHVQRPRGSRTVYPLAVILSPTRELASQIHDEAKRFSYQTGVKVVVAYGGTPINQQLRELERGVDILVATPGRLNDLLERARVSMQMIRFLALDEADRMLDMGFEPQIRKIVEQMDMPPRGVRQTLLFSATFPREIQRLAADFLANYIFLAVGRVGSSTDLIVQRVEFVLDSDKRSHLMDLLHAQRENGIQGKQALTLVFVETKRGADSLENWLCINGFPATSIHGDRTQQEREVALKAFKSGRTPILVATDVAARGLDIPHVAHVVNFDLPNDIDDYVHRIGRTGRAGKSGLATAFFNDGNTSLARPLAELMQEANQEVPEWLTRYASRSSFGGGKNRRSGGRFGGRDFRREGSFGSGRGGYGGGGGGYGGGGGYGGGGGYGGGGGYGGGYGGASSGGYGGEPPSAWD

SEQ ID NO: 39138 - DNA, 1143 bp, Arabidopsis thaliana
  misc_feature (1)..(1143): Ceres Seq. ID no. 12329706
  misc_feature (1)..(1143): Ortholog of  Ceres SEQ ID NO 12618197 as cited in SEQ ID NO 64478
attctctaggcttttttatattctgaaagttttgattttttgtatcttgttttgtttctcaatcatcaatttgtggtagtagctcactagcaaacaatggaggggaggttgaataatatgtggaggttgactgtgaatgagagcaaattcgttgaatctgcgttgcaatctgagctcagagtcgatggtcgtggcctttatgattaccgcaagcttactattaagtttggcaaggaatatggcagctcacaagttcaactgggtcagactcatgtaatggcttttgtgactgctcagctagtacaaccttacaaagacagacctagtgaaggctccttctctatcttcaccgagttttctccaatggctgatccatcgtttgagccagggcatcctggtgaatctgctgttgagcttggccgtattatagaccgtgctctacgagaaagccgtgcagtagatacagagtcgctttgtgttctagccggaaagctggtttggtctgttcgcattgatcttcacattttggacaatggagggaacttggttgatgctgctaatgttgctgccttagccgcactcatgactttcaggagacctgattgcactgtaggaggggacaacagtcaagacgtgatcatacatccacccgaagaaagggaaccacttcctttgataatacatcatctcccaatagccttcacgtttggattttttaataaaggcagtatcttggtgatggacccaacttacgttgaagaagctgttatgtgtgggagaatgactgtgacagtcaatgccaatggcgatatatgcgcaatccaaaaaccaggagaagaaggcgtgaaccagagtgtaatccttcattgcctgcgtcttgcttcttcaagagcttctgcaacaacaaagataattagagatgcagttgaagcatacaaccgtgagaggagctcacagaaggtggagcggcatcatactttggctaagtctgaagttttgggacctattgtagttgtgtaggaagagacataaataaaacatttgctgtggtcgtcgattgtaaataaagattttagttgtagaaatcttatcagcaacactaagctataaaaacgtcgatatgatcaagacatgttgagactc

SEQ ID NO: 39139 - protein, 307 aa, Arabidopsis thaliana
  peptide (1)..(307): Ceres Seq. ID no. 12329707
MEGRLNNMWRLTVNESKFVESALQSELRVDGRGLYDYRKLTIKFGKEYGSSQVQLGQTHVMAFVTAQLVQPYKDRPSEGSFSIFTEFSPMADPSFEPGHPGESAVELGRIIDRALRESRAVDTESLCVLAGKLVWSVRIDLHILDNGGNLVDAANVAALAALMTFRRPDCTVGGDNSQDVIIHPPEEREPLPLIIHHLPIAFTFGFFNKGSILVMDPTYVEEAVMCGRMTVTVNANGDICAIQKPGEEGVNQSVILHCLRLASSRASATTKIIRDAVEAYNRERSSQKVERHHTLAKSEVLGPIVVV

SEQ ID NO: 39140 - protein, 300 aa, Arabidopsis thaliana
  peptide (1)..(300): Ceres Seq. ID no. 12329708
MWRLTVNESKFVESALQSELRVDGRGLYDYRKLTIKFGKEYGSSQVQLGQTHVMAFVTAQLVQPYKDRPSEGSFSIFTEFSPMADPSFEPGHPGESAVELGRIIDRALRESRAVDTESLCVLAGKLVWSVRIDLHILDNGGNLVDAANVAALAALMTFRRPDCTVGGDNSQDVIIHPPEEREPLPLIIHHLPIAFTFGFFNKGSILVMDPTYVEEAVMCGRMTVTVNANGDICAIQKPGEEGVNQSVILHCLRLASSRASATTKIIRDAVEAYNRERSSQKVERHHTLAKSEVLGPIVVV

SEQ ID NO: 39141 - protein, 247 aa, Arabidopsis thaliana
  peptide (1)..(247): Ceres Seq. ID no. 12329709
MAFVTAQLVQPYKDRPSEGSFSIFTEFSPMADPSFEPGHPGESAVELGRIIDRALRESRAVDTESLCVLAGKLVWSVRIDLHILDNGGNLVDAANVAALAALMTFRRPDCTVGGDNSQDVIIHPPEEREPLPLIIHHLPIAFTFGFFNKGSILVMDPTYVEEAVMCGRMTVTVNANGDICAIQKPGEEGVNQSVILHCLRLASSRASATTKIIRDAVEAYNRERSSQKVERHHTLAKSEVLGPIVVV

SEQ ID NO: 39142 - DNA, 1141 bp, Arabidopsis thaliana
  misc_feature (1)..(1141): Ceres Seq. ID no. 12422273
  misc_feature (1)..(1141): Ortholog of  Ceres SEQ ID NO 14303282 as cited in SEQ ID NO 0
attatctgggcagttgttggaacatacacgagctggtgagcgtgttgctgttgattcgagaaagcgtaaccctgctgattttgcattatggaaggcggcaaagcctgatgagccaagttgggagagcccttggggtccaggaagaccaggatggcacatcgagtgcagtgcaatgagtgttcattatctgtctccgaaatttgatattcatggaggtggtgcagatcttaaattcccgcatcatgaaaatgagatcgcccagacatgtgctgcatgtgaggatagtggtgtaaattactggttgcataatgggcatgtcactatcaacaacgagaagatggcaaaatcaaagcacaactttaaaacgattagagaaataaccgctagctaccatccattggctctgaggcacttcttgatgagtgcacagtaccggtctcctctgagtttcactgcctcacagctagagagttcgtcagaagctttatactatgtttaccagactttacaagatcttgatgaaggtctgtcaccatatcaagacgcattgtctgaagatggtggaaaatctgaacaaactgcagaaggaaaagacatcattaagaagcagcgaatgtcaatgcttgtgtcactcgttgagattgagaaagcagcaagggaagttcttgatgtacttggtttactcactacactgagctatgccgagattttgaaagaaatgaaactaaaaacactaataagagcagaaattggagaagaaggtatttcgcagttaatagaagaaaggataacagccaggaagaataaagatttcacgaaaagtgatgagattagagagaaactgacaagaaaaggaatagcgttaatggacattggcaaagaaactgtatggagaccatgcttcccttctcaggctgattccagcacttgagcttagagcagagtcatggagatagttaacggtttcttcatttctctaactcttcttctttagccttttgtttgaggctctttctttataactctgtttttggaattttgcaatgacttcaaaatatacacttgttgctgtttgttgtattcttaccattcacaatgacattgtaacaatattgttactttggatattggttctatagcc

SEQ ID NO: 39143 - protein, 309 aa, Arabidopsis thaliana
  peptide (1)..(309): Ceres Seq. ID no. 12422274
LSGQLLEHTRAGERVAVDSRKRNPADFALWKAAKPDEPSWESPWGPGRPGWHIECSAMSVHYLSPKFDIHGGGADLKFPHHENEIAQTCAACEDSGVNYWLHNGHVTINNEKMAKSKHNFKTIREITASYHPLALRHFLMSAQYRSPLSFTASQLESSSEALYYVYQTLQDLDEGLSPYQDALSEDGGKSEQTAEGKDIIKKQRMSMLVSLVEIEKAAREVLDVLGLLTTLSYAEILKEMKLKTLIRAEIGEEGISQLIEERITARKNKDFTKSDEIREKLTRKGIALMDIGKETVWRPCFPSQADSST

SEQ ID NO: 39144 - protein, 252 aa, Arabidopsis thaliana
  peptide (1)..(252): Ceres Seq. ID no. 12422275
MSVHYLSPKFDIHGGGADLKFPHHENEIAQTCAACEDSGVNYWLHNGHVTINNEKMAKSKHNFKTIREITASYHPLALRHFLMSAQYRSPLSFTASQLESSSEALYYVYQTLQDLDEGLSPYQDALSEDGGKSEQTAEGKDIIKKQRMSMLVSLVEIEKAAREVLDVLGLLTTLSYAEILKEMKLKTLIRAEIGEEGISQLIEERITARKNKDFTKSDEIREKLTRKGIALMDIGKETVWRPCFPSQADSST

SEQ ID NO: 39145 - protein, 197 aa, Arabidopsis thaliana
  peptide (1)..(197): Ceres Seq. ID no. 12422276
MAKSKHNFKTIREITASYHPLALRHFLMSAQYRSPLSFTASQLESSSEALYYVYQTLQDLDEGLSPYQDALSEDGGKSEQTAEGKDIIKKQRMSMLVSLVEIEKAAREVLDVLGLLTTLSYAEILKEMKLKTLIRAEIGEEGISQLIEERITARKNKDFTKSDEIREKLTRKGIALMDIGKETVWRPCFPSQADSST

SEQ ID NO: 39146 - DNA, 1130 bp, Arabidopsis thaliana
  misc_feature (1)..(1130): Ceres Seq. ID no. 12330197
  misc_feature (1)..(1130): Ortholog of  Ceres SEQ ID NO 12615365 as cited in SEQ ID NO 63027
  misc_feature (1)..(1130): Ortholog of  Ceres SEQ ID NO 12783179 as cited in SEQ ID NO 0
atttttctcctaccgtcgaactaaatcctagggcacaggtgaaatcgccgagtgacgtctagccaccgcaccgcctccttctccggttatctcgctactaatcagactattccacagctatgtcacaggtagacagcagaaattcatcagcagccaagcgtgctagaactgacggggggcgtagagaagatgattggatctgcccaagttgtggcaatgtcaacttttcattcaggacaacttgcaatatgcgtaattgcactcagcctagacctgcagatcataatggaaagtctgctcccaaacctatgcaacatcaacaaggtttctcatcacccggggcatacttaggatctgggggtccccctccagtatatatgggcgggtcaccatatggatctcctctctttaatggatcgtctatgcctccttatgacgtcccattttctgggggttcgccttaccattttaactataatagccgaatgcctgccggagctcattacagaccattacatatgtctggaccaccaccataccatggcggatctatgatgggaagtggtggtatgtatggaatgcctccaccaatagacaggtatggccttggtatggcaatgggtcctggttctgccgctgccatgatgccaagaccaaggttttacccagatgaaaaatcacaaaagagagattcaactcgcgataatgattggacatgtccgaattgtggtaatgtaaacttctcattcagaactgtatgtaacatgaggaagtgcaacactccaaagcctggttctcagcagggtggaagctcagataaaatatccaaacaaaatgcaccggaagggagctggaagtgtgataactgtggaaatataaactacccattcaggagcaaatgcaacaggcaaaactgtggagctgataagcctggggatcggtcgaatggatctccgtcccgtgcaccagaagagaacgatcaggtttgtaagatgtatctatgtggtcacaactgtttgttaataaaatgtttgcctctgaaactcgtaaatgtaacaacctgtgtagattttatgccttgtgaaagcagaggttatatgtttatgaaaaaattgactccgactacgttt

SEQ ID NO: 39147 - protein, 337 aa, Arabidopsis thaliana
  peptide (1)..(337): Ceres Seq. ID no. 12330198
MSQVDSRNSSAAKRARTDGGRREDDWICPSCGNVNFSFRTTCNMRNCTQPRPADHNGKSAPKPMQHQQGFSSPGAYLGSGGPPPVYMGGSPYGSPLFNGSSMPPYDVPFSGGSPYHFNYNSRMPAGAHYRPLHMSGPPPYHGGSMMGSGGMYGMPPPIDRYGLGMAMGPGSAAAMMPRPRFYPDEKSQKRDSTRDNDWTCPNCGNVNFSFRTVCNMRKCNTPKPGSQQGGSSDKISKQNAPEGSWKCDNCGNINYPFRSKCNRQNCGADKPGDRSNGSPSRAPEENDQVCKMYLCGHNCLLIKCLPLKLVNVTTCVDFMPCESRGYMFMKKLTPTTF

SEQ ID NO: 39148 - protein, 294 aa, Arabidopsis thaliana
  peptide (1)..(294): Ceres Seq. ID no. 12330199
MRNCTQPRPADHNGKSAPKPMQHQQGFSSPGAYLGSGGPPPVYMGGSPYGSPLFNGSSMPPYDVPFSGGSPYHFNYNSRMPAGAHYRPLHMSGPPPYHGGSMMGSGGMYGMPPPIDRYGLGMAMGPGSAAAMMPRPRFYPDEKSQKRDSTRDNDWTCPNCGNVNFSFRTVCNMRKCNTPKPGSQQGGSSDKISKQNAPEGSWKCDNCGNINYPFRSKCNRQNCGADKPGDRSNGSPSRAPEENDQVCKMYLCGHNCLLIKCLPLKLVNVTTCVDFMPCESRGYMFMKKLTPTTF

SEQ ID NO: 39149 - protein, 274 aa, Arabidopsis thaliana
  peptide (1)..(274): Ceres Seq. ID no. 12330200
MQHQQGFSSPGAYLGSGGPPPVYMGGSPYGSPLFNGSSMPPYDVPFSGGSPYHFNYNSRMPAGAHYRPLHMSGPPPYHGGSMMGSGGMYGMPPPIDRYGLGMAMGPGSAAAMMPRPRFYPDEKSQKRDSTRDNDWTCPNCGNVNFSFRTVCNMRKCNTPKPGSQQGGSSDKISKQNAPEGSWKCDNCGNINYPFRSKCNRQNCGADKPGDRSNGSPSRAPEENDQVCKMYLCGHNCLLIKCLPLKLVNVTTCVDFMPCESRGYMFMKKLTPTTF

SEQ ID NO: 39150 - DNA, 1652 bp, Arabidopsis thaliana
  misc_feature (1)..(1652): Ceres Seq. ID no. 12599962
  misc_feature (1)..(1652): Ortholog of  Ceres SEQ ID NO 15177320 as cited in SEQ ID NO 52645
  misc_feature (1)..(1652): Ortholog of  Ceres SEQ ID NO 15171359 as cited in SEQ ID NO 57279
  misc_feature (1)..(1652): Ortholog of  Ceres SEQ ID NO 14313840 as cited in SEQ ID NO 59568
  misc_feature (1)..(1652): Ortholog of  Ceres SEQ ID NO 15168502 as cited in SEQ ID NO 60095
  misc_feature (1)..(1652): Ortholog of  Ceres SEQ ID NO 13662245 as cited in SEQ ID NO 62708
  misc_feature (1)..(1652): Ortholog of  Ceres SEQ ID NO 14314084 as cited in SEQ ID NO 63256
gttaacggtcggaatctaaaaaatgtctcctaactactccttcttcttcttcatcttcttcctcacttcacactcttctgttttctccagaatcttaccagagacctccacaaccactacctcaattctcaatgtcgctgactccatccacagaaccaagtatacgtcgtcgtttcggttaaaccagcaagaagaacagactcactctgcttcttcttctttcagcttgcagcttcattcacgagtttccgtccgaggaactgaacactcagactataagtcactcacactagccagactcaaccgtgacacagcccgagtcaaatctctcataacccgtttagatctagccatcaacaacatatccaaagcagatctcaaacccatcagcacaatgtacaccactgaggaacaagatatcgaagctcctttaatctccggcacgactcaaggaagtggcgagtacttcacacgcgtcggtatcggaaaaccggcgcgtgaagtttatatggttctagatactggaagtgacgtgaactggctacaatgtactccttgcgctgactgttaccaccaaaccgaaccaatcttcgagccatcgtcgtcttcttcttacgagcctctctcttgtgacactccacagtgcaatgcccttgaagtctcagaatgtagaaacgccacgtgtctttacgaggtttcttacggtgatggttcttacaccgttggagatttcgccaccgagactctcacaatcggctcaactctagttcaaaacgtcgccgttggttgtggacacagcaacgaagggttgttcgtcggcgccgccggtttacttggactcggcggtggtttgttagctcttccgtcgcagctcaacacgacgtcgttctcgtactgtctcgttgaccgtgactcagactcggcttcgaccgtggatttcgggacttctctttctcctgacgccgtcgtggctccgttgctacgtaaccaccagctcgacacgttttactacctaggcctcaccggaataagcgtcggcggcgagttgcttcagattcctcagtcttctttcgagatggacgagtcaggcagcggtgggatcatcatcgactcaggaaccgccgtgactcgtctccagaccgaaatctataactcgcttagagactcgttcgtgaaaggaacgttggacttggaaaaagcagccggggtggcgatgtttgacacgtgttataacctttcggctaagacgacggtagaagtcccgaccgtggcttttcatttccccggcgggaagatgttggctttgccggcgaagaactacatgattccggttgactcggtggggacattttgtttggcatttgcaccgacggcgagttcactagcgattatcggaaacgtgcagcaacaagggacacgtgtcactttcgatttggcaaattctctcattggattctcgtctaataaatgctaagctgttttcatcaaaaaaaacaaaaatgctaagctgttttttctataaatatatttgagttacaatgaaaaggaaaagtcacttaaaagatagtaatgttaagttagagtactgtactactgtttggttgtgtttgtttcttgtacttgttgttgcaatgcatagagtgaaaaagagt

SEQ ID NO: 39151 - protein, 483 aa, Arabidopsis thaliana
  peptide (1)..(483): Ceres Seq. ID no. 12599963
MSPNYSFFFFIFFLTSHSSVFSRILPETSTTTTSILNVADSIHRTKYTSSFRLNQQEEQTHSASSSFSLQLHSRVSVRGTEHSDYKSLTLARLNRDTARVKSLITRLDLAINNISKADLKPISTMYTTEEQDIEAPLISGTTQGSGEYFTRVGIGKPAREVYMVLDTGSDVNWLQCTPCADCYHQTEPIFEPSSSSSYEPLSCDTPQCNALEVSECRNATCLYEVSYGDGSYTVGDFATETLTIGSTLVQNVAVGCGHSNEGLFVGAAGLLGLGGGLLALPSQLNTTSFSYCLVDRDSDSASTVDFGTSLSPDAVVAPLLRNHQLDTFYYLGLTGISVGGELLQIPQSSFEMDESGSGGIIIDSGTAVTRLQTEIYNSLRDSFVKGTLDLEKAAGVAMFDTCYNLSAKTTVEVPTVAFHFPGGKMLALPAKNYMIPVDSVGTFCLAFAPTASSLAIIGNVQQQGTRVTFDLANSLIGFSSNKC

SEQ ID NO: 39152 - protein, 359 aa, Arabidopsis thaliana
  peptide (1)..(359): Ceres Seq. ID no. 12599964
MYTTEEQDIEAPLISGTTQGSGEYFTRVGIGKPAREVYMVLDTGSDVNWLQCTPCADCYHQTEPIFEPSSSSSYEPLSCDTPQCNALEVSECRNATCLYEVSYGDGSYTVGDFATETLTIGSTLVQNVAVGCGHSNEGLFVGAAGLLGLGGGLLALPSQLNTTSFSYCLVDRDSDSASTVDFGTSLSPDAVVAPLLRNHQLDTFYYLGLTGISVGGELLQIPQSSFEMDESGSGGIIIDSGTAVTRLQTEIYNSLRDSFVKGTLDLEKAAGVAMFDTCYNLSAKTTVEVPTVAFHFPGGKMLALPAKNYMIPVDSVGTFCLAFAPTASSLAIIGNVQQQGTRVTFDLANSLIGFSSNKC

SEQ ID NO: 39153 - protein, 321 aa, Arabidopsis thaliana
  peptide (1)..(321): Ceres Seq. ID no. 12599965
MVLDTGSDVNWLQCTPCADCYHQTEPIFEPSSSSSYEPLSCDTPQCNALEVSECRNATCLYEVSYGDGSYTVGDFATETLTIGSTLVQNVAVGCGHSNEGLFVGAAGLLGLGGGLLALPSQLNTTSFSYCLVDRDSDSASTVDFGTSLSPDAVVAPLLRNHQLDTFYYLGLTGISVGGELLQIPQSSFEMDESGSGGIIIDSGTAVTRLQTEIYNSLRDSFVKGTLDLEKAAGVAMFDTCYNLSAKTTVEVPTVAFHFPGGKMLALPAKNYMIPVDSVGTFCLAFAPTASSLAIIGNVQQQGTRVTFDLANSLIGFSSNKC

SEQ ID NO: 39154 - DNA, 1778 bp, Arabidopsis thaliana
  misc_feature (1)..(1778): Ceres Seq. ID no. 12329299
  misc_feature (1)..(1778): Ortholog of  Ceres SEQ ID NO 13658707 as cited in SEQ ID NO 66286
  misc_feature (1)..(1778): Ortholog of  Ceres SEQ ID NO 13654528 as cited in SEQ ID NO 68080
aaaaaaggcttctctgtgttgttctctgtgttgttctctgtggtcattcttctttcttttcacttcttcttcttcttcgctcttcttctcactgtcgggttccatttggcgcgaaaagttcttcactttttccagcttttttttgttctctgacagttttttttttttgtttggttacaaataaagatgccagtaagtgtggcactagttttgctgttgacattgagcagtgtgattctgattaatgggagaagttacggcgtcggaaacatatgcgatcgtggtcggagaccgagcgagagaccacacagtgtcaaaatcactgattttggtgctgtgggagatgggaaaacgttgaacacacttgcgtttcaaaatgctgtcttttatctaaagtctttcgctgataaaggtggtgctcagctttatgttcctccgggacggtggctcaccggaagtttcaacctcaccagtcatctcactctctttctcgagaaagacgccgtcatacttgcctcacaggatccatcgcattggcaagtcacggatgccttaccgtcatatgggcggggtattgatctaccagggaagagatacatgagtttgataaacggtgacatgctacatgatgtagtagtaacaggtgataacggtaccatagatgggcaaggccttgtttggtgggatcggtttaattctcattctttagagtacagtcgccctcaccttgtcgagtttgtctctgccgaaaatgtcattgtatcaaatcttacattcttgaacgctccggcttatactatccattcagtttattgtcgcaatttatacattcatagagtaacggctaatacttgtccagaatctccttataccatcggtattgtcccagattcttctgaaaatgtgtgtatccaagaatctagtatcaacatggggtatgatgccatttctcttaaaagtggttgtgatgaatacggtttatcgtatgcaagacctactgctaatgtccagataagaaatgtttaccttagagcagcttctggttcctccatttcctttggtagtgaaatgtctggtggtatatctgatgttgaggtcagtgatgctcacatacacaactcgttatccgggattgcctttagaacaacaaatggaagaggtggttatattaaggagattgatatttccaacatccatatggttaatgttggtactgcatttctagccaacggtagcttcggtactcatccggattctggtttcgatgaaaatgcttacccgcttgtgagtcacatcaggttacatgacattgttggagaaaacataagcactgctggatatttctttggaacgaaagagtctcctttcacttcgattttgttatcgaatatctctctgtcgattaaaaactcggcttcccctgctgattcttggcaatgctcatatgttgacgggtcttcggaattcgtagtccctgaaccgtgccttgagctgaagagttttgatagttactatggtagagctgaggccttatgaaaccaaacttcattaggaatgatgattcatatttgtttaagagagagcaaatggttctgattcttttcttttccccaaaaataaaccacagtgtgtagaattattacctgttccttgttggtgttgttgtccctgttatttgcagcttgtgagattaatatatcttgtacaggttcatttcttcattcatgtgtaaccaaagaaattttgtattagcccagtaaccagatattaattttttt

SEQ ID NO: 39155 - protein, 449 aa, Arabidopsis thaliana
  peptide (1)..(449): Ceres Seq. ID no. 12329300
MPVSVALVLLLTLSSVILINGRSYGVGNICDRGRRPSERPHSVKITDFGAVGDGKTLNTLAFQNAVFYLKSFADKGGAQLYVPPGRWLTGSFNLTSHLTLFLEKDAVILASQDPSHWQVTDALPSYGRGIDLPGKRYMSLINGDMLHDVVVTGDNGTIDGQGLVWWDRFNSHSLEYSRPHLVEFVSAENVIVSNLTFLNAPAYTIHSVYCRNLYIHRVTANTCPESPYTIGIVPDSSENVCIQESSINMGYDAISLKSGCDEYGLSYARPTANVQIRNVYLRAASGSSISFGSEMSGGISDVEVSDAHIHNSLSGIAFRTTNGRGGYIKEIDISNIHMVNVGTAFLANGSFGTHPDSGFDENAYPLVSHIRLHDIVGENISTAGYFFGTKESPFTSILLSNISLSIKNSASPADSWQCSYVDGSSEFVVPEPCLELKSFDSYYGRAEAL

SEQ ID NO: 39156 - protein, 312 aa, Arabidopsis thaliana
  peptide (1)..(312): Ceres Seq. ID no. 12329301
MSLINGDMLHDVVVTGDNGTIDGQGLVWWDRFNSHSLEYSRPHLVEFVSAENVIVSNLTFLNAPAYTIHSVYCRNLYIHRVTANTCPESPYTIGIVPDSSENVCIQESSINMGYDAISLKSGCDEYGLSYARPTANVQIRNVYLRAASGSSISFGSEMSGGISDVEVSDAHIHNSLSGIAFRTTNGRGGYIKEIDISNIHMVNVGTAFLANGSFGTHPDSGFDENAYPLVSHIRLHDIVGENISTAGYFFGTKESPFTSILLSNISLSIKNSASPADSWQCSYVDGSSEFVVPEPCLELKSFDSYYGRAEAL

SEQ ID NO: 39157 - protein, 305 aa, Arabidopsis thaliana
  peptide (1)..(305): Ceres Seq. ID no. 12329302
MLHDVVVTGDNGTIDGQGLVWWDRFNSHSLEYSRPHLVEFVSAENVIVSNLTFLNAPAYTIHSVYCRNLYIHRVTANTCPESPYTIGIVPDSSENVCIQESSINMGYDAISLKSGCDEYGLSYARPTANVQIRNVYLRAASGSSISFGSEMSGGISDVEVSDAHIHNSLSGIAFRTTNGRGGYIKEIDISNIHMVNVGTAFLANGSFGTHPDSGFDENAYPLVSHIRLHDIVGENISTAGYFFGTKESPFTSILLSNISLSIKNSASPADSWQCSYVDGSSEFVVPEPCLELKSFDSYYGRAEAL

SEQ ID NO: 39158 - DNA, 1681 bp, Arabidopsis thaliana
  misc_feature (1)..(1681): Ceres Seq. ID no. 12385085
  misc_feature (1)..(1681): Ortholog of  Ceres SEQ ID NO 15178264 as cited in SEQ ID NO 52395
  misc_feature (1)..(1681): Ortholog of  Ceres SEQ ID NO 13598642 as cited in SEQ ID NO 64264
  misc_feature (1)..(1681): Ortholog of  Ceres SEQ ID NO 13663413 as cited in SEQ ID NO 66334
  misc_feature (1)..(1681): Ortholog of  Ceres SEQ ID NO 12779833 as cited in SEQ ID NO 66670
  misc_feature (1)..(1681): Ortholog of  Ceres SEQ ID NO 15169501 as cited in SEQ ID NO 67032
  misc_feature (1)..(1681): Ortholog of  Ceres SEQ ID NO 13590666 as cited in SEQ ID NO 68761
aactgaaaaattaaaaggcaaaagctttttttcagatttctgataatcagacagacagacacaaacaaacaccggtatcgacgaacggaactaactccgatatccaaaacccactccaagtttcacgaacgaagggcttagtatctgccatggctcctgatgcttctactgctcttgcagcgagggagaaagttcagcaaatcctgaatgcagcttgtaccggaaatctcgaattccttaagaatgttgctaagcagcttgatgaaggaaaagacttgacgaaaactgtggagagtattaaagacgcaaacaaacgtggagcgcttcacttcgctgcgagagaaggacaaactgaaatatgcagatatcttttggaagaactgaaactcaatgctgatgcaaaagatgaaactggtgatactccgcttgttcatgctgcgaggcaaggacagattgaaacggttaagtatcttttagagcaaggagctgatcccaatatagctagtgaactaggagccacagctttgcatcatgcggctgggacaggagaaatcgagttgctaaaggaattgctctctagaggtgttcctgttgattctgaaagtgaatctggcacgccattaatctgggctgctggccacgaccaaaaaaatgctgtggaagtcttgttagaacacaatgccaatcctaatgctgagactgaagataatatcacaccgttattatctgcagtggcagcgggttctctgtcatgcttagagttgttggtcaaggcaggtgccaaagctaacgtttttgctggtggtgcaactccattgcacattgcggctgatattggaaaccttgagttaattaactgtttacttaaagccggggctgatccgaatcagaaagatgaggagggtaataggccattagaagttgcagctgctagagacaacagaaaggttgttgagatcctcttcccattgacaacaaaaccagaaactgtttcggactggacagtagatggaattctcgctcacatggaatcaaacaaagaacaagaggaaaactcaaacaaggcgaaatcccaagagactgggatcaagaaagatcttcctgtggtctccccagaagcaaaggcaaaagccgcagaagcaaaagccagaggacaagacgcctttcacagaaaggattttcagatggctattgatgcttatacacaagcaattgattttgacccaacggatcataccttattctcaaaccgaagcctctgctggttgcgactaggacaagctgagcatgccttatctgatgctaaagcctgcagagaactaaacccagattggcctaaaggttgcttcagagaaggcgctgctctgcgtttgctacagcggtttgacgaggcagccaatgctttctacgagggagtattgcttagccctgaaagcaaagagctcattgatgctttcagagaagctgtagatgccggaaggaagtttcacggcaagggtgaggttaaggccaaatcataagatcttcgagagatggtttatgtagtatatgtatgaagttttgatctacttcttacctttgttctcccttgtgcactattcttaggaacaaagttttgtttgtggtcgaatttggtaatttgtccgagtttacagcttagataaaaaagagttggtaatac

SEQ ID NO: 39159 - protein, 456 aa, Arabidopsis thaliana
  peptide (1)..(456): Ceres Seq. ID no. 12385086
MAPDASTALAAREKVQQILNAACTGNLEFLKNVAKQLDEGKDLTKTVESIKDANKRGALHFAAREGQTEICRYLLEELKLNADAKDETGDTPLVHAARQGQIETVKYLLEQGADPNIASELGATALHHAAGTGEIELLKELLSRGVPVDSESESGTPLIWAAGHDQKNAVEVLLEHNANPNAETEDNITPLLSAVAAGSLSCLELLVKAGAKANVFAGGATPLHIAADIGNLELINCLLKAGADPNQKDEEGNRPLEVAAARDNRKVVEILFPLTTKPETVSDWTVDGILAHMESNKEQEENSNKAKSQETGIKKDLPVVSPEAKAKAAEAKARGQDAFHRKDFQMAIDAYTQAIDFDPTDHTLFSNRSLCWLRLGQAEHALSDAKACRELNPDWPKGCFREGAALRLLQRFDEAANAFYEGVLLSPESKELIDAFREAVDAGRKFHGKGEVKAKS

SEQ ID NO: 39160 - DNA, 1016 bp, Arabidopsis thaliana; identical to SEQ ID NO: 38791
  misc_feature (1)..(1016): Ceres Seq. ID no. 13576736
  misc_feature (1)..(1016): Ortholog of  Ceres SEQ ID NO 12611994 as cited in SEQ ID NO 54063

SEQ ID NO: 39161 - protein, 190 aa, Arabidopsis thaliana; identical to SEQ ID NO: 38792
  peptide (1)..(190): Ceres Seq. ID no. 13576737

SEQ ID NO: 39162 - protein, 167 aa, Arabidopsis thaliana; identical to SEQ ID NO: 38793
  peptide (1)..(167): Ceres Seq. ID no. 13576738

SEQ ID NO: 39163 - protein, 159 aa, Arabidopsis thaliana; identical to SEQ ID NO: 38794
  peptide (1)..(159): Ceres Seq. ID no. 13576739

SEQ ID NO: 39164 - DNA, 898 bp, Arabidopsis thaliana
  misc_feature (1)..(898): Ceres Seq. ID no. 13496719
  misc_feature (1)..(898): Ortholog of  Ceres SEQ ID NO 13590591 as cited in SEQ ID NO 68169
aaaaatcctccgtctacctccgtctacctccgtctgattcctctattgggagaatccaaatttgcttcaggttccgttcgttcatggcttcgccagaggagatgggtgatgatgcatcagaaattccatccccgccaaaaaacacttacaaggatcccgacggtggaaggcaacgattcttactggaacttgaatttattcaatgtctcgccaatcctacttacatccactacctggcacagaatcggtattttgaagatgaagcatttattggatacttgaagtatcttcaatactggcagcgaccagagtacatcaagttcattatgtacccacactgcctatatttccttgaacttcttcaaaaccccaacttcaggactgctatggctcatcctgcaaacaaggaattggcgcatagacaacagttttactattggaagaactacagaaacaacagactgaagcacattctacctcggcctcttccagagcctgtacctccacaaccaccagttgcaccttcaacttctttgccacctgcaccatctgcaactgctgctctctctccagccctttctccaatgcagtacaataatatgctttctaagaatgacactaggaatatgggtgctactggaattgatcgtaggaagagaaagaagggtatataagcatttcctgccctgaagcatacaccatggcgtcagtcgtcagatatggtttcctccatgtcctaggagggaagcctacttgactcaggttacaaaaatgttggaaactcggtattactcattccgtgtcataggccgtttatggaagttgtcatatatggtgttcaatctttgtctatgatatacaacaacccccaatcagtatcagtctttatctttgttcc

SEQ ID NO: 39165 - protein, 223 aa, Arabidopsis thaliana
  peptide (1)..(223): Ceres Seq. ID no. 13496720
KSSVYLRLPPSDSSIGRIQICFRFRSFMASPEEMGDDASEIPSPPKNTYKDPDGGRQRFLLELEFIQCLANPTYIHYLAQNRYFEDEAFIGYLKYLQYWQRPEYIKFIMYPHCLYFLELLQNPNFRTAMAHPANKELAHRQQFYYWKNYRNNRLKHILPRPLPEPVPPQPPVAPSTSLPPAPSATAALSPALSPMQYNNMLSKNDTRNMGATGIDRRKRKKGI

SEQ ID NO: 39166 - protein, 196 aa, Arabidopsis thaliana
  peptide (1)..(196): Ceres Seq. ID no. 13496721
MASPEEMGDDASEIPSPPKNTYKDPDGGRQRFLLELEFIQCLANPTYIHYLAQNRYFEDEAFIGYLKYLQYWQRPEYIKFIMYPHCLYFLELLQNPNFRTAMAHPANKELAHRQQFYYWKNYRNNRLKHILPRPLPEPVPPQPPVAPSTSLPPAPSATAALSPALSPMQYNNMLSKNDTRNMGATGIDRRKRKKGI

SEQ ID NO: 39167 - protein, 190 aa, Arabidopsis thaliana
  peptide (1)..(190): Ceres Seq. ID no. 13496722
MGDDASEIPSPPKNTYKDPDGGRQRFLLELEFIQCLANPTYIHYLAQNRYFEDEAFIGYLKYLQYWQRPEYIKFIMYPHCLYFLELLQNPNFRTAMAHPANKELAHRQQFYYWKNYRNNRLKHILPRPLPEPVPPQPPVAPSTSLPPAPSATAALSPALSPMQYNNMLSKNDTRNMGATGIDRRKRKKGI

SEQ ID NO: 39168 - DNA, 1734 bp, Arabidopsis thaliana
  misc_feature (1)..(1734): Ceres Seq. ID no. 12562159
  misc_feature (1)..(1734): Ortholog of  Ceres SEQ ID NO 13639022 as cited in SEQ ID NO 59811
acaagggaggtgcttcgtcctcgaagcttttagaacttagccaagcagctgttgtttcttagttgactccctctccgacgaaaatggtgtccacgagcaagatcaaatccgttgatttctataggaaaatcccgagggatttgacagaggcgtctctgtctggtgctggattgtccattatagcagccctctctatgatatttctatttggaatggagttgaataattatttggctgtcagcacttccacatcggtcattgttgacaggagcgctgacggagacttcttgcgcttagattttaatataagcttcccgtcactttcatgtgaattcgcatctgtggatgtcagtgatgtattaggaactaacaggctaaatgtaacaaagacaattcggaagttttctattgattcgaatatgagacccactggttctgagtttcatgccggggaagttttatcactcattaatcatggagatgaaactggtgaagaaatagttgaagattcggtaccacttactggacgcaactttgacacatttacacatcaatttccaatcttggttgttaatttctatgctccgtggtgctattggtgtaatctcctgaaaccatcatgggagaaagcagctaaacagataaaagagagatatgatccagaaatggacggacgtgttattttggcaaaagttgactgcacccaagaaggtgatctctgtcggaggaatcatatacaagggtatccatccattcgcattttccgcaaaggcagtgatcttaaggatgacaatgcacaccacgaccatgaatcctactatggagatcgtgatacggaaagcttagtgaagatggtggtgagtctggttgaaccaattcatctagagccccataatctagcattggaggacaaatcagacaattcatcgagaactctaaaaaaggcaccttctacaggaggatgtcgagttgaaggatacatgcgtgtgaagaaggttccaggcaatttaatggtttcagctcgctcgggatctcattcctttgattcttctcagatgaatatgtcacatgttgttaaccatctatcctttgggcggaggattatgcctcagaaattttcggagtttaagcgcttgtcaccttatctcggcctaagccacgaccgtttagacggccggtccttcataaaccaacgagatctcggcccaaacgttaccattgagcattatcttcaaatagtaaagactgaggtagtgaaaagcaatggacaggcattggttgaggcgtatgagtacacagcacatagcagcgttgctcatagttactatttaccagtggccaagtttcactttgagctctcaccgatgcaggttctcataacggaaaactccaagtccttctcacatttcatcaccaacgtatgcgccattattggtggtgtcttcacggtggccggaatcttggattctattctccatcactccatgacactcatgaaaaagatagaacttggtaaaaacttctgaagctccctaagggttttatttcgttttcctctgtaacgagtcagaaatttttgccctagttataccagacgtcacttaaataattcggttatatatattcacaaactgttatccttttgaacatatataagtattatcgatgtctctgaagtctttgggagttttagtagaacaaattgttatcacttaaatcaggggaatttacttc

SEQ ID NO: 39169 - protein, 480 aa, Arabidopsis thaliana
  peptide (1)..(480): Ceres Seq. ID no. 12562160
MVSTSKIKSVDFYRKIPRDLTEASLSGAGLSIIAALSMIFLFGMELNNYLAVSTSTSVIVDRSADGDFLRLDFNISFPSLSCEFASVDVSDVLGTNRLNVTKTIRKFSIDSNMRPTGSEFHAGEVLSLINHGDETGEEIVEDSVPLTGRNFDTFTHQFPILVVNFYAPWCYWCNLLKPSWEKAAKQIKERYDPEMDGRVILAKVDCTQEGDLCRRNHIQGYPSIRIFRKGSDLKDDNAHHDHESYYGDRDTESLVKMVVSLVEPIHLEPHNLALEDKSDNSSRTLKKAPSTGGCRVEGYMRVKKVPGNLMVSARSGSHSFDSSQMNMSHVVNHLSFGRRIMPQKFSEFKRLSPYLGLSHDRLDGRSFINQRDLGPNVTIEHYLQIVKTEVVKSNGQALVEAYEYTAHSSVAHSYYLPVAKFHFELSPMQVLITENSKSFSHFITNVCAIIGGVFTVAGILDSILHHSMTLMKKIELGKNF

SEQ ID NO: 39170 - protein, 443 aa, Arabidopsis thaliana
  peptide (1)..(443): Ceres Seq. ID no. 12562161
MIFLFGMELNNYLAVSTSTSVIVDRSADGDFLRLDFNISFPSLSCEFASVDVSDVLGTNRLNVTKTIRKFSIDSNMRPTGSEFHAGEVLSLINHGDETGEEIVEDSVPLTGRNFDTFTHQFPILVVNFYAPWCYWCNLLKPSWEKAAKQIKERYDPEMDGRVILAKVDCTQEGDLCRRNHIQGYPSIRIFRKGSDLKDDNAHHDHESYYGDRDTESLVKMVVSLVEPIHLEPHNLALEDKSDNSSRTLKKAPSTGGCRVEGYMRVKKVPGNLMVSARSGSHSFDSSQMNMSHVVNHLSFGRRIMPQKFSEFKRLSPYLGLSHDRLDGRSFINQRDLGPNVTIEHYLQIVKTEVVKSNGQALVEAYEYTAHSSVAHSYYLPVAKFHFELSPMQVLITENSKSFSHFITNVCAIIGGVFTVAGILDSILHHSMTLMKKIELGKNF

SEQ ID NO: 39171 - protein, 437 aa, Arabidopsis thaliana
  peptide (1)..(437): Ceres Seq. ID no. 12562162
MELNNYLAVSTSTSVIVDRSADGDFLRLDFNISFPSLSCEFASVDVSDVLGTNRLNVTKTIRKFSIDSNMRPTGSEFHAGEVLSLINHGDETGEEIVEDSVPLTGRNFDTFTHQFPILVVNFYAPWCYWCNLLKPSWEKAAKQIKERYDPEMDGRVILAKVDCTQEGDLCRRNHIQGYPSIRIFRKGSDLKDDNAHHDHESYYGDRDTESLVKMVVSLVEPIHLEPHNLALEDKSDNSSRTLKKAPSTGGCRVEGYMRVKKVPGNLMVSARSGSHSFDSSQMNMSHVVNHLSFGRRIMPQKFSEFKRLSPYLGLSHDRLDGRSFINQRDLGPNVTIEHYLQIVKTEVVKSNGQALVEAYEYTAHSSVAHSYYLPVAKFHFELSPMQVLITENSKSFSHFITNVCAIIGGVFTVAGILDSILHHSMTLMKKIELGKNF

SEQ ID NO: 39172 - DNA, 929 bp, Arabidopsis thaliana
  misc_feature (1)..(929): Ceres Seq. ID no. 12599908
  misc_feature (1)..(929): Ortholog of  Ceres SEQ ID NO 12609041 as cited in SEQ ID NO 51310
  misc_feature (1)..(929): Ortholog of  Ceres SEQ ID NO 13594966 as cited in SEQ ID NO 56152
  misc_feature (1)..(929): Ortholog of  Ceres SEQ ID NO 14312140 as cited in SEQ ID NO 57002
  misc_feature (1)..(929): Ortholog of  Ceres SEQ ID NO 14312224 as cited in SEQ ID NO 57255
  misc_feature (1)..(929): Ortholog of  Ceres SEQ ID NO 12582457 as cited in SEQ ID NO 57530
  misc_feature (1)..(929): Ortholog of  Ceres SEQ ID NO 13655804 as cited in SEQ ID NO 64881
  misc_feature (1)..(929): Ortholog of  Ceres SEQ ID NO 13599144 as cited in SEQ ID NO 0
agctatagacagacacacccaaaccctagatctaaccccagccgtcagatcagattgatcgggcaatcgcttctagaccgttggaatcaagcaatggtagaggtagaatcgtatttgtgggtatctagaagaggcgttaggattgtctccaagctgggtgttttttcatcttgatggccaactaatcgaatctcctactctaaagatatttttgtttatttctgtcatgtgtgatttggtcgcgcgtacgggtcgtctccagcagcggtacgaggatggctctcgtctcgtcgccgggtgtattccgtttaggtatgtaaattctgacaaagatggtaattctgaatctgggaaagtgattcaagtgttgatgatcagctcgtctagtggacctggacttttgtttcccaagggaggatgggagaatgatgagacagtcagggaggctgcagcgagggaagcagtggaagaagcaggagtccgtgggattcttatggattttttggggaattatgagttcaagagcaaatcacaccaagatgagtttagcccagaaggtttatgtaaagcggcaatgtacgcgttgtatgtgaaagaagagctagcgacgtggccggaacatgagacgagaacacgtaaatggctgacaattgaagaagcggtagagagttgcaggcacccttggatgaaggacgcattggtggaaggattctgtaaatggcataaggagaagatggttaaaggagaggagataactggtgaacattgaagcaaatgtgcataaacctctgagcgttggtttcattcctttcgattttgtttttacctttttgtttttgtttttgaagtcttatgcatggataatctcttgtgactgcgaaacgtaatagtttcgaagatttaaagttcaattattgccctattttcac

SEQ ID NO: 39173 - protein, 180 aa, Arabidopsis thaliana
  peptide (1)..(180): Ceres Seq. ID no. 12599909
MCDLVARTGRLQQRYEDGSRLVAGCIPFRYVNSDKDGNSESGKVIQVLMISSSSGPGLLFPKGGWENDETVREAAAREAVEEAGVRGILMDFLGNYEFKSKSHQDEFSPEGLCKAAMYALYVKEELATWPEHETRTRKWLTIEEAVESCRHPWMKDALVEGFCKWHKEKMVKGEEITGEH

SEQ ID NO: 39174 - protein, 132 aa, Arabidopsis thaliana
  peptide (1)..(132): Ceres Seq. ID no. 12599910
MISSSSGPGLLFPKGGWENDETVREAAAREAVEEAGVRGILMDFLGNYEFKSKSHQDEFSPEGLCKAAMYALYVKEELATWPEHETRTRKWLTIEEAVESCRHPWMKDALVEGFCKWHKEKMVKGEEITGEH

SEQ ID NO: 39175 - protein, 91 aa, Arabidopsis thaliana
  peptide (1)..(91): Ceres Seq. ID no. 12599911
MDFLGNYEFKSKSHQDEFSPEGLCKAAMYALYVKEELATWPEHETRTRKWLTIEEAVESCRHPWMKDALVEGFCKWHKEKMVKGEEITGEH

SEQ ID NO: 39176 - DNA, 490 bp, Arabidopsis thaliana
  misc_feature (1)..(490): Ceres Seq. ID no. 12476432
  misc_feature (1)..(490): Ortholog of  Ceres SEQ ID NO 14302082 as cited in SEQ ID NO 64529
aagaaatctttcagatttgcgcatatcgacaattttccgagcggccagtttaagtattttgtttgtagttaacgtgtttcaagaactttgacaatggctgaggaagcgcataaggtaacattgaatgtctatgatttaagccaaggcttggcacgccagctctcacaatcactcctgggaaaggttattgaaggtgtatggcatacaggaatagttgtctatgggaatgagtacttttttggaggagggatacaacatttaccagttggaagaactccatatggaacaccaattcgaacgatagagttgggtctatcacatgtgcctaaagatgtattcgagatgtacttggaagaaatcagtcctcgttacactgctgaatcctacaatttacttactcacaactgcaacaacttcagcaacgaggtcgctcagtttttggtgttccatatggagttcttccaactggtaaatgttgtatccctcctcc

SEQ ID NO: 39177 - protein, 132 aa, Arabidopsis thaliana
  peptide (1)..(132): Ceres Seq. ID no. 12476433
MAEEAHKVTLNVYDLSQGLARQLSQSLLGKVIEGVWHTGIVVYGNEYFFGGGIQHLPVGRTPYGTPIRTIELGLSHVPKDVFEMYLEEISPRYTAESYNLLTHNCNNFSNEVAQFLVFHMEFFQLVNVVSLL

SEQ ID NO: 39178 - DNA, 1677 bp, Arabidopsis thaliana
  misc_feature (1)..(1677): Ceres Seq. ID no. 12370844
  misc_feature (1)..(1677): Ortholog of  Ceres SEQ ID NO 13647121 as cited in SEQ ID NO 151
  misc_feature (1)..(1677): Ortholog of  Ceres SEQ ID NO 15176411 as cited in SEQ ID NO 54468
  misc_feature (1)..(1677): Ortholog of  Ceres SEQ ID NO 14307131 as cited in SEQ ID NO 59707
agcaaaacatttgtcttcgtgtttgaaagctagataaaagattcactaaatggccaccgcaagcaccgctgctactttcagaccctcctccgtttcagcttcttccgaattaacccatctgagatcaccctccaaactccccaaatttacgcctctgccatcggctcgctcacggtcctcttcttcgttctccgtctcctgcaccatcgctaaggacccagctgttgtcatggcggactcggagaagattaaggccgctggatctgatccgactatgtggcaacgacctgattcattcggtcgtttcgggaagtttggcggcaagtacgtccccgaaactctaatgcacgccctctctgaactcgaaacggctttctattcgctcgccaccgacgaagatttccagagagaattagcagagatcttgaaagactacgttggtcgggaaagtcctctttactttgcagagaggctcacggagcattaccgccgtgaaaacggtgaagggccgctcatatacctcaaaagggaagacttgaaccacaccggtgctcacaagatcaacaacgctgtggctcaggctcttctcgccaagcgtctaggaaagaaacgaattattgctgagacaggggctggtcaacatggtgtagccacagctactgtgtgtgcacgtttcggtttgcagtgcattatctacatgggtgctcaagacatggagagacaagctcttaatgtgttcagaatgcgtcttctcggtgctgaggtaaggggagtccactctggaacagccactttaaaggacgcaacttctgaagctataagggattgggtgaccaatgtggagactacacattacatattgggatccgttgcgggtcctcatccttatcctatgatggtcagagactttcacgcggtgattggtaaagaaacaaggaaacaagcgatggagaaatggggcgggaagcctgatgttctggttgcttgtgtcggtggtggttcaaatgctatgggactcttccatgaatttgtcgatgacacagaggttcgaatgattggtgtggaagccgctggatttggattggacagcggcaaacatgctgccacattgacaaaaggagatgtcggtgtactccacggagctatgagttacttgctgcaagatgatgatggccaaatcattgaaccacactccatcagtgccggattggactaccctggagtcggacctgagcatagtttccttaaagacgtgggaagggctgaatactttagcgttactgatgaagaagcattagaagctttcaagagagtgtctcggttggagggaataatcccggcattggagacatcgcacgcattggcccatctggagaagctttgtccgacgttacctgatggagccagagtggtattaaacttcagtgggagaggcgacaaggatgttcagactgcaatcaagtatctcgaagtttaaagagtgtagattactttcattttcacacagtgctatttcttttatgtagtttgttagttctccttgcttatggtcgggaatccaaaagtttggatcaaagggttaagaagagaataagtgttatgaatgtatcatataaataaaaatgttctatggaacgtttgatgttcttataagcaattcgaactgttttgttcttg

SEQ ID NO: 39179 - protein, 475 aa, Arabidopsis thaliana
  peptide (1)..(475): Ceres Seq. ID no. 12370845
MATASTAATFRPSSVSASSELTHLRSPSKLPKFTPLPSARSRSSSSFSVSCTIAKDPAVVMADSEKIKAAGSDPTMWQRPDSFGRFGKFGGKYVPETLMHALSELETAFYSLATDEDFQRELAEILKDYVGRESPLYFAERLTEHYRRENGEGPLIYLKREDLNHTGAHKINNAVAQALLAKRLGKKRIIAETGAGQHGVATATVCARFGLQCIIYMGAQDMERQALNVFRMRLLGAEVRGVHSGTATLKDATSEAIRDWVTNVETTHYILGSVAGPHPYPMMVRDFHAVIGKETRKQAMEKWGGKPDVLVACVGGGSNAMGLFHEFVDDTEVRMIGVEAAGFGLDSGKHAATLTKGDVGVLHGAMSYLLQDDDGQIIEPHSISAGLDYPGVGPEHSFLKDVGRAEYFSVTDEEALEAFKRVSRLEGIIPALETSHALAHLEKLCPTLPDGARVVLNFSGRGDKDVQTAIKYLEV

SEQ ID NO: 39180 - protein, 415 aa, Arabidopsis thaliana
  peptide (1)..(415): Ceres Seq. ID no. 12370846
MADSEKIKAAGSDPTMWQRPDSFGRFGKFGGKYVPETLMHALSELETAFYSLATDEDFQRELAEILKDYVGRESPLYFAERLTEHYRRENGEGPLIYLKREDLNHTGAHKINNAVAQALLAKRLGKKRIIAETGAGQHGVATATVCARFGLQCIIYMGAQDMERQALNVFRMRLLGAEVRGVHSGTATLKDATSEAIRDWVTNVETTHYILGSVAGPHPYPMMVRDFHAVIGKETRKQAMEKWGGKPDVLVACVGGGSNAMGLFHEFVDDTEVRMIGVEAAGFGLDSGKHAATLTKGDVGVLHGAMSYLLQDDDGQIIEPHSISAGLDYPGVGPEHSFLKDVGRAEYFSVTDEEALEAFKRVSRLEGIIPALETSHALAHLEKLCPTLPDGARVVLNFSGRGDKDVQTAIKYLEV

SEQ ID NO: 39181 - protein, 400 aa, Arabidopsis thaliana
  peptide (1)..(400): Ceres Seq. ID no. 12370847
MWQRPDSFGRFGKFGGKYVPETLMHALSELETAFYSLATDEDFQRELAEILKDYVGRESPLYFAERLTEHYRRENGEGPLIYLKREDLNHTGAHKINNAVAQALLAKRLGKKRIIAETGAGQHGVATATVCARFGLQCIIYMGAQDMERQALNVFRMRLLGAEVRGVHSGTATLKDATSEAIRDWVTNVETTHYILGSVAGPHPYPMMVRDFHAVIGKETRKQAMEKWGGKPDVLVACVGGGSNAMGLFHEFVDDTEVRMIGVEAAGFGLDSGKHAATLTKGDVGVLHGAMSYLLQDDDGQIIEPHSISAGLDYPGVGPEHSFLKDVGRAEYFSVTDEEALEAFKRVSRLEGIIPALETSHALAHLEKLCPTLPDGARVVLNFSGRGDKDVQTAIKYLEV

SEQ ID NO: 39182 - DNA, 1150 bp, Arabidopsis thaliana
  misc_feature (1)..(1150): Ceres Seq. ID no. 13509011
  misc_feature (1)..(1150): Ortholog of  Ceres SEQ ID NO 13664220 as cited in SEQ ID NO 61151
  misc_feature (1)..(1150): Ortholog of  Ceres SEQ ID NO 13597477 as cited in SEQ ID NO 65160
acgactacaaagtacaagaaagtctcatttgagaataattgagcgataaagaaacggtatgacgtcgttttgctccatgatttctcttcttcttcttctctctctttcatcggcggttttctccgatgacgcttctttccagaaacttccggtgccggaaactaggtcaggtcccgaagctttcgcttttgattccaccggtaaagggttctataccggtgtctccggtggtaaaatcctcaagtacctccccgagacgggttatgttgactttgcccagatcactgaatcctcgaactcttcatggtgcgatggtactattggaacggctttagccggacgctgtggtcgaccagcaggaatagcattcaacgagaaaacaggtgatctttacgtcgccgatgctccgttgggtcttcacgttatttctcccgccggtggtttggctacgaagatcaccgacagtgttgacggaaagcctttcaagtttcttgacggtcttgacgttgatcccactactggtgtcgtctacttcacttccttcagctcacgcttctccccaatccaagtgttgattgcattggggttaaaggacgcgaccggaaagctctacaaatacgacccatcgaccaaagtcgtgactgtactgatggaagggctaagtggttcagccgggtgtgcagtgagctcagatggttcgtttgtgctggttagtcagttcacaaaaagtaacatcaagaggtattggatcaagggacccaaagctggttcttctgaagacttcaccaactcagtctcaaaccctgacaatatcaaaagaattggctctactggaaacttttgggtcgcttcagtggtgaacaagatcatcgtacctacgaacccatcagcagtcaaagttaactctaatggtgaagttcttcaaacaattcctctcaaagataaatttggagacactctgctcagcgaagtcaacgaattcgagggcaatttatatataggaactctcaccggaccatttgctggaattcttaagctcgaaaagggttcttgtcctgccacttagatctcttatttgaatgcatccgatgtgttacaataatatatatatatgagctttttatttatttctgaataaaataaccactta

SEQ ID NO: 39183 - protein, 335 aa, Arabidopsis thaliana
  peptide (1)..(335): Ceres Seq. ID no. 13509012
MTSFCSMISLLLLLSLSSAVFSDDASFQKLPVPETRSGPEAFAFDSTGKGFYTGVSGGKILKYLPETGYVDFAQITESSNSSWCDGTIGTALAGRCGRPAGIAFNEKTGDLYVADAPLGLHVISPAGGLATKITDSVDGKPFKFLDGLDVDPTTGVVYFTSFSSRFSPIQVLIALGLKDATGKLYKYDPSTKVVTVLMEGLSGSAGCAVSSDGSFVLVSQFTKSNIKRYWIKGPKAGSSEDFTNSVSNPDNIKRIGSTGNFWVASVVNKIIVPTNPSAVKVNSNGEVLQTIPLKDKFGDTLLSEVNEFEGNLYIGTLTGPFAGILKLEKGSCPAT

SEQ ID NO: 39184 - protein, 329 aa, Arabidopsis thaliana
  peptide (1)..(329): Ceres Seq. ID no. 13509013
MISLLLLLSLSSAVFSDDASFQKLPVPETRSGPEAFAFDSTGKGFYTGVSGGKILKYLPETGYVDFAQITESSNSSWCDGTIGTALAGRCGRPAGIAFNEKTGDLYVADAPLGLHVISPAGGLATKITDSVDGKPFKFLDGLDVDPTTGVVYFTSFSSRFSPIQVLIALGLKDATGKLYKYDPSTKVVTVLMEGLSGSAGCAVSSDGSFVLVSQFTKSNIKRYWIKGPKAGSSEDFTNSVSNPDNIKRIGSTGNFWVASVVNKIIVPTNPSAVKVNSNGEVLQTIPLKDKFGDTLLSEVNEFEGNLYIGTLTGPFAGILKLEKGSCPAT

SEQ ID NO: 39185 - DNA, 2016 bp, Arabidopsis thaliana
  misc_feature (1)..(2016): Ceres Seq. ID no. 13489529
  misc_feature (1)..(2016): Ortholog of  Ceres SEQ ID NO 14301836 as cited in SEQ ID NO 67386
tctttttttcctgagacttttccttgaatcctcttccctcctccttcttctctctctctcgtttctcaactaccgtctctctgcttcttctgttcccaaaaccggaaactttacttcgtggaattttcccttgtttctgaaatggaagacacaacatttaccaaagtgttcgttggaggattagcttgggaaacacacaaagtctctctcaggaattactttgaacagtttggtgacattgttgaagctgtcgttatcactgataaatctagtggtagatctaaaggctatggctttgttactttttgtgatccggaagcagctcagaaagcttgtgtagatccagctcctgttattgatggaagaagagctaattgtaatcttgctgcttttggtgttcagagatccaaaccttcttctcctattcatggacatgtaggaggaagaggcatgaaggtgactagccctttcaagacacactttgggaccgcggctactgctattccttccccacttccattctcccactacacacttccttacactaatccttttgggttctcttcatactcaatggattacaattaccccacgcagagctattacaatgtttatggaggggcaactgctcagcatccaatgtatggaagcggaccaatgactggtgtagcagcagcaccagcagcagggttctacccatatctccagtttgctgaaggaaatggacctgtcactggttatgctcccctccactaccccaaccacatgtttcactattctgctcccgggggaaactacccgcatcacaatggttcaccagtgtctcttgcaccttcaccagtcataccatcagtttgctttgcagttccacaggcttgaccatgaaggctcgtggttcatagttccatgatgctatgtaggggaccaattcatttaaatccttaaggcaaagctttgtttactactttcatccacatgcctctgaagtttcacaagacctgtggcctaaccatggttgcccttttccctttatgcttctaacccattagacaaagaagcccataatttggagtttgggcgtctttgcaagttctagttaagtctcacataggggtttaactaggaccatcttcatacacattactcatcttttcattttattcattgcattacctgctttctgaacgaaggtttcgttcaagatagcttgttcgagctgtagaagtaaacagttaccgtcttttgcacagtgcctcgcaaaggcaagcaattttgtagaaaaacttaaaaacttaggattggctgatcaacaagaaaggaaataaggatttcccgggaaaggcacaagaagtgaattgccaccacctggaagtgttgaagtagtgtgtgcaaaggtgtgcacactacttcacgctatatccattttaatgtgcagtcttaggattattagatctaggaccatgttgttacacattgtcttgtagtagaacgctagaacataaacttcctttgaggataaaggaattgctaacacatgtatattctcggtggctaagctttggagttatagccacacttgagctaacttagattaagatcatttttaagattcaaaatttagattgctcatcatatcttgaaccaaccccactaatggattgtggggttcttgcatttgcatgtatttttgcctcttgggagatattttggttccctttaggttcttctcataacaatcaaccaaaccagttgaccaaccatggttaggaatttcaggtgagaggtattcatcacctctttatctctcttttgtacttctttcctctatttcttcaagactaaaaactctctttttatgtaatttgttgttatatcttgtaagctgtgtgtttctgattctatgtaagaaaactaaaagctttcagtttccatcctcggtggttggaaaatgaaactgtgattgcaatattttactttgatctgatatataatcctcttgtatgaggttatgacaag

SEQ ID NO: 39186 - protein, 245 aa, Arabidopsis thaliana
  peptide (1)..(245): Ceres Seq. ID no. 13489530
MEDTTFTKVFVGGLAWETHKVSLRNYFEQFGDIVEAVVITDKSSGRSKGYGFVTFCDPEAAQKACVDPAPVIDGRRANCNLAAFGVQRSKPSSPIHGHVGGRGMKVTSPFKTHFGTAATAIPSPLPFSHYTLPYTNPFGFSSYSMDYNYPTQSYYNVYGGATAQHPMYGSGPMTGVAAAPAAGFYPYLQFAEGNGPVTGYAPLHYPNHMFHYSAPGGNYPHHNGSPVSLAPSPVIPSVCFAVPQA

SEQ ID NO: 39187 - protein, 142 aa, Arabidopsis thaliana
  peptide (1)..(142): Ceres Seq. ID no. 13489531
MKVTSPFKTHFGTAATAIPSPLPFSHYTLPYTNPFGFSSYSMDYNYPTQSYYNVYGGATAQHPMYGSGPMTGVAAAPAAGFYPYLQFAEGNGPVTGYAPLHYPNHMFHYSAPGGNYPHHNGSPVSLAPSPVIPSVCFAVPQA

SEQ ID NO: 39188 - DNA, 1419 bp, Arabidopsis thaliana
  misc_feature (1)..(1419): Ceres Seq. ID no. 12325621
  misc_feature (1)..(1419): Ortholog of  Ceres SEQ ID NO 13658922 as cited in SEQ ID NO 66316
cttttctattttattggcttctcaaaacgaaataacgaaatcgcctcctcttcttctcctcctcgacctggaaatcaatctttcgccgccgagttcttctctctgcggcggagaatcaattagcaatctccaggtttttcacttcaaaacctttccttttattatcaaattttgttcctttttagctttaggatttcatatttctagaacccagaagaaactcttgcccataacatctctatatttattggtatagaattaggtgagggaaaagaggatggctttgatcggaaaatccgagagattctctgctgattttgtgatgggtggtgctgcagccattgttgccaaatctgcagctgctccaatcgaaagggtgaagcttttactgcagaatcaaggggagatgataaagactggacatctcataagaccttacactggtttgggtaattgctttaccagaatctatagagaagaaggtgttttgtccttttggagaggaaaccaagccaatgtcatacgatatttccctacacaggcttccaactttgcatttaaaggttacttcaagaaccttcttggatgttcgaaagagaaagatggttacttgaagtggtttgctggaaatgtagcttcgggaagtgctgctggagcaacaacttccttgtttctgtaccatttggattatgcgcggacccgtttaggcactgatgcaaaggaatgttctgttaatggcaagagacagtttaaagggatgatcgatgtgtatcgtaaaactttgtcaagtgacggtattaaaggtctttaccgtggatttggtgtgtcaatagtgggaatcactctttaccgaggaatgtattttgggatgtacgacaccatcaaacccattgtgttagtcggttccttagagggaaacttcttggctagttttctattgggttggagtattactacctctgcaggcgtcattgcttacccttttgacacacttaggaggagaatgatgcttacatcaggacaacctgttaaataccggaacaccattcatgccttaagagagatattgaagtcggaagggttctatgcgctatatagaggagttactgcgaacatgcttcttggagtagcaggagcaggagtgcttgcgggatatgatcagcttcaccagattgcttataagcattgggttcagtagttttgaaccaaacccgaaacgatgacaatgaaagctgagctcaaaaagagaaggttagtaaacaccaagaagtctcacttgctttccaatgtattgtgttagttaacagaatctcggaatcattaaccgattgaaccagcagaagatagggaaaattgttcatagttcttgtgcagtaacattgttatatcaataatccaagaaaggcctatttgattttg

SEQ ID NO: 39189 - protein, 306 aa, Arabidopsis thaliana; identical to SEQ ID NO: 23275
  peptide (1)..(306): Ceres Seq. ID no. 12325622

SEQ ID NO: 39190 - protein, 291 aa, Arabidopsis thaliana; identical to SEQ ID NO: 23276
  peptide (1)..(291): Ceres Seq. ID no. 12325623

SEQ ID NO: 39191 - protein, 263 aa, Arabidopsis thaliana; identical to SEQ ID NO: 23277
  peptide (1)..(263): Ceres Seq. ID no. 12325624

SEQ ID NO: 39192 - DNA, 885 bp, Arabidopsis thaliana
  misc_feature (1)..(885): Ceres Seq. ID no. 12558291
  misc_feature (1)..(885): Ortholog of  Ceres SEQ ID NO 15172402 as cited in SEQ ID NO 59160
attagagagatctgatctttccccaattccataacccgaaaaatggaagaaatcgccgataaaaccttcttccgatactgtctcctcactcttattttcgccggcccaccaaccgccgtccttctgaaattcctccaagctccttacggtaaacacaaccgtaccggatggggtcccaccgtatctccaccgattgcttggttcgtcatggagagcccaaccttgtggctcactctcctcctcttcccctttggtcgtcacgctctcaaccctaaatctctacttctattctctccttatctcattcattacttccaccgcaccatcatttaccctcttcgcctcttccgcagctccttccccgccggtaaaaacggatttccgatcaccatcgccgccttggctttcacctttaatctcctcaatggttatatccaggcgaggtgggtttcgcattacaaggatgactacgaagacggaaactggttctggtggcggtttgttatcggtatggtggttttcataaccggcatgtatataaatatcacgtcggaccggactttggtacgattgaagaaagagaaccggggaggttatgtgataccgagaggaggctggttcgagttggtaagctgtccgaattattttggagaggcgattgagtggttgggctgggctgttatgacttggtcttgggccggtattggattttttctgtacacgtgttccaatttgtttccgcgtgcacgtgcgagtcacaagtggtacattgccaagttcaaggaagagtatcccaagactcgtaaagctgttattccttttgtgtactgagaattgagaaagttgaaaactagtttatcatatgttatgtgtcaatttgtttcc

SEQ ID NO: 39193 - protein, 262 aa, Arabidopsis thaliana
  peptide (1)..(262): Ceres Seq. ID no. 12558292
MEEIADKTFFRYCLLTLIFAGPPTAVLLKFLQAPYGKHNRTGWGPTVSPPIAWFVMESPTLWLTLLLFPFGRHALNPKSLLLFSPYLIHYFHRTIIYPLRLFRSSFPAGKNGFPITIAALAFTFNLLNGYIQARWVSHYKDDYEDGNWFWWRFVIGMVVFITGMYINITSDRTLVRLKKENRGGYVIPRGGWFELVSCPNYFGEAIEWLGWAVMTWSWAGIGFFLYTCSNLFPRARASHKWYIAKFKEEYPKTRKAVIPFVY

SEQ ID NO: 39194 - protein, 207 aa, Arabidopsis thaliana
  peptide (1)..(207): Ceres Seq. ID no. 12558293
MESPTLWLTLLLFPFGRHALNPKSLLLFSPYLIHYFHRTIIYPLRLFRSSFPAGKNGFPITIAALAFTFNLLNGYIQARWVSHYKDDYEDGNWFWWRFVIGMVVFITGMYINITSDRTLVRLKKENRGGYVIPRGGWFELVSCPNYFGEAIEWLGWAVMTWSWAGIGFFLYTCSNLFPRARASHKWYIAKFKEEYPKTRKAVIPFVY

SEQ ID NO: 39195 - DNA, 1251 bp, Arabidopsis thaliana
  misc_feature (1)..(1251): Ceres Seq. ID no. 13488723
  misc_feature (1)..(1251): Ortholog of  Ceres SEQ ID NO 13594176 as cited in SEQ ID NO 59144
aaagaaagaaagaaaaaaaagaagagaaacggccgaatcttcataaattccgccatctgttaagctcaatcgccgcctaaactccggcgactctctcgaagatatttggtgattgaggtgactcggaagagagtgagagagagagatggatgatagaggaggatcgttcgtagcagtgagaaggatttcacaaggtctagaacgaggaagtgtttatcattcttcttctgctgaggttgtagctggatcggcagcgtggttaggccgtggcctttcctgtgtttgtgttcagggtagagacggtgaccctcgtccttcatttgatctaacgcctgctcaggaggaatgcctgcagaggttgcaaagccgcattgatgttgcttatgacagctcaatacctcagcatcaggaagctctaaaggatctttggaaacttgcatttcctgaagaagagctacacggaattgtatctgatcagtggaaggaaatgggttggcagggaaaagatccatcgacagattttaggggtggtggttttatttctctcgaaaacttgttgtacttcgctaggaaattcccgaaatctttccacggccttctgcggaaacaggttggcgatcgttctgtgtgggaatacccctttgctgttgctggcatcaatataacattcatgctcatccagatgcttgaccttgaagcagtgaaaccacgaagtattgttggggaaacatttctaagattcctttcggtgaacgagtctgcgtttgaccttctttattgcattgccttcaagctaatggatcagcaatggctatccatgcgtgcttcatacatggagtttaacactgtgatgaaatcaacaaggcggcaactggagagagagattatgattgaagacattacaagtctcgaagatttgccatcatacagtcttctcagtcaatagcaaatagcttaccaaaaactactttgtaagtagaaagatctaacagctcagaaaccctatatcaaagctaaaacaacagcagagcaagtaagcaagcaaaaaagaagacaaggtttctctctctctcgctcttcactccatcttcctcgatattagtgttggttccatgaaatttgggttgttatttctatgaaaccagggtcagattttgtttcttatggggtcagattttctaacttgtggtgcttgtaaaacgttgttggttagttggtgttttgggctaataaatcatttggttacatttc

SEQ ID NO: 39196 - protein, 266 aa, Arabidopsis thaliana
  peptide (1)..(266): Ceres Seq. ID no. 13488724
MDDRGGSFVAVRRISQGLERGSVYHSSSAEVVAGSAAWLGRGLSCVCVQGRDGDPRPSFDLTPAQEECLQRLQSRIDVAYDSSIPQHQEALKDLWKLAFPEEELHGIVSDQWKEMGWQGKDPSTDFRGGGFISLENLLYFARKFPKSFHGLLRKQVGDRSVWEYPFAVAGINITFMLIQMLDLEAVKPRSIVGETFLRFLSVNESAFDLLYCIAFKLMDQQWLSMRASYMEFNTVMKSTRRQLEREIMIEDITSLEDLPSYSLLSQ

SEQ ID NO: 39197 - protein, 152 aa, Arabidopsis thaliana
  peptide (1)..(152): Ceres Seq. ID no. 13488725
MGWQGKDPSTDFRGGGFISLENLLYFARKFPKSFHGLLRKQVGDRSVWEYPFAVAGINITFMLIQMLDLEAVKPRSIVGETFLRFLSVNESAFDLLYCIAFKLMDQQWLSMRASYMEFNTVMKSTRRQLEREIMIEDITSLEDLPSYSLLSQ

SEQ ID NO: 39198 - DNA, 1026 bp, Arabidopsis thaliana
  misc_feature (1)..(1026): Ceres Seq. ID no. 13494105
  misc_feature (1)..(1026): Ortholog of  Ceres SEQ ID NO 12609304 as cited in SEQ ID NO 51524
  misc_feature (1)..(1026): Ortholog of  Ceres SEQ ID NO 14308976 as cited in SEQ ID NO 0
gcgggtggcattgattcatctgatcaatgacaaaggataagaaaaactaaaagagagcaaattcagaagctgagaatatgaagacggagcttgaagaagaagaagaagaagaatggagatccgttcacgaggttttattaatcgttcttccttatcttcattctctgttcgagcttctctctatgattcgcgtttcgcgatctctcagagacgcgatcagagacgaaaccgcgttatggacaaaactcgttattgaaccaccgttgagctctcgtctaaccgatgatattctatcggagttcagttccaaatccgccggaaagctgaaaactctgattctccggcaatgtcttatggtcaccaacaagggactccgtcgtgttgtggatgctaatcctctcatcactaagataattgtgcctggatgctctggattgactcctgaaggaatcatggaatgtgttgaaagcttgtctaagaacaatcataaactagagacacttcacatcaatggcgtcaatggctttaccaaacaacatctctcagcactgtatacttacctttcttccgagggaacgattgacctcgaggtctgtcccaaatgcgatgaagtaaggatgattccgtcttgctcaagagaatcatgtaaccagaagcaacgcaagtgccgtggatgctggctttgtatccctagatgtgcagagtgcgcagtgtgccttgttggttcagatactgagagtcaagaagcagcgtgtggtaatgatgatgttctgtgtcttgaatgttggcttgtgcttcccaagtgcagattctgcaataaaccatattgcactaatcacagtagtcgtcgacatgagattgcaatcactgatgctgcatctcggccttcgtttgaatgtgaagcttgttactatagggcaggtacaaacccatatgaagtcgactatcaaatctaaacaaacactttgttgtctgcaactttgtctattttgtatatgacaagcttggattgtgaaatattcagcc

SEQ ID NO: 39199 - protein, 292 aa, Arabidopsis thaliana
  peptide (1)..(292): Ceres Seq. ID no. 13494106
MKTELEEEEEEEWRSVHEVLLIVLPYLHSLFELLSMIRVSRSLRDAIRDETALWTKLVIEPPLSSRLTDDILSEFSSKSAGKLKTLILRQCLMVTNKGLRRVVDANPLITKIIVPGCSGLTPEGIMECVESLSKNNHKLETLHINGVNGFTKQHLSALYTYLSSEGTIDLEVCPKCDEVRMIPSCSRESCNQKQRKCRGCWLCIPRCAECAVCLVGSDTESQEAACGNDDVLCLECWLVLPKCRFCNKPYCTNHSSRRHEIAITDAASRPSFECEACYYRAGTNPYEVDYQI

SEQ ID NO: 39200 - protein, 257 aa, Arabidopsis thaliana
  peptide (1)..(257): Ceres Seq. ID no. 13494107
MIRVSRSLRDAIRDETALWTKLVIEPPLSSRLTDDILSEFSSKSAGKLKTLILRQCLMVTNKGLRRVVDANPLITKIIVPGCSGLTPEGIMECVESLSKNNHKLETLHINGVNGFTKQHLSALYTYLSSEGTIDLEVCPKCDEVRMIPSCSRESCNQKQRKCRGCWLCIPRCAECAVCLVGSDTESQEAACGNDDVLCLECWLVLPKCRFCNKPYCTNHSSRRHEIAITDAASRPSFECEACYYRAGTNPYEVDYQI

SEQ ID NO: 39201 - protein, 200 aa, Arabidopsis thaliana
  peptide (1)..(200): Ceres Seq. ID no. 13494108
MVTNKGLRRVVDANPLITKIIVPGCSGLTPEGIMECVESLSKNNHKLETLHINGVNGFTKQHLSALYTYLSSEGTIDLEVCPKCDEVRMIPSCSRESCNQKQRKCRGCWLCIPRCAECAVCLVGSDTESQEAACGNDDVLCLECWLVLPKCRFCNKPYCTNHSSRRHEIAITDAASRPSFECEACYYRAGTNPYEVDYQI

SEQ ID NO: 39202 - DNA, 1285 bp, Arabidopsis thaliana
  misc_feature (1)..(1285): Ceres Seq. ID no. 12558302
  misc_feature (1)..(1285): Ortholog of  Ceres SEQ ID NO 13637509 as cited in SEQ ID NO 53255
agattgaagtctcgcgaacagtcttgttgggttttgggttttgagagacagagaggttttggcttccgggtcgttagtgtttgatcatcttcgtatctcagaagggtgaactttgttgttttggcttttgcgtactgttgaatcagcttttccagatgcctcgaagaccatcatcaggaagaagagtgttaaagcatcagcctttaacattttcaccgtttatgcggttactttcctttgcttcaatggctaggcgtgatttgtctcatcctgaagattgtcaatgttctgatgaagatatatcttttgatgaaaagcaaaagatccctaatttaccaagaaaagggaaagaagaacaagtctcggactcgtctgatgaagaagattctcaggaagatgtccaagcagactttgagttctttgatcctaaacctacagactttcatggtgttaagatcctgttacaaaactatctcgatgacaaggagtgggatttgagcagttttgttgattgcatattggagcaaacaactgtaggaactgttgtgaaagtagctgatgatgaggatgagtcagtatttgctcttgtcactgctcttaacatggcaagagataaggacaacaagtgttttagagagttaaaagagtttcttcgtaaagtttgttctgaaaagaatatagcgaataatctagaaatgctcttagagaaaaaggcacaagatgttggtttattggtatctcaaagagtgatgaatcttcctccacaacttcttcctccactttatgatggattgttcgatgaagtctcatgggcaatcgaagatgagcctacagaaaagcttcgaagatcattccgttttaagtcatatcttctagttaccaagatttacaagctgaagaatcctaagcagagaaaacctcgacatggtgaagaagacattgaagacacagtatttcttaagcctgaagatgaactctttctcgagcttagctcttggtccttcacattccctatgcgctcacagctcgttacttcccaagaaatgaagaattatcagctgatgggtttagtgatggccgtggaagcaaacaagattcctaaattcagacagatgttgaactctctcattgattaacaatgatgaacatcttcttcttaaagattcaattaacggtttagttgtaatcgattcccgccagttttgtttgattcggttaaggattattgaggcttgttattacccaaactgtggtttgttttgtctaaaacgatgaggttcttatt

SEQ ID NO: 39203 - protein, 326 aa, Arabidopsis thaliana
  peptide (1)..(326): Ceres Seq. ID no. 12558303
MPRRPSSGRRVLKHQPLTFSPFMRLLSFASMARRDLSHPEDCQCSDEDISFDEKQKIPNLPRKGKEEQVSDSSDEEDSQEDVQADFEFFDPKPTDFHGVKILLQNYLDDKEWDLSSFVDCILEQTTVGTVVKVADDEDESVFALVTALNMARDKDNKCFRELKEFLRKVCSEKNIANNLEMLLEKKAQDVGLLVSQRVMNLPPQLLPPLYDGLFDEVSWAIEDEPTEKLRRSFRFKSYLLVTKIYKLKNPKQRKPRHGEEDIEDTVFLKPEDELFLELSSWSFTFPMRSQLVTSQEMKNYQLMGLVMAVEANKIPKFRQMLNSLID

SEQ ID NO: 39204 - protein, 304 aa, Arabidopsis thaliana
  peptide (1)..(304): Ceres Seq. ID no. 12558304
MRLLSFASMARRDLSHPEDCQCSDEDISFDEKQKIPNLPRKGKEEQVSDSSDEEDSQEDVQADFEFFDPKPTDFHGVKILLQNYLDDKEWDLSSFVDCILEQTTVGTVVKVADDEDESVFALVTALNMARDKDNKCFRELKEFLRKVCSEKNIANNLEMLLEKKAQDVGLLVSQRVMNLPPQLLPPLYDGLFDEVSWAIEDEPTEKLRRSFRFKSYLLVTKIYKLKNPKQRKPRHGEEDIEDTVFLKPEDELFLELSSWSFTFPMRSQLVTSQEMKNYQLMGLVMAVEANKIPKFRQMLNSLID

SEQ ID NO: 39205 - protein, 296 aa, Arabidopsis thaliana
  peptide (1)..(296): Ceres Seq. ID no. 12558305
MARRDLSHPEDCQCSDEDISFDEKQKIPNLPRKGKEEQVSDSSDEEDSQEDVQADFEFFDPKPTDFHGVKILLQNYLDDKEWDLSSFVDCILEQTTVGTVVKVADDEDESVFALVTALNMARDKDNKCFRELKEFLRKVCSEKNIANNLEMLLEKKAQDVGLLVSQRVMNLPPQLLPPLYDGLFDEVSWAIEDEPTEKLRRSFRFKSYLLVTKIYKLKNPKQRKPRHGEEDIEDTVFLKPEDELFLELSSWSFTFPMRSQLVTSQEMKNYQLMGLVMAVEANKIPKFRQMLNSLID

SEQ ID NO: 39206 - DNA, 1547 bp, Arabidopsis thaliana
  misc_feature (1)..(1547): Ceres Seq. ID no. 12703922
  misc_feature (1)..(1547): Ortholog of  Ceres SEQ ID NO 13657915 as cited in SEQ ID NO 66051
aagtcagcaactcacttccgtctctctccccctcaaaaccagcagaaccagtctcactcgatccttaatccaccatggcaacgacttctcgccggtttaccaccggtttattcgcctcgatcacctcggtcaaatcccattccgcaaaccgacctcaatccatctccctaatccgtcgaaaccacatcgatcatcgtctaccgttgatcgttccaagttccaggcggtggattatccaagcggcgagatcctgggatggatttgacgacggagctgaggcggagattaagaagccaggcgcgtatggttacgcgatcggcgataacgagatcgaagggagcagtagtagtactgtccatgtgatcgacggagagcatgttaagacggcggagatagtgatatgggcggcggttacggcggcgtttggcgtcggaaacagagtgatgtataagctcgcgttagttccactcaaggagtatcctttcttccttgcgcaactctccaccttcgggtatgtagctgtatattatactatcttgtattttcgatatcgtgctggaactgtcacagatgcaatgctctcggtgccaaaatctccatttttaattgttggcatcttagaggctctagctgcagctgctggcatggcagccgcagcgaatctttcggggccatcaacgacagttttatctcagacatttcttgtctggcaaattttcttctccattatttttctcgggaggagatatagcgtaaaccaaatactcggatgtactcttgtagctctcggtgtaatcgtcagtgtggcaagtggatcaggtgctgctcattcattgaatgaagccggagtattatggattcttctaatggttctctctttcttgcttcaaggagcaggtacagtattgaaggaagtcatctttatagatagccaaagacgattaaagggtgcttcactcgatctatttatagtaaattcatatggttcagctttccaagccatctgcattgcgttgcttcttccatttctttcaaaactttggggcataccgtttaaccaactcggtacctacctaaaagatggtgcggtttgttttctcaacaatgggacaataacaaaaggatgtgatggggctccgtttttgcctctgttgtttgtgataatgaacattggctataacattgctcttttaagactcctcaagatttcatccgcggtggtttcatgtcttgcatcaacagtctcagtgccaattgcagtgtttctgttcacaatgccattaccgtaccttggagttgcatcatcactaccaaaagggttcatgggaggaacaatcatacttgtattgggaatgattctttatagttggacaccacacggagctaactcttctcatactgattcagtcattccttcacctcctccaacatagagagggcttaactaaggggttttgcttttatataaagatttgagagatttatgcaaattcggtttgtgtttaaataaacttatatttgatcatatgatgttaatggaaaagttg

SEQ ID NO: 39207 - protein, 452 aa, Arabidopsis thaliana
  peptide (1)..(452): Ceres Seq. ID no. 12703923
MATTSRRFTTGLFASITSVKSHSANRPQSISLIRRNHIDHRLPLIVPSSRRWIIQAARSWDGFDDGAEAEIKKPGAYGYAIGDNEIEGSSSSTVHVIDGEHVKTAEIVIWAAVTAAFGVGNRVMYKLALVPLKEYPFFLAQLSTFGYVAVYYTILYFRYRAGTVTDAMLSVPKSPFLIVGILEALAAAAGMAAAANLSGPSTTVLSQTFLVWQIFFSIIFLGRRYSVNQILGCTLVALGVIVSVASGSGAAHSLNEAGVLWILLMVLSFLLQGAGTVLKEVIFIDSQRRLKGASLDLFIVNSYGSAFQAICIALLLPFLSKLWGIPFNQLGTYLKDGAVCFLNNGTITKGCDGAPFLPLLFVIMNIGYNIALLRLLKISSAVVSCLASTVSVPIAVFLFTMPLPYLGVASSLPKGFMGGTIILVLGMILYSWTPHGANSSHTDSVIPSPPPT

SEQ ID NO: 39208 - protein, 329 aa, Arabidopsis thaliana
  peptide (1)..(329): Ceres Seq. ID no. 12703924
MYKLALVPLKEYPFFLAQLSTFGYVAVYYTILYFRYRAGTVTDAMLSVPKSPFLIVGILEALAAAAGMAAAANLSGPSTTVLSQTFLVWQIFFSIIFLGRRYSVNQILGCTLVALGVIVSVASGSGAAHSLNEAGVLWILLMVLSFLLQGAGTVLKEVIFIDSQRRLKGASLDLFIVNSYGSAFQAICIALLLPFLSKLWGIPFNQLGTYLKDGAVCFLNNGTITKGCDGAPFLPLLFVIMNIGYNIALLRLLKISSAVVSCLASTVSVPIAVFLFTMPLPYLGVASSLPKGFMGGTIILVLGMILYSWTPHGANSSHTDSVIPSPPPT

SEQ ID NO: 39209 - protein, 285 aa, Arabidopsis thaliana
  peptide (1)..(285): Ceres Seq. ID no. 12703925
MLSVPKSPFLIVGILEALAAAAGMAAAANLSGPSTTVLSQTFLVWQIFFSIIFLGRRYSVNQILGCTLVALGVIVSVASGSGAAHSLNEAGVLWILLMVLSFLLQGAGTVLKEVIFIDSQRRLKGASLDLFIVNSYGSAFQAICIALLLPFLSKLWGIPFNQLGTYLKDGAVCFLNNGTITKGCDGAPFLPLLFVIMNIGYNIALLRLLKISSAVVSCLASTVSVPIAVFLFTMPLPYLGVASSLPKGFMGGTIILVLGMILYSWTPHGANSSHTDSVIPSPPPT

SEQ ID NO: 39210 - DNA, 1718 bp, Arabidopsis thaliana
  misc_feature (1)..(1718): Ceres Seq. ID no. 12562559
  misc_feature (1)..(1718): Ortholog of  Ceres SEQ ID NO 13656177 as cited in SEQ ID NO 64997
ctattgcattgagattgatatcttgttgcaggggaactctggttccatgtgttaggtattttcctttcgtcgacctgattcatcttgtgcatgtcgattctgaataatgaacgaagaaggctgcgtcccgcacaactctgatgttgttaaacaaaagtctatagatcaaagagcccctctttccggggaacctaaatgtgttatctgcagtcgttatggtgagtacatatgtgacgagaccaatgatgacgtctgcagcctcgagtgtaagcaagcactcctgagaagggttgacagcgctagagtttttcctgccacagatgagtgcttctatgttagagacccaggatcttcttcccacgatgctcaactacttagaagaaagcttgatattcatgtccaaggacaaggatcagcagtccctccacctgtcttgactttcacttcatgtggacttcctcctaagcttcttctcaacttagaaacggctggctatgactttcctactcctatccagatgcaagcaattccagctgctttaaccggcaaaagtctgctcgcctcagccgacaccggctctgggaaaacagcttcttttcttgttcctattatttctcgttgcacaacgtatcactctgagcatccctcagaccagaggaggaaccccttggctatggttttggctccaacgagagagctctgtgtccaagttgaagatcaggcaaaaatgctcggaaagggactgccatttaagactgcactcgttgtaggtggtgatcccatgtctggacaactctaccgcattcagcaaggtgttgaattgatcattggtaccccaggccgggtggtggaccttctatcaaagcacaccattgaactagataacatcatgacgtttgtgctggatgaagttgactgcatgcttcagagaggcttcagagatcaggtgatgcagatatttcaggccttgtcacaaccacaggtcttgctgttctctgcgacgatctcaagagaggtggagaaggtgggagggtctctagccaaggaaatcattttggtatccataggtaatcccaacaagcctaacaaggctgtcaaccaattggccatctgggtagatgcaaagcaaaagaaacagaagctgtttgatatactcagaagtcaaaaccatttcaagccccccgctgttgtttatgtgagttcgagagttggagcagatctcctggctaatgccataactgttgtcacgggggtaaaagctctatcgatccatggggagaagccaatgaaggagaggagagacgtaatgggatcgtttttgggtggagaggtgccagttcttgtatcaacgggagttctaggccgaggagttgacctattggtggtaaggcaggtgatagtgtttgacatgcctagtaccatcaaggagtacatacatgtaattggcagggcctctaggatgggagagaagggcactgccattgtgtttgtgaatgaggacgacaggaacctattccctgatttagttgccgctttaaaaagtagtggagcagccatacctaaggaacttatcaatttgacatccagggaaatgcacaacaagaagagaagggttgggtactgagatgtatgacctggatccgaatgttgttgtaaattaagaaagaaaggaagacttgagagcattgacgaatagaaaaaattaagggtttaactct

SEQ ID NO: 39211 - protein, 505 aa, Arabidopsis thaliana
  peptide (1)..(505): Ceres Seq. ID no. 12562560
MNEEGCVPHNSDVVKQKSIDQRAPLSGEPKCVICSRYGEYICDETNDDVCSLECKQALLRRVDSARVFPATDECFYVRDPGSSSHDAQLLRRKLDIHVQGQGSAVPPPVLTFTSCGLPPKLLLNLETAGYDFPTPIQMQAIPAALTGKSLLASADTGSGKTASFLVPIISRCTTYHSEHPSDQRRNPLAMVLAPTRELCVQVEDQAKMLGKGLPFKTALVVGGDPMSGQLYRIQQGVELIIGTPGRVVDLLSKHTIELDNIMTFVLDEVDCMLQRGFRDQVMQIFQALSQPQVLLFSATISREVEKVGGSLAKEIILVSIGNPNKPNKAVNQLAIWVDAKQKKQKLFDILRSQNHFKPPAVVYVSSRVGADLLANAITVVTGVKALSIHGEKPMKERRDVMGSFLGGEVPVLVSTGVLGRGVDLLVVRQVIVFDMPSTIKEYIHVIGRASRMGEKGTAIVFVNEDDRNLFPDLVAALKSSGAAIPKELINLTSREMHNKKRRVGY

SEQ ID NO: 39212 - protein, 368 aa, Arabidopsis thaliana
  peptide (1)..(368): Ceres Seq. ID no. 12562561
MQAIPAALTGKSLLASADTGSGKTASFLVPIISRCTTYHSEHPSDQRRNPLAMVLAPTRELCVQVEDQAKMLGKGLPFKTALVVGGDPMSGQLYRIQQGVELIIGTPGRVVDLLSKHTIELDNIMTFVLDEVDCMLQRGFRDQVMQIFQALSQPQVLLFSATISREVEKVGGSLAKEIILVSIGNPNKPNKAVNQLAIWVDAKQKKQKLFDILRSQNHFKPPAVVYVSSRVGADLLANAITVVTGVKALSIHGEKPMKERRDVMGSFLGGEVPVLVSTGVLGRGVDLLVVRQVIVFDMPSTIKEYIHVIGRASRMGEKGTAIVFVNEDDRNLFPDLVAALKSSGAAIPKELINLTSREMHNKKRRVGY

SEQ ID NO: 39213 - protein, 316 aa, Arabidopsis thaliana
  peptide (1)..(316): Ceres Seq. ID no. 12562562
MVLAPTRELCVQVEDQAKMLGKGLPFKTALVVGGDPMSGQLYRIQQGVELIIGTPGRVVDLLSKHTIELDNIMTFVLDEVDCMLQRGFRDQVMQIFQALSQPQVLLFSATISREVEKVGGSLAKEIILVSIGNPNKPNKAVNQLAIWVDAKQKKQKLFDILRSQNHFKPPAVVYVSSRVGADLLANAITVVTGVKALSIHGEKPMKERRDVMGSFLGGEVPVLVSTGVLGRGVDLLVVRQVIVFDMPSTIKEYIHVIGRASRMGEKGTAIVFVNEDDRNLFPDLVAALKSSGAAIPKELINLTSREMHNKKRRVGY

SEQ ID NO: 39214 - DNA, 1179 bp, Arabidopsis thaliana
  misc_feature (1)..(1179): Ceres Seq. ID no. 12370969
  misc_feature (1)..(1179): Ortholog of  Ceres SEQ ID NO 14302454 as cited in SEQ ID NO 68957
gaatcttcgagaagactcttcttttgattcaatcactcaccggagaagaagaagaagctatgccggtgttcaaagctccgttcaatggctactctgtgaaattcagtccattctacgagtcacgcctcgccgtcgctacagctcagaacttcggaattctcggaaacggccgaatccatgtcctcgagctcgctcctggagctccaggcgtaactgaatccgtctcgtacgatacagccgacgctgtatacgacgtatgttggtcagaatctcatgactctgtgctcatcgccgcaattggtgacggctcagtgaagatttacgacacagctcttcctcctccttctaatccgattagatcattccaagagcacgcgcgtgaggttcaatctgtggattacaatcccacgcggcgcgattcgtttctcacttcttcgtgggatgatacggttaagctttgggctatggatcgtccggcgagtgtaaggacttttaaggaacatgcttattgcgtttatcaagcagtttggaatcctaaacatggtgatgtgtttgcttctgcttctggagattgtactttaaggatttgggatgttagagaacctggatcaactatgatcatccctgctcatgattttgagattttgtcttgtgattggaataagtatgatgattgtattttagctacttcttcagtggataagacagttaaggtttgggatgttaggagttatagagttcctttggctgtgcttaatggtcatggatatgcggtgaggaaggtgaaattctcgccgcataggaggagtttgatagcttcttgctcttatgatatgagtgtttgtctttgggactatatggtggaagatgctttggttggtaggtatgatcatcatacagagtttgctgttgggatcgatatgagtgttcttgttgaaggtttaatggcgagtactggttgggatgagcttgtttatgtttggcagcaagggatggatcctagagccagttgattcataagtaagtttgtgattgcaaaacagtttcatctttatttgttgtggaattggtttggtttttgttaaaggaatgtagttggaataaagttgggatcttgcttaagaagaaatgtaagttactgagagtttcacatatgaacaaggttatctttcgaattgt

SEQ ID NO: 39215 - protein, 336 aa, Arabidopsis thaliana
  peptide (1)..(336): Ceres Seq. ID no. 12370970
IFEKTLLLIQSLTGEEEEAMPVFKAPFNGYSVKFSPFYESRLAVATAQNFGILGNGRIHVLELAPGAPGVTESVSYDTADAVYDVCWSESHDSVLIAAIGDGSVKIYDTALPPPSNPIRSFQEHAREVQSVDYNPTRRDSFLTSSWDDTVKLWAMDRPASVRTFKEHAYCVYQAVWNPKHGDVFASASGDCTLRIWDVREPGSTMIIPAHDFEILSCDWNKYDDCILATSSVDKTVKVWDVRSYRVPLAVLNGHGYAVRKVKFSPHRRSLIASCSYDMSVCLWDYMVEDALVGRYDHHTEFAVGIDMSVLVEGLMASTGWDELVYVWQQGMDPRAS

SEQ ID NO: 39216 - protein, 317 aa, Arabidopsis thaliana
  peptide (1)..(317): Ceres Seq. ID no. 12370971
MPVFKAPFNGYSVKFSPFYESRLAVATAQNFGILGNGRIHVLELAPGAPGVTESVSYDTADAVYDVCWSESHDSVLIAAIGDGSVKIYDTALPPPSNPIRSFQEHAREVQSVDYNPTRRDSFLTSSWDDTVKLWAMDRPASVRTFKEHAYCVYQAVWNPKHGDVFASASGDCTLRIWDVREPGSTMIIPAHDFEILSCDWNKYDDCILATSSVDKTVKVWDVRSYRVPLAVLNGHGYAVRKVKFSPHRRSLIASCSYDMSVCLWDYMVEDALVGRYDHHTEFAVGIDMSVLVEGLMASTGWDELVYVWQQGMDPRAS

SEQ ID NO: 39217 - protein, 182 aa, Arabidopsis thaliana
  peptide (1)..(182): Ceres Seq. ID no. 12370972
MDRPASVRTFKEHAYCVYQAVWNPKHGDVFASASGDCTLRIWDVREPGSTMIIPAHDFEILSCDWNKYDDCILATSSVDKTVKVWDVRSYRVPLAVLNGHGYAVRKVKFSPHRRSLIASCSYDMSVCLWDYMVEDALVGRYDHHTEFAVGIDMSVLVEGLMASTGWDELVYVWQQGMDPRAS

SEQ ID NO: 39218 - DNA, 1153 bp, Arabidopsis thaliana
  misc_feature (1)..(1153): Ceres Seq. ID no. 13497349
  misc_feature (1)..(1153): Ortholog of  Ceres SEQ ID NO 12582036 as cited in SEQ ID NO 50981
  misc_feature (1)..(1153): Ortholog of  Ceres SEQ ID NO 14311969 as cited in SEQ ID NO 58929
  misc_feature (1)..(1153): Ortholog of  Ceres SEQ ID NO 15173523 as cited in SEQ ID NO 61797
  misc_feature (1)..(1153): Ortholog of  Ceres SEQ ID NO 14309357 as cited in SEQ ID NO 0
aaaattgaaattcgaaaacagaacaaaaaaaaaaatctctctcaatctctctcagatctgaatccatccatcaccgatctctaatggcggcaccaccagcatcatcctcggcgagggaagagttcgtgtacctcgcaaagctcgcagagcaagcggaacgttacgaagaaatggttgaattcatggaaaaagtcgctgaagccgttgacaaagacgaactcaccgtcgaagaacgtaatctcctctccgtcgcttacaaaaacgtaatcggcgctcgtcgtgcttcctggagaatcatctcttccattgaacaaaaagaagagagtcgtggtaacgatgaccatgtgaccacgatccgtgattacagaagcaagatcgaatctgagttatcgaaaatctgtgacggtattcttaagcttcttgatactagacttgttcctgcttctgctaatggagattctaaggttttttaccttaagatgaagggagattatcataggtatttggctgagtttaagactggtcaagagaggaaagatgctgctgaacatactctcaccgcttacaaagctgctcaggatattgctaatgctgaattggctccaacgcatccgattcgtcttggtttggctttgaatttctctgtgttttactatgagattcttaattctccagatcgtgcttgtaatctcgctaagcaggcgtttgatgaagccattgctgagttagatactcttggagaggagtcatacaaggatagtaccttgatcatgcagcttcttcgtgacaatcttactctctggacttctgacatgcaggacgaaagtccggaggagattaaagaagcagcagcaccaaagcctgctgaagaacagaaggagatctaagtttgtggtttcttttttcagtattcttaagttatgcaattataattatgtttctgcttggtgtttattttctaatctttcctttgctatccccgaagcttctaaggccgtctaattcttgtcctttgtttgcttttctcaatcgtggatgctactggatttctgttttgttttacttcttctcttgattgattgcatttcccggcttatgccttgtacttgaaactcagttttctctcttattaatgatttgccattcacctggt

SEQ ID NO: 39219 - protein, 267 aa, Arabidopsis thaliana
  peptide (1)..(267): Ceres Seq. ID no. 13497350
MAAPPASSSAREEFVYLAKLAEQAERYEEMVEFMEKVAEAVDKDELTVEERNLLSVAYKNVIGARRASWRIISSIEQKEESRGNDDHVTTIRDYRSKIESELSKICDGILKLLDTRLVPASANGDSKVFYLKMKGDYHRYLAEFKTGQERKDAAEHTLTAYKAAQDIANAELAPTHPIRLGLALNFSVFYYEILNSPDRACNLAKQAFDEAIAELDTLGEESYKDSTLIMQLLRDNLTLWTSDMQDESPEEIKEAAAPKPAEEQKEI

SEQ ID NO: 39220 - protein, 238 aa, Arabidopsis thaliana
  peptide (1)..(238): Ceres Seq. ID no. 13497351
MVEFMEKVAEAVDKDELTVEERNLLSVAYKNVIGARRASWRIISSIEQKEESRGNDDHVTTIRDYRSKIESELSKICDGILKLLDTRLVPASANGDSKVFYLKMKGDYHRYLAEFKTGQERKDAAEHTLTAYKAAQDIANAELAPTHPIRLGLALNFSVFYYEILNSPDRACNLAKQAFDEAIAELDTLGEESYKDSTLIMQLLRDNLTLWTSDMQDESPEEIKEAAAPKPAEEQKEI

SEQ ID NO: 39221 - protein, 234 aa, Arabidopsis thaliana
  peptide (1)..(234): Ceres Seq. ID no. 13497352
MEKVAEAVDKDELTVEERNLLSVAYKNVIGARRASWRIISSIEQKEESRGNDDHVTTIRDYRSKIESELSKICDGILKLLDTRLVPASANGDSKVFYLKMKGDYHRYLAEFKTGQERKDAAEHTLTAYKAAQDIANAELAPTHPIRLGLALNFSVFYYEILNSPDRACNLAKQAFDEAIAELDTLGEESYKDSTLIMQLLRDNLTLWTSDMQDESPEEIKEAAAPKPAEEQKEI

SEQ ID NO: 39222 - DNA, 1238 bp, Arabidopsis thaliana
  misc_feature (1)..(1238): Ceres Seq. ID no. 13488953
  misc_feature (1)..(1238): Ortholog of  Ceres SEQ ID NO 15171739 as cited in SEQ ID NO 57134
agtgagtattcaatctcatagactcatagcaatggcgaatcacaacagtttcacttacatggaccatagcttcagcgatataagtctcaactttgattcctctgctttcagcgattgtaacagtgacatatcctgcgagtttccaacaactacctccgagagccgtcaacgaaaactcttcctctcttgcgccgttgataattccgatgacgtgatcagaaatctcataacgcatcttgagtcatcttcttcgatcgaggaacagaagcaagctgctatggagattagactcttatcaaagaacaaaccagagaatcgtatcaaactcgctaaagccggtgctattaaaccgttggtttctttaatctcgtcttcggatcttcagcttcaagagtatggagtcactgcggtgttgaatctatctctctgcgatgagaacaaagagatgattgtttcttccggtgcggttaaaccgctcgttaatgcgttgagattaggaacaccgacgacgaaagagaacgctgcttgtgctctgctccggttatctcaagtggaggaaaacaaaatcacgattgggagatcaggagcgattcctttactagtgaaccttctagaaaatggcggattcagagcgaagaaagacgcgtcgacggctttatactcgttgtgttcgacgaacgagaacaaaaccagagctgttgaatctgggattatgaagccgttagtggagttaatgattgattttgaatcggatatggttgataaatcagcgtttgttatgaatctgttaatgtcggcgccggaatcgaagccggcggttgtggaagaaggaggagttccggtgttggttgagattgttgaagcgggaacacagagacagaaggagataagtgtgtcgatattgttgcagctttgtgaggagagtgttgtgtatcgaaccatggtggctcgtgaaggagcggttcctccgctcgtggctttatcgcagggtagtgcgagtcgtggtgctaaggtaaaggctgaggcgttgatagagcttcttaggcaacccagacaacaacaacaacaacaacactttgaatctaacgacaacgagagataacactttagtttgggctttttattaatgggcctttgtagaatacatatcttgttaattatttgggcggcccaagctgaacacatatcttgttaattattggtcgatgtgttttgcatcaaagttgcattacttgcgc

SEQ ID NO: 39223 - protein, 366 aa, Arabidopsis thaliana
  peptide (1)..(366): Ceres Seq. ID no. 13488954
VSIQSHRLIAMANHNSFTYMDHSFSDISLNFDSSAFSDCNSDISCEFPTTTSESRQRKLFLSCAVDNSDDVIRNLITHLESSSSIEEQKQAAMEIRLLSKNKPENRIKLAKAGAIKPLVSLISSSDLQLQEYGVTAVLNLSLCDENKEMIVSSGAVKPLVNALRLGTPTTKENAACALLRLSQVEENKITIGRSGAIPLLVNLLENGGFRAKKDASTALYSLCSTNENKTRAVESGIMKPLVELMIDFESDMVDKSAFVMNLLMSAPESKPAVVEEGGVPVLVEIVEAGTQRQKEISVSILLQLCEESVVYRTMVAREGAVPPLVALSQGSASRGAKVKAEALIELLRQPRQQQQQQHFESNDNER

SEQ ID NO: 39224 - protein, 356 aa, Arabidopsis thaliana
  peptide (1)..(356): Ceres Seq. ID no. 13488955
MANHNSFTYMDHSFSDISLNFDSSAFSDCNSDISCEFPTTTSESRQRKLFLSCAVDNSDDVIRNLITHLESSSSIEEQKQAAMEIRLLSKNKPENRIKLAKAGAIKPLVSLISSSDLQLQEYGVTAVLNLSLCDENKEMIVSSGAVKPLVNALRLGTPTTKENAACALLRLSQVEENKITIGRSGAIPLLVNLLENGGFRAKKDASTALYSLCSTNENKTRAVESGIMKPLVELMIDFESDMVDKSAFVMNLLMSAPESKPAVVEEGGVPVLVEIVEAGTQRQKEISVSILLQLCEESVVYRTMVAREGAVPPLVALSQGSASRGAKVKAEALIELLRQPRQQQQQQHFESNDNER

SEQ ID NO: 39225 - protein, 347 aa, Arabidopsis thaliana
  peptide (1)..(347): Ceres Seq. ID no. 13488956
MDHSFSDISLNFDSSAFSDCNSDISCEFPTTTSESRQRKLFLSCAVDNSDDVIRNLITHLESSSSIEEQKQAAMEIRLLSKNKPENRIKLAKAGAIKPLVSLISSSDLQLQEYGVTAVLNLSLCDENKEMIVSSGAVKPLVNALRLGTPTTKENAACALLRLSQVEENKITIGRSGAIPLLVNLLENGGFRAKKDASTALYSLCSTNENKTRAVESGIMKPLVELMIDFESDMVDKSAFVMNLLMSAPESKPAVVEEGGVPVLVEIVEAGTQRQKEISVSILLQLCEESVVYRTMVAREGAVPPLVALSQGSASRGAKVKAEALIELLRQPRQQQQQQHFESNDNER

SEQ ID NO: 39226 - DNA, 825 bp, Arabidopsis thaliana
  misc_feature (1)..(825): Ceres Seq. ID no. 12325920
  misc_feature (1)..(825): Ortholog of  Ceres SEQ ID NO 14316371 as cited in SEQ ID NO 60113
actgttaaggaaggtcttgctgcgctaagaaagaaaagaagaagaaagatgccaggagcaattgtggaggaagagaaatctcagattgaatccatcaaagagcaattgaaactcgagaaggaagatgatgttgttgtggaggatgtgaaagacggagaggaagaagacgatgatgaagacgatgaggacgtcgaagttgaaggggaaggtggaaatgagaatgcaaagcaaagtagaagcgagaagaaaagtcgcaaagctgttctaaagcttggcatgaaacctgtctcagatgtcagcagagtgacaatcaaaagagccaagaatgtgttatttgtcatctcgaagccagatgtttacaagagtcccaatgcagagacttacgtcatttttggagaggccaaggtcgacgatttgagctctcagctacagactcaagctgctcagaggtttaagatgcctgatgtgacatccatgctacctaacgccggttctgaagctaccatggctccactagcagaggaagaagacgaagacgatgttgatgacactggtgttgaagccagagacattgatcttgtcatgacccaagcaggtgtctccaaggccaaagccgtcagtgctctaaaggctaatgatggggatatcgtttcagccattatggaactcactacatagagttgagtagtagagccacctaaattgtgcttttgtttcattgtttcttgtctcagctaccattttctttgaacattattaattatgtctccccttgatttgaagtcattatctgtctactctgatcaaagtatttaatttgcggcc

SEQ ID NO: 39227 - protein, 225 aa, Arabidopsis thaliana
  peptide (1)..(225): Ceres Seq. ID no. 12325921
TVKEGLAALRKKRRRKMPGAIVEEEKSQIESIKEQLKLEKEDDVVVEDVKDGEEEDDDEDDEDVEVEGEGGNENAKQSRSEKKSRKAVLKLGMKPVSDVSRVTIKRAKNVLFVISKPDVYKSPNAETYVIFGEAKVDDLSSQLQTQAAQRFKMPDVTSMLPNAGSEATMAPLAEEEDEDDVDDTGVEARDIDLVMTQAGVSKAKAVSALKANDGDIVSAIMELTT

SEQ ID NO: 39228 - protein, 209 aa, Arabidopsis thaliana
  peptide (1)..(209): Ceres Seq. ID no. 12325922
MPGAIVEEEKSQIESIKEQLKLEKEDDVVVEDVKDGEEEDDDEDDEDVEVEGEGGNENAKQSRSEKKSRKAVLKLGMKPVSDVSRVTIKRAKNVLFVISKPDVYKSPNAETYVIFGEAKVDDLSSQLQTQAAQRFKMPDVTSMLPNAGSEATMAPLAEEEDEDDVDDTGVEARDIDLVMTQAGVSKAKAVSALKANDGDIVSAIMELTT

SEQ ID NO: 39229 - protein, 133 aa, Arabidopsis thaliana
  peptide (1)..(133): Ceres Seq. ID no. 12325923
MKPVSDVSRVTIKRAKNVLFVISKPDVYKSPNAETYVIFGEAKVDDLSSQLQTQAAQRFKMPDVTSMLPNAGSEATMAPLAEEEDEDDVDDTGVEARDIDLVMTQAGVSKAKAVSALKANDGDIVSAIMELTT

SEQ ID NO: 39230 - DNA, 1620 bp, Arabidopsis thaliana
  misc_feature (1)..(1620): Ceres Seq. ID no. 12330906
  misc_feature (1)..(1620): Ortholog of  Ceres SEQ ID NO 13596189 as cited in SEQ ID NO 68452
acaacgtgaaaacacaggttcgtgctactactccaatgatacgggtctcaaaatactcaaaactctggcatgtctcaattccacaaattattgtttaatcattctgcttcttctataactgcagaagaaagaagaaagaagaagaagaagagattagagcttgagccataatatataatcccttgatcattagtctaaagaaccacataaaaagatgggattctggtcgttgttggaggtggcttctatgccggttattcaagttcttttcatgagtctcgtgggagctttcatggcctctgatcgttgcaagctcttccctgttgaagcccgtaattccatgaacaaggtggtgtttgtactatttgcaccggctctcatgtttgccaatctagctcagacggttacacttgaagacatcatctcatggtggtttatgccggtgaacatgggacttacatttctaatcggaggacttcttgggtggttggttgttaagattttgaaaccacctccttatcttgaaggtcttattgttgcaacttgttctgcaggaaatatggggaacctaccaatcatacttgtcccagcaatctgcgatgaggacaaaagtccttttggtaaccgaagtgtatgtagaaccgtcgggctctcttacgcgtctttctccatggcgctagggggtttctacatatggacatacacattccggctgattaaagggtccgcaatgaaagttcaagccatagaagaatctgagaaaatagcaattaaatcatccaatagtgacttagaagctgatcataagacccatctcctcggtgcaccggaagacaaggaaaacaaagtggtaaaggaagagacagggttttggagaaaaggagtagacttcctccatgagatattggaggagcttcttgcaccacctacacttggtgcaattatcggtttcattttcggtgcagtaagatggctcagaaatcttatcataggtgatgatgctcctttacgaatagtacaaagcactgcaaaacttcttggagatgggaccattccctgtatgactattatactagggggaaacctcatacaaggtttacgttcttcggcagtcaaaccgatggttgtacttggaatagtctgtgctcggtacatagctatgccaattatcggtataggcattgtactancanntgcaaatctnggatttcttccagctgatcctttgtttcagtatgttttgatgcttcagttcaccctcccgcctgccatgaatatcggtaccatgacacagctgtacaatgttgctcaagacgaatgctcagtgctcatgctttggacctacttggtcgcgatactggccctcactgtatggtccaccatcttccttcacttgttagtctaaagaacctgcaactctgtatgagcacaagaagattctatctctctactactacagagaccgaagctctgtcaagggatcttaccattctttttgtctatcacataaaatttgatcataacttgatagatttttctggttgcatgcgtacctttctgcaaatcttcatttttctccatatcccgatttgtaaacgccaatattgtatcaagtattac

SEQ ID NO: 39231 - protein, 396 aa, Arabidopsis thaliana
  peptide (1)..(396): Ceres Seq. ID no. 12330907
  misc_feature (326)..(326): Xaa is any aa, unknown or other
  misc_feature (327)..(327): Xaa is any aa, unknown or other
  misc_feature (330)..(330): Xaa is any aa, unknown or other
MGFWSLLEVASMPVIQVLFMSLVGAFMASDRCKLFPVEARNSMNKVVFVLFAPALMFANLAQTVTLEDIISWWFMPVNMGLTFLIGGLLGWLVVKILKPPPYLEGLIVATCSAGNMGNLPIILVPAICDEDKSPFGNRSVCRTVGLSYASFSMALGGFYIWTYTFRLIKGSAMKVQAIEESEKIAIKSSNSDLEADHKTHLLGAPEDKENKVVKEETGFWRKGVDFLHEILEELLAPPTLGAIIGFIFGAVRWLRNLIIGDDAPLRIVQSTAKLLGDGTIPCMTIILGGNLIQGLRSSAVKPMVVLGIVCARYIAMPIIGIGIVLXXANXGFLPADPLFQYVLMLQFTLPPAMNIGTMTQLYNVAQDECSVLMLWTYLVAILALTVWSTIFLHLLV

SEQ ID NO: 39232 - protein, 385 aa, Arabidopsis thaliana
  peptide (1)..(385): Ceres Seq. ID no. 12330908
  misc_feature (315)..(315): Xaa is any aa, unknown or other
  misc_feature (316)..(316): Xaa is any aa, unknown or other
  misc_feature (319)..(319): Xaa is any aa, unknown or other
MPVIQVLFMSLVGAFMASDRCKLFPVEARNSMNKVVFVLFAPALMFANLAQTVTLEDIISWWFMPVNMGLTFLIGGLLGWLVVKILKPPPYLEGLIVATCSAGNMGNLPIILVPAICDEDKSPFGNRSVCRTVGLSYASFSMALGGFYIWTYTFRLIKGSAMKVQAIEESEKIAIKSSNSDLEADHKTHLLGAPEDKENKVVKEETGFWRKGVDFLHEILEELLAPPTLGAIIGFIFGAVRWLRNLIIGDDAPLRIVQSTAKLLGDGTIPCMTIILGGNLIQGLRSSAVKPMVVLGIVCARYIAMPIIGIGIVLXXANXGFLPADPLFQYVLMLQFTLPPAMNIGTMTQLYNVAQDECSVLMLWTYLVAILALTVWSTIFLHLLV

SEQ ID NO: 39233 - protein, 377 aa, Arabidopsis thaliana
  peptide (1)..(377): Ceres Seq. ID no. 12330909
  misc_feature (307)..(307): Xaa is any aa, unknown or other
  misc_feature (308)..(308): Xaa is any aa, unknown or other
  misc_feature (311)..(311): Xaa is any aa, unknown or other
MSLVGAFMASDRCKLFPVEARNSMNKVVFVLFAPALMFANLAQTVTLEDIISWWFMPVNMGLTFLIGGLLGWLVVKILKPPPYLEGLIVATCSAGNMGNLPIILVPAICDEDKSPFGNRSVCRTVGLSYASFSMALGGFYIWTYTFRLIKGSAMKVQAIEESEKIAIKSSNSDLEADHKTHLLGAPEDKENKVVKEETGFWRKGVDFLHEILEELLAPPTLGAIIGFIFGAVRWLRNLIIGDDAPLRIVQSTAKLLGDGTIPCMTIILGGNLIQGLRSSAVKPMVVLGIVCARYIAMPIIGIGIVLXXANXGFLPADPLFQYVLMLQFTLPPAMNIGTMTQLYNVAQDECSVLMLWTYLVAILALTVWSTIFLHLLV

SEQ ID NO: 39234 - DNA, 1779 bp, Arabidopsis thaliana
  misc_feature (1)..(1779): Ceres Seq. ID no. 12343534
  misc_feature (1)..(1779): Ortholog of  Ceres SEQ ID NO 14310419 as cited in SEQ ID NO 55050
  misc_feature (1)..(1779): Ortholog of  Ceres SEQ ID NO 13657789 as cited in SEQ ID NO 66154
cttcaatctctcgtctcttactaacgttatttcttcaatctcattgatcaaaaaaaccaaaaccctaatctcaatttcctccaaaagtttcagtttttaaaaatgggttttcttcttttgtaacgaaaaatgtgtcaaactttgaattgaccatttttttttataaggattcgatgaagaaattgagaagctattactcaaatgtgagacatcatcagaatcaccatcatcatcaccatcatcatagcaacattgtttcttcagagaggaaatggatatttttccctctattgattggttcaatcttcgctttgttcttactcttcctcacaacaaccctaacttcaccaaccggaggagtccggtttctcccttttacccgacccgttttgttaaccggatctggttcatcagctttcgttgaatccaaaatcaaacctcaacaaatctcatcactcccgtcgccaccgcgttttgcttacttgatttctggatccgccggtgacgggaaatctctccggcgaactcttttggctctttaccatccgaataatcggtatgttgttcatttagatagagaatcttccatggaagagagagaggagcttcatggatatatcaaaaactcgtctttgtttcgaaggtttatgaatgttcatatgattgagaaagctaatcttgtcacgtatcgtggacctactatggttgccaatacacttcacgctgcggcgattttgcttagagaaggagctgattgggattggtttattaatcttagctcttctgattatcctctagtgactcatgatgatttgttgcatatcttttcgcatttgccgcgggatttgaacttcattgatcatactagtaacattggatggaaagcatcacaaagagcaaaaccggtgattatagatcctggactgtatttgaacaagaaatctgatgttttttgggttacgcaaagacggagcatcccaacagcattcaagcttttcacaggctctgcttggatggcgttatctcggccattcgtcgactattgtatatggggttgggataatctacctcgtacggtcttaatgtattactcgaattttctctcttctccagaaggatattttcacactgttctctgcaacgctgaggaattcagaaacacaacggtaaatagcaacctgcacttcatatcgtgggacaatccgcctaagcagcatccacaccatctcactcttacagacatgaccaaaatggtaaatagcaatgccccgtttgctagaaagttcagaagagaagatcctgtccttgacaagatcgatgatgagctccttaacagaggtcctgggatgataacacctggcggttggtgcattggaagccatgagaatgggagtgacccttgtgctgttattggtgatactgatgttatcaggcctggtccaggcgctagacggctcgagaatctggtanttcgttattatccactgagaatttccgatcaaaacagtgtaagtgatctgatatatctagagaacgacatcacacagagatggaatgtagcagccttgattattggggttagatgtgatttaggatctgatagaaatccctcttttagtcaagaatataagtgaagaaatacagaacaattaggctatatgatgtgggaagtatttgtcttgttgctccacacaacatgccttaaggtcttgttgtagttctcagattggaattttgagattttgtactctgctgttttaaaattagtttcttcctttc

SEQ ID NO: 39235 - protein, 486 aa, Arabidopsis thaliana
  peptide (1)..(486): Ceres Seq. ID no. 12343535
  misc_feature (433)..(433): Xaa is any aa, unknown or other
MKKLRSYYSNVRHHQNHHHHHHHHSNIVSSERKWIFFPLLIGSIFALFLLFLTTTLTSPTGGVRFLPFTRPVLLTGSGSSAFVESKIKPQQISSLPSPPRFAYLISGSAGDGKSLRRTLLALYHPNNRYVVHLDRESSMEEREELHGYIKNSSLFRRFMNVHMIEKANLVTYRGPTMVANTLHAAAILLREGADWDWFINLSSSDYPLVTHDDLLHIFSHLPRDLNFIDHTSNIGWKASQRAKPVIIDPGLYLNKKSDVFWVTQRRSIPTAFKLFTGSAWMALSRPFVDYCIWGWDNLPRTVLMYYSNFLSSPEGYFHTVLCNAEEFRNTTVNSNLHFISWDNPPKQHPHHLTLTDMTKMVNSNAPFARKFRREDPVLDKIDDELLNRGPGMITPGGWCIGSHENGSDPCAVIGDTDVIRPGPGARRLENLVXRYYPLRISDQNSVSDLIYLENDITQRWNVAALIIGVRCDLGSDRNPSFSQEYK

SEQ ID NO: 39236 - protein, 348 aa, Arabidopsis thaliana
  peptide (1)..(348): Ceres Seq. ID no. 12343536
  misc_feature (295)..(295): Xaa is any aa, unknown or other
MEEREELHGYIKNSSLFRRFMNVHMIEKANLVTYRGPTMVANTLHAAAILLREGADWDWFINLSSSDYPLVTHDDLLHIFSHLPRDLNFIDHTSNIGWKASQRAKPVIIDPGLYLNKKSDVFWVTQRRSIPTAFKLFTGSAWMALSRPFVDYCIWGWDNLPRTVLMYYSNFLSSPEGYFHTVLCNAEEFRNTTVNSNLHFISWDNPPKQHPHHLTLTDMTKMVNSNAPFARKFRREDPVLDKIDDELLNRGPGMITPGGWCIGSHENGSDPCAVIGDTDVIRPGPGARRLENLVXRYYPLRISDQNSVSDLIYLENDITQRWNVAALIIGVRCDLGSDRNPSFSQEYK

SEQ ID NO: 39237 - protein, 328 aa, Arabidopsis thaliana
  peptide (1)..(328): Ceres Seq. ID no. 12343537
  misc_feature (275)..(275): Xaa is any aa, unknown or other
MNVHMIEKANLVTYRGPTMVANTLHAAAILLREGADWDWFINLSSSDYPLVTHDDLLHIFSHLPRDLNFIDHTSNIGWKASQRAKPVIIDPGLYLNKKSDVFWVTQRRSIPTAFKLFTGSAWMALSRPFVDYCIWGWDNLPRTVLMYYSNFLSSPEGYFHTVLCNAEEFRNTTVNSNLHFISWDNPPKQHPHHLTLTDMTKMVNSNAPFARKFRREDPVLDKIDDELLNRGPGMITPGGWCIGSHENGSDPCAVIGDTDVIRPGPGARRLENLVXRYYPLRISDQNSVSDLIYLENDITQRWNVAALIIGVRCDLGSDRNPSFSQEYK

SEQ ID NO: 39238 - DNA, 1207 bp, Arabidopsis thaliana
  misc_feature (1)..(1207): Ceres Seq. ID no. 12395464
  misc_feature (1)..(1207): Ortholog of  Ceres SEQ ID NO 15175767 as cited in SEQ ID NO 56994
atgacgacgacgacgacgattcagtctcctctctctacacgttgaatttcaatcggcttcacgaaccttcaatctcgtgcggatcgaaattcgatcagtttgtagtaaccgacaagttccgaagatttttcatctgctggatttcgtcgatcagattgaaaccgagcttttcaatcaggtgacttggatatttctctacgttatgctcgatctgaagaattgggattcaaatctagtctcatagatcgattctgattaaactcgtggagatccaatctctatcactagttcgattggattgttgtttgttatcttcaaggcctctctgtgtttgtgagtgagatggtatatttgcatagctcaatctcggtctgcaattccgtcgacccaatgatcatgtctcactcctcacctaaatccagaaacacccgtaataaatcttcatcatcaccaacctgttccaaattccctgtctgcgacggatctcagtccgctgctatcgacgtcgtgatccttatcgcggtcatcaccgcctgcggcttcctcttcttcccttacgtcaaactcatcaccctcaaatcgattgaggtcttttcagatctctctcttttagtcaaacaagagattttgcagaacccgattgtgtatggatcattagctttgagtatcttctgtgctgccatctctacttggcttgttatactcttgtgtactatgcagagatgcggcaaaccgaattgtaaaggccttaggaaagctgttgagtttgatattcagcttgagactgaggaatgcgtcaagagctccagcaacaagaggggaatgtttgagttgcctcgtgttcatcaccgtgaattggaagctgagctgaagaagatggctccgcctaatgggcgagccgtgcttgttttcagagcgaggtgtggttgttctgtaaggagattagtcgtttccgggccaaagaagcagcagaggaagatcaagaaatgaataagcgaacaaagttattatatatataaaaaaaggttcaatctttggaaatgagattggatcactacacttttcttcggttagttttattctctcatacacactcttttacaaaaacttatatatgttatagtccatgtgtttaaataatgtacaatgggaataagcattgtaaggatattgtgggaaccaggttatagtgaagaacattttggtc

SEQ ID NO: 39239 - protein, 215 aa, Arabidopsis thaliana
  peptide (1)..(215): Ceres Seq. ID no. 12395465
MVYLHSSISVCNSVDPMIMSHSSPKSRNTRNKSSSSPTCSKFPVCDGSQSAAIDVVILIAVITACGFLFFPYVKLITLKSIEVFSDLSLLVKQEILQNPIVYGSLALSIFCAAISTWLVILLCTMQRCGKPNCKGLRKAVEFDIQLETEECVKSSSNKRGMFELPRVHHRELEAELKKMAPPNGRAVLVFRARCGCSVRRLVVSGPKKQQRKIKK

SEQ ID NO: 39240 - protein, 199 aa, Arabidopsis thaliana
  peptide (1)..(199): Ceres Seq. ID no. 12395466
MIMSHSSPKSRNTRNKSSSSPTCSKFPVCDGSQSAAIDVVILIAVITACGFLFFPYVKLITLKSIEVFSDLSLLVKQEILQNPIVYGSLALSIFCAAISTWLVILLCTMQRCGKPNCKGLRKAVEFDIQLETEECVKSSSNKRGMFELPRVHHRELEAELKKMAPPNGRAVLVFRARCGCSVRRLVVSGPKKQQRKIKK

SEQ ID NO: 39241 - protein, 197 aa, Arabidopsis thaliana
  peptide (1)..(197): Ceres Seq. ID no. 12395467
MSHSSPKSRNTRNKSSSSPTCSKFPVCDGSQSAAIDVVILIAVITACGFLFFPYVKLITLKSIEVFSDLSLLVKQEILQNPIVYGSLALSIFCAAISTWLVILLCTMQRCGKPNCKGLRKAVEFDIQLETEECVKSSSNKRGMFELPRVHHRELEAELKKMAPPNGRAVLVFRARCGCSVRRLVVSGPKKQQRKIKK

SEQ ID NO: 39242 - DNA, 1285 bp, Arabidopsis thaliana
  misc_feature (1)..(1285): Ceres Seq. ID no. 12395440
  misc_feature (1)..(1285): Ortholog of  Ceres SEQ ID NO 14313666 as cited in SEQ ID NO 54618
  misc_feature (1)..(1285): Ortholog of  Ceres SEQ ID NO 13639645 as cited in SEQ ID NO 57488
accatttccaatggccggagcagtaagcctttggcggagagaggccgtgttcttgacggcgatgctggcaggcgaaaccagcatcgtcggactaagtactctgtttaaggtagcaacttcaaagggactcaacatttaccctttcctcagctattcttatcttcttgcttctcttctccttcttccttctctgttcttcaccaacaggtcaagatcacttcctccactaagtgcctcaatactctctaagattggacttcttggctttctaggatcaatgtatgttattacaggaggcataggcatcgaatacagcaacccaaccttagcctccgccataggcaatattgttcctgctcttaccttcatcctcgctgttatcttcaggatggagaaagtatcattcaaagaaaggagcagtgtagccaaagtgatggggacgatactgtcactaataggcgcatttgtggtgattttctaccacggtccacgtgtctttgtcgcatcttctccaccatatctaaacttccgtcagctttctccaccgttgtcatcgtcaaagtctgattggctcatcggaggagctattcttaccatacaaggcatcttcgtttctgtttcttttattctccaggcacatataatgagagaatatcctgaagcattcacagtctccattctctacattctatgtatttcaatcgtgacctcaatgattggactagtagtcgaaaagaacaacccaagcatttggatcattcatttcgatattacattgtttacaattgttactacgggaataataacttcagtatactatgtgattcattcatgggcaatacgtcacaaaggacctctatacttagcgatatttaagcctctatctattttgatagcagtggttatggggaccatttttctcaacgattctctctatctcggatgtttgattggaggaattttgataacattaggcttttatgctgtgatgtggggcaaatcaaacgaagagaaggacaagttgttatcattttcaggaaaagagaaaacccctcttctattgagcggcaaaaacgaacaagtttaaatgaaaaataaattataatcaaaggagttacaaactctcaaatagtatcttatatacatggcgtgcaaacttttagtgtatactgtgtattgctttgtatataacttagaaaatgactatctaattgtttttttaagttacgggtacgtaacgactatctaaattcgttagatcacgacatctaacgaattttggtcc

SEQ ID NO: 39243 - protein, 361 aa, Arabidopsis thaliana
  peptide (1)..(361): Ceres Seq. ID no. 12395441
PFPMAGAVSLWRREAVFLTAMLAGETSIVGLSTLFKVATSKGLNIYPFLSYSYLLASLLLLPSLFFTNRSRSLPPLSASILSKIGLLGFLGSMYVITGGIGIEYSNPTLASAIGNIVPALTFILAVIFRMEKVSFKERSSVAKVMGTILSLIGAFVVIFYHGPRVFVASSPPYLNFRQLSPPLSSSKSDWLIGGAILTIQGIFVSVSFILQAHIMREYPEAFTVSILYILCISIVTSMIGLVVEKNNPSIWIIHFDITLFTIVTTGIITSVYYVIHSWAIRHKGPLYLAIFKPLSILIAVVMGTIFLNDSLYLGCLIGGILITLGFYAVMWGKSNEEKDKLLSFSGKEKTPLLLSGKNEQV

SEQ ID NO: 39244 - protein, 358 aa, Arabidopsis thaliana
  peptide (1)..(358): Ceres Seq. ID no. 12395442
MAGAVSLWRREAVFLTAMLAGETSIVGLSTLFKVATSKGLNIYPFLSYSYLLASLLLLPSLFFTNRSRSLPPLSASILSKIGLLGFLGSMYVITGGIGIEYSNPTLASAIGNIVPALTFILAVIFRMEKVSFKERSSVAKVMGTILSLIGAFVVIFYHGPRVFVASSPPYLNFRQLSPPLSSSKSDWLIGGAILTIQGIFVSVSFILQAHIMREYPEAFTVSILYILCISIVTSMIGLVVEKNNPSIWIIHFDITLFTIVTTGIITSVYYVIHSWAIRHKGPLYLAIFKPLSILIAVVMGTIFLNDSLYLGCLIGGILITLGFYAVMWGKSNEEKDKLLSFSGKEKTPLLLSGKNEQV

SEQ ID NO: 39245 - protein, 341 aa, Arabidopsis thaliana
  peptide (1)..(341): Ceres Seq. ID no. 12395443
MLAGETSIVGLSTLFKVATSKGLNIYPFLSYSYLLASLLLLPSLFFTNRSRSLPPLSASILSKIGLLGFLGSMYVITGGIGIEYSNPTLASAIGNIVPALTFILAVIFRMEKVSFKERSSVAKVMGTILSLIGAFVVIFYHGPRVFVASSPPYLNFRQLSPPLSSSKSDWLIGGAILTIQGIFVSVSFILQAHIMREYPEAFTVSILYILCISIVTSMIGLVVEKNNPSIWIIHFDITLFTIVTTGIITSVYYVIHSWAIRHKGPLYLAIFKPLSILIAVVMGTIFLNDSLYLGCLIGGILITLGFYAVMWGKSNEEKDKLLSFSGKEKTPLLLSGKNEQV

SEQ ID NO: 39246 - DNA, 2508 bp, Arabidopsis thaliana
  misc_feature (1)..(2508): Ceres Seq. ID no. 13494685
  misc_feature (1)..(2508): Ortholog of  Ceres SEQ ID NO 13593911 as cited in SEQ ID NO 52935
ggttttaagccatttttttcccaccgcctctgcagctctgcttttttagctgctattttttttttttgcttttggtcttcttcttcttcttcaagaatgagctaatactcacagaagaagaagatttttctttggatttttcactactgaggcattgttgtgaaattggatggtagtagcattggaatggcagaacaaaagagtagtaacggaggaggaggaggaggagatgttgttatcaatgttccagttgaggaagcatcaaggcgttccaaggaaatggcttcaccagagtctgagaaaggagttccctttagtaaaagcccttctcctgaaatctctaagcttgttggtagtcctaacaagcctcctagagctccaaatcagaacaatgtgggtctaactcagaggaaatcttttgcaaggtcggtttactcaaaacccaagtcccggtttgttgatccatcttgtcctgtagacacaagtattctagaggaggaagttagggagcaacttggtgctggtttttcttttagtagagcttctccgaataacaaatctaataggagtgtcgggtcaccagcaccggttactccaagtaaagtcgttgttgagaaagatgaggatgaggaaatctacaagaaggttaagctgaacagagagatgcgcagtaagataagtacattggctttgatagagtcagctttctttgtggtgattttgagcgctttggttgcgagtttaaccattaatgtcctgaaacatcacaccttctgggggctagaagtctggaaatggtgtgtgcttgtgatggttatattcagtggaatgttggtgacaaactggttcatgcgtttgattgtgttcctcatagaaacaaactttcttttgaggagaaaagtgctctactttgtgcacggcttgaagaagagcgtccaagttttcatttggctctgcttgattcttgttgcttggatattgttgttcaaccacgacgtgaaacggtcccccgcagccaccaaagtcctcaaatgtattaccaggactcttatttccattcttacaggggcattcttttggctggtgaaaacactcttgttgaaaatccttgcagcgaatttcaacgtcaataactttttcgataggattcaagattctgttttccaccagtatgttctacaaacgctctcgggtcttccacttatggaagaggcagagagggtcgggcgtgagccaagcacaggccatttgagtttcgcgactgtagtgaaaaaaggaacggttaaagagaagaaagtgattgatatggggaaagttcataagatgaagcgggagaaagtttcggcttggactatgcgagttttgatggaagcggttagaacttcaggtctctctactatctctgacacattggacgaaacagcatacggcgaggggaaagagcaagctgacagagaaattactagtgagatggaggctttggctgctgcttaccatgtcttcagaaatgttgctcagcccttcttcaattacatagaggaagaggacttgcttaggtttatgattaaggaagaggttgatcttgtgttcccattgtttgatggtgccgctgagaccgggagaattacaagaaaagctttcacagaatgggtggttaaggtgtacacgagccggagagctttagcgcattccttaaacgacacaaaaacagcggttaagcagttaaacaaacttgtgacagcaatcttgatggtggttaccgttgtcatttggctgctccttctagaagtagcaacgactaaggttttgctgttcttctccacccaactcgtggctctggcttttataatcggaagcacatgcaaaaacctctttgaatccattgtgttcgtattcgtcatgcatccttatgatgtcggtgatcgatgtgttgttgacggtgtcgcgatgctggtggaagaaatgaatctcttaacgacagtgttcttgaagcttaacaacgagaaagtgtattatccgaacgctgttttggccacgaaaccgataagcaattacttcagaagtccgaatatgggagaaacagtggaattctctatctctttctcgacaccagtctctaagatagcacatctcaaagaaagaatcgccgagtacttggagcagaacccgcaacattgggcaccggttcactcggtggtggtgaaggagatagagaacatgaacaagctgaagatggccctatacagtgaccacaccatcacgtttcaggaaaacagagagaggaatcttagaagaaccgaactttctttggccattaagagaatgttggaggaccttcacatcgactacactctccttcctcaagacattaatctcacaaagaagaactgatgagaaccaatttaaaaccggtttggtgttttttctaaaccgttgttataagacattattattaccaaacgttgtgatactgttttgtttaaggcttttagagtagatgatgaaatc

SEQ ID NO: 39247 - protein, 734 aa, Arabidopsis thaliana
  peptide (1)..(734): Ceres Seq. ID no. 13494686
MAEQKSSNGGGGGGDVVINVPVEEASRRSKEMASPESEKGVPFSKSPSPEISKLVGSPNKPPRAPNQNNVGLTQRKSFARSVYSKPKSRFVDPSCPVDTSILEEEVREQLGAGFSFSRASPNNKSNRSVGSPAPVTPSKVVVEKDEDEEIYKKVKLNREMRSKISTLALIESAFFVVILSALVASLTINVLKHHTFWGLEVWKWCVLVMVIFSGMLVTNWFMRLIVFLIETNFLLRRKVLYFVHGLKKSVQVFIWLCLILVAWILLFNHDVKRSPAATKVLKCITRTLISILTGAFFWLVKTLLLKILAANFNVNNFFDRIQDSVFHQYVLQTLSGLPLMEEAERVGREPSTGHLSFATVVKKGTVKEKKVIDMGKVHKMKREKVSAWTMRVLMEAVRTSGLSTISDTLDETAYGEGKEQADREITSEMEALAAAYHVFRNVAQPFFNYIEEEDLLRFMIKEEVDLVFPLFDGAAETGRITRKAFTEWVVKVYTSRRALAHSLNDTKTAVKQLNKLVTAILMVVTVVIWLLLLEVATTKVLLFFSTQLVALAFIIGSTCKNLFESIVFVFVMHPYDVGDRCVVDGVAMLVEEMNLLTTVFLKLNNEKVYYPNAVLATKPISNYFRSPNMGETVEFSISFSTPVSKIAHLKERIAEYLEQNPQHWAPVHSVVVKEIENMNKLKMALYSDHTITFQENRERNLRRTELSLAIKRMLEDLHIDYTLLPQDINLTKKN

SEQ ID NO: 39248 - protein, 703 aa, Arabidopsis thaliana
  peptide (1)..(703): Ceres Seq. ID no. 13494687
MASPESEKGVPFSKSPSPEISKLVGSPNKPPRAPNQNNVGLTQRKSFARSVYSKPKSRFVDPSCPVDTSILEEEVREQLGAGFSFSRASPNNKSNRSVGSPAPVTPSKVVVEKDEDEEIYKKVKLNREMRSKISTLALIESAFFVVILSALVASLTINVLKHHTFWGLEVWKWCVLVMVIFSGMLVTNWFMRLIVFLIETNFLLRRKVLYFVHGLKKSVQVFIWLCLILVAWILLFNHDVKRSPAATKVLKCITRTLISILTGAFFWLVKTLLLKILAANFNVNNFFDRIQDSVFHQYVLQTLSGLPLMEEAERVGREPSTGHLSFATVVKKGTVKEKKVIDMGKVHKMKREKVSAWTMRVLMEAVRTSGLSTISDTLDETAYGEGKEQADREITSEMEALAAAYHVFRNVAQPFFNYIEEEDLLRFMIKEEVDLVFPLFDGAAETGRITRKAFTEWVVKVYTSRRALAHSLNDTKTAVKQLNKLVTAILMVVTVVIWLLLLEVATTKVLLFFSTQLVALAFIIGSTCKNLFESIVFVFVMHPYDVGDRCVVDGVAMLVEEMNLLTTVFLKLNNEKVYYPNAVLATKPISNYFRSPNMGETVEFSISFSTPVSKIAHLKERIAEYLEQNPQHWAPVHSVVVKEIENMNKLKMALYSDHTITFQENRERNLRRTELSLAIKRMLEDLHIDYTLLPQDINLTKKN

SEQ ID NO: 39249 - protein, 575 aa, Arabidopsis thaliana
  peptide (1)..(575): Ceres Seq. ID no. 13494688
MRSKISTLALIESAFFVVILSALVASLTINVLKHHTFWGLEVWKWCVLVMVIFSGMLVTNWFMRLIVFLIETNFLLRRKVLYFVHGLKKSVQVFIWLCLILVAWILLFNHDVKRSPAATKVLKCITRTLISILTGAFFWLVKTLLLKILAANFNVNNFFDRIQDSVFHQYVLQTLSGLPLMEEAERVGREPSTGHLSFATVVKKGTVKEKKVIDMGKVHKMKREKVSAWTMRVLMEAVRTSGLSTISDTLDETAYGEGKEQADREITSEMEALAAAYHVFRNVAQPFFNYIEEEDLLRFMIKEEVDLVFPLFDGAAETGRITRKAFTEWVVKVYTSRRALAHSLNDTKTAVKQLNKLVTAILMVVTVVIWLLLLEVATTKVLLFFSTQLVALAFIIGSTCKNLFESIVFVFVMHPYDVGDRCVVDGVAMLVEEMNLLTTVFLKLNNEKVYYPNAVLATKPISNYFRSPNMGETVEFSISFSTPVSKIAHLKERIAEYLEQNPQHWAPVHSVVVKEIENMNKLKMALYSDHTITFQENRERNLRRTELSLAIKRMLEDLHIDYTLLPQDINLTKKN

SEQ ID NO: 39250 - DNA, 573 bp, Arabidopsis thaliana
  misc_feature (1)..(573): Ceres Seq. ID no. 12393074
  misc_feature (1)..(573): Ortholog of  Ceres SEQ ID NO 12562293 as cited in SEQ ID NO 20690
atcacttacttaacatactaagagagttattagaacttgcaaaaaatggcttccaaggctttgattctgttaggtctcttctcagttcttctcgtcgtctccgaagtgtcttccgcaaggcaatcgggcatggtgaagccagagagtgaggaaactgtgcaacctgaaggttatggcggtggccacggaggacatggtggtcacggagggggaggaggccacggacatggaggacacaacggaggagggggccacggacttgacggatacggaggaggtggaggacactatggaggaggtggaggacactacggaggaggtggaggacactacggaggtggtggaggaggatacggaggtggaggaggacaccacggaggaggaggccacgggctaaacgaacctgttcagactaagccgggtgtttaaaactatataatatcttcactaccatgcatgattgcatatatatatatacgcttatgtattatctatatgcctataaataaaccatggtgagtttgtaacgcagtgccttcagaaatgttcggaataaatttccataatattagt

SEQ ID NO: 39251 - protein, 127 aa, Arabidopsis thaliana
  peptide (1)..(127): Ceres Seq. ID no. 12393075
MASKALILLGLFSVLLVVSEVSSARQSGMVKPESEETVQPEGYGGGHGGHGGHGGGGGHGHGGHNGGGGHGLDGYGGGGGHYGGGGGHYGGGGGHYGGGGGGYGGGGGHHGGGGHGLNEPVQTKPGV

SEQ ID NO: 39252 - protein, 99 aa, Arabidopsis thaliana
  peptide (1)..(99): Ceres Seq. ID no. 12393076
MVKPESEETVQPEGYGGGHGGHGGHGGGGGHGHGGHNGGGGHGLDGYGGGGGHYGGGGGHYGGGGGHYGGGGGGYGGGGGHHGGGGHGLNEPVQTKPGV

SEQ ID NO: 39253 - protein, 74 aa, Arabidopsis thaliana
  peptide (1)..(74): Ceres Seq. ID no. 12393077
MAVATEDMVVTEGEEATDMEDTTEEGATDLTDTEEVEDTMEEVEDTTEEVEDTTEVVEEDTEVEEDTTEEEATG

SEQ ID NO: 39254 - DNA, 1334 bp, Arabidopsis thaliana
  misc_feature (1)..(1334): Ceres Seq. ID no. 13494122
  misc_feature (1)..(1334): Ortholog of  Ceres SEQ ID NO 13654557 as cited in SEQ ID NO 68444
acagcaaaaaatcgaaaatggttgcctcagccgccgcacatgagcaccgatcaatccaccaccgtcactttaccagacgtcatgactgctccagttcgacctgacattgtcaacttcgtccacgcccaaatctccaacaacagccgtcagccttacgcagtctccaaaaaggccggtcaccaaacctccgccgagtcctggggaaccggaagagccgtgtcacgtatccctcgtgttcctggtggtggaactcaccgtgccggtcaagcagcgttcggaaacatgtgtcgtggtggtcgtatgtttgctccgactaagatctggagacgctggcaccgtcgtgtcaatgtcaacatgaagaggcacgcgattgtttctgcaatcgctgctactgctgttccagctcttgtgatggctcgtggtcacaagatcgagaatgttcctgagatgcctcttgttgttagcgactcagctgaagctggtggagaagacatcagctgcgatcaaggtattgaagcagatcggtgcttacgacgatgcggagaaagctaagaacagtattggaattcgtcctggtaaaggtaaaatgaggaatcgtcgttacatttctaggaaaggtcctcttgttgtgtttggaactgaaggagccaagattgtgaaagcttttaggaatcttcctggtgttgagctttgtcacgttgagaggcttaacttgttgaaattagcccctggtggtcaccttggtaggtttgtgatttggactaagtctgcttttgagaagcttggatctatctatggctcgtttgagaaaccatcagagaagaagaagggttacgtcttgcctcgtgcgaagatggtgaatgctgatcttgctaggattattaactccgatgaggtacagagtgtggtgaacccgattaaggatggttccaagagagcggttctgaagaagaatccattgaagaaccttaatgtgatgttcaagttgaatccttatgctaagaccgcaaagagaatgtctctgttggctgaagcttcaagggttaaggctaagaaggagaagctcgagaagaagaggaaagtcgtcactaaggaggaggcccaagcgatcaaagcagcaggcaaggcttggtatcagactatgatttcagacagtgactacaccgagttcgataacttcaccaagtggcttggcgctagtcagtaatgatgctctcgtcatcgcaaagtctcttatatctaggcaaagattttggttttctgatttatgttcttcgtttgtattggatttatctgggattttatgttgttgagttggtaagacgatttttaag

SEQ ID NO: 39255 - protein, 256 aa, Arabidopsis thaliana
  peptide (1)..(256): Ceres Seq. ID no. 13494123
MFLRCLLLLATQLKLVEKTSAAIKVLKQIGAYDDAEKAKNSIGIRPGKGKMRNRRYISRKGPLVVFGTEGAKIVKAFRNLPGVELCHVERLNLLKLAPGGHLGRFVIWTKSAFEKLGSIYGSFEKPSEKKKGYVLPRAKMVNADLARIINSDEVQSVVNPIKDGSKRAVLKKNPLKNLNVMFKLNPYAKTAKRMSLLAEASRVKAKKEKLEKKRKVVTKEEAQAIKAAGKAWYQTMISDSDYTEFDNFTKWLGASQ

SEQ ID NO: 39256 - protein, 206 aa, Arabidopsis thaliana
  peptide (1)..(206): Ceres Seq. ID no. 13494124
MRNRRYISRKGPLVVFGTEGAKIVKAFRNLPGVELCHVERLNLLKLAPGGHLGRFVIWTKSAFEKLGSIYGSFEKPSEKKKGYVLPRAKMVNADLARIINSDEVQSVVNPIKDGSKRAVLKKNPLKNLNVMFKLNPYAKTAKRMSLLAEASRVKAKKEKLEKKRKVVTKEEAQAIKAAGKAWYQTMISDSDYTEFDNFTKWLGASQ

SEQ ID NO: 39257 - protein, 183 aa, Arabidopsis thaliana
  peptide (1)..(183): Ceres Seq. ID no. 13494125
TAKNRKWLPQPPHMSTDQSTTVTLPDVMTAPVRPDIVNFVHAQISNNSRQPYAVSKKAGHQTSAESWGTGRAVSRIPRVPGGGTHRAGQAAFGNMCRGGRMFAPTKIWRRWHRRVNVNMKRHAIVSAIAATAVPALVMARGHKIENVPEMPLVVSDSAEAGGEDISCDQGIEADRCLRRCGES

SEQ ID NO: 39258 - DNA, 1771 bp, Arabidopsis thaliana
  misc_feature (1)..(1771): Ceres Seq. ID no. 13495902
  misc_feature (1)..(1771): Ortholog of  Ceres SEQ ID NO 14310907 as cited in SEQ ID NO 54338
aaattcaattcgtttaaaaatggagagtcaaaagcaagaagataatgaatacattttccgcagtttgtatccatctgtgcccattcctgacaaacttacactgcctgaatttgtgctccaaggagttgaagaatacacagagaatgtagcgtttgtagaagcggtgaccggaaaagctgtgacgtacggtgatgtagtgagggacacaaagaggctagccaaagcgttgacatctctcggactaaggaaaggtcaagtgatggttgtggtcctaccaaacgtcgccgagtatgggattattgcccttggtattatgtctgccggtggagtcttctccggtgcaaatccgacggctcttgtttccgagatcaagaagcaagttgaagcttccggtgctagaggaatcatcactgatgctactaactatgaaaaggtgaaatcactaggtttaccggtgatagtgttaggtgaagagaagatagaaggagcagtaaactggaaagatcttctagaagcaggagacaaatgcggagataccgacaatgaagagattcttcagacagatctttgtgcacttcctttttcttcaggaacaacaggattacaaaaaggagtaatgctcacacatcgcaatctcatagccaatctttgctctactctcttcggtgtcaggtctgaaatgatcggtcagatcgtgacgcttggtttgatcccattctttcatatttacggtatcgttggcatatgttgtgctacaatgaagaataaaggcaaagttgttgctatgagtcggtacgatctaaggattttcttgaatgctttgattgctcatgaggtttcgtttgcgcctatagttccgccgattatattgaatcttgttaagaatccgatagttgatgagtttgatctttcgaagcttaaacttcagtctgtcatgactgctgctgctcctttagctcctgagcttcttactgccttcgaagccaagtttcctaatgtccaagtccaagaggcttatggattaacggagcatagttgcattacgttaactcacggagatccagagaaaggacaaggaatcgcgaaacgaaactcggttggtttcatacttccgaatctcgaggtaaagttcatagatcctgacaccggtagatcactcccgaagaacacttctggtgagctatgtgtgaggagccaatgtgtaatgcaaggttacttcatgaacaaggaagagactgacaagacaattgatgaacaaggttggcttcacacaggagacataggttacatcgatgatgatggagacatcttcatcgttgatcgtatcaaagaacttattaaatacaaaggttttcaggttgctccggccgagcttgaagctattctactcactcatccatccgttgaagacgttgccgtcgtgccgttaccggacgaggaagccggggagattccggcggcttgcgtggtgataaatccgaaagcgacagaaaaggaagaagacattctcaactttgttgcagcaaatgtggctcattacaagaaggttagagccgtccattttgtggattcaatccctaaatctctctctggtaaaatcatgaggaggcttcttagagacaagatcctcagcatcaacaagaagtagaagaaagaaaactcttacaagcttttaattaatctactttggttaaagaaattgtccttaaacaataaatactctttgtggtttcattattgctccttaattaggaaattctacagttcaatt

SEQ ID NO: 39259 - protein, 548 aa, Arabidopsis thaliana
  peptide (1)..(548): Ceres Seq. ID no. 13495903
NSIRLKMESQKQEDNEYIFRSLYPSVPIPDKLTLPEFVLQGVEEYTENVAFVEAVTGKAVTYGDVVRDTKRLAKALTSLGLRKGQVMVVVLPNVAEYGIIALGIMSAGGVFSGANPTALVSEIKKQVEASGARGIITDATNYEKVKSLGLPVIVLGEEKIEGAVNWKDLLEAGDKCGDTDNEEILQTDLCALPFSSGTTGLQKGVMLTHRNLIANLCSTLFGVRSEMIGQIVTLGLIPFFHIYGIVGICCATMKNKGKVVAMSRYDLRIFLNALIAHEVSFAPIVPPIILNLVKNPIVDEFDLSKLKLQSVMTAAAPLAPELLTAFEAKFPNVQVQEAYGLTEHSCITLTHGDPEKGQGIAKRNSVGFILPNLEVKFIDPDTGRSLPKNTSGELCVRSQCVMQGYFMNKEETDKTIDEQGWLHTGDIGYIDDDGDIFIVDRIKELIKYKGFQVAPAELEAILLTHPSVEDVAVVPLPDEEAGEIPAACVVINPKATEKEEDILNFVAANVAHYKKVRAVHFVDSIPKSLSGKIMRRLLRDKILSINKK

SEQ ID NO: 39260 - protein, 542 aa, Arabidopsis thaliana
  peptide (1)..(542): Ceres Seq. ID no. 13495904
MESQKQEDNEYIFRSLYPSVPIPDKLTLPEFVLQGVEEYTENVAFVEAVTGKAVTYGDVVRDTKRLAKALTSLGLRKGQVMVVVLPNVAEYGIIALGIMSAGGVFSGANPTALVSEIKKQVEASGARGIITDATNYEKVKSLGLPVIVLGEEKIEGAVNWKDLLEAGDKCGDTDNEEILQTDLCALPFSSGTTGLQKGVMLTHRNLIANLCSTLFGVRSEMIGQIVTLGLIPFFHIYGIVGICCATMKNKGKVVAMSRYDLRIFLNALIAHEVSFAPIVPPIILNLVKNPIVDEFDLSKLKLQSVMTAAAPLAPELLTAFEAKFPNVQVQEAYGLTEHSCITLTHGDPEKGQGIAKRNSVGFILPNLEVKFIDPDTGRSLPKNTSGELCVRSQCVMQGYFMNKEETDKTIDEQGWLHTGDIGYIDDDGDIFIVDRIKELIKYKGFQVAPAELEAILLTHPSVEDVAVVPLPDEEAGEIPAACVVINPKATEKEEDILNFVAANVAHYKKVRAVHFVDSIPKSLSGKIMRRLLRDKILSINKK

SEQ ID NO: 39261 - protein, 462 aa, Arabidopsis thaliana
  peptide (1)..(462): Ceres Seq. ID no. 13495905
MVVVLPNVAEYGIIALGIMSAGGVFSGANPTALVSEIKKQVEASGARGIITDATNYEKVKSLGLPVIVLGEEKIEGAVNWKDLLEAGDKCGDTDNEEILQTDLCALPFSSGTTGLQKGVMLTHRNLIANLCSTLFGVRSEMIGQIVTLGLIPFFHIYGIVGICCATMKNKGKVVAMSRYDLRIFLNALIAHEVSFAPIVPPIILNLVKNPIVDEFDLSKLKLQSVMTAAAPLAPELLTAFEAKFPNVQVQEAYGLTEHSCITLTHGDPEKGQGIAKRNSVGFILPNLEVKFIDPDTGRSLPKNTSGELCVRSQCVMQGYFMNKEETDKTIDEQGWLHTGDIGYIDDDGDIFIVDRIKELIKYKGFQVAPAELEAILLTHPSVEDVAVVPLPDEEAGEIPAACVVINPKATEKEEDILNFVAANVAHYKKVRAVHFVDSIPKSLSGKIMRRLLRDKILSINKK

SEQ ID NO: 39262 - DNA, 1109 bp, Arabidopsis thaliana
  misc_feature (1)..(1109): Ceres Seq. ID no. 13600811
  misc_feature (1)..(1109): Ortholog of  Ceres SEQ ID NO 14310443 as cited in SEQ ID NO 54695
  misc_feature (1)..(1109): Ortholog of  Ceres SEQ ID NO 13596354 as cited in SEQ ID NO 68027
aagttcgatttcctaattcctaatccgtttcctttttattccgatcaaagcagcgaaaaaagcatcggagatatgtcgtctaaggacaagaaactatcgaagccaacaagtggtcgtactggtggtatccgtacactttccgatctgaaccgaagatcagaacctgattccgatagtgactccgatggacctcaagaatacttcaccggtggcgaaaaaagtggtatgcttgttcaagatcctacaaaagaaccaaaacacgatgatgttgatgagatatttaatcaagcaagacagctaggagctgtggaaggacctcttgagcatccttcgagttctagaagctttacaggaacaggaagattgctttctggagaaagtgtgccaacggctcttcaacagcctgagcctgtgattcacaatattattttctggtctaatggattcactgtagatgatggacctttgaggaagttggatgatccagagaatgcttcttttcttgatagcattcgaaagtctgaatgtccgaaagagcttgagcctgttgataaaagagctcctgtacatgttaatcttatgagaagagatgagaagtgccctgagaaagaaaagcttaaggtttcatttcaaggagttggaaggactctaggtggtgcaagctcatcaacagcttcaagccaaagtaacctaactgatgtagcagcggttcaatcaccgttacagagccttgtagtagatgaaactcttccatccacatcgatccagcttagactcgcggatgggacacgcatggtagcaaagttcaacaaccatcacacggttaacgacattcgtggtttcattgagttttctcgaccagggaatccaaacaactatacccttcaggtcatggggttcccaccaaagccacttactgacccttctcagaccattgaacaagccggtctagcaagttctgtagtcattcagaaattctagaaaatttcgtttctctttttttgtactagagagagatttcaacaacttggaattgtactgaaaatattcaatcggcttattgttgtggcaagagaaataaaaacatcatatggtttctatgttgtttc

SEQ ID NO: 39263 - protein, 326 aa, Arabidopsis thaliana
  peptide (1)..(326): Ceres Seq. ID no. 13600812
KFDFLIPNPFPFYSDQSSEKSIGDMSSKDKKLSKPTSGRTGGIRTLSDLNRRSEPDSDSDSDGPQEYFTGGEKSGMLVQDPTKEPKHDDVDEIFNQARQLGAVEGPLEHPSSSRSFTGTGRLLSGESVPTALQQPEPVIHNIIFWSNGFTVDDGPLRKLDDPENASFLDSIRKSECPKELEPVDKRAPVHVNLMRRDEKCPEKEKLKVSFQGVGRTLGGASSSTASSQSNLTDVAAVQSPLQSLVVDETLPSTSIQLRLADGTRMVAKFNNHHTVNDIRGFIEFSRPGNPNNYTLQVMGFPPKPLTDPSQTIEQAGLASSVVIQKF

SEQ ID NO: 39264 - protein, 302 aa, Arabidopsis thaliana
  peptide (1)..(302): Ceres Seq. ID no. 13600813
MSSKDKKLSKPTSGRTGGIRTLSDLNRRSEPDSDSDSDGPQEYFTGGEKSGMLVQDPTKEPKHDDVDEIFNQARQLGAVEGPLEHPSSSRSFTGTGRLLSGESVPTALQQPEPVIHNIIFWSNGFTVDDGPLRKLDDPENASFLDSIRKSECPKELEPVDKRAPVHVNLMRRDEKCPEKEKLKVSFQGVGRTLGGASSSTASSQSNLTDVAAVQSPLQSLVVDETLPSTSIQLRLADGTRMVAKFNNHHTVNDIRGFIEFSRPGNPNNYTLQVMGFPPKPLTDPSQTIEQAGLASSVVIQKF

SEQ ID NO: 39265 - protein, 251 aa, Arabidopsis thaliana
  peptide (1)..(251): Ceres Seq. ID no. 13600814
MLVQDPTKEPKHDDVDEIFNQARQLGAVEGPLEHPSSSRSFTGTGRLLSGESVPTALQQPEPVIHNIIFWSNGFTVDDGPLRKLDDPENASFLDSIRKSECPKELEPVDKRAPVHVNLMRRDEKCPEKEKLKVSFQGVGRTLGGASSSTASSQSNLTDVAAVQSPLQSLVVDETLPSTSIQLRLADGTRMVAKFNNHHTVNDIRGFIEFSRPGNPNNYTLQVMGFPPKPLTDPSQTIEQAGLASSVVIQKF

SEQ ID NO: 39266 - DNA, 1429 bp, Arabidopsis thaliana
  misc_feature (1)..(1429): Ceres Seq. ID no. 13575008
  misc_feature (1)..(1429): Ortholog of  Ceres SEQ ID NO 12781552 as cited in SEQ ID NO 51997
  misc_feature (1)..(1429): Ortholog of  Ceres SEQ ID NO 15176548 as cited in SEQ ID NO 53387
  misc_feature (1)..(1429): Ortholog of  Ceres SEQ ID NO 15169228 as cited in SEQ ID NO 55423
  misc_feature (1)..(1429): Ortholog of  Ceres SEQ ID NO 14312196 as cited in SEQ ID NO 56984
  misc_feature (1)..(1429): Ortholog of  Ceres SEQ ID NO 13597237 as cited in SEQ ID NO 64136
  misc_feature (1)..(1429): Ortholog of  Ceres SEQ ID NO 13598601 as cited in SEQ ID NO 69129
attcacatttggtgtctgctgctggctttggtctttctctttctctttctacttttttttggttctgcgatttccatcaaaacccttttcccaacaatcttggttttgtacagagaagaagaagaagaagaaaggcacacaaaataacccatgtctggtttatacaataactcatcttacttctctcctgctcgagctgcttctcctcagattagaagcactcctgagatcgacagctctcagtacttgacggagcttctcgctgaacatcaaaagcttactccttttatgcaggtcctacccatatgtagccgtctattgaatcaagagatgttcagggtctctggaatgatgtctaaccaaggatttggtgattttgatagacttcgacacagaagtcccagccctatggcttcttctaatcttatgtctaatgtctctaataccgggttaggaggctggaacggcctctctcaggagagacttagtggaacacctggaatgacaatggattggcaaggtgcacctggaagccccagttcatacaccgtcaaaaggatattgcgtctggagattcctgtagataactatcctaatttcaattttgttggacgacttctcggccctagaggcaactcgttaaaacgcgttgaagctaccaccggttgccgagtattcatcagagggaaagggtcaatcaaggatcccgaaaaggaagataaattaaggggaagacctggctatgaacacttgaatgagcagcttcacatcttaatagaggcagatcttccagctagtattgtggagatacgtctgcgacaagctcaagaaattatagaagagttactaaagcctgtggacgagtcgcaagatttcataaagagacagcagctgagggaactggcattgctaaactcgaacaacctgagggaagagagtccggggccaagcggaggtggaagcgtttcgcctttcaattcaagtggtaaacgcccgaaaacaggatgctaagtagcgttttgtacgtctcgcccaaaacgctccttcaagccttataatggttacttcaaccaaaagtacatgtctgcatgcattacacagacgcacatgtgtatatctggtttctccagtagtggctgcaatggtggtggtctggtcaaggcctgccctggtctctctcgggtgagcgaccctgtggctttcgtttttcttcttctttattttaaatttttgtttttctttttcctcatcaaaaattcattacagattatttaaaaaagattcatgcaaaaaaaaaaaaaaagagtatgagatatataatatatatagggagaaaaagatgtggtggcttgggagggcgtggactgaaaattcttattgtataaacataaacaaaaaacacatttattggattgattcttatcgtttg

SEQ ID NO: 39267 - protein, 286 aa, Arabidopsis thaliana
  peptide (1)..(286): Ceres Seq. ID no. 13575009
MSGLYNNSSYFSPARAASPQIRSTPEIDSSQYLTELLAEHQKLTPFMQVLPICSRLLNQEMFRVSGMMSNQGFGDFDRLRHRSPSPMASSNLMSNVSNTGLGGWNGLSQERLSGTPGMTMDWQGAPGSPSSYTVKRILRLEIPVDNYPNFNFVGRLLGPRGNSLKRVEATTGCRVFIRGKGSIKDPEKEDKLRGRPGYEHLNEQLHILIEADLPASIVEIRLRQAQEIIEELLKPVDESQDFIKRQQLRELALLNSNNLREESPGPSGGGSVSPFNSSGKRPKTGC

SEQ ID NO: 39268 - protein, 240 aa, Arabidopsis thaliana
  peptide (1)..(240): Ceres Seq. ID no. 13575010
MQVLPICSRLLNQEMFRVSGMMSNQGFGDFDRLRHRSPSPMASSNLMSNVSNTGLGGWNGLSQERLSGTPGMTMDWQGAPGSPSSYTVKRILRLEIPVDNYPNFNFVGRLLGPRGNSLKRVEATTGCRVFIRGKGSIKDPEKEDKLRGRPGYEHLNEQLHILIEADLPASIVEIRLRQAQEIIEELLKPVDESQDFIKRQQLRELALLNSNNLREESPGPSGGGSVSPFNSSGKRPKTGC

SEQ ID NO: 39269 - protein, 226 aa, Arabidopsis thaliana
  peptide (1)..(226): Ceres Seq. ID no. 13575011
MFRVSGMMSNQGFGDFDRLRHRSPSPMASSNLMSNVSNTGLGGWNGLSQERLSGTPGMTMDWQGAPGSPSSYTVKRILRLEIPVDNYPNFNFVGRLLGPRGNSLKRVEATTGCRVFIRGKGSIKDPEKEDKLRGRPGYEHLNEQLHILIEADLPASIVEIRLRQAQEIIEELLKPVDESQDFIKRQQLRELALLNSNNLREESPGPSGGGSVSPFNSSGKRPKTGC

SEQ ID NO: 39270 - DNA, 1657 bp, Arabidopsis thaliana
  misc_feature (1)..(1657): Ceres Seq. ID no. 12377488
  misc_feature (1)..(1657): Ortholog of  Ceres SEQ ID NO 14307904 as cited in SEQ ID NO 66440
  misc_feature (1)..(1657): Ortholog of  Ceres SEQ ID NO 13659971 as cited in SEQ ID NO 67565
  misc_feature (1)..(1657): Ortholog of  Ceres SEQ ID NO 13500385 as cited in SEQ ID NO 67583
atggagaaaccaaaccctagaagaccctcaaacagtgttcttccatacgaaacaccaagattaagagatcactatctcctcggcaaaaagctaggccaaggccaatttggaacaacctatctctgtacagagaaatcatcatcagctaattacgcttgcaaatcaatcccaaaacgtaagcttgtatgtcgtgaagactacgaagatgtatggcgtgagattcagatcatgcatcatctctctgagcatcctaatgttgttagaatcaagggtacttatgaagactctgtttttgttcacattgttatggaagtttgtgaaggtggtgagctttttgatcggattgtttctaaagggtgttttagtgaacgtgaagctgctaagttgattaagactattcttggtgttgttgaggcttgtcattctcttggtgttatgcatagagatcttaagcctgagaatttcttgtttgatagtcccagtgatgatgctaagcttaaagctacagactttggtttgtctgtcttctacaagccagggcagtatctgtatgatgtagttggaagtccgtattatgttgcacctgaggttctgaagaaatgttatggaccagagatagacgtgtggagcgccggtgttatcttgtacatcttactaagtggggttcctcctttttgggcagaaaccgagtcaggaatctttaggcagatattgcaagggaagatagattttaaatctgatccgtggcctactatctcagaaggtgctaaagatttgatttacaaaatgctcgataggagccccaagaaacgtatttctgcacatgaagcattgtgtcacccttggattgttgatgaacatgctgcaccagacaagcctctcgacccagcagtcttgtcgcgacttaagcagttctcgcaaatgaataaaatcaagaaaatggccttacgagtaatcgcggagagactctcggaggaagagattggtggtctgaaggaattgttcaaaatgatagatacagacaacagtggaacaatcacctttgaagagcttaaagcaggtctaaagagagttggatctgaattgatggaatcagaaatcaagtctcttatggatgcggcggatatagacaacagtgggacaatagactacggtgaattcctagcagcgacattacatataaacaagatggagagagaagagaacttggtggttgcgttttcatactttgataaagatggtagcggttatatcaccattgacgagcttcaacaagcctgcacagagtttggtctctgtgacactcctcttgatgacatgatcaaagagattgatcttgataatgacgggaagattgatttctcagagtttactgctatgatgaagaaaggagatggtgttgggaggagcagaactatgaggaacaacttgaacttcaatatagctgaagcttttggagttgaggacacaagcagcactgctaaatctgatgattcaccaaagtaattataatcatctatatacttggaattgagaaatgagaactcacaaaagaaaaactgaatctttcctttttgttttcgtttccacttttgtagatgagcaactttctcaattttgttataagcatggataattttgcttcatattttctgcg

SEQ ID NO: 39271 - protein, 501 aa, Arabidopsis thaliana
  peptide (1)..(501): Ceres Seq. ID no. 12377489
MEKPNPRRPSNSVLPYETPRLRDHYLLGKKLGQGQFGTTYLCTEKSSSANYACKSIPKRKLVCREDYEDVWREIQIMHHLSEHPNVVRIKGTYEDSVFVHIVMEVCEGGELFDRIVSKGCFSEREAAKLIKTILGVVEACHSLGVMHRDLKPENFLFDSPSDDAKLKATDFGLSVFYKPGQYLYDVVGSPYYVAPEVLKKCYGPEIDVWSAGVILYILLSGVPPFWAETESGIFRQILQGKIDFKSDPWPTISEGAKDLIYKMLDRSPKKRISAHEALCHPWIVDEHAAPDKPLDPAVLSRLKQFSQMNKIKKMALRVIAERLSEEEIGGLKELFKMIDTDNSGTITFEELKAGLKRVGSELMESEIKSLMDAADIDNSGTIDYGEFLAATLHINKMEREENLVVAFSYFDKDGSGYITIDELQQACTEFGLCDTPLDDMIKEIDLDNDGKIDFSEFTAMMKKGDGVGRSRTMRNNLNFNIAEAFGVEDTSSTAKSDDSPK

SEQ ID NO: 39272 - protein, 425 aa, Arabidopsis thaliana
  peptide (1)..(425): Ceres Seq. ID no. 12377490
MHHLSEHPNVVRIKGTYEDSVFVHIVMEVCEGGELFDRIVSKGCFSEREAAKLIKTILGVVEACHSLGVMHRDLKPENFLFDSPSDDAKLKATDFGLSVFYKPGQYLYDVVGSPYYVAPEVLKKCYGPEIDVWSAGVILYILLSGVPPFWAETESGIFRQILQGKIDFKSDPWPTISEGAKDLIYKMLDRSPKKRISAHEALCHPWIVDEHAAPDKPLDPAVLSRLKQFSQMNKIKKMALRVIAERLSEEEIGGLKELFKMIDTDNSGTITFEELKAGLKRVGSELMESEIKSLMDAADIDNSGTIDYGEFLAATLHINKMEREENLVVAFSYFDKDGSGYITIDELQQACTEFGLCDTPLDDMIKEIDLDNDGKIDFSEFTAMMKKGDGVGRSRTMRNNLNFNIAEAFGVEDTSSTAKSDDSPK

SEQ ID NO: 39273 - protein, 399 aa, Arabidopsis thaliana
  peptide (1)..(399): Ceres Seq. ID no. 12377491
MEVCEGGELFDRIVSKGCFSEREAAKLIKTILGVVEACHSLGVMHRDLKPENFLFDSPSDDAKLKATDFGLSVFYKPGQYLYDVVGSPYYVAPEVLKKCYGPEIDVWSAGVILYILLSGVPPFWAETESGIFRQILQGKIDFKSDPWPTISEGAKDLIYKMLDRSPKKRISAHEALCHPWIVDEHAAPDKPLDPAVLSRLKQFSQMNKIKKMALRVIAERLSEEEIGGLKELFKMIDTDNSGTITFEELKAGLKRVGSELMESEIKSLMDAADIDNSGTIDYGEFLAATLHINKMEREENLVVAFSYFDKDGSGYITIDELQQACTEFGLCDTPLDDMIKEIDLDNDGKIDFSEFTAMMKKGDGVGRSRTMRNNLNFNIAEAFGVEDTSSTAKSDDSPK

SEQ ID NO: 39274 - DNA, 990 bp, Arabidopsis thaliana
  misc_feature (1)..(990): Ceres Seq. ID no. 12325694
  misc_feature (1)..(990): Ortholog of  Ceres SEQ ID NO 13656286 as cited in SEQ ID NO 69168
  misc_feature (1)..(990): Ortholog of  Ceres SEQ ID NO 15174351 as cited in SEQ ID NO 0
acccaaaatctccgatattcttattcctttgctgtatcatcttcttcttctacttcgtcctcatcatcgtcacatagatcctcctttttcgttaattggggagagatatactttcttttgaggatcagatcgtgacagggtttagctcaaggagagggtgagaaaaagaagaagaaggtgagaaaagtgaaggcaaggctttgaggatgtcttttacaggaactcaacagaaatgcaaggcttgtgagaagactgtttatgctgttgagcttctctctgctgatggagttggatatcacaagtcttgcttcaaatgcactcactgcaaaagcaggcttcagctgagtagttactcatcaatggaaggtgttttgtactgtaagcctcattttgagcagctctttaaggagagtggtagtttcaacaagaactttcagtcacctgcaaaatcggctgacaaatcaactcctgagctgacaaggacgcctagccgagttgctggcaggttctctggtacacaagagaaatgcgccacttgtagtaaaactgtgtatcctattgaaaaggtaacagtcgagagccagacatatcacaagtcctgcttcaagtgctcacatggaggttgcccaatttcaccttccaactacgcagctcttgaaggaatcctgtactgcaagcaccatttcgctcagctcttcaaggagaagggaagttacaaccacttaatcaaatccgcttccatcaaacgctctgcagccgcagcagtcgccgccggtgtaccagcagcctccgttcctgaatcttaaaatccaataatttctcctctctagtctaaaatttgaagttaatgccaaactgattcagtttgatttctctttgtgagagcgtgtgtgtaatctatgctttgatgttcttatttccattgatgtctcctaaaattctatgtttgtgtggtgatttggttatctataaaaagtctgaaactttcct

SEQ ID NO: 39275 - protein, 199 aa, Arabidopsis thaliana
  peptide (1)..(199): Ceres Seq. ID no. 12325695
MSFTGTQQKCKACEKTVYAVELLSADGVGYHKSCFKCTHCKSRLQLSSYSSMEGVLYCKPHFEQLFKESGSFNKNFQSPAKSADKSTPELTRTPSRVAGRFSGTQEKCATCSKTVYPIEKVTVESQTYHKSCFKCSHGGCPISPSNYAALEGILYCKHHFAQLFKEKGSYNHLIKSASIKRSAAAAVAAGVPAASVPES

SEQ ID NO: 39276 - protein, 148 aa, Arabidopsis thaliana
  peptide (1)..(148): Ceres Seq. ID no. 12325696
MEGVLYCKPHFEQLFKESGSFNKNFQSPAKSADKSTPELTRTPSRVAGRFSGTQEKCATCSKTVYPIEKVTVESQTYHKSCFKCSHGGCPISPSNYAALEGILYCKHHFAQLFKEKGSYNHLIKSASIKRSAAAAVAAGVPAASVPES

SEQ ID NO: 39277 - DNA, 912 bp, Arabidopsis thaliana
  misc_feature (1)..(912): Ceres Seq. ID no. 12325697
  misc_feature (1)..(912): Ortholog of  Ceres SEQ ID NO 13574681 as cited in SEQ ID NO 19
tcaatctgcgaatttctcttaaaccctaaccctctcgctgccgtccggtggtttttccgacgacgaactatgacgattcacgctgcagtaatccagaagcttctgaacaccggagcacatctcggccgtcgtgccgccgagcaccatttcaagcaatacgcttacgggacgcgtaacggaatgacaattatcgactccgacaaaaccctaatttgcctccgtagcgccgctcatttcgtcgctaacctcgcccacatgagaggtaacatcttcttcgtcaacacgaatcctctcttcgacgaaatcattgagctcacttctcgtcggatccaaggagattcgtataatcacaaccgtgcgataaatctgtggaagatgggagggtttttgactaacagctacagtcctaagaagtttcgatctaggcataaaaagctttgctttggtccaactactatgcctgattgtgtcgttgtgtttgattctgagaggaagagctctgtgatacttgaggcatcgaagcttcagattccggttgttgcaattgtggacccgaatgtgccattggagttctttgagaagattacgtatcctgtgccagctcgtgattcggtcaagtttgtgtatttgttctgtaatgtgatcaccaagtgctttgtggcagaacagatgaagttggggatcaaagaagggagcaatgaagatttgatgaaggatttagctgcttgattttgatatttgcaacaaaagtatgaaactttacagttgtttttctgagtctggaataattgttcttcagaattgtggttacttcaactttgaaattctgggagttttttacacatggatgattttgtttctctgatggatatttctgtataagattgttgagttctagtgttctacatcttg

SEQ ID NO: 39278 - protein, 242 aa, Arabidopsis thaliana
  peptide (1)..(242): Ceres Seq. ID no. 12325698
SICEFLLNPNPLAAVRWFFRRRTMTIHAAVIQKLLNTGAHLGRRAAEHHFKQYAYGTRNGMTIIDSDKTLICLRSAAHFVANLAHMRGNIFFVNTNPLFDEIIELTSRRIQGDSYNHNRAINLWKMGGFLTNSYSPKKFRSRHKKLCFGPTTMPDCVVVFDSERKSSVILEASKLQIPVVAIVDPNVPLEFFEKITYPVPARDSVKFVYLFCNVITKCFVAEQMKLGIKEGSNEDLMKDLAA

SEQ ID NO: 39279 - protein, 219 aa, Arabidopsis thaliana
  peptide (1)..(219): Ceres Seq. ID no. 12325699
MTIHAAVIQKLLNTGAHLGRRAAEHHFKQYAYGTRNGMTIIDSDKTLICLRSAAHFVANLAHMRGNIFFVNTNPLFDEIIELTSRRIQGDSYNHNRAINLWKMGGFLTNSYSPKKFRSRHKKLCFGPTTMPDCVVVFDSERKSSVILEASKLQIPVVAIVDPNVPLEFFEKITYPVPARDSVKFVYLFCNVITKCFVAEQMKLGIKEGSNEDLMKDLAA

SEQ ID NO: 39280 - protein, 182 aa, Arabidopsis thaliana
  peptide (1)..(182): Ceres Seq. ID no. 12325700
MTIIDSDKTLICLRSAAHFVANLAHMRGNIFFVNTNPLFDEIIELTSRRIQGDSYNHNRAINLWKMGGFLTNSYSPKKFRSRHKKLCFGPTTMPDCVVVFDSERKSSVILEASKLQIPVVAIVDPNVPLEFFEKITYPVPARDSVKFVYLFCNVITKCFVAEQMKLGIKEGSNEDLMKDLAA

SEQ ID NO: 39281 - DNA, 1870 bp, Arabidopsis thaliana
  misc_feature (1)..(1870): Ceres Seq. ID no. 12328820
  misc_feature (1)..(1870): Ortholog of  Ceres SEQ ID NO 13654989 as cited in SEQ ID NO 63117
  misc_feature (1)..(1870): Ortholog of  Ceres SEQ ID NO 13657138 as cited in SEQ ID NO 65923
  misc_feature (1)..(1870): Ortholog of  Ceres SEQ ID NO 13584744 as cited in SEQ ID NO 69137
ataaactttataagaaaaataaatacatattctctttctcttccatcaagcaaagcttttcaaaaagaatcaaacttttcgaatctttttgcttctcgagatcttttcatagagagagagataaagaatgggtttttatgaaggagcctctgttcatccaagaactccagaaaacaaaaacacagtgaatattccgatactcacttcttcttcttcatcatcagatcttgacggagataacaatgacaacaacaacaatacaggaatcaaaacccttttgaaaagaatgatctttgatttgggtttcgcttgtttccttcctcctttaagctcaaccgaaaactccggcaacaacaatggaggaggaacaagcggcggcggaggaggaggaggaggaggaggagagaataacaaagcttggctattggcggaaacagcaccggagaatatgaatcctgatcctcattcagttcattcatcgtttagattcagtctttgttcacaaatcgagcttgagaaaatgaaaggtgaagaaccgtccttgtctgcttcgtcttcttgtcggaatttgtcggtttctggtggttccacgacggttttgatggttaatttggagaatggtgttaaggagactactgggaatgcgactgatgatttgcggtggactagagctaggtcgcttgagaagagtatttctccggtggctaatactttggttcgttttagctacggtgagattgtggcagctactcgtaatttctctaaagggagagtgttgggaagaggagcttgtagctatgtgtttagaggcaaaatcggaatgtggagaacggctttagcaatcaagagacttgataaggaagacaaagaatctcctaaatctttttgtagagagttgatgattgcaagctctcttcatagctccaacattgtacctcttcttggattctgtattgatcctgaagaagggttattcttggtttacaagtatgtctctggtggtagcctcgaacattatttacacgataagaagaagaagaaaggcgtaaaagccgcttttggtttgccttggtcagcaaggtacaaggtagcgttaggtatagcagatgccatagcttatttgcataatggaacagagcaatgtgttgttcacagagatatcaaaccttccaatattcttctttcatcaaagaaaataccaaagttgtgtgattttgggttagctacttggaccgctgcaccttcggttcctttcctctgcaagaccgtgaaaggcacattcggctatctggctcctgagtatttccagcatggtaagatatctgacaagaccgatgtttacgccttcggggttgtgttgcttgagctaataactggccggaaaccaatcgaagcaagaagagcatctggtcaagaaaatctggttgtttgggcgaaaccgttgttggatagagggatagaagctatagtggagctgcttgatccaaggctaaaatgcacaagaaaaaactcggttcaaatggagcggatgatccgtgctgcagcggcgtgtgtgatcaatgaggagtcccgaagacccggtatggaagagattgtctcaatcttgaaaggcgaagaaggtgtagagccagaaacacattcaagcaggaaaactacaaatatttcgggtatgattgactcttatacacaattgcaacaaaccaaatccgagatgaaatgtcatcttgatcttgcgatgctcggagtaaccgagtttgaagatgatgatcatgtgtacggccgataaaagattctaagaaatggatttataagtgtgtaaataggtatttatgaaaagtttgaaacagagttcttagtttctgaattagtg

SEQ ID NO: 39282 - protein, 552 aa, Arabidopsis thaliana
  peptide (1)..(552): Ceres Seq. ID no. 12328821
MGFYEGASVHPRTPENKNTVNIPILTSSSSSSDLDGDNNDNNNNTGIKTLLKRMIFDLGFACFLPPLSSTENSGNNNGGGTSGGGGGGGGGGENNKAWLLAETAPENMNPDPHSVHSSFRFSLCSQIELEKMKGEEPSLSASSSCRNLSVSGGSTTVLMVNLENGVKETTGNATDDLRWTRARSLEKSISPVANTLVRFSYGEIVAATRNFSKGRVLGRGACSYVFRGKIGMWRTALAIKRLDKEDKESPKSFCRELMIASSLHSSNIVPLLGFCIDPEEGLFLVYKYVSGGSLEHYLHDKKKKKGVKAAFGLPWSARYKVALGIADAIAYLHNGTEQCVVHRDIKPSNILLSSKKIPKLCDFGLATWTAAPSVPFLCKTVKGTFGYLAPEYFQHGKISDKTDVYAFGVVLLELITGRKPIEARRASGQENLVVWAKPLLDRGIEAIVELLDPRLKCTRKNSVQMERMIRAAAACVINEESRRPGMEEIVSILKGEEGVEPETHSSRKTTNISGMIDSYTQLQQTKSEMKCHLDLAMLGVTEFEDDDHVYGR

SEQ ID NO: 39283 - protein, 499 aa, Arabidopsis thaliana
  peptide (1)..(499): Ceres Seq. ID no. 12328822
MIFDLGFACFLPPLSSTENSGNNNGGGTSGGGGGGGGGGENNKAWLLAETAPENMNPDPHSVHSSFRFSLCSQIELEKMKGEEPSLSASSSCRNLSVSGGSTTVLMVNLENGVKETTGNATDDLRWTRARSLEKSISPVANTLVRFSYGEIVAATRNFSKGRVLGRGACSYVFRGKIGMWRTALAIKRLDKEDKESPKSFCRELMIASSLHSSNIVPLLGFCIDPEEGLFLVYKYVSGGSLEHYLHDKKKKKGVKAAFGLPWSARYKVALGIADAIAYLHNGTEQCVVHRDIKPSNILLSSKKIPKLCDFGLATWTAAPSVPFLCKTVKGTFGYLAPEYFQHGKISDKTDVYAFGVVLLELITGRKPIEARRASGQENLVVWAKPLLDRGIEAIVELLDPRLKCTRKNSVQMERMIRAAAACVINEESRRPGMEEIVSILKGEEGVEPETHSSRKTTNISGMIDSYTQLQQTKSEMKCHLDLAMLGVTEFEDDDHVYGR

SEQ ID NO: 39284 - protein, 445 aa, Arabidopsis thaliana
  peptide (1)..(445): Ceres Seq. ID no. 12328823
MNPDPHSVHSSFRFSLCSQIELEKMKGEEPSLSASSSCRNLSVSGGSTTVLMVNLENGVKETTGNATDDLRWTRARSLEKSISPVANTLVRFSYGEIVAATRNFSKGRVLGRGACSYVFRGKIGMWRTALAIKRLDKEDKESPKSFCRELMIASSLHSSNIVPLLGFCIDPEEGLFLVYKYVSGGSLEHYLHDKKKKKGVKAAFGLPWSARYKVALGIADAIAYLHNGTEQCVVHRDIKPSNILLSSKKIPKLCDFGLATWTAAPSVPFLCKTVKGTFGYLAPEYFQHGKISDKTDVYAFGVVLLELITGRKPIEARRASGQENLVVWAKPLLDRGIEAIVELLDPRLKCTRKNSVQMERMIRAAAACVINEESRRPGMEEIVSILKGEEGVEPETHSSRKTTNISGMIDSYTQLQQTKSEMKCHLDLAMLGVTEFEDDDHVYGR

SEQ ID NO: 39285 - DNA, 1724 bp, Arabidopsis thaliana
  misc_feature (1)..(1724): Ceres Seq. ID no. 13592997
  misc_feature (1)..(1724): Ortholog of  Ceres SEQ ID NO 14306707 as cited in SEQ ID NO 53331
agagttcacgagcttccgagtcaaaaacactctaaaacaaaaccatgactttgttccatagactcgatctcatcgatccgtacacgtgtacaccactcatcgtccgtgaaacctccattgttgaaccttcatcattgttcctagggtttccttccttcatcgacgaagacattgaagatctcttcgagttttcatcacctaatcctctcgatctattcgaaaccgtgacggatctggttaagattaagaaatctccgtcgtcttgcaagtacaaggtgattcgtcggagattagagccggagtatccattgaagtatctttgtgaccgtgtttctgatttggaatcaaagtttgatagattggttagtcctaagagtgataggaagtatacattgacgaaggagataaagggaagtggtgagaggaagtataaatgggaggcggagattcaaggaccgttggagaggaagtataagttggaagctgagattgaaggttcgggagagaggaagtatagatggacgacggagattaaaggagggaagaaggatgaggaagggttaaagttagctgctttgaagaaggagaaggcgaaagctaaagctattgctgctgctgaagcggagaagaagaagaataagaataagaagaagagttataattggacgacggaggtgaagagtgagagagagaatggtgaggtttcgcatacttatatcatcaaggctactactggaggagagaaaaagaagaaacatgaggagaaggagaagaaagagaagatagagactaagagcaagaagaaggagaaaactcgtgttgtggtgattgaggaggaggaagaagaagatgatgagtcgtcagaacatggtgctatcgttcttaggaaggcgttttccagaaggaatggagcagttaggaccaagaaggggaagaacaaggaaatgccacctgaatatgcggctgtgatgatccagagggccttcaaagcttatttgattcgtcgctcaaaatcattgcgtgctcttcgtgatcttgctattgcaaagactaaacttaaggagctaagagcttctttccacaacttcagctaccgtcgcctgattgctcgtgatggagaggagcgtcagaaattctcagagaagatcattgtactcctcctcactgttgacgccatagagggagttgatgtgatggttcgaggagcgaagagatcaatggtggatgagctggaagcaatgttagatgtggtagacccgcaaccgcaggggaaatcattgtcgatgagaagaagaacatttgatatgccagacagtttgatccgcaaagaaatcgcagagggagtgactcagattgtgcagatgcttgaaacggaagaagaatgatggaatggagcactgtgtgtttgtgactcaggggctgtttttgttgttgtttgtgactgggaagaactgatcagcctctttagtttgattagtgttctgaatgtttctaattatgcagacaaaattaataatgagagtggcttgaagaagagattggtgtctcgctcgcatcagtctcatctctcaaatcttgtctcttcttagtctgtttctgtttgtcaggttatgtaatccctttgtgttcccaaacttgtagactctgttttgtcaaattgcttatgtttttggttttgcttatttctactccatcatgaattagaaattgattataaagtttgc

SEQ ID NO: 39286 - protein, 446 aa, Arabidopsis thaliana
  peptide (1)..(446): Ceres Seq. ID no. 13592998
MTLFHRLDLIDPYTCTPLIVRETSIVEPSSLFLGFPSFIDEDIEDLFEFSSPNPLDLFETVTDLVKIKKSPSSCKYKVIRRRLEPEYPLKYLCDRVSDLESKFDRLVSPKSDRKYTLTKEIKGSGERKYKWEAEIQGPLERKYKLEAEIEGSGERKYRWTTEIKGGKKDEEGLKLAALKKEKAKAKAIAAAEAEKKKNKNKKKSYNWTTEVKSERENGEVSHTYIIKATTGGEKKKKHEEKEKKEKIETKSKKKEKTRVVVIEEEEEEDDESSEHGAIVLRKAFSRRNGAVRTKKGKNKEMPPEYAAVMIQRAFKAYLIRRSKSLRALRDLAIAKTKLKELRASFHNFSYRRLIARDGEERQKFSEKIIVLLLTVDAIEGVDVMVRGAKRSMVDELEAMLDVVDPQPQGKSLSMRRRTFDMPDSLIRKEIAEGVTQIVQMLETEEE

SEQ ID NO: 39287 - DNA, 1331 bp, Arabidopsis thaliana
  misc_feature (1)..(1331): Ceres Seq. ID no. 12579649
  misc_feature (1)..(1331): Ortholog of  Ceres SEQ ID NO 13598741 as cited in SEQ ID NO 62749
acagttctactatatggatgatggccctggcttcttcaaaccatctgtgtgtttagtcttctcatttgtgcacaactcaaagacaagtccactaagtttgaagcaaaatggcgatatggtttcagagaattttcctgttgcttctcgtttcctgttgcgcctcttcagattttttggaaaatccagacttcgaatctccaccgttaaacttacctacaaactcaaatgctagctctgtatcgctggatcagaacagtacactcccgggatggacattccaagggacagtgctttatgttgaactgcctgataccggacacgcggttcagctcggtgaagatggcaagatcaatcaaacattcattgccaaaggtgatgaattgaactacatcctcacattcgcactgatccacgcaggccagaactgtacaagctctgctggtctcagtgtctcggggccagacagcaatgcggtcttttcttacagacaaaactacagtaaggtttcatggcagagctacagtcataacttgggtagttgggggaatggtgagcctattaacttagttcttgaaagtcaggcaatagattctgattctgatacaaactccacatgttggcctatcattgacacattgcttatcaagactgttggtgtaacattggtccaagacagtggtaacctcttaatcaatggtggatttgagtctggacctggtttcttgcccaactcaaccgatggagttctgattgacgcggttccaagcctgattcaatcaccattaaggcagtggtctgtcataggaacagtcagatacatagactcggagcacttccatgtcccagaaggcaaagctgcaatagaaattctgtctaacacagctccatctggcatacacagcaacaaaaggcacaagtgaaggttcaagatacaacctcacatttaccttaggcgatgctaacgatgcgtgcagaggacatttcgtggtgggtgctcaagctggctccgtaactcaaaacttcacattggagagtaatgggactggctctggtgagaagtttgggttagtgtttgaagcagacaaagatgcagcacagataagtttcaccagctactcagttacaatgacaaaagagaatgttgtttgtggtcctgtgattgatgaagtgatggtacatcctcttggtggaacagcctcagtaaaacccacttggctgctacttattttcgctttgttgtatgttgcagttctctgattgaaactgtttgggagagaggtcataaagaagatatttttgcaaggagatgtgataatcattctagcttcatg

SEQ ID NO: 39288 - protein, 270 aa, Arabidopsis thaliana
  peptide (1)..(270): Ceres Seq. ID no. 12579650
MAIWFQRIFLLLLVSCCASSDFLENPDFESPPLNLPTNSNASSVSLDQNSTLPGWTFQGTVLYVELPDTGHAVQLGEDGKINQTFIAKGDELNYILTFALIHAGQNCTSSAGLSVSGPDSNAVFSYRQNYSKVSWQSYSHNLGSWGNGEPINLVLESQAIDSDSDTNSTCWPIIDTLLIKTVGVTLVQDSGNLLINGGFESGPGFLPNSTDGVLIDAVPSLIQSPLRQWSVIGTVRYIDSEHFHVPEGKAAIEILSNTAPSGIHSNKRHK

SEQ ID NO: 39289 - DNA, 1397 bp, Arabidopsis thaliana
  misc_feature (1)..(1397): Ceres Seq. ID no. 13489548
  misc_feature (1)..(1397): Ortholog of  Ceres SEQ ID NO 13661015 as cited in SEQ ID NO 60921
  misc_feature (1)..(1397): Ortholog of  Ceres SEQ ID NO 13596304 as cited in SEQ ID NO 69269
aataaaaactttttcatggatctgagattttctccaaatctatatttgtgattgtttcgtgtagtttttctcttaaagttgtgttctttaagctctctcgtgctcaatcttacgtttccctttggtttgatttcgtgtttttgttattcgatttcacctttaacttttatctaatctcttgtttttgattttgtaaattgtaaaaagtttctggtgattctcttagcgaatttgggaaactttatctgtatttttctgtttcgccgtagatttaggatccttaattaatgaatttgtgggtttcaatattcctcgtctctgcaatagctggatcatgcttaccttctgggtttgcttacgttgacgtttgcaatcacgaattcgaggtgttccgatccgtgatcgagcaaaaatgtcctcgttctttgtatccaagccctcctatcgaggtagatggagacttgctagacaaactcatggatgcaaaccatggaaatgcctatatatccatactattttatacctcacggtgcccgttttcacgtgcagtacgcccaaagtttgatgttctgagttcaatgtttcctcacataacgcacctgattgttgagcaatctcaggctttaccatctgtgttttctaggtatggtatccatagcttgccttcaatcctgatggtgaatcaaacaatgaagatgcgataccatggtccaaaggatcttgcatccctgattcagttttacaaggaaacaacaggtcttaaacctgtccagtatatggatgaaggtgaaccaacaagcttggacactgatggaaacctgatcacatggctacacaacgggtcatctatcagagaaatagcagaaagagagccatatatggtacttgcactaatgtttctgtctttgaaactggcaattttgatcttccccatcatgggatcacggttgaaaacgttatgggcattgtatgttccgcatctgagcttgggaatacttggtgagactagccaactgtttggccgtgccctacacatgatcgatgtgaggagactatggataaaactgagactcaccaaaacaaggaacttccaagaaagagcaaagaacgcacttgcatcagtctcactaggaaaatcttcatcacaatcagcctaaaagggtgatttagaaatccttcactgtcaatgagcttagtttagattactttactttactgtctgtgagagatcctttgactgacatgtttctatacctttggagttccactgtctctgtatgtaaatcctgttttgcttcttttgtgaatattttttcttcttcttttgaatattcatgttcttggtccacttcgttgtgcttacgttttgtctatattgattatggatggtttggttt

SEQ ID NO: 39290 - protein, 289 aa, Arabidopsis thaliana
  peptide (1)..(289): Ceres Seq. ID no. 13489549
MNLWVSIFLVSAIAGSCLPSGFAYVDVCNHEFEVFRSVIEQKCPRSLYPSPPIEVDGDLLDKLMDANHGNAYISILFYTSRCPFSRAVRPKFDVLSSMFPHITHLIVEQSQALPSVFSRYGIHSLPSILMVNQTMKMRYHGPKDLASLIQFYKETTGLKPVQYMDEGEPTSLDTDGNLITWLHNGSSIREIAEREPYMVLALMFLSLKLAILIFPIMGSRLKTLWALYVPHLSLGILGETSQLFGRALHMIDVRRLWIKLRLTKTRNFQERAKNALASVSLGKSSSQSA

SEQ ID NO: 39291 - protein, 226 aa, Arabidopsis thaliana
  peptide (1)..(226): Ceres Seq. ID no. 13489550
MDANHGNAYISILFYTSRCPFSRAVRPKFDVLSSMFPHITHLIVEQSQALPSVFSRYGIHSLPSILMVNQTMKMRYHGPKDLASLIQFYKETTGLKPVQYMDEGEPTSLDTDGNLITWLHNGSSIREIAEREPYMVLALMFLSLKLAILIFPIMGSRLKTLWALYVPHLSLGILGETSQLFGRALHMIDVRRLWIKLRLTKTRNFQERAKNALASVSLGKSSSQSA

SEQ ID NO: 39292 - protein, 192 aa, Arabidopsis thaliana
  peptide (1)..(192): Ceres Seq. ID no. 13489551
MFPHITHLIVEQSQALPSVFSRYGIHSLPSILMVNQTMKMRYHGPKDLASLIQFYKETTGLKPVQYMDEGEPTSLDTDGNLITWLHNGSSIREIAEREPYMVLALMFLSLKLAILIFPIMGSRLKTLWALYVPHLSLGILGETSQLFGRALHMIDVRRLWIKLRLTKTRNFQERAKNALASVSLGKSSSQSA

SEQ ID NO: 39293 - DNA, 1208 bp, Arabidopsis thaliana
  misc_feature (1)..(1208): Ceres Seq. ID no. 13495834
  misc_feature (1)..(1208): Ortholog of  Ceres SEQ ID NO 14305357 as cited in SEQ ID NO 60046
  misc_feature (1)..(1208): Ortholog of  Ceres SEQ ID NO 14313511 as cited in SEQ ID NO 64459
  misc_feature (1)..(1208): Ortholog of  Ceres SEQ ID NO 14303006 as cited in SEQ ID NO 67498
  misc_feature (1)..(1208): Ortholog of  Ceres SEQ ID NO 13599627 as cited in SEQ ID NO 0
  misc_feature (1)..(1208): Ortholog of  Ceres SEQ ID NO 14305069 as cited in SEQ ID NO 0
atcatagtttctatctccgatgacacaaaacgaggaagattatttgacattttaagtaagaacagctagctttgccatctccctaaaggcaataaatctcggatccactttcacgatattttgatattttttctatttataatctttctgggttttgagtcttttgaaggctgaattgctctgaaatctcaattgtataatcatctcctgggtcgtcgttatcgtgatcatctagaagaaagcatgactacactagatttgaccagagccgagcttgctcttattgttctctatttgaacaaagctgaggctagagataagatatgcagagctatccaatatggttccaaatttttgagcggtggccaacctggtactgctcaaactgtcgacaaaaacaccagcttggcgagaaaagttttccgtcttttcaagtttgtcaatgattttcacggtcttatcagccccgtgcctaaagggactccacttcctcttgtcttactcgggaagtcgaagaatgcgctcttgtctacctttttgtttcttgatcaaatcgtctggcttggtagatccggcatatacaagaacaaagaacgaactgaattgcttggacgtatatcacttttctgctggctgggatcatccgtttgtacaagtgcagtcgagattggtgagcttggaaggctctcttcatctatgaagaagatggaaaaggaactcaaagctgatgatgagctgtatcgtgctaagcttcagaaatcaaacgacagaactctagctttgattaaatcaagcatggacattattgtagccattggtctccttcagttagctccaaagacgattagtcctcgtgtcactggtgctttcgggtttaccacctcacttatctcttgttatcagttgcttccatcgcgccccaagttgaagacaccttgaagaaggaataagcttgttctctagactttcagaataattgtttcatattcatcagtaaacctattgtgttcaggtattctaaggagtctatgttcctcctttgaatgaatttgctgctcttataacgcgtttgcaagaataatgataagttttagaataagattattatgatacatcttcaagattttttgattagaaatttgtgtttgtttctcattttgaacaagactctgttcctacatagtagagaggaaatcatttgatgttcg

SEQ ID NO: 39294 - protein, 231 aa, Arabidopsis thaliana; identical to SEQ ID NO: 23905
  peptide (1)..(231): Ceres Seq. ID no. 13495835

SEQ ID NO: 39295 - DNA, 1270 bp, Arabidopsis thaliana
  misc_feature (1)..(1270): Ceres Seq. ID no. 12558327
  misc_feature (1)..(1270): Ortholog of  Ceres SEQ ID NO 14312208 as cited in SEQ ID NO 54845
  misc_feature (1)..(1270): Ortholog of  Ceres SEQ ID NO 15171755 as cited in SEQ ID NO 57047
  misc_feature (1)..(1270): Ortholog of  Ceres SEQ ID NO 13597613 as cited in SEQ ID NO 65334
  misc_feature (1)..(1270): Ortholog of  Ceres SEQ ID NO 15178832 as cited in SEQ ID NO 0
ctctcatttatcttcgtggagatctaaaagaaggaggaagacatttcttccctctggatctccaaaaaaacgagaggtttgggtggggaaggaaagaaggaggaagaggcaatgtcagctaggtattggtgtcacatgtgttcacaaatggtgaatccagttattggtgccgagatcaaatgccccttttgccaaagcgggtttgtcgaggaaatgagccgtgagattaatggcggcagcagtagcagtctaagggaggttcaagaccctgagattgattttggtacagaccgtgcattgtctctatggggtccaatcttgcttggaatgatgagtaatcctcgtagacgtagaaggtttaggaggacagagtttggtgtggataatgatgaggtcaatgtatctgatgatgttgatggaaatgacagcgtcgatattgatcgacatcatcatcgtcgtcatcgccacaggcaacaaggtagagagattgatttagacagagagtttgagtctatccttaggaggagacggagaagctcagctactatattgcagttgcttcagggtattcgtgcagggattgcttctgagtatgagagctcggatcgagacctgttaaatcaatcagctgttgttcagggttcaacgagtttgaatcaaaaccggaacaatacttctctttctgcaattggagattactttgttggatccagtttagaccatttgcttgaacatctagctgataatgattcaatcaggcacgggagtcttccagcacgtaaagaagttgtggataatctcccaacggttaagataagtgaatcattgcagtgctcgatttgtttggatgattttgacaaaggaagtgaagctaaagagatgccgtgtaagcacaagtttcacatccggtgtatagtaccgtggctcgagcttcacagttcatgtcccgtgtgccgatatgaactccctcctgatgatgagaccaaggttaatcctgtaagaccgagaacaagaactctagagatcaacgtaagtaatgagaatgtggaagatgatgcaaggaacagtaatgtgagcgagagaaggttctcttttccatggccgttcagcggattattctcttcatcctcttcgtcatccgcatcggcctcggggtcatctcatctcggtgagaactcgtaaactgctattcctcagcttatagtacataaaatcttgttcactcagattgttgaatactgcataacaaataaacactttcgaggaatgg

SEQ ID NO: 39296 - protein, 356 aa, Arabidopsis thaliana
  peptide (1)..(356): Ceres Seq. ID no. 12558328
MSARYWCHMCSQMVNPVIGAEIKCPFCQSGFVEEMSREINGGSSSSLREVQDPEIDFGTDRALSLWGPILLGMMSNPRRRRRFRRTEFGVDNDEVNVSDDVDGNDSVDIDRHHHRRHRHRQQGREIDLDREFESILRRRRRSSATILQLLQGIRAGIASEYESSDRDLLNQSAVVQGSTSLNQNRNNTSLSAIGDYFVGSSLDHLLEHLADNDSIRHGSLPARKEVVDNLPTVKISESLQCSICLDDFDKGSEAKEMPCKHKFHIRCIVPWLELHSSCPVCRYELPPDDETKVNPVRPRTRTLEINVSNENVEDDARNSNVSERRFSFPWPFSGLFSSSSSSSASASGSSHLGENS

SEQ ID NO: 39297 - protein, 348 aa, Arabidopsis thaliana
  peptide (1)..(348): Ceres Seq. ID no. 12558329
MCSQMVNPVIGAEIKCPFCQSGFVEEMSREINGGSSSSLREVQDPEIDFGTDRALSLWGPILLGMMSNPRRRRRFRRTEFGVDNDEVNVSDDVDGNDSVDIDRHHHRRHRHRQQGREIDLDREFESILRRRRRSSATILQLLQGIRAGIASEYESSDRDLLNQSAVVQGSTSLNQNRNNTSLSAIGDYFVGSSLDHLLEHLADNDSIRHGSLPARKEVVDNLPTVKISESLQCSICLDDFDKGSEAKEMPCKHKFHIRCIVPWLELHSSCPVCRYELPPDDETKVNPVRPRTRTLEINVSNENVEDDARNSNVSERRFSFPWPFSGLFSSSSSSSASASGSSHLGENS

SEQ ID NO: 39298 - protein, 344 aa, Arabidopsis thaliana
  peptide (1)..(344): Ceres Seq. ID no. 12558330
MVNPVIGAEIKCPFCQSGFVEEMSREINGGSSSSLREVQDPEIDFGTDRALSLWGPILLGMMSNPRRRRRFRRTEFGVDNDEVNVSDDVDGNDSVDIDRHHHRRHRHRQQGREIDLDREFESILRRRRRSSATILQLLQGIRAGIASEYESSDRDLLNQSAVVQGSTSLNQNRNNTSLSAIGDYFVGSSLDHLLEHLADNDSIRHGSLPARKEVVDNLPTVKISESLQCSICLDDFDKGSEAKEMPCKHKFHIRCIVPWLELHSSCPVCRYELPPDDETKVNPVRPRTRTLEINVSNENVEDDARNSNVSERRFSFPWPFSGLFSSSSSSSASASGSSHLGENS

SEQ ID NO: 39299 - DNA, 1508 bp, Arabidopsis thaliana
  misc_feature (1)..(1508): Ceres Seq. ID no. 12328951
  misc_feature (1)..(1508): Ortholog of  Ceres SEQ ID NO 14308389 as cited in SEQ ID NO 55226
  misc_feature (1)..(1508): Ortholog of  Ceres SEQ ID NO 15177652 as cited in SEQ ID NO 56858
  misc_feature (1)..(1508): Ortholog of  Ceres SEQ ID NO 13597162 as cited in SEQ ID NO 63955
gttgtttatttctgaagaagaagaaaaacagagcatcataagaagaaaaaaaaaaagcaatgggatccttagttcatgtgaaagaagccacagttattactccttccgaccaaacaccttcttctgttctgtctctctccgctttagattctcagcttttcctccgattcaccattgaatacctcctcgtttacccacccgtttccgacccggagtattctctctccggtcgtctcaaatccgctctctctcgcgctctcgttccttacttccctttctccggccgcgtccgagaaaaacccgacggcggcggaggtctcgaggtcaattgccgtggccaaggtgctctgtttcttgaagccgtctctgacatcctcacgtgccttgactttcagaaacctccccggcacgtgactagctggagaaagcttctttcgctccacgtcatcgatgtcctcgctggtgctccacctctcgtcgttcagctcacttggctccgtgacggtggtgctgctttagccgtcggtgttaaccactgcgtctccgatggaatcggtagcgccgagtttctcactttattcgccgagttatctaaagactcactgagtcaaaccgagttaaaacggaaacatctctgggatcgtcaattgcttatgccgtctccgattcgtgactcgttgagtcatcccgagttcaaccgtgttcccgatctatgcggattcgttaaccgattcaacgccgagcgactcgttcctacatcggttgtcttcgagagacagaaacttaacgagctaaagaaactcgcgagtcgactcggtgagttcaattctaaacacacatcgttcgaggtactctctgcacatgtatggcggagctgggcgagatcactgaacttgccatcgaatcaggtccttaagcttttgtttagcgtcaacattagagaccgagtcaaaccgagtctacccagtgggttctacgggaacgcattcgtcgtcggatgtgctcaaaccaccgtgaaagacttgacggagaaaggattaagctacgcgacgatgctcgtgaaacaagcgaaggagcgagtcggtgacgagtacgtcagatcggtggtggaagctgtgagcaaggagagagcgagtcctgactcggttggagtcttgatactgtcgcaatggtcacgtctcggtttagagaagcttgattttggtttgggtaaaccggttcatgttggatcggtctgttgcgaccgttactgtttgttgcttccgattcctgaacaaaatgacgccgttaaagtaatggtcgccgttccgtcaagctctgttgacacgtacgagaatcttgtgacgagtcctaacgcttagattagagaaaggataaattctaattttttactctttacgttttttacttttttacctttttctaaaataaattatgaactctcctccgttgacttgtaaaatatgagttttgacttattttattttaaatccatttttggttttctt

SEQ ID NO: 39300 - protein, 433 aa, Arabidopsis thaliana
  peptide (1)..(433): Ceres Seq. ID no. 12328952
MGSLVHVKEATVITPSDQTPSSVLSLSALDSQLFLRFTIEYLLVYPPVSDPEYSLSGRLKSALSRALVPYFPFSGRVREKPDGGGGLEVNCRGQGALFLEAVSDILTCLDFQKPPRHVTSWRKLLSLHVIDVLAGAPPLVVQLTWLRDGGAALAVGVNHCVSDGIGSAEFLTLFAELSKDSLSQTELKRKHLWDRQLLMPSPIRDSLSHPEFNRVPDLCGFVNRFNAERLVPTSVVFERQKLNELKKLASRLGEFNSKHTSFEVLSAHVWRSWARSLNLPSNQVLKLLFSVNIRDRVKPSLPSGFYGNAFVVGCAQTTVKDLTEKGLSYATMLVKQAKERVGDEYVRSVVEAVSKERASPDSVGVLILSQWSRLGLEKLDFGLGKPVHVGSVCCDRYCLLLPIPEQNDAVKVMVAVPSSSVDTYENLVTSPNA

SEQ ID NO: 39301 - protein, 235 aa, Arabidopsis thaliana
  peptide (1)..(235): Ceres Seq. ID no. 12328953
MPSPIRDSLSHPEFNRVPDLCGFVNRFNAERLVPTSVVFERQKLNELKKLASRLGEFNSKHTSFEVLSAHVWRSWARSLNLPSNQVLKLLFSVNIRDRVKPSLPSGFYGNAFVVGCAQTTVKDLTEKGLSYATMLVKQAKERVGDEYVRSVVEAVSKERASPDSVGVLILSQWSRLGLEKLDFGLGKPVHVGSVCCDRYCLLLPIPEQNDAVKVMVAVPSSSVDTYENLVTSPNA

SEQ ID NO: 39302 - DNA, 1330 bp, Arabidopsis thaliana
  misc_feature (1)..(1330): Ceres Seq. ID no. 13580365
  misc_feature (1)..(1330): Ortholog of  Ceres SEQ ID NO 14314327 as cited in SEQ ID NO 57354
atccaaaactctctcagtcatggctcttcttcgtcttcctggcatttccctccaaattctaggtcacaaatcaaaccagaagaaccctaatcccaatgttgccttcaccaatcactctctctctttatctactccttcactatgtcgtctccatcgtcacgcgacgtttccagactcaattccagcaaaatccagaaacctcacttcgtacttctccaccacaacacaagagccagtcctcgaatcttcttcttcttcttcttcagctcctgaggtagtagaagaagagatttctaaaaccagattgattgctcagaatgttccatggacatctacacctgaagatattagatcgttgttcgagaagtacgggagtgttatcgacattgagatgtctatgcataagaaggaaagaaatagaggtttggtgttcattgaaatggcttctcctgaagaagctgcaacagctcttaaatctcttgaatcgtgtgaatatgagggtcgtcgtttgaaggtagactatgcaaagaccaaaaagaagaagacatatgcgccgcgtgagacgccttcaccagtgcctacattcaatttgtttgttgcaaacttggcatttgaagcaagggccaagcatcttaaggagttctttgatgcagacactggtaatgttgtctccactgaagttatattccatgaaaatccaaggaggtcgagtggttacgggtttgtctctttcaaaaccaagaaacaggccgaggcagcgcttattgagttccaaggaaaggattttttgggaaggccaatccattagctaaaagcaaacagtttgtgaagttgcaagcaaaagaagggttgcagccaccagaggaggaagcagaggaggaaccatctcagtctgagacaatgacccaagagcacgaaactccggctgcataaaacttagaagtcttcgttgcaggatcattgttggagatattggaattgacgaagaagcttcgagcttttaggtctttattcttcttagtttttgaccaacaagaggagtgggtacatacaagtagtacctaccttgagtaaatggtggagaggtaagaagtacaagaccgattttgttagaactgaaaactagtaagagacaggtattaccaaacgtcagtatcagaccagatcaaatctcaagaaacaaactcatgtggctcctacgaaacttgctttgttcagttaaacacaatgcttctttgtttgtcatctactttcgattacttgtttgcgtttgttatatgcttagtgtgtaacttcatatatgaacccgtactcttaagaaagttatgtt

SEQ ID NO: 39303 - protein, 268 aa, Arabidopsis thaliana
  peptide (1)..(268): Ceres Seq. ID no. 13580366
SKTLSVMALLRLPGISLQILGHKSNQKNPNPNVAFTNHSLSLSTPSLCRLHRHATFPDSIPAKSRNLTSYFSTTTQEPVLESSSSSSSAPEVVEEEISKTRLIAQNVPWTSTPEDIRSLFEKYGSVIDIEMSMHKKERNRGLVFIEMASPEEAATALKSLESCEYEGRRLKVDYAKTKKKKTYAPRETPSPVPTFNLFVANLAFEARAKHLKEFFDADTGNVVSTEVIFHENPRRSSGYGFVSFKTKKQAEAALIEFQGKDFLGRPIH

SEQ ID NO: 39304 - protein, 262 aa, Arabidopsis thaliana
  peptide (1)..(262): Ceres Seq. ID no. 13580367
MALLRLPGISLQILGHKSNQKNPNPNVAFTNHSLSLSTPSLCRLHRHATFPDSIPAKSRNLTSYFSTTTQEPVLESSSSSSSAPEVVEEEISKTRLIAQNVPWTSTPEDIRSLFEKYGSVIDIEMSMHKKERNRGLVFIEMASPEEAATALKSLESCEYEGRRLKVDYAKTKKKKTYAPRETPSPVPTFNLFVANLAFEARAKHLKEFFDADTGNVVSTEVIFHENPRRSSGYGFVSFKTKKQAEAALIEFQGKDFLGRPIH

SEQ ID NO: 39305 - protein, 138 aa, Arabidopsis thaliana
  peptide (1)..(138): Ceres Seq. ID no. 13580368
MSMHKKERNRGLVFIEMASPEEAATALKSLESCEYEGRRLKVDYAKTKKKKTYAPRETPSPVPTFNLFVANLAFEARAKHLKEFFDADTGNVVSTEVIFHENPRRSSGYGFVSFKTKKQAEAALIEFQGKDFLGRPIH

SEQ ID NO: 39306 - DNA, 1278 bp, Arabidopsis thaliana
  misc_feature (1)..(1278): Ceres Seq. ID no. 12329059
  misc_feature (1)..(1278): Ortholog of  Ceres SEQ ID NO 13654273 as cited in SEQ ID NO 68551
tccggcgtgattcttgagaagaactgaagtgtagagagagatctgaaatctcaatctccgatttaacttgcgacaatgcttcaaattcgtcttcggagggattccccgacggaaactggaaatggtgcgaggccttctccgacggagacggttactgtagcctgtcccgaccatctcgtcctcgccgatcttcctgttgcgaaaggaatcggttccgtgactcccaccacagtaatcaagcccgtcggtcgtcgttctcgccgtcagctaggcgagagagttcacttctgcgttcgttgcgattttccgattgcaatctatggtcgtctgattccttgtgatcatgccttttgccttgaatgtgctcgcagtgattccatctgctatctatgtgatgagcggattcagaagattcaaacaatcaagatgatggaagggatcttcatctgtgcagctcctcattgtcttaggtctttcctgaagaaacttgactttgaagcccatgtccatgacctccatggaagcctattacaagccgatgcagagaaagaagatggtaaccagtcagatgttcagagcacaatgcagcagtcttcagcttcaaaatccaccttgcgagctcctttaagatcccagctgcaacaatcccgtgaactaaacaggtcggcgtcatttgcaaagtcacagtctggatttagtcaagtccagaattaccctccagatagcgataactctcgccctcctggattcgaaaccgctagtcctaaaccaggaatccggttcccagactacccccagcctatgaatcttatgcaaccgcccagcttgcccgttccaatgaatcaaaacccgggtttaccacagcagtttggttttccttcgtatccaacaacagagagtggatcatctcaacaattctttaacggtgctcagtacgagatgacaagaacagagagcggcggcggatcagaacaaagttcattgctcgggtatcccccgccttcaccaatgacgaatctgaatttccaaggatcgtatcctcctccatcatggaatcccggaatggcaccgcctcacacgacccagcaggttaaccggggtagagacggtcaaagttttgggtggccacaagagaaccgtgatggctttgggcaggagtaagagtagtctagtttgaatttgtgcaatgttaaacttgtcgtttgaaagtttcaagtgcttttgtttctaaaaactgtgtcgtttgttgttggtctaacatgtaattcgagtaaaccc

SEQ ID NO: 39307 - protein, 361 aa, Arabidopsis thaliana
  peptide (1)..(361): Ceres Seq. ID no. 12329060
MLQIRLRRDSPTETGNGARPSPTETVTVACPDHLVLADLPVAKGIGSVTPTTVIKPVGRRSRRQLGERVHFCVRCDFPIAIYGRLIPCDHAFCLECARSDSICYLCDERIQKIQTIKMMEGIFICAAPHCLRSFLKKLDFEAHVHDLHGSLLQADAEKEDGNQSDVQSTMQQSSASKSTLRAPLRSQLQQSRELNRSASFAKSQSGFSQVQNYPPDSDNSRPPGFETASPKPGIRFPDYPQPMNLMQPPSLPVPMNQNPGLPQQFGFPSYPTTESGSSQQFFNGAQYEMTRTESGGGSEQSSLLGYPPPSPMTNLNFQGSYPPPSWNPGMAPPHTTQQVNRGRDGQSFGWPQENRDGFGQE

SEQ ID NO: 39308 - protein, 244 aa, Arabidopsis thaliana
  peptide (1)..(244): Ceres Seq. ID no. 12329061
MMEGIFICAAPHCLRSFLKKLDFEAHVHDLHGSLLQADAEKEDGNQSDVQSTMQQSSASKSTLRAPLRSQLQQSRELNRSASFAKSQSGFSQVQNYPPDSDNSRPPGFETASPKPGIRFPDYPQPMNLMQPPSLPVPMNQNPGLPQQFGFPSYPTTESGSSQQFFNGAQYEMTRTESGGGSEQSSLLGYPPPSPMTNLNFQGSYPPPSWNPGMAPPHTTQQVNRGRDGQSFGWPQENRDGFGQE

SEQ ID NO: 39309 - protein, 243 aa, Arabidopsis thaliana
  peptide (1)..(243): Ceres Seq. ID no. 12329062
MEGIFICAAPHCLRSFLKKLDFEAHVHDLHGSLLQADAEKEDGNQSDVQSTMQQSSASKSTLRAPLRSQLQQSRELNRSASFAKSQSGFSQVQNYPPDSDNSRPPGFETASPKPGIRFPDYPQPMNLMQPPSLPVPMNQNPGLPQQFGFPSYPTTESGSSQQFFNGAQYEMTRTESGGGSEQSSLLGYPPPSPMTNLNFQGSYPPPSWNPGMAPPHTTQQVNRGRDGQSFGWPQENRDGFGQE

SEQ ID NO: 39310 - DNA, 1943 bp, Arabidopsis thaliana
  misc_feature (1)..(1943): Ceres Seq. ID no. 13495871
  misc_feature (1)..(1943): Ortholog of  Ceres SEQ ID NO 13598582 as cited in SEQ ID NO 65294
  misc_feature (1)..(1943): Ortholog of  Ceres SEQ ID NO 15176145 as cited in SEQ ID NO 0
gattgattccaatcttctttcattttcttcttcttcttcttcttcttcttctgctggggaaggggcaggttaaaattatgccatctattcaaatcgtgcctatcctcagatcttaactcttttctctacgagattcggcatctgggttttattcttcttgagcaaaatgcaatcggataatggaaagcttttcatcggtgggatatcttgggacaccaatgaggaacgtctcaaggagtatttcagcagttttggagaagtgatcgaagctgtcatcttgaaagatcgtaccactggtcgtgctcgtggtttcggttttgttgtntttgctgatcctgctgttgctgagattgttatcaccgaaaaacataatattgatggcagattggttgaagccaagaaagctgttcccagagatgaccaaaacatggtaaatagaagcaacagcagtagcatccaaggttctcccggtggtccaggtcgcacaaggaagatatttgttggaggattaccttcttcggttacagagagtgatttcaagacgtattttgagcagtttggtacaactacggatgtggttgtcatgtatgatcacaacacacaaaggcctagaggtttcgggtttataacctacgattccgaggaggcggttgaaaaggtattgctcaagacattccatgaactaaatggtaaaatggttgaggttaagcgagctgttccaaaggagttatctccaggtccaagtcgcagtcctyttggtgcaggttacakctatggagttaatagggtcaataacctccttaatgggtatgctcaagggtttaatcccgctgcagttggaggctacggacttakgattggatggtcggttcagtccggttggtgctggaagaagcgggtttgcaaattacagttctggatacgggatgaatgtgaactttgatcagggattgcccacagggttcacgggaggtacaaaattacaatggaaatgttgactatggccgatgaatgagcccgtactacattggtaacaacaaacaggtttggtcctgcggttggctatgaagggggcaacggaggaggaaactcatccttyttcagttcggttacacggaacttatggggaaacaatggtggtcttaactataacaacaataatacaaactcaaactccaatacatatatgggaggatcatcaagtgggaacaacacacttagtggtccatttggaaattcaggagtcaattggggtgctcctggaggaggaaacaatgctgtgagtaacgagaatgtgaagtttggttatggaggaaacggtgaatctggttttgggttgggaacaggtggttatgcagcaagaaacccaggggctaacaaggcagcaccatcctcttcattctcttctgcctcagcaaccaacaacacgggttatgatacagcaggacttgcagagttttacgggratggtscagtttatagtgaccctacatggagatcaaccaactcctgagacagaagggcctgctccttttagctatgggattggaggaggggttccttcttcagatgtttcagctagaagttcatctccaggttatgttggcagttacagtgtgaacaagagacaaccaaacagaggcgagccatcacggtgaacgatctgtgtcttttggcgaatcttttagattatcttcttttcccttcatacaaagccagtgaggacgaaacttgatcatatcatcacctagagctaaccagagaatcccgcagacttttctgtcatggtttggttttctaaattcattgttcctcctaggcttttttctgctttcttttttttctatttttgttttcttttcttctttcaatgagggacagaagaaactgtatcagtctccggcgaggcggtaatacataaggagagttcaaaacaaaaaccc

SEQ ID NO: 39311 - protein, 258 aa, Arabidopsis thaliana
  peptide (1)..(258): Ceres Seq. ID no. 15222963
  misc_feature (53)..(53): Xaa is any aa, unknown or other
  misc_feature (197)..(197): Xaa is any aa, unknown or other
  misc_feature (202)..(202): Xaa is any aa, unknown or other
  misc_feature (230)..(230): Xaa is any aa, unknown or other
MQSDNGKLFIGGISWDTNEERLKEYFSSFGEVIEAVILKDRTTGRARGFGFVXFADPAVAEIVITEKHNIDGRLVEAKKAVPRDDQNMVNRSNSSSIQGSPGGPGRTRKIFVGGLPSSVTESDFKTYFEQFGTTTDVVVMYDHNTQRPRGFGFITYDSEEAVEKVLLKTFHELNGKMVEVKRAVPKELSPGPSRSPXGAGYXYGVNRVNNLLNGYAQGFNPAAVGGYGLXIGWSVQSGWCWKKRVCKLQFWIRDECEL

SEQ ID NO: 39312 - protein, 171 aa, Arabidopsis thaliana
  peptide (1)..(171): Ceres Seq. ID no. 15222964
  misc_feature (110)..(110): Xaa is any aa, unknown or other
  misc_feature (115)..(115): Xaa is any aa, unknown or other
  misc_feature (143)..(143): Xaa is any aa, unknown or other
MVNRSNSSSIQGSPGGPGRTRKIFVGGLPSSVTESDFKTYFEQFGTTTDVVVMYDHNTQRPRGFGFITYDSEEAVEKVLLKTFHELNGKMVEVKRAVPKELSPGPSRSPXGAGYXYGVNRVNNLLNGYAQGFNPAAVGGYGLXIGWSVQSGWCWKKRVCKLQFWIRDECEL

SEQ ID NO: 39313 - DNA, 1698 bp, Arabidopsis thaliana
  misc_feature (1)..(1698): Ceres Seq. ID no. 12370784
  misc_feature (1)..(1698): Ortholog of  Ceres SEQ ID NO 15179918 as cited in SEQ ID NO 57077
cttttatagtaatctaaaccatattgagaactagctaatagatatggatatggcctttacgcacgtttgtctatggacgctactcgccttcgtgctgacctggacggtgttctgcgttaccaacaggaagaagaaggcgccggaattggcagatgcggcagcagaggagagaagagacagtgctgctgatgttatcatcgtcggggctggtgtgggtggctcggctctcgcatattctcttgctaaggacgggcgccgagtacttgtgatagagagggatatgagagaaccagagagaatgatgggtgagtttatgcagccaggaggacgactcatgctttctaagcttggccttgaagattgtctgaatgatatagatgcccaaaaagccacgggcatggcagtttataaggacggaaaagaagctgtcgcatcttttccggtggacgacaacaattttccatatgatccgtcggctcgaacttttcacaatggtcgattcgtccaacgtctgcgccaaaaggcttcttctcttcctagtgtgcggctcgaagaaggaacggtgaagtctttaatagaagaaaaaggagtgatcaaaggagtgacatacaaaaataaagcaggcgaagaaacaacagccttggcacctctcactgtagtatgcgacggttgctactcaaaccttcgtcggtctctaaacgataacaatgctgaggttctgtcttaccaagttgcttacatctcgaagaattgtcggcttgatgatcccaaaaaccttcatttgataatgtccaaaccctcctacatcatgttgtaccaattaagcagcactgatgttcgttgtggttttgaacttttctccgccaattttccttccattgcaaaaggtgaaatggctacttttgcgaagaacactctagctcctcaggtacctccaaaacttcgcaaaatattcttgaaaggtctagatgaaggagcacacataaaagcggtgccagcaaagcgcatgacagcttctttaaccaagaaaaatggattgattgtgttgggagatgcattcaacatgcgtcatccttcggtcgcggctggtatgatggttttattgtctgacattctcattctacgtcgtcttctccagccactaagcaaccttggtgatgcaaacaaagtctcagaagtcattaagtcctttaatattatccgcaagccaatgtcagcgacggtgaacacattaggaaatgcattttctcaagttctaattgcatcaactgacgaagcaaaagaggcaatgagacaaggttgctatgattacctctctagtggtggtttttgcacgtcggggatgatggctctactaggtggcatgaatcctcgtccgctctctctcatatatcatctatgtgctatcactttacattcaattggccatcttctatctccatttccttccccccttagcatttggcatagcctcaggctttttggtttggctttgaaaatgttggttccccatctcaaggctgagggagttagcgaaatgttttttccagcaaacgcagccgcatatcgcaaaagctatatggccgcatctggtctttaaacattgatgctctaaacagcaacatacgtaagcttgtaaactcgttgaaatgttattgtaatgcttagcttacataatattacttaatgagtttctcc

SEQ ID NO: 39314 - protein, 518 aa, Arabidopsis thaliana
  peptide (1)..(518): Ceres Seq. ID no. 12370785
MDMAFTHVCLWTLLAFVLTWTVFCVTNRKKKAPELADAAAEERRDSAADVIIVGAGVGGSALAYSLAKDGRRVLVIERDMREPERMMGEFMQPGGRLMLSKLGLEDCLNDIDAQKATGMAVYKDGKEAVASFPVDDNNFPYDPSARTFHNGRFVQRLRQKASSLPSVRLEEGTVKSLIEEKGVIKGVTYKNKAGEETTALAPLTVVCDGCYSNLRRSLNDNNAEVLSYQVAYISKNCRLDDPKNLHLIMSKPSYIMLYQLSSTDVRCGFELFSANFPSIAKGEMATFAKNTLAPQVPPKLRKIFLKGLDEGAHIKAVPAKRMTASLTKKNGLIVLGDAFNMRHPSVAAGMMVLLSDILILRRLLQPLSNLGDANKVSEVIKSFNIIRKPMSATVNTLGNAFSQVLIASTDEAKEAMRQGCYDYLSSGGFCTSGMMALLGGMNPRPLSLIYHLCAITLHSIGHLLSPFPSPLSIWHSLRLFGLALKMLVPHLKAEGVSEMFFPANAAAYRKSYMAASGL

SEQ ID NO: 39315 - protein, 516 aa, Arabidopsis thaliana
  peptide (1)..(516): Ceres Seq. ID no. 12370786
MAFTHVCLWTLLAFVLTWTVFCVTNRKKKAPELADAAAEERRDSAADVIIVGAGVGGSALAYSLAKDGRRVLVIERDMREPERMMGEFMQPGGRLMLSKLGLEDCLNDIDAQKATGMAVYKDGKEAVASFPVDDNNFPYDPSARTFHNGRFVQRLRQKASSLPSVRLEEGTVKSLIEEKGVIKGVTYKNKAGEETTALAPLTVVCDGCYSNLRRSLNDNNAEVLSYQVAYISKNCRLDDPKNLHLIMSKPSYIMLYQLSSTDVRCGFELFSANFPSIAKGEMATFAKNTLAPQVPPKLRKIFLKGLDEGAHIKAVPAKRMTASLTKKNGLIVLGDAFNMRHPSVAAGMMVLLSDILILRRLLQPLSNLGDANKVSEVIKSFNIIRKPMSATVNTLGNAFSQVLIASTDEAKEAMRQGCYDYLSSGGFCTSGMMALLGGMNPRPLSLIYHLCAITLHSIGHLLSPFPSPLSIWHSLRLFGLALKMLVPHLKAEGVSEMFFPANAAAYRKSYMAASGL

SEQ ID NO: 39316 - protein, 439 aa, Arabidopsis thaliana
  peptide (1)..(439): Ceres Seq. ID no. 12370787
MREPERMMGEFMQPGGRLMLSKLGLEDCLNDIDAQKATGMAVYKDGKEAVASFPVDDNNFPYDPSARTFHNGRFVQRLRQKASSLPSVRLEEGTVKSLIEEKGVIKGVTYKNKAGEETTALAPLTVVCDGCYSNLRRSLNDNNAEVLSYQVAYISKNCRLDDPKNLHLIMSKPSYIMLYQLSSTDVRCGFELFSANFPSIAKGEMATFAKNTLAPQVPPKLRKIFLKGLDEGAHIKAVPAKRMTASLTKKNGLIVLGDAFNMRHPSVAAGMMVLLSDILILRRLLQPLSNLGDANKVSEVIKSFNIIRKPMSATVNTLGNAFSQVLIASTDEAKEAMRQGCYDYLSSGGFCTSGMMALLGGMNPRPLSLIYHLCAITLHSIGHLLSPFPSPLSIWHSLRLFGLALKMLVPHLKAEGVSEMFFPANAAAYRKSYMAASGL

SEQ ID NO: 39317 - DNA, 1368 bp, Arabidopsis thaliana
  misc_feature (1)..(1368): Ceres Seq. ID no. 12558338
  misc_feature (1)..(1368): Ortholog of  Ceres SEQ ID NO 15224520 as cited in SEQ ID NO 58188
  misc_feature (1)..(1368): Ortholog of  Ceres SEQ ID NO 12777206 as cited in SEQ ID NO 60246
ttccaaggaaaaaaaaagtctttacccgtaaacattttttctccatcttcttgatatcaacaaaacacacctcaacaaaaaaaaaaaaacttcatctctctcagatttcgaaattgacccgtcggtgattcttaatctctcctctctgttcttctccgatcaaacctcattccaaagaaacaaaccatggatctccaaccagaagagcttcaattcttgacaatacctcaactacttcaagaatcaatctcaatcaagaaacgatctccaagaaccttctacctcataaccctctccttcatcttccctctctccttcgctatcctcgctcactcactcttcactcaaccaatcttagccaaactcgacaaatccgacccaccaaactcagatcgttcacgtcatgattggactgttcttctaatcttccagttcagttacttgatcttcctctttgccttctctcttctctcaaccgctgctgttgtcttcaccgtcgcttctctttacaccggaaagcctgtttctttctcgtcaactctctctgcgattcccaaagtctttaaacgactctttataactttcctttgggttgctctgttgatgtttgcttataacgcagtcttctttgtcttcctcgtgatgcttctcgtagctcttgatttgaatagtttaggtttagctattgtagccggggttataatctctgttctatactttggtgttcatgtttatttcactgctttatggcatttaggtagtgtaatctctgttcttgaaccggtttacggaatcgccgctatgagaaaagcttatgagttgcttaaagggaagactaagatggctatggggttaatctttgtttatcttttcctctgtggattgattggagttgtttttggtgctgttgtggttcatggtggtgggaagtatggaacttttactaggactttggttggtggattgttagttggtgttcttgtgatggttaatcttgtgggtttgttggttcagagtgtgttttactatgtttgtaagagttatcatcatcagactattgataagaccgctttgtatgatcaacttggtgggtatcttggagattatgtgcctcttaagagcaacattcagttggaggatttagatatttgaagatttgtcaagatgatgattctcttgtactgtttttcttctcttattaccattctctctctctctttgtagtttgtaatattggagaagaagaagaaatttggaatctgaacaatagttttaatgtaatgtgtatgtattagactcaacactctttgttgttgttttcatttgattattattacatgatttgagtttactaatttattcttgttg

SEQ ID NO: 39318 - protein, 321 aa, Arabidopsis thaliana
  peptide (1)..(321): Ceres Seq. ID no. 12558339
MDLQPEELQFLTIPQLLQESISIKKRSPRTFYLITLSFIFPLSFAILAHSLFTQPILAKLDKSDPPNSDRSRHDWTVLLIFQFSYLIFLFAFSLLSTAAVVFTVASLYTGKPVSFSSTLSAIPKVFKRLFITFLWVALLMFAYNAVFFVFLVMLLVALDLNSLGLAIVAGVIISVLYFGVHVYFTALWHLGSVISVLEPVYGIAAMRKAYELLKGKTKMAMGLIFVYLFLCGLIGVVFGAVVVHGGGKYGTFTRTLVGGLLVGVLVMVNLVGLLVQSVFYYVCKSYHHQTIDKTALYDQLGGYLGDYVPLKSNIQLEDLDI

SEQ ID NO: 39319 - protein, 182 aa, Arabidopsis thaliana
  peptide (1)..(182): Ceres Seq. ID no. 12558340
MFAYNAVFFVFLVMLLVALDLNSLGLAIVAGVIISVLYFGVHVYFTALWHLGSVISVLEPVYGIAAMRKAYELLKGKTKMAMGLIFVYLFLCGLIGVVFGAVVVHGGGKYGTFTRTLVGGLLVGVLVMVNLVGLLVQSVFYYVCKSYHHQTIDKTALYDQLGGYLGDYVPLKSNIQLEDLDI

SEQ ID NO: 39320 - protein, 169 aa, Arabidopsis thaliana
  peptide (1)..(169): Ceres Seq. ID no. 12558341
MLLVALDLNSLGLAIVAGVIISVLYFGVHVYFTALWHLGSVISVLEPVYGIAAMRKAYELLKGKTKMAMGLIFVYLFLCGLIGVVFGAVVVHGGGKYGTFTRTLVGGLLVGVLVMVNLVGLLVQSVFYYVCKSYHHQTIDKTALYDQLGGYLGDYVPLKSNIQLEDLDI

SEQ ID NO: 39321 - DNA, 2811 bp, Arabidopsis thaliana
  misc_feature (1)..(2811): Ceres Seq. ID no. 13491848
  misc_feature (1)..(2811): Ortholog of  Ceres SEQ ID NO 13590691 as cited in SEQ ID NO 66290
ctgcaggcttcgatagagatagagctaagcacgaaaatcccgagtaattgaccttctcttcttcccagtgttgtcttctcttctccacgaacttaattttttcaaaaccctagcaactttgattcattcaaaatccgatccaacgatgactattgaagaagtttccggtgagactcctccgtctacgcctccttcttcttctacgccttctccgtcttcctccaccaccaacgccgcgccgttgggatcctctgtgattccgattgtaaacaagctacaagacatattcgctcagctcggaagccagtctacgatcgcgcttcctcaggttgttgttgttggaagccaaagcagtggcaagtctagcgtccttgaagcactcgtcggccgtgactttctccctcgtggtaatgatatctgcacgcgtcgtcctcttgttctccagctcctccagactaaaagccgcgctaatggcggatccgatgatgagtggggggagtttcgtcaccttcctgaaactcgtttctatgatttctctgagattcgtcgagaaattgaggctgagacgaatagattagttggagagaacaaaggtgtagcagatacacagattcgtcttaaaatttcttcacctaatgtattgaacatcacgcttgtggatctgcctggtattaccaaggtgccagttggtgaccagccatccgacattgaagcacgtataagaacgatgatcttgtcttacatcaagcaagatacttgcttgatattggctgttacccctgctaataccgatctagcaaactctgatgcccttcaaattgctagcattgtagatcctgatggtcacagaacgataggtgtaatcacaaagttggatattatggacaaaggtactgatgctcgaaaactccttcttggaaatgttgttcctcttcgacttggatacgtgggagttgtaaatcgttgccaggaggatattttgctaaaccgcacagtcaaggaagcacttctcgcagaggagaagttcttccggagtcacccggtttaccatggtcttgccgatcgtttgggtgttcctcagctagcaaagaagttaaatcagatccttgttcaacatatcaaggtcttgcttccggatttgaagtcgcggataagtaatgctttggttgctacagcaaaagagcatcagagctatggtgaattaacagaatcaagggctgggcaaggagctcttctcctcaactttctctccaaatactgtgaagcatactcttcattgctggaagggaaaagtgaagaaatgtctacgtcagagctctctggaggagcaagaattcactatattttccagtcaatctttgttaagagtttggaggaggttgatccatgcgaggacttgacagatgatgatattcggactgcaattcagaatgcaactggtccaagatctgcattatttgttccagatgttccatttgaagttcttgttaggaggcagatatctcgtttgttagatcctagccttcagtgtgcccggttcatttttgaagagctaataaagattagccatagatgtatgatgaatgagttacaacgatttccagtcctacgaaagcgcatggatgaggttatcggggatttcctgcgagaaggtcttgaaccctcagaagcaatgatcggggatatcattgatatggagatggattacataaacacttcacatccaaattttattggtggaaccaaggccgtggaagctgcaatgcatcaagtgaagtcttcgaggattccccatcctgtggcacgaccaaaggacactgtggagcctgatagaacatcttcttccacgagtcaagtgaaatctagatcgtttctcggcaggcaagctaatggaattgttactgatcagggagttgtatctgcagatgctgaaaaagctcaacctgctgcaaatgcgagtgatacaaggtggggtatcccttcaattttccgagggggtgatactagagcagttactaaagatagcttattaaacaaaccattcagtgaagctgttgaggatatgtctcacaacttatccatgatctatctaaaggagcccccagctgtcttgaggccaaccgaaacccattcagaacaggaagcagttgagattcagataacaaagctgttactaagatcatactatgacattgtaaggaagaatattgaggactcggtaccaaaagcaatcatgcatttcctggtaaaccacacaaaacgtgagctgcataacgtcttcatcaagaagctttacagggagaacttgtttgaagaaatgttgcaagagccagatgagatagcagttaagaggaaacgcacacaagagactctccacgttcttcagcaagcttacaggacactagatgagttgccactggaagcagattcggtgtcagcaggaatgtcaaaacatcaggagttactgacatcttcaaagtattcgacaagcagctcatactcggcatctccaagtacgacaagaagatcgagaagagcaggagatcaacaccaaaatggatacggattctaacatgatccaaatatctcgaatatctctcgactgtgataacgcatttcattcatttaatggctctttcaggttttggtattaaattatgtgttggtcatatgaagaatttatataggaaaccagtacacagtgtgggttttggtccttttggactctgcattggttgacttgataagggagtgaaaggtgatatagtttttttttccaaaaaaaaaaaaaaaaaactcgagggggggccc

SEQ ID NO: 39322 - protein, 808 aa, Arabidopsis thaliana
  peptide (1)..(808): Ceres Seq. ID no. 13491849
MTIEEVSGETPPSTPPSSSTPSPSSSTTNAAPLGSSVIPIVNKLQDIFAQLGSQSTIALPQVVVVGSQSSGKSSVLEALVGRDFLPRGNDICTRRPLVLQLLQTKSRANGGSDDEWGEFRHLPETRFYDFSEIRREIEAETNRLVGENKGVADTQIRLKISSPNVLNITLVDLPGITKVPVGDQPSDIEARIRTMILSYIKQDTCLILAVTPANTDLANSDALQIASIVDPDGHRTIGVITKLDIMDKGTDARKLLLGNVVPLRLGYVGVVNRCQEDILLNRTVKEALLAEEKFFRSHPVYHGLADRLGVPQLAKKLNQILVQHIKVLLPDLKSRISNALVATAKEHQSYGELTESRAGQGALLLNFLSKYCEAYSSLLEGKSEEMSTSELSGGARIHYIFQSIFVKSLEEVDPCEDLTDDDIRTAIQNATGPRSALFVPDVPFEVLVRRQISRLLDPSLQCARFIFEELIKISHRCMMNELQRFPVLRKRMDEVIGDFLREGLEPSEAMIGDIIDMEMDYINTSHPNFIGGTKAVEAAMHQVKSSRIPHPVARPKDTVEPDRTSSSTSQVKSRSFLGRQANGIVTDQGVVSADAEKAQPAANASDTRWGIPSIFRGGDTRAVTKDSLLNKPFSEAVEDMSHNLSMIYLKEPPAVLRPTETHSEQEAVEIQITKLLLRSYYDIVRKNIEDSVPKAIMHFLVNHTKRELHNVFIKKLYRENLFEEMLQEPDEIAVKRKRTQETLHVLQQAYRTLDELPLEADSVSAGMSKHQELLTSSKYSTSSSYSASPSTTRRSRRAGDQHQNGYGF

SEQ ID NO: 39323 - protein, 614 aa, Arabidopsis thaliana
  peptide (1)..(614): Ceres Seq. ID no. 13491850
MILSYIKQDTCLILAVTPANTDLANSDALQIASIVDPDGHRTIGVITKLDIMDKGTDARKLLLGNVVPLRLGYVGVVNRCQEDILLNRTVKEALLAEEKFFRSHPVYHGLADRLGVPQLAKKLNQILVQHIKVLLPDLKSRISNALVATAKEHQSYGELTESRAGQGALLLNFLSKYCEAYSSLLEGKSEEMSTSELSGGARIHYIFQSIFVKSLEEVDPCEDLTDDDIRTAIQNATGPRSALFVPDVPFEVLVRRQISRLLDPSLQCARFIFEELIKISHRCMMNELQRFPVLRKRMDEVIGDFLREGLEPSEAMIGDIIDMEMDYINTSHPNFIGGTKAVEAAMHQVKSSRIPHPVARPKDTVEPDRTSSSTSQVKSRSFLGRQANGIVTDQGVVSADAEKAQPAANASDTRWGIPSIFRGGDTRAVTKDSLLNKPFSEAVEDMSHNLSMIYLKEPPAVLRPTETHSEQEAVEIQITKLLLRSYYDIVRKNIEDSVPKAIMHFLVNHTKRELHNVFIKKLYRENLFEEMLQEPDEIAVKRKRTQETLHVLQQAYRTLDELPLEADSVSAGMSKHQELLTSSKYSTSSSYSASPSTTRRSRRAGDQHQNGYGF

SEQ ID NO: 39324 - protein, 563 aa, Arabidopsis thaliana
  peptide (1)..(563): Ceres Seq. ID no. 13491851
MDKGTDARKLLLGNVVPLRLGYVGVVNRCQEDILLNRTVKEALLAEEKFFRSHPVYHGLADRLGVPQLAKKLNQILVQHIKVLLPDLKSRISNALVATAKEHQSYGELTESRAGQGALLLNFLSKYCEAYSSLLEGKSEEMSTSELSGGARIHYIFQSIFVKSLEEVDPCEDLTDDDIRTAIQNATGPRSALFVPDVPFEVLVRRQISRLLDPSLQCARFIFEELIKISHRCMMNELQRFPVLRKRMDEVIGDFLREGLEPSEAMIGDIIDMEMDYINTSHPNFIGGTKAVEAAMHQVKSSRIPHPVARPKDTVEPDRTSSSTSQVKSRSFLGRQANGIVTDQGVVSADAEKAQPAANASDTRWGIPSIFRGGDTRAVTKDSLLNKPFSEAVEDMSHNLSMIYLKEPPAVLRPTETHSEQEAVEIQITKLLLRSYYDIVRKNIEDSVPKAIMHFLVNHTKRELHNVFIKKLYRENLFEEMLQEPDEIAVKRKRTQETLHVLQQAYRTLDELPLEADSVSAGMSKHQELLTSSKYSTSSSYSASPSTTRRSRRAGDQHQNGYGF

SEQ ID NO: 39325 - DNA, 1850 bp, Arabidopsis thaliana
  misc_feature (1)..(1850): Ceres Seq. ID no. 13575016
  misc_feature (1)..(1850): Ortholog of  Ceres SEQ ID NO 13663060 as cited in SEQ ID NO 60964
  misc_feature (1)..(1850): Ortholog of  Ceres SEQ ID NO 13655298 as cited in SEQ ID NO 68914
gtcgtctcatattctcgtttgattcaaaacgatagaaatcgacaaagaaggtgtgaagaagttgggaaaacaaaattaacgcttgaagaatctaaaggtttagcttttttctcaatccgatcattcaccgagaaatattctattttatatatttatgtgaagctcttcaattgaagaaagaagaagaaaagacaatcgtcaaatgcttgactttggtttcagttcttcttcacgacagctcaaggaagatcggctctttgatgggatgggacaccaagaaatcaccatgggtttatgatgctatcaattactagtagtacgtgttatcttctgaatatatatcatggcatcctctggactgggaaatggagtaggcacttcgagatctgccaaaggtttaaagagctcttctagttctgtcgattggttgaccagagatttggctgagacgaggataagggacaaagtagagaccgatgatgagagagatagtgaaccagatattattgatggggctggtgctgagcctggtcatgtgattagaaccacactccgtggtcgaaatggtcaatcaagacagacagtcagttacatatcagaacatgttgttggtactggttcctttggcatggttttccaagctaaatgtagggaaactggggaggttgttgccatcaagaaggttctacaagacaaacgctacaagaacagggagctacaaataatgcagatgctagaccatcccaatgccgttgctttaaagcatagctttttctcaagaacagacaacgaagaggtttatttgaatcttgtccttgaatttgtgcctgagaccgtcaatcgtgttgcaagaagttatagtaggacaaaccagctgatgccattgatatatgttaaactctacacctatcagatttgcagggcgcttgcttacatccataattcctttggtctttgtcaccgtgatatcaagcctcaaaacctgctggtgaacccacacacgcatcagctaaaaatatgtgatttcgggagtgcaaaagtgttggtaaaaggagaacccaatgtttcttacatctgttctagatactatcgtgctccagaactcatttttggtgccagtgaatacacaactgcaattgatatatggtccactggttgtgtgatggccgaactgcttcttggacagcctctgtttcctggtgagagcggagttgatcagcttgttgaaatcattaaggttttaggtacaccaacaagggaagaaatcaagtgcatgaatccaaactatacagaatttaagtttccgcagataaaacctcatccatggcacaaggtgttccaaaaacgtttgccaccagaagcagttgatcttctttgtaggttcttccaatattcccccaatttgagatgtacagctttggaagcttgtatccatccgttatttgatgagctaagggacccaaacactcgtcttcccaatggccgaccacttcctccacttttcaactttaaaccgcaagagctatctggcatacctcctgaaatcgtgaacaggcttgtcccagagcatgcccgtaagcagaacctcttcatggctttgcattcgtaagacgcttatcggtttttgcatctgtataagcaagctctcttgatatcaatatttggagcagccagttttcagccatttggcttttgtttttggtgagttctttttctttattttttttctgtttggttggttatatgtcgatgaggatgcatgaatacaaacagtacttgaggtttgctggttacagaccacttgtttgtttcacggccaccatataaccttatctatcgcaaactgtttt

SEQ ID NO: 39326 - protein, 421 aa, Arabidopsis thaliana
  peptide (1)..(421): Ceres Seq. ID no. 13575017
MASSGLGNGVGTSRSAKGLKSSSSSVDWLTRDLAETRIRDKVETDDERDSEPDIIDGAGAEPGHVIRTTLRGRNGQSRQTVSYISEHVVGTGSFGMVFQAKCRETGEVVAIKKVLQDKRYKNRELQIMQMLDHPNAVALKHSFFSRTDNEEVYLNLVLEFVPETVNRVARSYSRTNQLMPLIYVKLYTYQICRALAYIHNSFGLCHRDIKPQNLLVNPHTHQLKICDFGSAKVLVKGEPNVSYICSRYYRAPELIFGASEYTTAIDIWSTGCVMAELLLGQPLFPGESGVDQLVEIIKVLGTPTREEIKCMNPNYTEFKFPQIKPHPWHKVFQKRLPPEAVDLLCRFFQYSPNLRCTALEACIHPLFDELRDPNTRLPNGRPLPPLFNFKPQELSGIPPEIVNRLVPEHARKQNLFMALHS

SEQ ID NO: 39327 - protein, 326 aa, Arabidopsis thaliana
  peptide (1)..(326): Ceres Seq. ID no. 13575018
MVFQAKCRETGEVVAIKKVLQDKRYKNRELQIMQMLDHPNAVALKHSFFSRTDNEEVYLNLVLEFVPETVNRVARSYSRTNQLMPLIYVKLYTYQICRALAYIHNSFGLCHRDIKPQNLLVNPHTHQLKICDFGSAKVLVKGEPNVSYICSRYYRAPELIFGASEYTTAIDIWSTGCVMAELLLGQPLFPGESGVDQLVEIIKVLGTPTREEIKCMNPNYTEFKFPQIKPHPWHKVFQKRLPPEAVDLLCRFFQYSPNLRCTALEACIHPLFDELRDPNTRLPNGRPLPPLFNFKPQELSGIPPEIVNRLVPEHARKQNLFMALHS

SEQ ID NO: 39328 - protein, 294 aa, Arabidopsis thaliana
  peptide (1)..(294): Ceres Seq. ID no. 13575019
MQMLDHPNAVALKHSFFSRTDNEEVYLNLVLEFVPETVNRVARSYSRTNQLMPLIYVKLYTYQICRALAYIHNSFGLCHRDIKPQNLLVNPHTHQLKICDFGSAKVLVKGEPNVSYICSRYYRAPELIFGASEYTTAIDIWSTGCVMAELLLGQPLFPGESGVDQLVEIIKVLGTPTREEIKCMNPNYTEFKFPQIKPHPWHKVFQKRLPPEAVDLLCRFFQYSPNLRCTALEACIHPLFDELRDPNTRLPNGRPLPPLFNFKPQELSGIPPEIVNRLVPEHARKQNLFMALHS

SEQ ID NO: 39329 - DNA, 1174 bp, Arabidopsis thaliana
  misc_feature (1)..(1174): Ceres Seq. ID no. 13488707
  misc_feature (1)..(1174): Ortholog of  Ceres SEQ ID NO 14311832 as cited in SEQ ID NO 59054
agaagaagaagaaccctttcgtcgtcaaggtctagctttctcaaatcctctctctctcgtttctccgattccgatatcaccgtctcctccaccggaaaatccataacgcgattaggtttttagcctagttccttaatctctggttattgattctttcaatttctgatcgatgacattgtccaagcgattggctctattgggagctcaatctgcgattactctcgctaaacctcgaggtctcggttcctctctcgggttacttgatcgtcgtccatttccgtatcgtcaattttctgagctcacgaaagctaatgggagacgtgcttttctcgttgatacattggctctggtgaggagtcttgaagctcaaggagttccatcgaaacaagctgaggcaataacttctgctattactgaggttttgaatgatagcttggaaaatgtctctgagtcttttgtgtcgaaagcggaaatgcagaagattgaaatgattcaagattcaaatttatcgaaatttaaatctgaagtcaaaagttctcaggagcatcattttactgtattgcaacgtgagactgaaaaattgagaggcgatatagagaagatgcgaagtgagctaaggtacgaaattgataaggtcacagcgggacaacgcttggatttgaatcttgaaagaggccgaatacgtgatgagctagctaatcagaataccgaaacaacaaacctcacaaacaagcttgacagggaaattcatgcgttgagagctcaattagaagcttcaaaatacgaagtcatcaaatattgcataggtacacttgtgtcgatttcagcagtgggactcgccgtccttcgtatcatgatttaaagtacgatcccaacactcaacactgctctctgcttacaggcttaaaagccaaattgataacttgtcatttttatttgaatcccatcaatatgccatattatttttttctggcgatcagagaatattattgtttctgtgatctattttgccatcatcctttctaggtgtcagggtttgaaaatttgcaccgagaattatgttaatccaaggattattggtttcttccatttgcattattagttttctagctccttatatgatatgtcaatgactcaatgttacaaattgtcccaactgattttgtttctaagc

SEQ ID NO: 39330 - protein, 230 aa, Arabidopsis thaliana
  peptide (1)..(230): Ceres Seq. ID no. 13488708
MTLSKRLALLGAQSAITLAKPRGLGSSLGLLDRRPFPYRQFSELTKANGRRAFLVDTLALVRSLEAQGVPSKQAEAITSAITEVLNDSLENVSESFVSKAEMQKIEMIQDSNLSKFKSEVKSSQEHHFTVLQRETEKLRGDIEKMRSELRYEIDKVTAGQRLDLNLERGRIRDELANQNTETTNLTNKLDREIHALRAQLEASKYEVIKYCIGTLVSISAVGLAVLRIMI

SEQ ID NO: 39331 - protein, 129 aa, Arabidopsis thaliana
  peptide (1)..(129): Ceres Seq. ID no. 13488709
MQKIEMIQDSNLSKFKSEVKSSQEHHFTVLQRETEKLRGDIEKMRSELRYEIDKVTAGQRLDLNLERGRIRDELANQNTETTNLTNKLDREIHALRAQLEASKYEVIKYCIGTLVSISAVGLAVLRIMI

SEQ ID NO: 39332 - protein, 124 aa, Arabidopsis thaliana
  peptide (1)..(124): Ceres Seq. ID no. 13488710
MIQDSNLSKFKSEVKSSQEHHFTVLQRETEKLRGDIEKMRSELRYEIDKVTAGQRLDLNLERGRIRDELANQNTETTNLTNKLDREIHALRAQLEASKYEVIKYCIGTLVSISAVGLAVLRIMI

SEQ ID NO: 39333 - DNA, 831 bp, Arabidopsis thaliana
  misc_feature (1)..(831): Ceres Seq. ID no. 12385287
  misc_feature (1)..(831): Ortholog of  Ceres SEQ ID NO 13638716 as cited in SEQ ID NO 51101
  misc_feature (1)..(831): Ortholog of  Ceres SEQ ID NO 14306010 as cited in SEQ ID NO 59330
  misc_feature (1)..(831): Ortholog of  Ceres SEQ ID NO 12627045 as cited in SEQ ID NO 67611
aatcaccgattgttctgagccggacgaaggagaggcagccgcctaagaagttgccgtcgtgcgccatggccgtgaaggcttctggattcattgggaaatcagcaatctctgttcatctagatttctcttcgtttcctgtgaaattttcatgcttgaaacagttttctgtatcttcaccaaagccactggtcgttttatccgttgccttatcgtcgccggcaagaacagttgagtctccgcctgttggttaccggaagaatgttgggatttgtctcgttagcccatgtagaaagatttttacggcgtcaaagattcacattccggatacatggcagatgcctcagggtggtgctgatgagggagaagatttgaggaacgctgcctttagagaactgagagaagaaacaggggttacttcggcagaattcattgcggagataccaaactggctgacctatgattttccccgagaagtaaaggacaaactaaaccggaaatggcgaacaagttacaaaggccaagctcagaagtggtttctctttaagttcacgggcaaggaagaagagataaatctccttggagacggtactgcaaaaccagagtttaaggtgtggtcgtggatgctaccggaacaagttattgaacatgctgtatatttcaagagacctgtttatgagcatgtcataaagcaattcaacccttattttgtggatgaagaaaaggattccatgaactcgtctaaggattgaatgtgcacaaagattcaccaagtgaatactgattagaagcaaatcaatcaattcattatactggtttctcttgaatctcatc

SEQ ID NO: 39334 - protein, 248 aa, Arabidopsis thaliana
  peptide (1)..(248): Ceres Seq. ID no. 12385288
SPIVLSRTKERQPPKKLPSCAMAVKASGFIGKSAISVHLDFSSFPVKFSCLKQFSVSSPKPLVVLSVALSSPARTVESPPVGYRKNVGICLVSPCRKIFTASKIHIPDTWQMPQGGADEGEDLRNAAFRELREETGVTSAEFIAEIPNWLTYDFPREVKDKLNRKWRTSYKGQAQKWFLFKFTGKEEEINLLGDGTAKPEFKVWSWMLPEQVIEHAVYFKRPVYEHVIKQFNPYFVDEEKDSMNSSKD

SEQ ID NO: 39335 - protein, 227 aa, Arabidopsis thaliana
  peptide (1)..(227): Ceres Seq. ID no. 12385289
MAVKASGFIGKSAISVHLDFSSFPVKFSCLKQFSVSSPKPLVVLSVALSSPARTVESPPVGYRKNVGICLVSPCRKIFTASKIHIPDTWQMPQGGADEGEDLRNAAFRELREETGVTSAEFIAEIPNWLTYDFPREVKDKLNRKWRTSYKGQAQKWFLFKFTGKEEEINLLGDGTAKPEFKVWSWMLPEQVIEHAVYFKRPVYEHVIKQFNPYFVDEEKDSMNSSKD

SEQ ID NO: 39336 - protein, 137 aa, Arabidopsis thaliana
  peptide (1)..(137): Ceres Seq. ID no. 12385290
MPQGGADEGEDLRNAAFRELREETGVTSAEFIAEIPNWLTYDFPREVKDKLNRKWRTSYKGQAQKWFLFKFTGKEEEINLLGDGTAKPEFKVWSWMLPEQVIEHAVYFKRPVYEHVIKQFNPYFVDEEKDSMNSSKD

SEQ ID NO: 39337 - DNA, 1180 bp, Arabidopsis thaliana; identical to SEQ ID NO: 23631
  misc_feature (1)..(1180): Ceres Seq. ID no. 12330478
  misc_feature (1)..(1180): Ortholog of  Ceres SEQ ID NO 14306066 as cited in SEQ ID NO 57378

SEQ ID NO: 39338 - protein, 254 aa, Arabidopsis thaliana; identical to SEQ ID NO: 23632
  peptide (1)..(254): Ceres Seq. ID no. 12330479

SEQ ID NO: 39339 - protein, 231 aa, Arabidopsis thaliana; identical to SEQ ID NO: 23633
  peptide (1)..(231): Ceres Seq. ID no. 12330480

SEQ ID NO: 39340 - protein, 227 aa, Arabidopsis thaliana; identical to SEQ ID NO: 23634
  peptide (1)..(227): Ceres Seq. ID no. 12330481

SEQ ID NO: 39341 - DNA, 929 bp, Arabidopsis thaliana
  misc_feature (1)..(929): Ceres Seq. ID no. 12325534
  misc_feature (1)..(929): Ortholog of  Ceres SEQ ID NO 13638835 as cited in SEQ ID NO 52005
  misc_feature (1)..(929): Ortholog of  Ceres SEQ ID NO 12614289 as cited in SEQ ID NO 68735
  misc_feature (1)..(929): Ortholog of  Ceres SEQ ID NO 14309007 as cited in SEQ ID NO 0
attcccaccattagggctctctctaaattcctcagtctcgtgagaatcgtcatcgtcttcacggagctcactcgaagatgttaacggcagatataccaccgaatcattcaatctacatccaaaacctcaatgaaaggatcaagaaagaggaattgaagagatctctttactgtttgttctctcagtttgggagaatacttgatgtggttgctttgaagactccgaagctccgaggacaagcttgggttacttttagtgaagtcactgctgctggtcatgctgttcgtcagatgcaaaattttcccttctatgataaaccaatgcgcttacaatatgcaaaagcaaagtcagattgtctagctaaagctgagggaactttcgttccaaaagataagaagaggaagcaagaagaaaaagttgaaagaaagcgtgaagaatcccaacgaccaaacacagctaatggtccaagtgctaatggtccaagtgccaataacggagtccctgcgccttcgttccagccgagcgggcaagaaacaatgccaccaaacaacatactcttcattcagaatctcccacacgagacaacaagcatgatgctccagcttctcttcgaacagtaccctggattcaaagagataagaatgatcgacgcaaaaccaggaatcgcgtttgtagagtacgaagacgatgttcaagcttccatagctatgcaacctcttcaaggtttcaaaatcactccccagaatccaatggtcatctctttcgccaagaaatgataagagtcttgtttttgtttgtttgttgtcctttaagacgatagtactggaccaaccaaacctggtgtgtataaccaaccaacggttctattggttaacggattaatccggttttggtttaatcattgaaagagacccttgaaacgcggtttc

SEQ ID NO: 39342 - protein, 232 aa, Arabidopsis thaliana; identical to SEQ ID NO: 22953
  peptide (1)..(232): Ceres Seq. ID no. 12325535

SEQ ID NO: 39343 - protein, 161 aa, Arabidopsis thaliana; identical to SEQ ID NO: 22954
  peptide (1)..(161): Ceres Seq. ID no. 12325536

SEQ ID NO: 39344 - protein, 151 aa, Arabidopsis thaliana; identical to SEQ ID NO: 22955
  peptide (1)..(151): Ceres Seq. ID no. 12325537

SEQ ID NO: 39345 - DNA, 1431 bp, Arabidopsis thaliana
  misc_feature (1)..(1431): Ceres Seq. ID no. 12328852
  misc_feature (1)..(1431): Ortholog of  Ceres SEQ ID NO 13596911 as cited in SEQ ID NO 60640
aaattgggttaagtcaattgttgtcactatagatgtttagttctacaactctgcatcatcttcctcgtccgaatcttcttcttcccagctctcgtgtctgcaggaaagttatttcgagaagaatgagtacgaatcctgcaattgaaccaaaagttcgcaaatttgaatctgttgaaggagttgatattggttcaagaaataaatccgatggtatcagattccgtcttgtttcatataacatattagctcaggtttatgtgaagagtgcacttctcccacactctccacctgcctgtctcaaatggaaagctcgttcacatgcaattctcagcgttctcaaaaatctccaggctgatttcttttgtctgcaggaagtagatgagtacgatagcttttacagaaataacatggactctctgggatattctgggatttatattcagagaaccggccagaggaagcgtgatggttgtgcaatcttctacaagccaagctgtgcagagttagtcacaaaggaacggatcgaatataatgatcttgtggactcaataaaagcagatagtgtttcctgcagcgaacagaagattgagacatccaacgaaggaaaaggtgatgagaaagcgaaagattctcgaaaagacagtcgtgaccttaatgatccactagtgagactaaaacgtgattgcgttggaataatggctgcttttaggatcaacaagccgtttcagcatatcgttatcgtggcaaacacacatctttactgggaccctgaattggctgatgtcaagcttgctcaagccaagtatctactgtcacgactagctcagttcaaaacactaatatcagatgaatttgagtgcacaccttcattgctactagctggcgacttcaattcaattcctggggatatggtttatagttacctagtatcgggtaatgctaaacccacagagaccatagaagaagaagaagctccagttcctctgtctagtgtctatgaagtcacaagaggagagcctaagttcacaaattgcactcctggcttcacaaacacacttgactacatcttcatctctccttcagacttcatcaaacctgtgagtatccttcaactacctgagccggattctccagatgttgtcggtttcttaccgaatcatcatcacccgagtgatcatttacctataggagctgagtttgagattcgtcgggaataggaagtttcgttctttagaaagttttgtcgcataactccattgtttcagcatttgaatatggttcttgtagaaatcatgaagcagtgaatcatacacacacaacacaaagtattaaaggacttggatcatttttgtctcgataaactcgaaatcgttgtgtgcattgaattactgagaatatttgaattttcttgagaagaaattgtttaatgtc

SEQ ID NO: 39346 - protein, 394 aa, Arabidopsis thaliana
  peptide (1)..(394): Ceres Seq. ID no. 12328853
MFSSTTLHHLPRPNLLLPSSRVCRKVISRRMSTNPAIEPKVRKFESVEGVDIGSRNKSDGIRFRLVSYNILAQVYVKSALLPHSPPACLKWKARSHAILSVLKNLQADFFCLQEVDEYDSFYRNNMDSLGYSGIYIQRTGQRKRDGCAIFYKPSCAELVTKERIEYNDLVDSIKADSVSCSEQKIETSNEGKGDEKAKDSRKDSRDLNDPLVRLKRDCVGIMAAFRINKPFQHIVIVANTHLYWDPELADVKLAQAKYLLSRLAQFKTLISDEFECTPSLLLAGDFNSIPGDMVYSYLVSGNAKPTETIEEEEAPVPLSSVYEVTRGEPKFTNCTPGFTNTLDYIFISPSDFIKPVSILQLPEPDSPDVVGFLPNHHHPSDHLPIGAEFEIRRE

SEQ ID NO: 39347 - protein, 364 aa, Arabidopsis thaliana
  peptide (1)..(364): Ceres Seq. ID no. 12328854
MSTNPAIEPKVRKFESVEGVDIGSRNKSDGIRFRLVSYNILAQVYVKSALLPHSPPACLKWKARSHAILSVLKNLQADFFCLQEVDEYDSFYRNNMDSLGYSGIYIQRTGQRKRDGCAIFYKPSCAELVTKERIEYNDLVDSIKADSVSCSEQKIETSNEGKGDEKAKDSRKDSRDLNDPLVRLKRDCVGIMAAFRINKPFQHIVIVANTHLYWDPELADVKLAQAKYLLSRLAQFKTLISDEFECTPSLLLAGDFNSIPGDMVYSYLVSGNAKPTETIEEEEAPVPLSSVYEVTRGEPKFTNCTPGFTNTLDYIFISPSDFIKPVSILQLPEPDSPDVVGFLPNHHHPSDHLPIGAEFEIRRE

SEQ ID NO: 39348 - protein, 269 aa, Arabidopsis thaliana
  peptide (1)..(269): Ceres Seq. ID no. 12328855
MDSLGYSGIYIQRTGQRKRDGCAIFYKPSCAELVTKERIEYNDLVDSIKADSVSCSEQKIETSNEGKGDEKAKDSRKDSRDLNDPLVRLKRDCVGIMAAFRINKPFQHIVIVANTHLYWDPELADVKLAQAKYLLSRLAQFKTLISDEFECTPSLLLAGDFNSIPGDMVYSYLVSGNAKPTETIEEEEAPVPLSSVYEVTRGEPKFTNCTPGFTNTLDYIFISPSDFIKPVSILQLPEPDSPDVVGFLPNHHHPSDHLPIGAEFEIRRE

SEQ ID NO: 39349 - DNA, 1279 bp, Arabidopsis thaliana
  misc_feature (1)..(1279): Ceres Seq. ID no. 13491536
  misc_feature (1)..(1279): Ortholog of  Ceres SEQ ID NO 14316128 as cited in SEQ ID NO 52380
acaatcacttgtctgattctctcatataatagagttttctttctattctcctctgcttaatttcccagaaattactctttctgtgcttatcggattcaatagattcttagtaaatcgtaatggagacaccatcatcgacaagaagagtcacgagatctcagacccgctgtgctatcaataatctcttatcctcaaagaaagcggatgattggtcagataaatgtcaatcgaagtcggtacaaagaaacggtgcaaaagacaggtctgcgttgtttgacataaccaacgactcaccgatcgtaggtctggcgatgcagacaccgtcctcaggagttgttgggaagaggaacatgagcagaatcaataacactcctggatctggtgaggctctcttgagaggccaagtcaagactctcttgcagaaggttgaggaagaagcagatctcaccaagatttcgttggaatctcgtcctttcatccatctcgttacttctcccatgggtcttctcgccccaactccggccaacaccccccaagttcttggtttctcagacgaagtgcaggttgtgatcacttctccggtagttgcaggacaattcagagcaccgtctcaggtggtggaaagcaacatgtttgatgagaaagaagaaagcttggagttagagaagagcccgagcattactcggtcattgcttctggactttagtgataaatcagaattatgggagagctcagactgctcatctgtggtgactcaaaacccagaggatgataactcgtcggtgtggtcgatgcaggccaatgcaagtgccaaagacgaagagtatgatgatgaagaggaagaagcctattcttacggtgaggaatatgatgaggaatactacgacgaggaagaggaggaagaagagggagggattgtggatgggttgtgtgagggaattaggaagatgagcgtagagactgactttgcagggaaacacactagatttgtgtatgacagtgaagatgaagagattgtggaggccaaagatcaatctccaggagtgttgcgtttgaaaggctttcctacaccgacaggaaaacatgtcagatttgccggtgatgaatgagttcagtttgaatctttcttcttggagttgtgacaaaaagcctcatatgtctcgactttttttttttttttcttgttgttgcttgaagattcacaaatctgattcttgttattaccttgttgttatttttcaataactaaaagtgtaatcggaatatgactcttttcatt

SEQ ID NO: 39350 - protein, 329 aa, Arabidopsis thaliana
  peptide (1)..(329): Ceres Seq. ID no. 13491537
METPSSTRRVTRSQTRCAINNLLSSKKADDWSDKCQSKSVQRNGAKDRSALFDITNDSPIVGLAMQTPSSGVVGKRNMSRINNTPGSGEALLRGQVKTLLQKVEEEADLTKISLESRPFIHLVTSPMGLLAPTPANTPQVLGFSDEVQVVITSPVVAGQFRAPSQVVESNMFDEKEESLELEKSPSITRSLLLDFSDKSELWESSDCSSVVTQNPEDDNSSVWSMQANASAKDEEYDDEEEEAYSYGEEYDEEYYDEEEEEEEGGIVDGLCEGIRKMSVETDFAGKHTRFVYDSEDEEIVEAKDQSPGVLRLKGFPTPTGKHVRFAGDE

SEQ ID NO: 39351 - protein, 265 aa, Arabidopsis thaliana
  peptide (1)..(265): Ceres Seq. ID no. 13491538
MQTPSSGVVGKRNMSRINNTPGSGEALLRGQVKTLLQKVEEEADLTKISLESRPFIHLVTSPMGLLAPTPANTPQVLGFSDEVQVVITSPVVAGQFRAPSQVVESNMFDEKEESLELEKSPSITRSLLLDFSDKSELWESSDCSSVVTQNPEDDNSSVWSMQANASAKDEEYDDEEEEAYSYGEEYDEEYYDEEEEEEEGGIVDGLCEGIRKMSVETDFAGKHTRFVYDSEDEEIVEAKDQSPGVLRLKGFPTPTGKHVRFAGDE

SEQ ID NO: 39352 - protein, 252 aa, Arabidopsis thaliana
  peptide (1)..(252): Ceres Seq. ID no. 13491539
MSRINNTPGSGEALLRGQVKTLLQKVEEEADLTKISLESRPFIHLVTSPMGLLAPTPANTPQVLGFSDEVQVVITSPVVAGQFRAPSQVVESNMFDEKEESLELEKSPSITRSLLLDFSDKSELWESSDCSSVVTQNPEDDNSSVWSMQANASAKDEEYDDEEEEAYSYGEEYDEEYYDEEEEEEEGGIVDGLCEGIRKMSVETDFAGKHTRFVYDSEDEEIVEAKDQSPGVLRLKGFPTPTGKHVRFAGDE

SEQ ID NO: 39353 - DNA, 1335 bp, Arabidopsis thaliana
  misc_feature (1)..(1335): Ceres Seq. ID no. 12330247
  misc_feature (1)..(1335): Ortholog of  Ceres SEQ ID NO 15169244 as cited in SEQ ID NO 58988
acactcctctccttcttctttacacctctccaatggtaaaatctctcattcactaactttctctgcttctctctatctttctctgtgcataccaactctaaagtctctcatcaatggcggctcgaaaactagggtcgttgttacgtcaatactttttctctctatgcttcctcttcctcggttgcttcttcttccctaaagacgcagactataaacaaaagagaagaaagaagaagcttagaagagtttcttcttcttctggttcatctctatcctcttcttggacgtatttaaaacgagttttcttatccacgacaaggatatccaaatcccgtaaccaaacacatcctaacgttactttaacatccgcaagatcatctcaaaactccctcgtcactctcgtccaacccgataccacaaaccaacccgacccggaaacacgtattcatcagcaaaccgaattcgagatctcctcttccgacgagattttcccttgtaactcgtgtggcgagattttcccaaaaatcaatctcctcgagaatcacatcgcgatcaaacacgccgtgtcggagctaatcgccggagaatcaagcacgaacatcgtcaagatcatattcaaatctggttggccggagcaaggtaattacaaatctccggtgatcaatcgaatcttaaaaatccacaacagttcaaagattctcaccagattcgaagagtatcgtgagttcgtgaaagctaaagccgctcgtagcaacggcggtggaagacggtgggacgatgaacgttgcgtcgccgacggaaacgaacttttacgattttactgctcgacgtttatgtgtgatttagggcaaaacggtaaatcaaatctctgtggtcatcagtattgtagtatctgtggtatcatcggatctggattctcgccgaagctcgacgggatcgcgacgttggcgacggggtggagaggacacgtggcggttccggaggaggttgaagaagagtttgggtttatgaatgtgaaacgggccatgttggtttgtcgggttgtagcgggtcgggtcgggtgtgatttgattgatgatgatgacgtggataagagtgatggtggagggtatgattctctggttgggcagagtgggaacaagagtggggctctgttgaggatcgacgatgatgagcttttggtttttaatccaagggctgtgcttccttgttttgttattgtgtatactgtgtaaccggatttgtgatcctgtgtgtttttgtttatattttgttacaattgtgaagtgtgaaacgctttaggtttgtttggaaaatggtaaaatctttgtggtg

SEQ ID NO: 39354 - protein, 373 aa, Arabidopsis thaliana
  peptide (1)..(373): Ceres Seq. ID no. 12330248
MAARKLGSLLRQYFFSLCFLFLGCFFFPKDADYKQKRRKKKLRRVSSSSGSSLSSSWTYLKRVFLSTTRISKSRNQTHPNVTLTSARSSQNSLVTLVQPDTTNQPDPETRIHQQTEFEISSSDEIFPCNSCGEIFPKINLLENHIAIKHAVSELIAGESSTNIVKIIFKSGWPEQGNYKSPVINRILKIHNSSKILTRFEEYREFVKAKAARSNGGGRRWDDERCVADGNELLRFYCSTFMCDLGQNGKSNLCGHQYCSICGIIGSGFSPKLDGIATLATGWRGHVAVPEEVEEEFGFMNVKRAMLVCRVVAGRVGCDLIDDDDVDKSDGGGYDSLVGQSGNKSGALLRIDDDELLVFNPRAVLPCFVIVYTV

SEQ ID NO: 39355 - DNA, 1854 bp, Arabidopsis thaliana
  misc_feature (1)..(1854): Ceres Seq. ID no. 12330847
  misc_feature (1)..(1854): Ortholog of  Ceres SEQ ID NO 14308455 as cited in SEQ ID NO 55108
caataggcgttgattcttcttttgttggattccaacaatattactcagaccctccgtatgaaagtgctgcatcttcgcctacttatgttccatatgttattcagcctgatatggtctcgaatagttcaacagactctttggtagcgaatggtggtcaatctgatggaagaggatccatgcagagaaatggttcagcaattgccggactcccaaaagatgctccaaagtctaccactactggccagtataaacagccaggaatccccaagaatgtttccacaacagcttctgcacattctctccagggaaaaactgcttacgcgaacacactcttgccttatgggaaatcagacattgctaatggggtctcatcaattgcttcatatagttataaaccttgttccaagatttatgataccagaggtgataacaacacaactggaagtacatatacgagtgaacaaaatcgaggatcgagaacgagaagatcaagaaatcaactaattgtcaaagcatatacaaccaaagctggaaatgctgatgcggaaggaaatattgtgataaatcctgatcgatataataaagaagatttcagtattgaatacagcgatgccaggttttttgtgattaagtcgtatagtgaagatgatgttcacaagagcatcaaatatggtgtctggtcatctacattgaatgggaacaagaaattgcagagtgtatatgaagatgctcagagaatagccactgagaagtctcgtgaatgtcctattttcttattcttttctgtcaattccagtggtctgttctgtggcgtggctgagatgaccggtccagtttccttcgaccgagacatggatttttggcagcaagacaaatggagtggaagctttcctgtcaagtggcacattattaaagatgttcctaatagctatttcaggcacattattttacataataacgagaataagccagtgaccaacagccgagacacacaagagataatactgaaacaaggactcgaggtgctaaaactattcaaacatcatgcggaaaagacttcactattagatgattttatgtactacgaagaccgccagagactcatgcaggaagagagagctagacttccatttaggacctttcgcaggccatttcccgtgctcaatctagatttttctgacagaagcaagaaaagctccaaggatgtcggtaagaagccttcagtgacctctgcagaaacaaaggttgtgcaattaaaaaactcagatggggatgaaaagagcaatacacaggaagcaacagacgaaactactccttccactctgaagtttggctctctcgccattaaaccaactgctggtaccacctttaacccaacccaagccaagcctaaaccgaccccatctctcggctctgaccacaagtcagactcttctgaagaggttactgggtctctggctgatgacattgtcagtgtaggatcgttgcccataaaagtaaagggatctaaagaattatcctccaagatcgcagcggtgggtacaagtcctctctcaactcaagatcagttcagaagtaaaccagggttttgacattgtctttgtctaacttgtttatgcataatagaaagcatggtcgatatggttcgagaaagagaaagagattgagtatgtatagattggttggttttaccttttaaatggtctgattggtcgtttgagaatccttgtttatcgtctcagtttggacaaatgattgttgccagtggttgcgttttggtttgttgggtttgattaaacagttggttccgtcttttgatcgaaatttatgtgtttgtcatgctatattaatgtt

SEQ ID NO: 39356 - protein, 529 aa, Arabidopsis thaliana
  peptide (1)..(529): Ceres Seq. ID no. 12330848
IGVDSSFVGFQQYYSDPPYESAASSPTYVPYVIQPDMVSNSSTDSLVANGGQSDGRGSMQRNGSAIAGLPKDAPKSTTTGQYKQPGIPKNVSTTASAHSLQGKTAYANTLLPYGKSDIANGVSSIASYSYKPCSKIYDTRGDNNTTGSTYTSEQNRGSRTRRSRNQLIVKAYTTKAGNADAEGNIVINPDRYNKEDFSIEYSDARFFVIKSYSEDDVHKSIKYGVWSSTLNGNKKLQSVYEDAQRIATEKSRECPIFLFFSVNSSGLFCGVAEMTGPVSFDRDMDFWQQDKWSGSFPVKWHIIKDVPNSYFRHIILHNNENKPVTNSRDTQEIILKQGLEVLKLFKHHAEKTSLLDDFMYYEDRQRLMQEERARLPFRTFRRPFPVLNLDFSDRSKKSSKDVGKKPSVTSAETKVVQLKNSDGDEKSNTQEATDETTPSTLKFGSLAIKPTAGTTFNPTQAKPKPTPSLGSDHKSDSSEEVTGSLADDIVSVGSLPIKVKGSKELSSKIAAVGTSPLSTQDQFRSKPGF

SEQ ID NO: 39357 - protein, 493 aa, Arabidopsis thaliana
  peptide (1)..(493): Ceres Seq. ID no. 12330849
MVSNSSTDSLVANGGQSDGRGSMQRNGSAIAGLPKDAPKSTTTGQYKQPGIPKNVSTTASAHSLQGKTAYANTLLPYGKSDIANGVSSIASYSYKPCSKIYDTRGDNNTTGSTYTSEQNRGSRTRRSRNQLIVKAYTTKAGNADAEGNIVINPDRYNKEDFSIEYSDARFFVIKSYSEDDVHKSIKYGVWSSTLNGNKKLQSVYEDAQRIATEKSRECPIFLFFSVNSSGLFCGVAEMTGPVSFDRDMDFWQQDKWSGSFPVKWHIIKDVPNSYFRHIILHNNENKPVTNSRDTQEIILKQGLEVLKLFKHHAEKTSLLDDFMYYEDRQRLMQEERARLPFRTFRRPFPVLNLDFSDRSKKSSKDVGKKPSVTSAETKVVQLKNSDGDEKSNTQEATDETTPSTLKFGSLAIKPTAGTTFNPTQAKPKPTPSLGSDHKSDSSEEVTGSLADDIVSVGSLPIKVKGSKELSSKIAAVGTSPLSTQDQFRSKPGF

SEQ ID NO: 39358 - protein, 471 aa, Arabidopsis thaliana
  peptide (1)..(471): Ceres Seq. ID no. 12330850
MQRNGSAIAGLPKDAPKSTTTGQYKQPGIPKNVSTTASAHSLQGKTAYANTLLPYGKSDIANGVSSIASYSYKPCSKIYDTRGDNNTTGSTYTSEQNRGSRTRRSRNQLIVKAYTTKAGNADAEGNIVINPDRYNKEDFSIEYSDARFFVIKSYSEDDVHKSIKYGVWSSTLNGNKKLQSVYEDAQRIATEKSRECPIFLFFSVNSSGLFCGVAEMTGPVSFDRDMDFWQQDKWSGSFPVKWHIIKDVPNSYFRHIILHNNENKPVTNSRDTQEIILKQGLEVLKLFKHHAEKTSLLDDFMYYEDRQRLMQEERARLPFRTFRRPFPVLNLDFSDRSKKSSKDVGKKPSVTSAETKVVQLKNSDGDEKSNTQEATDETTPSTLKFGSLAIKPTAGTTFNPTQAKPKPTPSLGSDHKSDSSEEVTGSLADDIVSVGSLPIKVKGSKELSSKIAAVGTSPLSTQDQFRSKPGF

SEQ ID NO: 39359 - DNA, 1562 bp, Arabidopsis thaliana
  misc_feature (1)..(1562): Ceres Seq. ID no. 12395256
  misc_feature (1)..(1562): Ortholog of  Ceres SEQ ID NO 15178767 as cited in SEQ ID NO 55317
attcgcttttctgaatcctttagagtattgttttctccgtcgaattcgcatgaacacttgagctcaacaagacggcgtggaagtggacggtgaggtagttttttttagtttttgaaagacatggcgcaaaacgggtacttggttccagcggatccttcggcggttgtgacggtgaagaagaaaacgccacaagcgtcgtgggctcttattgacgcgacgggacagagtgagccactcgatgttgataagtatgagatcatgcaccgtgtccagatccacgctcgcgatctccggattctagaccccaatttatcttacccttccactattcttggccgagagagagccattgttctcaatttggagcatatcaaggctattatcacttccgaagaggttttgcttcgggatccgtctgatgaaaatgttattccagttgtggaggagcttcgaagacgcttacctgttggaaatgcatcacacaatggtggtcaaggagacgggaaagagatcgcaggtgctcaaaacgacggtgatactggtgacgaagatgaatccccatttgaatttcgggcgctggaagtagctttggaagcaatctgtagcttcttagctgcaaggacagcagaattagaaacagctgcttatcctgctttggatgagcttacctcaaagatcagtagccgtaatttggatagagttcggaaattgaagagtgccatgactcggttgacagctcgggttcaaaaggtaagagatgaactcgaacagttgctggatgatgacgatgatatggcagatctttacctttcaaggaaactttcaagtgcttcctcaccgattagtagtattggtgaaccaaattggtatactacttccccaacaataggctctaagatttcaagagcaagtagagcgagtttagccacagttcatggggatgagaatgatgttgaagaacttgaaatgttactcgaggcatacttcatgcagatcgacagcactttgaacagattaacaacactacgtgagtatattgatgacacagaggactacattaacatccagcttgacaatcatcggaatcagcttattcagttggagctagtgttaagttctggaacagtttgcttatcgatgtactctcttgtcgctggaattttcgggatgaacattccatacacatggaacgacggtcatggatacatgttcaaatacgtggtgggcttgacggggacactttgtgtagtcgtgtttgtgatcataatgtcgtacgctaggtacaaaggacttgtgggatcttgatggctgaatttgggttagatggagagattgtgaaggggcattgggcagatcttgttttcgattattatacttgtggtcgttctgagttttgaacgagcttcacaattattttagttgtcgcatcataaaatttaatcaaacatattgaaaaaagcagaagcattgtgacttgtaattgcaaagataagctctaccatcgattccttacaattagagcatagaaatcaaatttaggatccttgattccttattagctc

SEQ ID NO: 39360 - protein, 394 aa, Arabidopsis thaliana
  peptide (1)..(394): Ceres Seq. ID no. 12395257
MAQNGYLVPADPSAVVTVKKKTPQASWALIDATGQSEPLDVDKYEIMHRVQIHARDLRILDPNLSYPSTILGRERAIVLNLEHIKAIITSEEVLLRDPSDENVIPVVEELRRRLPVGNASHNGGQGDGKEIAGAQNDGDTGDEDESPFEFRALEVALEAICSFLAARTAELETAAYPALDELTSKISSRNLDRVRKLKSAMTRLTARVQKVRDELEQLLDDDDDMADLYLSRKLSSASSPISSIGEPNWYTTSPTIGSKISRASRASLATVHGDENDVEELEMLLEAYFMQIDSTLNRLTTLREYIDDTEDYINIQLDNHRNQLIQLELVLSSGTVCLSMYSLVAGIFGMNIPYTWNDGHGYMFKYVVGLTGTLCVVVFVIIMSYARYKGLVGS

SEQ ID NO: 39361 - protein, 348 aa, Arabidopsis thaliana
  peptide (1)..(348): Ceres Seq. ID no. 12395258
MHRVQIHARDLRILDPNLSYPSTILGRERAIVLNLEHIKAIITSEEVLLRDPSDENVIPVVEELRRRLPVGNASHNGGQGDGKEIAGAQNDGDTGDEDESPFEFRALEVALEAICSFLAARTAELETAAYPALDELTSKISSRNLDRVRKLKSAMTRLTARVQKVRDELEQLLDDDDDMADLYLSRKLSSASSPISSIGEPNWYTTSPTIGSKISRASRASLATVHGDENDVEELEMLLEAYFMQIDSTLNRLTTLREYIDDTEDYINIQLDNHRNQLIQLELVLSSGTVCLSMYSLVAGIFGMNIPYTWNDGHGYMFKYVVGLTGTLCVVVFVIIMSYARYKGLVGS

SEQ ID NO: 39362 - DNA, 1376 bp, Arabidopsis thaliana; identical to SEQ ID NO: 27480
  misc_feature (1)..(1376): Ceres Seq. ID no. 13575406
  misc_feature (1)..(1376): Ortholog of  Ceres SEQ ID NO 14301568 as cited in SEQ ID NO 66744

SEQ ID NO: 39363 - protein, 326 aa, Arabidopsis thaliana; identical to SEQ ID NO: 27481
  peptide (1)..(326): Ceres Seq. ID no. 13575407

SEQ ID NO: 39364 - protein, 318 aa, Arabidopsis thaliana; identical to SEQ ID NO: 27482
  peptide (1)..(318): Ceres Seq. ID no. 13575408

SEQ ID NO: 39365 - protein, 268 aa, Arabidopsis thaliana; identical to SEQ ID NO: 27483
  peptide (1)..(268): Ceres Seq. ID no. 13575409

SEQ ID NO: 39366 - DNA, 1191 bp, Arabidopsis thaliana
  misc_feature (1)..(1191): Ceres Seq. ID no. 13489080
  misc_feature (1)..(1191): Ortholog of  Ceres SEQ ID NO 12613953 as cited in SEQ ID NO 68388
aaaatctctcgctctgttacgccattttcgtgagtaagaagaagaaaccctaagagtctctccccaaaacctcaaaccatggccgagggactcgtattgaagggcattatgcgcgcccacaccgacattgtcacggccatcgctacgccgatcgacaattccgacatcatcgtcacagcgtcgcgtgacaaatcaatcatcctctggaaactcacaaaggacgagaagtcttacggtgttgctcagcgtaggctcacaggtcactctcacttcgtggaagatgttgttctctcatcggacggtcagtttgcactctccggaagttgggacggtgagctccgtctctgggatctcgccacgggagaaacaactcgtcgattcgttggtcacacgaaagatgtgctctctgttgctttctctactgataaccgtcagatcgtgtctgcttctcgtgatcgtacgattaagctttggaacacacttggtgagtgcaagtataccatctctgaaggtgatggtcacaaggaatgggttagttgtgttaggtttagtcctaatactcttgtaccaactattgtatctgcttcttgggataaaactgtgaaagtttggaatctccagaactgtaagctgaggaactctcttgttggtcactctggttacctcaacactgttgctgtctcgcctgatggttcgctatgcgccagtggtgggaaagatggtgttatcttgttgtgggatttggctgaaggaaagaagctttactcgcttgaggctggttcgattattcactcgctttgcttcagtcctaacagatactggttgtgtgctgctactgagaatagcattaggatttgggatcttgagagcaagtctgttgttgaggacttgaaggttgatctcaagtctgaggcagagaagaatgaaggtggtgttggaactggtaaccagaagaaggttatctactgcacaagcttgaactggagtgcagatggaagcacattgttcagtggttacactgatggagttgtcagggtctggggtattggtcgttactagagatcacaacaagatgaagaagaagtcacgaaatctccggaaaaaagtagctgcttttaatttttccagactgcgtcagtattgtattagtctctcgcaaacttctattttggcaatttttgtttaatttcc

SEQ ID NO: 39367 - protein, 326 aa, Arabidopsis thaliana
  peptide (1)..(326): Ceres Seq. ID no. 13489081
MAEGLVLKGIMRAHTDIVTAIATPIDNSDIIVTASRDKSIILWKLTKDEKSYGVAQRRLTGHSHFVEDVVLSSDGQFALSGSWDGELRLWDLATGETTRRFVGHTKDVLSVAFSTDNRQIVSASRDRTIKLWNTLGECKYTISEGDGHKEWVSCVRFSPNTLVPTIVSASWDKTVKVWNLQNCKLRNSLVGHSGYLNTVAVSPDGSLCASGGKDGVILLWDLAEGKKLYSLEAGSIIHSLCFSPNRYWLCAATENSIRIWDLESKSVVEDLKVDLKSEAEKNEGGVGTGNQKKVIYCTSLNWSADGSTLFSGYTDGVVRVWGIGRY

SEQ ID NO: 39368 - protein, 316 aa, Arabidopsis thaliana
  peptide (1)..(316): Ceres Seq. ID no. 13489082
MRAHTDIVTAIATPIDNSDIIVTASRDKSIILWKLTKDEKSYGVAQRRLTGHSHFVEDVVLSSDGQFALSGSWDGELRLWDLATGETTRRFVGHTKDVLSVAFSTDNRQIVSASRDRTIKLWNTLGECKYTISEGDGHKEWVSCVRFSPNTLVPTIVSASWDKTVKVWNLQNCKLRNSLVGHSGYLNTVAVSPDGSLCASGGKDGVILLWDLAEGKKLYSLEAGSIIHSLCFSPNRYWLCAATENSIRIWDLESKSVVEDLKVDLKSEAEKNEGGVGTGNQKKVIYCTSLNWSADGSTLFSGYTDGVVRVWGIGRY

SEQ ID NO: 39369 - DNA, 1004 bp, Arabidopsis thaliana
  misc_feature (1)..(1004): Ceres Seq. ID no. 12559953
  misc_feature (1)..(1004): Ortholog of  Ceres SEQ ID NO 14314823 as cited in SEQ ID NO 52565
  misc_feature (1)..(1004): Ortholog of  Ceres SEQ ID NO 14307324 as cited in SEQ ID NO 54131
  misc_feature (1)..(1004): Ortholog of  Ceres SEQ ID NO 14303336 as cited in SEQ ID NO 54567
  misc_feature (1)..(1004): Ortholog of  Ceres SEQ ID NO 13594940 as cited in SEQ ID NO 55819
  misc_feature (1)..(1004): Ortholog of  Ceres SEQ ID NO 13599083 as cited in SEQ ID NO 0
aagatcatggtggggttttttattttctccttatcaagaatcctctgatcagtcaaatacccatcaatcaatcaaatccccaaacactcccaaaaaaagatcagcttccaatatttttccccttcttacaaaaaagatgtctatgtcgtctatgtcctccccttcctcagctgtttgttcaccggaccacttctctccttccgaccatctctgctatgtccaatgcaacttttgccaaaccatccttgcggttaatgttccttacacaagcttgttcaagaccgtaactgtccgatgtggttgctgtaccaatctcctttcggtgaacatgagatcatatgtcctcccagcttctaaccagctccagctccagctcggtcctcactcttacttcaatccccaggatattctggaggagctgagagatgcaccgtctaacatgaatatgatgatgatgaatcaacatcctactatgaatgacataccatctttcatggatcttcatcaacaacatgagattcctaaagcaccacccgttaaccgccctccagagaaaagacagagagtcccatccgcatataaccgattcatcaaggaggagatccaacgtatcaaagctggtaatcctgatataagccacagagaagcctttagtgctgctgccaagaattgggcccacttcccccacatacacttcgggctcgtgccagacaatcaacccgtgaagaaaaccaacatgccccaacaggagggagaggataacatggtgatgaaagaagggttctacgctcctgcagctgctaacgttggtgtgactccttattaaagagataaatataatcgactaagtatttgaggaattgaaatccaatttcttagggtttatcatgtccaaaagttgtggtttcttttcctttcttgaacttatttatatatattataaatatgcatgtgtctttttctgttgttgtaatcaaaaatcttgctaattaatggggtttctt

SEQ ID NO: 39370 - protein, 274 aa, Arabidopsis thaliana
  peptide (1)..(274): Ceres Seq. ID no. 12559954
RSWWGFLFSPYQESSDQSNTHQSIKSPNTPKKRSASNIFPLLTKKMSMSSMSSPSSAVCSPDHFSPSDHLCYVQCNFCQTILAVNVPYTSLFKTVTVRCGCCTNLLSVNMRSYVLPASNQLQLQLGPHSYFNPQDILEELRDAPSNMNMMMMNQHPTMNDIPSFMDLHQQHEIPKAPPVNRPPEKRQRVPSAYNRFIKEEIQRIKAGNPDISHREAFSAAAKNWAHFPHIHFGLVPDNQPVKKTNMPQQEGEDNMVMKEGFYAPAAANVGVTPY

SEQ ID NO: 39371 - protein, 229 aa, Arabidopsis thaliana
  peptide (1)..(229): Ceres Seq. ID no. 12559955
MSMSSMSSPSSAVCSPDHFSPSDHLCYVQCNFCQTILAVNVPYTSLFKTVTVRCGCCTNLLSVNMRSYVLPASNQLQLQLGPHSYFNPQDILEELRDAPSNMNMMMMNQHPTMNDIPSFMDLHQQHEIPKAPPVNRPPEKRQRVPSAYNRFIKEEIQRIKAGNPDISHREAFSAAAKNWAHFPHIHFGLVPDNQPVKKTNMPQQEGEDNMVMKEGFYAPAAANVGVTPY

SEQ ID NO: 39372 - protein, 227 aa, Arabidopsis thaliana
  peptide (1)..(227): Ceres Seq. ID no. 12559956
MSSMSSPSSAVCSPDHFSPSDHLCYVQCNFCQTILAVNVPYTSLFKTVTVRCGCCTNLLSVNMRSYVLPASNQLQLQLGPHSYFNPQDILEELRDAPSNMNMMMMNQHPTMNDIPSFMDLHQQHEIPKAPPVNRPPEKRQRVPSAYNRFIKEEIQRIKAGNPDISHREAFSAAAKNWAHFPHIHFGLVPDNQPVKKTNMPQQEGEDNMVMKEGFYAPAAANVGVTPY

SEQ ID NO: 39373 - DNA, 1394 bp, Arabidopsis thaliana; identical to SEQ ID NO: 24208
  misc_feature (1)..(1394): Ceres Seq. ID no. 12394405
  misc_feature (1)..(1394): Ortholog of  Ceres SEQ ID NO 13654928 as cited in SEQ ID NO 62546

SEQ ID NO: 39374 - protein, 393 aa, Arabidopsis thaliana; identical to SEQ ID NO: 24209
  peptide (1)..(393): Ceres Seq. ID no. 12394406

SEQ ID NO: 39375 - protein, 389 aa, Arabidopsis thaliana; identical to SEQ ID NO: 24210
  peptide (1)..(389): Ceres Seq. ID no. 12394407

SEQ ID NO: 39376 - protein, 376 aa, Arabidopsis thaliana; identical to SEQ ID NO: 24211
  peptide (1)..(376): Ceres Seq. ID no. 12394408

SEQ ID NO: 39377 - DNA, 1284 bp, Arabidopsis thaliana
  misc_feature (1)..(1284): Ceres Seq. ID no. 12328584
  misc_feature (1)..(1284): Ortholog of  Ceres SEQ ID NO 14311131 as cited in SEQ ID NO 53729
  misc_feature (1)..(1284): Ortholog of  Ceres SEQ ID NO 13594037 as cited in SEQ ID NO 55666
  misc_feature (1)..(1284): Ortholog of  Ceres SEQ ID NO 13657707 as cited in SEQ ID NO 66407
atgtactaagcacattttctttttctggtatagggtttacgtaaaacatgcgacaacgacaaagattgccggaaaactagccggaacttaggggagctaggtgagaccagcggcggttccatcctcgtgagtaaagcagtgatcgtcggtccgttcaaatccgacaacttcacaaccatcaccgatgctattgcagccgcacctaataacactagaccagaggatggttactttgttatctacgcaagagaaggtgtctatgaagaatatattgttgttcccatcaacaaaaagaacttaatgcttatcggagatgggatcaagaagacgattattacagggaaccataatgttgttgatggttggactacgtataattgctcgagcttcgctgtggttggagagcggttcatggcggttgatgttacattcagaaacacagctggacctgaaaaacatcaggctgtggctttgaggaacaatgcggaaggatcaagtttttatcggtgtagttttgaaggctatcaagatactctctacgtccattctcttagacaattctatcgcgaatgcgatatatatggtaccgtcgattttatattcggaaatgcagccgcaatttttcaaaactgcaacatatatgctcgaaaaccgatggccaagcaaaagaacgcaataacagcgcatggaagactcgatccaaaccagaataccggaatctctatcatcaattgtacaataaaagccgccccagatcttgcagctgatcctaaatcagccatgacatttttagggagaccgtggaagccctactcaaggacggttttcatgcaatcatacattagtgacattgttcaaccagtcggatggctcgaatggaacggtacaattggactagacacaatctactacggtgagtatagtaactttggaccaggtgctaacacgaaccagagagtgcagtggttagggtacaatttattgaacttggcagaagccatgaacttcacggtctacaacttcaccatgggagatacatggttgcctcaaaccgatattcctttctatggtggtttgcttagcaaagaatgaaattgatgaacaacatattatatgtaaacatatttaattatacgtacttcctcatttaaaaaataaatcaagaaattttcatttgttctagttgttgggacgagtcaatgggagtggttctcatgtaaatctagacgtgcttctaactttatttattgcttcagataaccaataaagctaagttttgatgcc

SEQ ID NO: 39378 - protein, 263 aa, Arabidopsis thaliana
  peptide (1)..(263): Ceres Seq. ID no. 12328585
MLIGDGIKKTIITGNHNVVDGWTTYNCSSFAVVGERFMAVDVTFRNTAGPEKHQAVALRNNAEGSSFYRCSFEGYQDTLYVHSLRQFYRECDIYGTVDFIFGNAAAIFQNCNIYARKPMAKQKNAITAHGRLDPNQNTGISIINCTIKAAPDLAADPKSAMTFLGRPWKPYSRTVFMQSYISDIVQPVGWLEWNGTIGLDTIYYGEYSNFGPGANTNQRVQWLGYNLLNLAEAMNFTVYNFTMGDTWLPQTDIPFYGGLLSKE

SEQ ID NO: 39379 - protein, 226 aa, Arabidopsis thaliana
  peptide (1)..(226): Ceres Seq. ID no. 12328586
MAVDVTFRNTAGPEKHQAVALRNNAEGSSFYRCSFEGYQDTLYVHSLRQFYRECDIYGTVDFIFGNAAAIFQNCNIYARKPMAKQKNAITAHGRLDPNQNTGISIINCTIKAAPDLAADPKSAMTFLGRPWKPYSRTVFMQSYISDIVQPVGWLEWNGTIGLDTIYYGEYSNFGPGANTNQRVQWLGYNLLNLAEAMNFTVYNFTMGDTWLPQTDIPFYGGLLSKE

SEQ ID NO: 39380 - protein, 145 aa, Arabidopsis thaliana
  peptide (1)..(145): Ceres Seq. ID no. 12328587
MAKQKNAITAHGRLDPNQNTGISIINCTIKAAPDLAADPKSAMTFLGRPWKPYSRTVFMQSYISDIVQPVGWLEWNGTIGLDTIYYGEYSNFGPGANTNQRVQWLGYNLLNLAEAMNFTVYNFTMGDTWLPQTDIPFYGGLLSKE

SEQ ID NO: 39381 - DNA, 1045 bp, Arabidopsis thaliana
  misc_feature (1)..(1045): Ceres Seq. ID no. 12339663
  misc_feature (1)..(1045): Ortholog of  Ceres SEQ ID NO 12608945 as cited in SEQ ID NO 51209
  misc_feature (1)..(1045): Ortholog of  Ceres SEQ ID NO 12619999 as cited in SEQ ID NO 66123
  misc_feature (1)..(1045): Ortholog of  Ceres SEQ ID NO 13656436 as cited in SEQ ID NO 69154
aataaaaatttgtttctttcttctctgtttttttttgctttcgtcttcaagagagagagagagagagatacaaagagagaaatttggttgtttgttgacggaagcttcttcggtctctcttctccgtcttacgattgtcaacgcgtggttccatcttcaattttgtttctattttagcagaagtttctcgagcttcaaatactgtttcagatcaatcaatcagtcaatcatggctagctctggaaacaagaacatcaacgccaaattggtattactaggagatgttggagctggaaaatcaagtcttgtgctacggtttgtgaaagatcagtttgttgaatttcaggaatcaaccattggtgcagcttttttctctcaaacattggctgtgaatgatgcgactgtgaagtttgagatatgggatacagctggtcaggaacgataccacagtttggctccaatgtactacaggggtgcagctgctgctattattgtctttgacattactaatcaagcctcatttgagagggcgaagaaatgggttcaggaactgcaggcacaaggtaaccctaatatggtgatggctcttgctggaaacaaagctgatttattagacgcaaggaaggtgtctgcagaggaggcagagatatatgctcaagagaacagccttttctttatggaaacctcagcgaagaccgcaacaaatgtcaaagacatattctacgaaatagcgaaaaggctaccacgtgtacagccagctgaaaacccgacaggaatggttctcccaaacgggccaggggctacggcagtgagttcatcgtgttgtgcttagattcgtacctgaagagagatctcatttggttagtcacatagtagagaacatctggactttcatgtgtttgcttcttcttcgtctttgttactttactttgcttgcattgacaacaacaacagtgtatatcatgatgatacttattctgcctttgtgaaatctgaagatatttgtatttggagagatttatatatatatatctcttttgtaaag

SEQ ID NO: 39382 - protein, 276 aa, Arabidopsis thaliana
  peptide (1)..(276): Ceres Seq. ID no. 12339664
IKICFFLLCFFLLSSSREREREIQREKFGCLLTEASSVSLLRLTIVNAWFHLQFCFYFSRSFSSFKYCFRSINQSIMASSGNKNINAKLVLLGDVGAGKSSLVLRFVKDQFVEFQESTIGAAFFSQTLAVNDATVKFEIWDTAGQERYHSLAPMYYRGAAAAIIVFDITNQASFERAKKWVQELQAQGNPNMVMALAGNKADLLDARKVSAEEAEIYAQENSLFFMETSAKTATNVKDIFYEIAKRLPRVQPAENPTGMVLPNGPGATAVSSSCCA

SEQ ID NO: 39383 - protein, 200 aa, Arabidopsis thaliana; identical to SEQ ID NO: 24213
  peptide (1)..(200): Ceres Seq. ID no. 12339665

SEQ ID NO: 39384 - DNA, 1309 bp, Arabidopsis thaliana
  misc_feature (1)..(1309): Ceres Seq. ID no. 13501404
  misc_feature (1)..(1309): Ortholog of  Ceres SEQ ID NO 13597325 as cited in SEQ ID NO 63935
aaatatttaaggaaacaaataaaaaacaaaaagattcatcttccaatacccaacgcatattacgcagccaccacacagcggagagagagagagaagaaacagaaacagaaacagagctcgagctcgagacgctcaatattaatggcggccgcatcagcacgagctttcttcatgctctctcgtgtaactgacctttcaaagaaaaagctaatccttcaccaaccaccaccgtcgtcatctcctcaccggctaccttatgctccgaatcgtgcggtgtcttcctccgctgtaatcagctgtctcagcggtggtggtgtttcctccgacgattcgtatgtatctactcgtcggtctaagttagatcgaggtttcgctgtgatcgcgaatttggtgaatcggatccagccgcttgatacgtctgttatctctaaaggcttatctgattcagctaaggattcgatgaaacagacgatttcttctatgcttggtcttcttccttccgatcaattttccgtttccgttactatctccgaacagcctctttatcgtctccttatttcttccatcatcaccgggtatacattgtggaatgcggagtatcgtgtatcactgaggaggaattttgatataccgattgatcctagaaaggaggaggaggatcaatcttcgaaagacaatgttagatttggttcagagaagggaatgagtgaggatttagggaattgtgttgaggaatttgagagactgagtcctcaggtgtttggagacttgtcacctgaagcgttgagttatattcagcttttgcagtctgagctatcttccatgaaagaggagctagattcacaaaagaagaaagctttgaggatagaatgtgagaaaggaaacaggaatgatttgttggattatttgcgttctttagatcccgagatggtgactgagttatctcaactgtcttcaccggaagtggaagagattgtgaaccagcttgtccaaaacgtattagagaggctcttcgaagaccagactacttcaaatttcatgcaaaatcctggcataaggactacagaaggtggtgatggaactggtagaaaggtggacacatccagggattaccttgcaaagctccttttctggtgcatgctattgggacatcatttaagaggtttggagaatagattacatctcagctgtgttgttgggttgctgtaatatcagagaatcataaaaaggagacaagataaaaaagaaacacaaatgtatattcttctcccccattttgatttctttaatctaagcgttaagttattat

SEQ ID NO: 39385 - protein, 402 aa, Arabidopsis thaliana
  peptide (1)..(402): Ceres Seq. ID no. 13501405
KYLRKQIKNKKIHLPIPNAYYAATTQRREREKKQKQKQSSSSRRSILMAAASARAFFMLSRVTDLSKKKLILHQPPPSSSPHRLPYAPNRAVSSSAVISCLSGGGVSSDDSYVSTRRSKLDRGFAVIANLVNRIQPLDTSVISKGLSDSAKDSMKQTISSMLGLLPSDQFSVSVTISEQPLYRLLISSIITGYTLWNAEYRVSLRRNFDIPIDPRKEEEDQSSKDNVRFGSEKGMSEDLGNCVEEFERLSPQVFGDLSPEALSYIQLLQSELSSMKEELDSQKKKALRIECEKGNRNDLLDYLRSLDPEMVTELSQLSSPEVEEIVNQLVQNVLERLFEDQTTSNFMQNPGIRTTEGGDGTGRKVDTSRDYLAKLLFWCMLLGHHLRGLENRLHLSCVVGLL

SEQ ID NO: 39386 - protein, 355 aa, Arabidopsis thaliana
  peptide (1)..(355): Ceres Seq. ID no. 13501406
MAAASARAFFMLSRVTDLSKKKLILHQPPPSSSPHRLPYAPNRAVSSSAVISCLSGGGVSSDDSYVSTRRSKLDRGFAVIANLVNRIQPLDTSVISKGLSDSAKDSMKQTISSMLGLLPSDQFSVSVTISEQPLYRLLISSIITGYTLWNAEYRVSLRRNFDIPIDPRKEEEDQSSKDNVRFGSEKGMSEDLGNCVEEFERLSPQVFGDLSPEALSYIQLLQSELSSMKEELDSQKKKALRIECEKGNRNDLLDYLRSLDPEMVTELSQLSSPEVEEIVNQLVQNVLERLFEDQTTSNFMQNPGIRTTEGGDGTGRKVDTSRDYLAKLLFWCMLLGHHLRGLENRLHLSCVVGLL

SEQ ID NO: 39387 - protein, 345 aa, Arabidopsis thaliana
  peptide (1)..(345): Ceres Seq. ID no. 13501407
MLSRVTDLSKKKLILHQPPPSSSPHRLPYAPNRAVSSSAVISCLSGGGVSSDDSYVSTRRSKLDRGFAVIANLVNRIQPLDTSVISKGLSDSAKDSMKQTISSMLGLLPSDQFSVSVTISEQPLYRLLISSIITGYTLWNAEYRVSLRRNFDIPIDPRKEEEDQSSKDNVRFGSEKGMSEDLGNCVEEFERLSPQVFGDLSPEALSYIQLLQSELSSMKEELDSQKKKALRIECEKGNRNDLLDYLRSLDPEMVTELSQLSSPEVEEIVNQLVQNVLERLFEDQTTSNFMQNPGIRTTEGGDGTGRKVDTSRDYLAKLLFWCMLLGHHLRGLENRLHLSCVVGLL

SEQ ID NO: 39388 - DNA, 1906 bp, Arabidopsis thaliana
  misc_feature (1)..(1906): Ceres Seq. ID no. 13489601
  misc_feature (1)..(1906): Ortholog of  Ceres SEQ ID NO 13656138 as cited in SEQ ID NO 65492
  misc_feature (1)..(1906): Ortholog of  Ceres SEQ ID NO 14301542 as cited in SEQ ID NO 66246
atcttcttcgcaaatctcaacaatggtgtttgaagcattcgaagtcggcacagtcccattcaattccgatggttggggaccaccagatgcttccgacacttcctccaccagcgtcgcggcggcgaatctcctcccaaacgtccccttcgcttccttctcacgatccgaaaaactcggacgcgttgctgattggactcgagctctctcaaatccatcagctcgtcctcacaccggatccaaatcagatccatcagcgatcttcgatttctcagcttttgcagtagatgaaggatttggtctaacaaactcaggtggaaacgccgacgaagacgccgctttccgattagtcgacggaaaaccaccgccgcgtcctaaattcggacctaaatggagattcaatcaataccataaccgaaatcagcttcctcaacgtcgtgatgaagaagttgaagctaagaaacgtgaagctgagaaagatcgagctcgtcgtgatcgtctctacaataacaatcgtaacaatattcatcagcaacgccgtgaagccgccgcgtttaaatcatcagttgatattcaaccggaatggaatatgcttgagcagattccgttttcgactttctctaagctttcgtttacagtttctgaacctgaagatcttcttctttgtggtggacttgagtcttatgatcggagttttgatcgtattactcctaaagctgatcgtagacttgagcgtttcaagaacagaagctttaaggttactacaagtgatgatcttgtgatcagacgtcttgctaaagaagataaagctactgtttttgctactgatgctattctagctgctcttatgtgtgctcctagatcggtttattcatgggatcttgtgattcaacgtgttgggaataagcttttctttgataagagagatgggtcaccgcttgatttgttatctgttcatgagacttctcaagagcctttgcctgagggtaaagatgatattaactctgctcattctctaggtctggaggctgcttatattaatcagaattttgctcagcaggttttggttaagaatgggaaaagggaaacttttgatgagccaattcctaatgttaatgaaggtgaagagaatgcttctattgcttataggtataggagatggaagcttgatgatagtatgtatctagttgctaggtgtgagttacagagcactgttgatttgaataaccagagatcgtttttaactttgaatgctcttaacgagtttgatcctaagtactctggtgttgattggagacagaagcttgagactcagagaggtgcggttttagctaatgagttgaagaacaatggtaataagttagctaaatggactgcgcaggctctcttggctaatgcggatatgatgaagattgggtttgtttcgagggttcatcctcgtgatcattttaaccatgttatattatcggttttggggtataagccgaaagatttcgctgggcagatcaatctgaacactaacaatatgtggggaattgtgaagtcgattgttgatctgtgtatgaagttaagtgaaggaaagtatgttctagtgaaggatccatcgaagcctcaagttaggatttacgaagttccggctgatgcatttgacaatgattatgtggaggagccactccctgaagatgaacaggttcagccacctgaggagaacactgatgcaggagcagagactaatggggtttcctctactaatgtagctgtagaggataagaaatccgaagttgaagcctgattttgatgatatgggtatatttcaagtcgtgttgttttgagttacttttaaaaaatgttcgaaagcttgttcactttttcatagactatttatgttccaaaatgttggttcatgcct

SEQ ID NO: 39389 - protein, 595 aa, Arabidopsis thaliana
  peptide (1)..(595): Ceres Seq. ID no. 13489602
SSSQISTMVFEAFEVGTVPFNSDGWGPPDASDTSSTSVAAANLLPNVPFASFSRSEKLGRVADWTRALSNPSARPHTGSKSDPSAIFDFSAFAVDEGFGLTNSGGNADEDAAFRLVDGKPPPRPKFGPKWRFNQYHNRNQLPQRRDEEVEAKKREAEKDRARRDRLYNNNRNNIHQQRREAAAFKSSVDIQPEWNMLEQIPFSTFSKLSFTVSEPEDLLLCGGLESYDRSFDRITPKADRRLERFKNRSFKVTTSDDLVIRRLAKEDKATVFATDAILAALMCAPRSVYSWDLVIQRVGNKLFFDKRDGSPLDLLSVHETSQEPLPEGKDDINSAHSLGLEAAYINQNFAQQVLVKNGKRETFDEPIPNVNEGEENASIAYRYRRWKLDDSMYLVARCELQSTVDLNNQRSFLTLNALNEFDPKYSGVDWRQKLETQRGAVLANELKNNGNKLAKWTAQALLANADMMKIGFVSRVHPRDHFNHVILSVLGYKPKDFAGQINLNTNNMWGIVKSIVDLCMKLSEGKYVLVKDPSKPQVRIYEVPADAFDNDYVEEPLPEDEQVQPPEENTDAGAETNGVSSTNVAVEDKKSEVEA

SEQ ID NO: 39390 - protein, 588 aa, Arabidopsis thaliana
  peptide (1)..(588): Ceres Seq. ID no. 13489603
MVFEAFEVGTVPFNSDGWGPPDASDTSSTSVAAANLLPNVPFASFSRSEKLGRVADWTRALSNPSARPHTGSKSDPSAIFDFSAFAVDEGFGLTNSGGNADEDAAFRLVDGKPPPRPKFGPKWRFNQYHNRNQLPQRRDEEVEAKKREAEKDRARRDRLYNNNRNNIHQQRREAAAFKSSVDIQPEWNMLEQIPFSTFSKLSFTVSEPEDLLLCGGLESYDRSFDRITPKADRRLERFKNRSFKVTTSDDLVIRRLAKEDKATVFATDAILAALMCAPRSVYSWDLVIQRVGNKLFFDKRDGSPLDLLSVHETSQEPLPEGKDDINSAHSLGLEAAYINQNFAQQVLVKNGKRETFDEPIPNVNEGEENASIAYRYRRWKLDDSMYLVARCELQSTVDLNNQRSFLTLNALNEFDPKYSGVDWRQKLETQRGAVLANELKNNGNKLAKWTAQALLANADMMKIGFVSRVHPRDHFNHVILSVLGYKPKDFAGQINLNTNNMWGIVKSIVDLCMKLSEGKYVLVKDPSKPQVRIYEVPADAFDNDYVEEPLPEDEQVQPPEENTDAGAETNGVSSTNVAVEDKKSEVEA

SEQ ID NO: 39391 - protein, 400 aa, Arabidopsis thaliana
  peptide (1)..(400): Ceres Seq. ID no. 13489604
MLEQIPFSTFSKLSFTVSEPEDLLLCGGLESYDRSFDRITPKADRRLERFKNRSFKVTTSDDLVIRRLAKEDKATVFATDAILAALMCAPRSVYSWDLVIQRVGNKLFFDKRDGSPLDLLSVHETSQEPLPEGKDDINSAHSLGLEAAYINQNFAQQVLVKNGKRETFDEPIPNVNEGEENASIAYRYRRWKLDDSMYLVARCELQSTVDLNNQRSFLTLNALNEFDPKYSGVDWRQKLETQRGAVLANELKNNGNKLAKWTAQALLANADMMKIGFVSRVHPRDHFNHVILSVLGYKPKDFAGQINLNTNNMWGIVKSIVDLCMKLSEGKYVLVKDPSKPQVRIYEVPADAFDNDYVEEPLPEDEQVQPPEENTDAGAETNGVSSTNVAVEDKKSEVEA

SEQ ID NO: 39392 - DNA, 1289 bp, Arabidopsis thaliana
  misc_feature (1)..(1289): Ceres Seq. ID no. 12329055
  misc_feature (1)..(1289): Ortholog of  Ceres SEQ ID NO 14313147 as cited in SEQ ID NO 54166
  misc_feature (1)..(1289): Ortholog of  Ceres SEQ ID NO 13598882 as cited in SEQ ID NO 0
atcttaccctaaaaaccacatttcttaacttcctcaataaaaaaaagaaaagcttcaccctttaattttaccctcaaccccaaaacaaaaaccccttcctccacgagggcatacagaaatatcaaagacccaatctttctttcacttccccaatctctagatgacaatctaacgatacagttccttttagatcgattaccaaatacaaaggatcaatttttcttacatgaacactctgttgtaatggcagaggaaaatctagaactgagtcttttatgtacagagagcaacgttgatgatgagggcatgattgttgacgaaactccgattgaaatttcgattcctcagatgggtttttctcaatcggagagtgaggagattatcatggagatggtggagaaggagaagcagcatttgccaagtgatgattacatcaagagacttagaagtggagatttggatttgaatgttggaagaagagatgccctcaattggatttggaaggcttgtgaagtacaccagtttggaccattgtgtttttgcttagcaatgaactacttggatcgattcttatcggttcatgatttgcctagtggcaaaggttggatattgcagttgttggctgtggcttgtttatcattggcagccaaaattgaagaaactgaagttccaatgttgatagatcttcaggttggagatcctcagtttgtgtttgaggctaaatcagtccaaagaatggagcttttggtgttgaacaaattgaaatggagattgagagcaataactccatgctcatacataagatatttcctgagaaagatgagtaaatgtgatcaagaaccatccaacacattgatatctagatcattacaagtgatagccagcacaaccaaaggtattgactttttggagtttagaccttctgaagctgctgctgctgtggcactttctgtttctggagaattgcagagagtacactttgacaactcttccttctctcctcttttctcactacttcaaaaggagagagtgaagaagataggggaaatgatagagagtgatggctcagacttatgttcacaaacacccaatggggttttagaagtatcggcttgttgtttcagctttaagacccatgattcttcttcttcttatacacatctttcttaaaaaaaaaactgtttttttcttacattattataatcagtatgatgtctgatgagaggttgaaaaaagaggacaataaatcaaagcaaaaatttttaaataaataaaagtgtattaatttc

SEQ ID NO: 39393 - protein, 308 aa, Arabidopsis thaliana
  peptide (1)..(308): Ceres Seq. ID no. 12329056
MAEENLELSLLCTESNVDDEGMIVDETPIEISIPQMGFSQSESEEIIMEMVEKEKQHLPSDDYIKRLRSGDLDLNVGRRDALNWIWKACEVHQFGPLCFCLAMNYLDRFLSVHDLPSGKGWILQLLAVACLSLAAKIEETEVPMLIDLQVGDPQFVFEAKSVQRMELLVLNKLKWRLRAITPCSYIRYFLRKMSKCDQEPSNTLISRSLQVIASTTKGIDFLEFRPSEAAAAVALSVSGELQRVHFDNSSFSPLFSLLQKERVKKIGEMIESDGSDLCSQTPNGVLEVSACCFSFKTHDSSSSYTHLS

SEQ ID NO: 39394 - protein, 287 aa, Arabidopsis thaliana
  peptide (1)..(287): Ceres Seq. ID no. 12329057
MIVDETPIEISIPQMGFSQSESEEIIMEMVEKEKQHLPSDDYIKRLRSGDLDLNVGRRDALNWIWKACEVHQFGPLCFCLAMNYLDRFLSVHDLPSGKGWILQLLAVACLSLAAKIEETEVPMLIDLQVGDPQFVFEAKSVQRMELLVLNKLKWRLRAITPCSYIRYFLRKMSKCDQEPSNTLISRSLQVIASTTKGIDFLEFRPSEAAAAVALSVSGELQRVHFDNSSFSPLFSLLQKERVKKIGEMIESDGSDLCSQTPNGVLEVSACCFSFKTHDSSSSYTHLS

SEQ ID NO: 39395 - protein, 273 aa, Arabidopsis thaliana
  peptide (1)..(273): Ceres Seq. ID no. 12329058
MGFSQSESEEIIMEMVEKEKQHLPSDDYIKRLRSGDLDLNVGRRDALNWIWKACEVHQFGPLCFCLAMNYLDRFLSVHDLPSGKGWILQLLAVACLSLAAKIEETEVPMLIDLQVGDPQFVFEAKSVQRMELLVLNKLKWRLRAITPCSYIRYFLRKMSKCDQEPSNTLISRSLQVIASTTKGIDFLEFRPSEAAAAVALSVSGELQRVHFDNSSFSPLFSLLQKERVKKIGEMIESDGSDLCSQTPNGVLEVSACCFSFKTHDSSSSYTHLS

SEQ ID NO: 39396 - DNA, 1389 bp, Arabidopsis thaliana
  misc_feature (1)..(1389): Ceres Seq. ID no. 12328262
  misc_feature (1)..(1389): Ortholog of  Ceres SEQ ID NO 14309287 as cited in SEQ ID NO 0
ccacaaagatatttttctttattctctcgcagttcaattagggtttcaatctctctgctctgcttgtcatcaccaccaccaccaccaccgtcgtcgtctctctgtatctctccggcgggttctctctctacttcccccggaggattaaaagatggaccagtcttttattttgatattccgttagcttgttcagttattgtagaagctgtgtcgtcaagacttttaatatctcaaatggatgatggtgggcatcgtgagaatggtcggcataaagcagcagttcagggccagcatcagccgtcgatgaaacaagtgatgtcgataatagcagagcgcgatgcagcgattcaggagagaaatctgacgatatcagagaaaaaagcagcagtagctgaaagggacatggcgtttcttcagagggacaccgccattgctgagcgcaacaatgcgataatggagagagacagtgctcttacagctctccaataccgtgagaactctatggttactgctcctgctgccaatatgtcagcatgtccaccgggttgtcaaatatcacgtggtgtaaaacacttgcaccatccgcacatgcatcatcatcatcaacaacatcacatacctcagttgactgaaaatgcatatgaaaccagagaaatggagccaaacgatggtctcccgacatcaccacctgctggatccaccttggaatctgccaaaccaaagcgcggtaaaagagtgaacccaaaggcgacaacacaaaccgctgctaataagagagggccaaaaaatcagaggaaggttaagaaagagagcgaggacgacttaaacaagataatgtttgtaaagacgacccatgactacacagacgaagattcaagtaagcatatcttaataggatcaaaatctgactggaaaagtcaagaaatggtggggctgaaccaagtggtttacgacgagacaacgatgccaccacctgtatgttcatgtacaggagttctcagacagtgctacaaatggggaaatggaggttggcaatcatcgtgttgcacaactacactatcaatgtatcctttacctgcactgcccaacaaaaggcatgctcgagttggtggacggaaaatgagcggaagcgcgttcaacaagcttctaagccggcttgctgcagaagggcatcatgatctttcaaacctggtcgatctgaaggaccattgggcaaagcacggtacaaaccgctacattacgattaaatgatatgtgcatttaggtgtgagttgttcttacgacattatctgattttaaatcatgtgtactaaattcaaataaactcgagaggaaaagaattgtatgtggagccaatgttatgttgtattatataattcgaaaaatttt

SEQ ID NO: 39397 - protein, 416 aa, Arabidopsis thaliana
  peptide (1)..(416): Ceres Seq. ID no. 12328263
PQRYFSLFSRSSIRVSISLLCLSSPPPPPPSSSLCISPAGSLSTSPGGLKDGPVFYFDIPLACSVIVEAVSSRLLISQMDDGGHRENGRHKAAVQGQHQPSMKQVMSIIAERDAAIQERNLTISEKKAAVAERDMAFLQRDTAIAERNNAIMERDSALTALQYRENSMVTAPAANMSACPPGCQISRGVKHLHHPHMHHHHQQHHIPQLTENAYETREMEPNDGLPTSPPAGSTLESAKPKRGKRVNPKATTQTAANKRGPKNQRKVKKESEDDLNKIMFVKTTHDYTDEDSSKHILIGSKSDWKSQEMVGLNQVVYDETTMPPPVCSCTGVLRQCYKWGNGGWQSSCCTTTLSMYPLPALPNKRHARVGGRKMSGSAFNKLLSRLAAEGHHDLSNLVDLKDHWAKHGTNRYITIK

SEQ ID NO: 39398 - protein, 338 aa, Arabidopsis thaliana
  peptide (1)..(338): Ceres Seq. ID no. 12328264
MDDGGHRENGRHKAAVQGQHQPSMKQVMSIIAERDAAIQERNLTISEKKAAVAERDMAFLQRDTAIAERNNAIMERDSALTALQYRENSMVTAPAANMSACPPGCQISRGVKHLHHPHMHHHHQQHHIPQLTENAYETREMEPNDGLPTSPPAGSTLESAKPKRGKRVNPKATTQTAANKRGPKNQRKVKKESEDDLNKIMFVKTTHDYTDEDSSKHILIGSKSDWKSQEMVGLNQVVYDETTMPPPVCSCTGVLRQCYKWGNGGWQSSCCTTTLSMYPLPALPNKRHARVGGRKMSGSAFNKLLSRLAAEGHHDLSNLVDLKDHWAKHGTNRYITIK

SEQ ID NO: 39399 - protein, 315 aa, Arabidopsis thaliana
  peptide (1)..(315): Ceres Seq. ID no. 12328265
MKQVMSIIAERDAAIQERNLTISEKKAAVAERDMAFLQRDTAIAERNNAIMERDSALTALQYRENSMVTAPAANMSACPPGCQISRGVKHLHHPHMHHHHQQHHIPQLTENAYETREMEPNDGLPTSPPAGSTLESAKPKRGKRVNPKATTQTAANKRGPKNQRKVKKESEDDLNKIMFVKTTHDYTDEDSSKHILIGSKSDWKSQEMVGLNQVVYDETTMPPPVCSCTGVLRQCYKWGNGGWQSSCCTTTLSMYPLPALPNKRHARVGGRKMSGSAFNKLLSRLAAEGHHDLSNLVDLKDHWAKHGTNRYITIK

SEQ ID NO: 39400 - DNA, 2646 bp, Arabidopsis thaliana
  misc_feature (1)..(2646): Ceres Seq. ID no. 13491697
  misc_feature (1)..(2646): Ortholog of  Ceres SEQ ID NO 15176095 as cited in SEQ ID NO 59699
acacactagggaaaccacagttctcttctatcctctctttctccgcttctgtagcaatgtcaatgtggtaccctctaccttcttcttcttcctccactcactaaccaaatccagaatcaacaataatagaaaaagccctaactttctctgtcaatggctttcttcttctactttttcttcctcttgactctttcttctccttcttcttctgcttcctcttcaaactccttgacttacatcgtccacgtcgaccacgaagctaaaccctcaatcttccccactcatcttcactggtacacttcctctcttgcctcactcacatcttctcctccctccattatccacacatacaacaccgttttccatggcttctccgctagactcacttcacaagacgctagtcaactcttagaccatcctcatgtcatctccgttatcccggaacaagtccgtcacttgcacaccactcgttcccctgagtttcttggactcaggtccaccgacaaagcgggtctactcgaagagtctgatttcgggtcggatctagttatcggagttatcgatactggtgtttggcccgaaagacctagctttgatgaccgtggtcttggtcctgttcccattaaatggaaaggccaatgtatcgcttcccaagattttccggagtctgcttgtaaccgtaaactcgtcggagctagattcttctgcggtgggtatgaagcaaccaacgggaaaatgaatgaaacgactgagtttcgctctccgcgtgactccgatggacatgggactcacacagcttcaatctccgcgggccgttacgtttttccggcatcaactctcggctacgctcacggtgtcgctgctgggatggctccgaaagctagactcgctgcgtacaaagtctgttggaactccggttgttacgactcagatatcttagccgctttcgacaccgccgttgccgacggtgtcgatgtcatctctctctccgttggaggcgttgtggttccttattacctagacgctatcgccataggagcttttggagctattgacagaggaatattcgtctctgcttccgccggaaacggaggtcccggtgctttaacggtgacgaatgttgctccgtggatgacaacagtcggagctggaacaatcgatagggattttccagccaatgtgaaactcggtaacggaaagatgatttctggtgttagtgtatacggtggaccgggtctggatccgggtcgaatgtacccgcttgtttacggtggtagtttactaggcggcgatggttactcatcgtctctgtgtcttgaaggctcgttggatccgaatttggtgacgggaaagatcgttctttgtgatagaggaatcaattctagagcaaccaaaggtgagatcgtacggaaaaatggaggcttggggatgattatagcgaatggtgtgtttgacggtgaaggtttagtagctgattgccacgtgttaccggcgacatctgttggtgcttctggaggagatgagattcgtaggtatatctctgaatcatccaaatctcgttcatcgaaacatccaacggctacgattgttttcaaagggactcgacttgggatccgacctgcaccggttgttgcatctttctctgcacgtggtcctaatccagagacgccggagattcttaaaccggatgtaatcgcacctggtttgaatattctagctgcttggcctgaccggattggtccatctggtgttacttctgataaccggagaactgagttcaacattttatcaggcacttcgatggcgtgccctcatgtttctggtctagctgctttgcttaaggcggctcatccggattggagccccgcggcgataagatcagcattgatgaccacggcttacacggttgataacagcggtgagccgatgatggatgagtccactggcaatacgtcttcggttacggattatggttcgggtcatgttcacccaaccagagctatggatccgggactagtctacgatataacatcttatgattatatcaacttcttgtgtaattctaactacactggaaccaacattgtgacgataacccgtcgccaagcggactgcgacggtgcgaggcgagcgggacacgtcggaaatttgaactacccgtcgttctctgtcgtgtttcagcagtatggagagagtaaaatgtcgacacatttcattaggactgtgacaaatgtaggcgattcggattcggtttacgagattaagattaggccgcctagagggactacagtgacggttgagccggagaagctatcgttcagacgggtggggcagaaactgagttttgttgttagggttaagaccacagaggtgaagttgtcaccaggagcgacaaatgtggagactggtcatatggtttggtcagatgggaaacggaatgtgacaagtcccttggtggtcactcttcaacaacctctttgaagggttttagaatctggtgaccgggaaaattctggtctctgtttgttgtactagtgaaaaagaaagatcataagttgttgttgtcgtcgtctatgatctttgttggtgtaatataaatatgtatctttgttttgttgttaagaaagatagagcgtctaaagaaat

SEQ ID NO: 39401 - protein, 775 aa, Arabidopsis thaliana
  peptide (1)..(775): Ceres Seq. ID no. 15222869
MAFFFYFFFLLTLSSPSSSASSSNSLTYIVHVDHEAKPSIFPTHLHWYTSSLASLTSSPPSIIHTYNTVFHGFSARLTSQDASQLLDHPHVISVIPEQVRHLHTTRSPEFLGLRSTDKAGLLEESDFGSDLVIGVIDTGVWPERPSFDDRGLGPVPIKWKGQCIASQDFPESACNRKLVGARFFCGGYEATNGKMNETTEFRSPRDSDGHGTHTASISAGRYVFPASTLGYAHGVAAGMAPKARLAAYKVCWNSGCYDSDILAAFDTAVADGVDVISLSVGGVVVPYYLDAIAIGAFGAIDRGIFVSASAGNGGPGALTVTNVAPWMTTVGAGTIDRDFPANVKLGNGKMISGVSVYGGPGLDPGRMYPLVYGGSLLGGDGYSSSLCLEGSLDPNLVTGKIVLCDRGINSRATKGEIVRKNGGLGMIIANGVFDGEGLVADCHVLPATSVGASGGDEIRRYISESSKSRSSKHPTATIVFKGTRLGIRPAPVVASFSARGPNPETPEILKPDVIAPGLNILAAWPDRIGPSGVTSDNRRTEFNILSGTSMACPHVSGLAALLKAAHPDWSPAAIRSALMTTAYTVDNSGEPMMDESTGNTSSVTDYGSGHVHPTRAMDPGLVYDITSYDYINFLCNSNYTGTNIVTITRRQADCDGARRAGHVGNLNYPSFSVVFQQYGESKMSTHFIRTVTNVGDSDSVYEIKIRPPRGTTVTVEPEKLSFRRVGQKLSFVVRVKTTEVKLSPGATNVETGHMVWSDGKRNVTSPLVVTLQQPL

SEQ ID NO: 39402 - protein, 581 aa, Arabidopsis thaliana
  peptide (1)..(581): Ceres Seq. ID no. 15222870
MNETTEFRSPRDSDGHGTHTASISAGRYVFPASTLGYAHGVAAGMAPKARLAAYKVCWNSGCYDSDILAAFDTAVADGVDVISLSVGGVVVPYYLDAIAIGAFGAIDRGIFVSASAGNGGPGALTVTNVAPWMTTVGAGTIDRDFPANVKLGNGKMISGVSVYGGPGLDPGRMYPLVYGGSLLGGDGYSSSLCLEGSLDPNLVTGKIVLCDRGINSRATKGEIVRKNGGLGMIIANGVFDGEGLVADCHVLPATSVGASGGDEIRRYISESSKSRSSKHPTATIVFKGTRLGIRPAPVVASFSARGPNPETPEILKPDVIAPGLNILAAWPDRIGPSGVTSDNRRTEFNILSGTSMACPHVSGLAALLKAAHPDWSPAAIRSALMTTAYTVDNSGEPMMDESTGNTSSVTDYGSGHVHPTRAMDPGLVYDITSYDYINFLCNSNYTGTNIVTITRRQADCDGARRAGHVGNLNYPSFSVVFQQYGESKMSTHFIRTVTNVGDSDSVYEIKIRPPRGTTVTVEPEKLSFRRVGQKLSFVVRVKTTEVKLSPGATNVETGHMVWSDGKRNVTSPLVVTLQQPL

SEQ ID NO: 39403 - protein, 537 aa, Arabidopsis thaliana
  peptide (1)..(537): Ceres Seq. ID no. 15222871
MAPKARLAAYKVCWNSGCYDSDILAAFDTAVADGVDVISLSVGGVVVPYYLDAIAIGAFGAIDRGIFVSASAGNGGPGALTVTNVAPWMTTVGAGTIDRDFPANVKLGNGKMISGVSVYGGPGLDPGRMYPLVYGGSLLGGDGYSSSLCLEGSLDPNLVTGKIVLCDRGINSRATKGEIVRKNGGLGMIIANGVFDGEGLVADCHVLPATSVGASGGDEIRRYISESSKSRSSKHPTATIVFKGTRLGIRPAPVVASFSARGPNPETPEILKPDVIAPGLNILAAWPDRIGPSGVTSDNRRTEFNILSGTSMACPHVSGLAALLKAAHPDWSPAAIRSALMTTAYTVDNSGEPMMDESTGNTSSVTDYGSGHVHPTRAMDPGLVYDITSYDYINFLCNSNYTGTNIVTITRRQADCDGARRAGHVGNLNYPSFSVVFQQYGESKMSTHFIRTVTNVGDSDSVYEIKIRPPRGTTVTVEPEKLSFRRVGQKLSFVVRVKTTEVKLSPGATNVETGHMVWSDGKRNVTSPLVVTLQQPL

SEQ ID NO: 39404 - DNA, 1071 bp, Arabidopsis thaliana
  misc_feature (1)..(1071): Ceres Seq. ID no. 13487212
  misc_feature (1)..(1071): Ortholog of  Ceres SEQ ID NO 14311859 as cited in SEQ ID NO 51658
  misc_feature (1)..(1071): Ortholog of  Ceres SEQ ID NO 13638685 as cited in SEQ ID NO 51871
agagaaactttcaatttaattggttcaaaatcatcctaaatcgagtagattgttttgaatcgatttttgaagttgattcgaagttcagtgattgtgattagaatttataaccagacccagtttttgaggtgaagaaaaagcagattttgtgttcaatttccatggaagacgaaccaggaagcgaaaatgaagcagacaccatagttgcttcaccacttgcaaaatggagaatcgaattctcgaaatcgtttcagaattacttagacagatctgctcctaacattgttcgaagatggcttgtgactttagtcgctgcagtgatctatatctatagggtttactctgtttatggatacttcgttatctcttatggcttagctacttatatcttaaatctcttgattggtttcctttcccctaaagttgatcctgaacttgaagctttggatcctgattctttacctgttgatgagtctgatgagtataagccctttgttcgtcgtcttcctgagttcaagttctggtatgcagcgactaaagcatttgttgttgcatttgtgatgacattcttctctttcctggatgtgcctgtgttctggccgatcttgttgtgttactggttggttttgtattctttaactatgaaacgcttaatcgtgcacatgttcaagtatagatactttcctttcgatgtaagaaagcctgtgaagctgctcaagtttcttgtaaacagtgtcctgacctttttaagactcaagaagggtgatggtggagatgataggcccagcagcagcaattcatctcagggaaatgaaaaacaagattagatgcgaacagtagatcaggtactgatctcgacgtggtgataggcgaagcaagaaaggatacaaactaaggatatcaaagtaaaatatactatagccatgctggtggaataggaaaacaaagttcttgaagcttaacagaactaagaaatctctctgagttttgagtaatctcctgcattttccggtttttgcattgtaatgtgtaacagtgtattttacaattatacgtttaaatgaatttggg

SEQ ID NO: 39405 - protein, 221 aa, Arabidopsis thaliana
  peptide (1)..(221): Ceres Seq. ID no. 13487213
MEDEPGSENEADTIVASPLAKWRIEFSKSFQNYLDRSAPNIVRRWLVTLVAAVIYIYRVYSVYGYFVISYGLATYILNLLIGFLSPKVDPELEALDPDSLPVDESDEYKPFVRRLPEFKFWYAATKAFVVAFVMTFFSFLDVPVFWPILLCYWLVLYSLTMKRLIVHMFKYRYFPFDVRKPVKLLKFLVNSVLTFLRLKKGDGGDDRPSSSNSSQGNEKQD

SEQ ID NO: 39406 - DNA, 1369 bp, Arabidopsis thaliana
  misc_feature (1)..(1369): Ceres Seq. ID no. 13491698
  misc_feature (1)..(1369): Ortholog of  Ceres SEQ ID NO 14307119 as cited in SEQ ID NO 54170
tggatttgagaaatctttttcatcatcatcactcttcctccttccccattgcttagtgttggttcccaagtcccaacctgcttcaatttaggtcgcaaacgatctcaattattcacaatccaatcttttcttcaatcgatcttcgtttctgatcaagctaataataagctaggaagagagtttagtgaagtagtgaagatgcagaatcagattgatatggtgaaggatgaagcggaagtagctgcatcgatttcagcaattaagggtgaagaatggggaaattgttcatcagtggaagatcaaccatcttttcaagaagaagaagctgctaaagttccttatgttggtgataaggaacctctgtctagtttagctgcagagtatcaatcagggagtcccattttgctggagaagattaagatactggacagtcaatatatcggaatccggcgaacaagaggagatggaaattgcttcttccgaagttttatgttctcttaccttgagcatatattggaatcacaagatcgtgctgaagtcgatcgtatcaaggtcaatgttgagaaatgtagaaagactctgcaaaacttaggttatacagattttacatttgaggacttctttgcgttgttccttgagcaactagatgacattctccaaggaactgaagagtctataagctacgatgagctggttaacagaagtagagatcagtcagtctcagattacattgtaatgttctttaggtttgttactgctggtgatatacgaacgcgtgccgattttttcgagccttttataacaggcttatcaaatgcaacagtggatcagttttgcaagtcctcggtcgaaccaatgggggaagagagtgaccatattcacataactgctttgtcggacgcacttggtgttgcaatccgtgttgtgtatcttgaccgtagctcatgtgatagtgggggcgtcactgtgaatcatcatgactttgttcctgtgggcattaccaatgagaaagatgaagaagcttctgctccatttataaccttgctgtatcgtccaggccattacgatatcctctaccccaagccatcttgtaaggtatcagacaatgtggggaaatgatcatttgacatatcgtaaatcgcattaggagacgtttacaaaaaactgtggtaatatggattcatgtggatgaaaccatggaacaatcaacaattaccccatcgatttgcattttgattatgataaaagaaccctttttgcaacactatagaatggaccgtctctttactttgatattgccttgtatttttcatgaatcatgataatatcctttatgatatttctgatgagcaagtggaatcaaagggtt

SEQ ID NO: 39407 - protein, 306 aa, Arabidopsis thaliana
  peptide (1)..(306): Ceres Seq. ID no. 13491699
MQNQIDMVKDEAEVAASISAIKGEEWGNCSSVEDQPSFQEEEAAKVPYVGDKEPLSSLAAEYQSGSPILLEKIKILDSQYIGIRRTRGDGNCFFRSFMFSYLEHILESQDRAEVDRIKVNVEKCRKTLQNLGYTDFTFEDFFALFLEQLDDILQGTEESISYDELVNRSRDQSVSDYIVMFFRFVTAGDIRTRADFFEPFITGLSNATVDQFCKSSVEPMGEESDHIHITALSDALGVAIRVVYLDRSSCDSGGVTVNHHDFVPVGITNEKDEEASAPFITLLYRPGHYDILYPKPSCKVSDNVGK

SEQ ID NO: 39408 - protein, 300 aa, Arabidopsis thaliana
  peptide (1)..(300): Ceres Seq. ID no. 13491700
MVKDEAEVAASISAIKGEEWGNCSSVEDQPSFQEEEAAKVPYVGDKEPLSSLAAEYQSGSPILLEKIKILDSQYIGIRRTRGDGNCFFRSFMFSYLEHILESQDRAEVDRIKVNVEKCRKTLQNLGYTDFTFEDFFALFLEQLDDILQGTEESISYDELVNRSRDQSVSDYIVMFFRFVTAGDIRTRADFFEPFITGLSNATVDQFCKSSVEPMGEESDHIHITALSDALGVAIRVVYLDRSSCDSGGVTVNHHDFVPVGITNEKDEEASAPFITLLYRPGHYDILYPKPSCKVSDNVGK

SEQ ID NO: 39409 - protein, 209 aa, Arabidopsis thaliana
  peptide (1)..(209): Ceres Seq. ID no. 13491701
MFSYLEHILESQDRAEVDRIKVNVEKCRKTLQNLGYTDFTFEDFFALFLEQLDDILQGTEESISYDELVNRSRDQSVSDYIVMFFRFVTAGDIRTRADFFEPFITGLSNATVDQFCKSSVEPMGEESDHIHITALSDALGVAIRVVYLDRSSCDSGGVTVNHHDFVPVGITNEKDEEASAPFITLLYRPGHYDILYPKPSCKVSDNVGK

SEQ ID NO: 39410 - DNA, 1621 bp, Arabidopsis thaliana
  misc_feature (1)..(1621): Ceres Seq. ID no. 12328588
  misc_feature (1)..(1621): Ortholog of  Ceres SEQ ID NO 12611829 as cited in SEQ ID NO 56771
  misc_feature (1)..(1621): Ortholog of  Ceres SEQ ID NO 15171735 as cited in SEQ ID NO 57234
  misc_feature (1)..(1621): Ortholog of  Ceres SEQ ID NO 13597018 as cited in SEQ ID NO 64288
  misc_feature (1)..(1621): Ortholog of  Ceres SEQ ID NO 14305124 as cited in SEQ ID NO 0
aattgatgctatgacaaacaacaacagcaagaaatttgtgtgagagtagagagtcttgcttcagttgaatcaaagattggtcctttttttttcgttttctctttcctgctttttttgtttgtagtttctgatctctcaggaaggctttttataaatttgccctcaatttctccgtccctactactctttttgatcaatttctacgggaaaaagcaccaatctttaaacccgggcatgtccttgtaatcgagtatgttgtgtaagtgatgaatttgtggtgagatctggtgagaagtttcctcttttttctcagattgcggtaaaaaaaaagagtttttaataaggaagagattgagattagattttatcgcttttgtttgtgtgatatgggtaacgtgaacgcgagagaagaagcgaatagtaacaacgcttctgctgttgaagacgaagacgctgagatttgttctcgtgaagctatgtctgctgcttctgatggtaaccatgtcgctcctcctgagcttatgggtcaatctcctcctcatagccctcgagctactcagtctcctctcatgtttgctcctcaggttccggtgcttccacttcaaagacctgatgaaattcatatccctaatccttcgtggatgcaatcgccatcttcgttgtatgaagaagcttctaacgaacaaggaatccctacgatgatcacttggtgtcatggaggcaaggagattgctgtggagggatcatgggataattggaagacaagaagtcggctgcagagatctgggaaggacttcactatcatgaaagtgttaccttcaggagtctatgagtacaggttcattgtggatggacagtggaggcatgcccctgagctccctttagctagagatgatgctgggaacactttcaacattttggatcttcaggactatgttcctgaagacattcaaagcatatctgggtttgagcctccgcaatctccagagaatagttacagcaacttgcttctcggagctgaggactactctaaagaaccgcctgtggttcccccgcacctacaaatgacactgctgaacttgccggcagccaatcctgacattccatctccgctgccgagacctcagcatgtcattctcaatcatctttacatgcagaagggcaaaagtggtccttctgtggttgcgcttggttccactcaccgatttctagcaaagtatgtaactgtggtgctctacaaatccctgcagaggtgagtgaagatgatgcaattccaatgggtagttagcatgtggatcctcggcatgctcttatctattttggtgttaaaacgttaactcatggagtatgggtgaggctatatagaaaggagacacacgaagagagttatttccaggcaaagtattccctcgatacagcgaattttgttgtctttaaaagttgtcaataaggtttaccaacagaatgaagatgcagtattcagtcagtgtctgtgtaatcttttgatttgaagacttcatcatctgttttttttttagcatagaagaatgcaggaacgacttcacttgtaaaaccggcaaatcttttttatggttttgttttggggctttcaagttttcac

SEQ ID NO: 39411 - protein, 289 aa, Arabidopsis thaliana
  peptide (1)..(289): Ceres Seq. ID no. 12328589
MGNVNAREEANSNNASAVEDEDAEICSREAMSAASDGNHVAPPELMGQSPPHSPRATQSPLMFAPQVPVLPLQRPDEIHIPNPSWMQSPSSLYEEASNEQGIPTMITWCHGGKEIAVEGSWDNWKTRSRLQRSGKDFTIMKVLPSGVYEYRFIVDGQWRHAPELPLARDDAGNTFNILDLQDYVPEDIQSISGFEPPQSPENSYSNLLLGAEDYSKEPPVVPPHLQMTLLNLPAANPDIPSPLPRPQHVILNHLYMQKGKSGPSVVALGSTHRFLAKYVTVVLYKSLQR

SEQ ID NO: 39412 - protein, 259 aa, Arabidopsis thaliana
  peptide (1)..(259): Ceres Seq. ID no. 12328590
MSAASDGNHVAPPELMGQSPPHSPRATQSPLMFAPQVPVLPLQRPDEIHIPNPSWMQSPSSLYEEASNEQGIPTMITWCHGGKEIAVEGSWDNWKTRSRLQRSGKDFTIMKVLPSGVYEYRFIVDGQWRHAPELPLARDDAGNTFNILDLQDYVPEDIQSISGFEPPQSPENSYSNLLLGAEDYSKEPPVVPPHLQMTLLNLPAANPDIPSPLPRPQHVILNHLYMQKGKSGPSVVALGSTHRFLAKYVTVVLYKSLQR

SEQ ID NO: 39413 - protein, 244 aa, Arabidopsis thaliana
  peptide (1)..(244): Ceres Seq. ID no. 12328591
MGQSPPHSPRATQSPLMFAPQVPVLPLQRPDEIHIPNPSWMQSPSSLYEEASNEQGIPTMITWCHGGKEIAVEGSWDNWKTRSRLQRSGKDFTIMKVLPSGVYEYRFIVDGQWRHAPELPLARDDAGNTFNILDLQDYVPEDIQSISGFEPPQSPENSYSNLLLGAEDYSKEPPVVPPHLQMTLLNLPAANPDIPSPLPRPQHVILNHLYMQKGKSGPSVVALGSTHRFLAKYVTVVLYKSLQR

SEQ ID NO: 39414 - DNA, 1758 bp, Arabidopsis thaliana; identical to SEQ ID NO: 37701
  misc_feature (1)..(1758): Ceres Seq. ID no. 13580639
  misc_feature (1)..(1758): Ortholog of  Ceres SEQ ID NO 15177320 as cited in SEQ ID NO 52645
  misc_feature (1)..(1758): Ortholog of  Ceres SEQ ID NO 15171359 as cited in SEQ ID NO 57279
  misc_feature (1)..(1758): Ortholog of  Ceres SEQ ID NO 14313840 as cited in SEQ ID NO 59568
  misc_feature (1)..(1758): Ortholog of  Ceres SEQ ID NO 13662245 as cited in SEQ ID NO 62708
  misc_feature (1)..(1758): Ortholog of  Ceres SEQ ID NO 14314084 as cited in SEQ ID NO 63256
  misc_feature (1)..(1758): Ortholog of  Ceres SEQ ID NO 14303091 as cited in SEQ ID NO 66369

SEQ ID NO: 39415 - protein, 474 aa, Arabidopsis thaliana; identical to SEQ ID NO: 37702
  peptide (1)..(474): Ceres Seq. ID no. 13580640

SEQ ID NO: 39416 - DNA, 1309 bp, Arabidopsis thaliana
  misc_feature (1)..(1309): Ceres Seq. ID no. 12330719
  misc_feature (1)..(1309): Ortholog of  Ceres SEQ ID NO 15168500 as cited in SEQ ID NO 57041
cacttttaattaaaacggtgccgtttctcccaggaacctctttcggtcggacgagaaagccaaaaacgtagcaaaacatcgatcctccgagtccgagattcaggaattggtaatggcggctatgtcagcggttctttctctgggtttaggaacactccgcccttcgcatcgttccttgtcctgtttcgattccctccggcaccaccagacatcttttctccgttgccaccaaagtctcatctctagaaataccacgaggtctccgctcaacaagattcttcaggcttgccttcaatccagtggattctgcaaatggtgatgctttggtgtcatcatccgatgaaagttctgagattgtatttatgggtaccggaaccagtgaagggattcctcgtgtcagctgcctcactaatcctttgaaaacatgttcggtatgcacaaaagcaacagaaccaggaaacagaaataggagacttaacaccagcattcttgttcggtacattagaccatccggaacaagtaatatcctcattgattgtggcaagttcttctaccatagtgcccttcgatggtttcccaccttcgggctaagaacacttgatgcagttgtaattactcattctcatgctgacgcaattggaggtctctgaaactgacaagtcttgatgatcttcgtgattggacaaacaatgtccaacctcacattccaatttacactgctatacgtgatctcgaggtgatgaagaagacccattattacttggttgatacaagtgtcatcatacccggagctgcagtctcagagttggagtttaaagtcatacacgaggaccagccatttgtggtaaacgatctgaagatcaccccattacctgtatggcatggaagtaactaccgttcccttggtttccgctttggtaatgtctgctacataagcgatgtcagtgacataccggaagaaacctacccgctccttaaagactgtgatctcctaattatggatgctttgaggcctgaccggtcttcagcaacacactttggcctcccaagggcgttagaggaagttcggaaaatcaaaccaaaaagaacccttttcaccggaatgatgcatttgatggaccacgagaaggtgagcgaagaactggagaaacttaggaacacagaaggcctcgatatccaactgagctacgatggtcttcgtgtaccaatctcaatttaactcggtttattccttttttccctggtataaccggtttataattatatacataaaataaatttccttttttgtaatgacctgtatatgtgc

SEQ ID NO: 39417 - protein, 159 aa, Arabidopsis thaliana
  peptide (1)..(159): Ceres Seq. ID no. 12330720
MKKTHYYLVDTSVIIPGAAVSELEFKVIHEDQPFVVNDLKITPLPVWHGSNYRSLGFRFGNVCYISDVSDIPEETYPLLKDCDLLIMDALRPDRSSATHFGLPRALEEVRKIKPKRTLFTGMMHLMDHEKVSEELEKLRNTEGLDIQLSYDGLRVPISI

SEQ ID NO: 39418 - protein, 95 aa, Arabidopsis thaliana
  peptide (1)..(95): Ceres Seq. ID no. 12330721
MGTGTSEGIPRVSCLTNPLKTCSVCTKATEPGNRNRRLNTSILVRYIRPSGTSNILIDCGKFFYHSALRWFPTFGLRTLDAVVITHSHADAIGGL

SEQ ID NO: 39419 - DNA, 1094 bp, Arabidopsis thaliana
  misc_feature (1)..(1094): Ceres Seq. ID no. 12422438
  misc_feature (1)..(1094): Ortholog of  Ceres SEQ ID NO 15177067 as cited in SEQ ID NO 52085
  misc_feature (1)..(1094): Ortholog of  Ceres SEQ ID NO 14309480 as cited in SEQ ID NO 0
  misc_feature (1)..(1094): Ortholog of  Ceres SEQ ID NO 14312472 as cited in SEQ ID NO 0
gcaattcaccggaacttagccgacgagcactgatcaaatcaaccggagaagcgaagctatagatctactatctccttcacagttgctatcagagatgtataataatatgggaccccggcctggaatggcaatgcctcaggcaaatcctcagcctagcccatttgggaatccgttctctggacctggctctggacttatccggagtggcttgggagcttatggggagaagattttcggttctagctctgagtatgtgcagagcaacataagtcgctacttctccgatcctcaatactattttcaagtgaatgaccagtatgtgaggaacaagttgaagattgttctacttccattccttcacaggggacactggactcgaatatcagaaccagttgggggtagactttcatacaaaccaccgatatacgatataaatgcaccagacttatacattccgctcatggcctttggcacttacgttgttcttgctggtttgtcactaggactctatggaaagtttactccagaagctctgaactggctttttgtgaaaggaatggttggctggtttttgcaagtgatgctgctgaagataacattgctttcacttggaagcggagaagcccctctcttggatattgtggcatatgcaggctatactttcacaggcctttgtctagctgttcttggcaagataatctggggatactcttactatgttttgattccgtggacctgcttatgcactggggttttcttagtgaagacaatgaagcgagttctctttgcagaatctaggagttatgactcaagcaggcatcactatctcttgatctttgttgctttagcccagtttcctcttttgatctggcttggtaacattagtgtgaattggctattttgaaacgcagtacgtttatattgttgtgaaaaacacctctgaggttatgtagcagaatttggaatgtcctcctgatggatatattatatggtagttgagctttttttggtttagacttctgtatgtcaaacatcaatatggaaagaaaagtgttatctctctttcatatcttcttttatgaatctcacttttc

SEQ ID NO: 39420 - protein, 269 aa, Arabidopsis thaliana
  peptide (1)..(269): Ceres Seq. ID no. 12422439
MYNNMGPRPGMAMPQANPQPSPFGNPFSGPGSGLIRSGLGAYGEKIFGSSSEYVQSNISRYFSDPQYYFQVNDQYVRNKLKIVLLPFLHRGHWTRISEPVGGRLSYKPPIYDINAPDLYIPLMAFGTYVVLAGLSLGLYGKFTPEALNWLFVKGMVGWFLQVMLLKITLLSLGSGEAPLLDIVAYAGYTFTGLCLAVLGKIIWGYSYYVLIPWTCLCTGVFLVKTMKRVLFAESRSYDSSRHHYLLIFVALAQFPLLIWLGNISVNWLF

SEQ ID NO: 39421 - protein, 265 aa, Arabidopsis thaliana
  peptide (1)..(265): Ceres Seq. ID no. 12422440
MGPRPGMAMPQANPQPSPFGNPFSGPGSGLIRSGLGAYGEKIFGSSSEYVQSNISRYFSDPQYYFQVNDQYVRNKLKIVLLPFLHRGHWTRISEPVGGRLSYKPPIYDINAPDLYIPLMAFGTYVVLAGLSLGLYGKFTPEALNWLFVKGMVGWFLQVMLLKITLLSLGSGEAPLLDIVAYAGYTFTGLCLAVLGKIIWGYSYYVLIPWTCLCTGVFLVKTMKRVLFAESRSYDSSRHHYLLIFVALAQFPLLIWLGNISVNWLF

SEQ ID NO: 39422 - protein, 259 aa, Arabidopsis thaliana
  peptide (1)..(259): Ceres Seq. ID no. 12422441
MAMPQANPQPSPFGNPFSGPGSGLIRSGLGAYGEKIFGSSSEYVQSNISRYFSDPQYYFQVNDQYVRNKLKIVLLPFLHRGHWTRISEPVGGRLSYKPPIYDINAPDLYIPLMAFGTYVVLAGLSLGLYGKFTPEALNWLFVKGMVGWFLQVMLLKITLLSLGSGEAPLLDIVAYAGYTFTGLCLAVLGKIIWGYSYYVLIPWTCLCTGVFLVKTMKRVLFAESRSYDSSRHHYLLIFVALAQFPLLIWLGNISVNWLF

SEQ ID NO: 39423 - DNA, 1341 bp, Arabidopsis thaliana
  misc_feature (1)..(1341): Ceres Seq. ID no. 12371095
  misc_feature (1)..(1341): Ortholog of  Ceres SEQ ID NO 14312357 as cited in SEQ ID NO 59727
aaaatgacagtaacaatataagtgaaaaacataatttcattagctttaagtcacgaggcacgaccattgaacatgcgagaaacgcgtgtacccaaactcattggttagttttgagagcagcagcgtattcttacacagttctcatatgtttaactccattcactctctcaaaaggttcccatctttatcaaaagacttgctaaaatcttctctttctttctcctttcatcacactcttgagtccttgtctctgtttttagtcacctgaagaaaaaatatatggagaacggagaatctaaccaagaaaatctcaaatctctcaaccacgacgaatcgcttaagaagccatctgcttcctccgtcgttgtagataggttaaaacgtgatgaatggagcgaaggagctgtttcgactttactcgaagcttatgagtcaaaatgggttctcagaaacagagccaagcttaagggacaagactgggaagacgtggctaaacacgtgtcctcacgcgccactcacaccaagtcaccaaagactcagactcagtgcaagaacaagatcgagtccatgaagaaacggtaccgttctgagtccgctactgctgatggctcctcttggcctctttatcctcgtcttgatcatctcctacgtggaactcagcctcagcctcagcctcaagctgttctgcctctgaattgctctgttcctctgctcttacttgagccgccgttgcctgcggtggctcatccgccgcagatttcttacggatccaacggcgtcggcaagattcctaaggaagacggattcaagccggagaacaaaccggaaaaagatgcggagatggatacagacagtagtacgcctgtggttaaaacgaaggtgagagggaagaaagtgaagagaagatataaagaagagaaggaagagatcgccggaagtatacggtggttagcggaggtggtgatgagatcagagagagcaagaatggagacgatgaaagagatagagagaatgagagctgaagctgaagctaagagaggagaattggatttgaaacggacggagataatggcgaatactcagctagagattgctagaatctttgctgctgcagcttcttctggacagaacaaaggtgttgattcttcattaaggatcggaagaaattgagttctgctttttatattggagactcaagatgttgtgtgtacataccaagtgttgttttgtcaaaatttctcagagagagaccaataattgtttcctggggtagatggcgatttccacatttctaccagcaaatgtatgcttttgccatatgaatatcatcaatctttagtc

SEQ ID NO: 39424 - protein, 296 aa, Arabidopsis thaliana
  peptide (1)..(296): Ceres Seq. ID no. 12371096
MENGESNQENLKSLNHDESLKKPSASSVVVDRLKRDEWSEGAVSTLLEAYESKWVLRNRAKLKGQDWEDVAKHVSSRATHTKSPKTQTQCKNKIESMKKRYRSESATADGSSWPLYPRLDHLLRGTQPQPQPQAVLPLNCSVPLLLLEPPLPAVAHPPQISYGSNGVGKIPKEDGFKPENKPEKDAEMDTDSSTPVVKTKVRGKKVKRRYKEEKEEIAGSIRWLAEVVMRSERARMETMKEIERMRAEAEAKRGELDLKRTEIMANTQLEIARIFAAAASSGQNKGVDSSLRIGRN

SEQ ID NO: 39425 - protein, 200 aa, Arabidopsis thaliana
  peptide (1)..(200): Ceres Seq. ID no. 12371097
MKKRYRSESATADGSSWPLYPRLDHLLRGTQPQPQPQAVLPLNCSVPLLLLEPPLPAVAHPPQISYGSNGVGKIPKEDGFKPENKPEKDAEMDTDSSTPVVKTKVRGKKVKRRYKEEKEEIAGSIRWLAEVVMRSERARMETMKEIERMRAEAEAKRGELDLKRTEIMANTQLEIARIFAAAASSGQNKGVDSSLRIGRN

SEQ ID NO: 39426 - DNA, 1509 bp, Arabidopsis thaliana
  misc_feature (1)..(1509): Ceres Seq. ID no. 13491876
  misc_feature (1)..(1509): Ortholog of  Ceres SEQ ID NO 14312216 as cited in SEQ ID NO 53930
  misc_feature (1)..(1509): Ortholog of  Ceres SEQ ID NO 13656404 as cited in SEQ ID NO 65806
  misc_feature (1)..(1509): Ortholog of  Ceres SEQ ID NO 12779935 as cited in SEQ ID NO 66774
  misc_feature (1)..(1509): Ortholog of  Ceres SEQ ID NO 13598695 as cited in SEQ ID NO 67368
  misc_feature (1)..(1509): Ortholog of  Ceres SEQ ID NO 13591174 as cited in SEQ ID NO 68289
tctcgctatcaatcacacacatgcaacagtacaagatttgtcagagtccacagaaatcgatcttttcgagtcaagattttcagctctgttcaggactccggcggagatgaagagtgtgttgcgtattgcggcggcgatattctggctttggctgtttatcgtgttaggtgtgattgggagtgggaatgtgagagatacagacgatgagatctcgttactcgaaagtcaattggtggtgacatctccgtcgcagcttcttatggtgcctctcactttgattcaggctgctgcctccaaaggagctgtgtgcctggatggaacactacctggttatcatctacaccctggttctggatcaggagctaaccggtggctcatccaactcgagggtggaggatggtgcaacacacgtaggagctgtatcttccggaaaaccactcgccgtggttcatcaaatcatatggagaaagttttggccttcactggaatattgagcaataaatctaatgagaatcctgacttcttcaactggaacagagtcaaattgcgttactgcgatggtgcctctttcaccggcgatagtcaggatgagagctcacaactttactatagaggacaacgaatctggcattcagctatggaagaactactctctaaaggcatgcaaaaagcagaacaggctctactttctggatgttcagctgggggattagcttccatcctacactgcgatcagttcaaggaactatttccgggcactacgacagtgaaatgcttaagtgatgctggaatgtttatggatgcagtggatgtctctgggggccactcgctccggaaaatgttccaaggtgttgttacagtacagaacctccaaaaggaactgtccactgcttgtacaaagcatttggatccaacttcgtgcttctttccccagaacttggtttcaggcattaagactccaatgtttcttctcaatgcagcatatgacgcttggcaggtacaagagagtttagctccaccatcagttgacctaagcggctcttggaaggcatgcaaatctgatcactcgcattgtaattcatctcagatccagttcttccaagacttcaggactcatatggtagatgctgtaaagtctttcgcgacatcgacacataacggtgtgttcataaactcatgcttcgctcactgccaatctgaaagacaggacacttggtatgcaccagattctcctactcttcatggcaagaccgttgctgaatctgttggtgattggtactttgacagaacaacagtgaaagccattgactgtccttacccctgtgacaaaacatgtcacaatctcatcttcaagtgagatgacaaatgacatatactcttcaaactcaaacagcttacttgattcttataccatactaccattagtaacaacaattcctgaaaaaccgcatttcatcttttacataatatgtgctattttgactcaaataaagttagtttttcgtgtgt

SEQ ID NO: 39427 - protein, 451 aa, Arabidopsis thaliana
  peptide (1)..(451): Ceres Seq. ID no. 13491877
LAINHTHATVQDLSESTEIDLFESRFSALFRTPAEMKSVLRIAAAIFWLWLFIVLGVIGSGNVRDTDDEISLLESQLVVTSPSQLLMVPLTLIQAAASKGAVCLDGTLPGYHLHPGSGSGANRWLIQLEGGGWCNTRRSCIFRKTTRRGSSNHMEKVLAFTGILSNKSNENPDFFNWNRVKLRYCDGASFTGDSQDESSQLYYRGQRIWHSAMEELLSKGMQKAEQALLSGCSAGGLASILHCDQFKELFPGTTTVKCLSDAGMFMDAVDVSGGHSLRKMFQGVVTVQNLQKELSTACTKHLDPTSCFFPQNLVSGIKTPMFLLNAAYDAWQVQESLAPPSVDLSGSWKACKSDHSHCNSSQIQFFQDFRTHMVDAVKSFATSTHNGVFINSCFAHCQSERQDTWYAPDSPTLHGKTVAESVGDWYFDRTTVKAIDCPYPCDKTCHNLIFK

SEQ ID NO: 39428 - protein, 416 aa, Arabidopsis thaliana
  peptide (1)..(416): Ceres Seq. ID no. 13491878
MKSVLRIAAAIFWLWLFIVLGVIGSGNVRDTDDEISLLESQLVVTSPSQLLMVPLTLIQAAASKGAVCLDGTLPGYHLHPGSGSGANRWLIQLEGGGWCNTRRSCIFRKTTRRGSSNHMEKVLAFTGILSNKSNENPDFFNWNRVKLRYCDGASFTGDSQDESSQLYYRGQRIWHSAMEELLSKGMQKAEQALLSGCSAGGLASILHCDQFKELFPGTTTVKCLSDAGMFMDAVDVSGGHSLRKMFQGVVTVQNLQKELSTACTKHLDPTSCFFPQNLVSGIKTPMFLLNAAYDAWQVQESLAPPSVDLSGSWKACKSDHSHCNSSQIQFFQDFRTHMVDAVKSFATSTHNGVFINSCFAHCQSERQDTWYAPDSPTLHGKTVAESVGDWYFDRTTVKAIDCPYPCDKTCHNLIFK

SEQ ID NO: 39429 - protein, 365 aa, Arabidopsis thaliana
  peptide (1)..(365): Ceres Seq. ID no. 13491879
MVPLTLIQAAASKGAVCLDGTLPGYHLHPGSGSGANRWLIQLEGGGWCNTRRSCIFRKTTRRGSSNHMEKVLAFTGILSNKSNENPDFFNWNRVKLRYCDGASFTGDSQDESSQLYYRGQRIWHSAMEELLSKGMQKAEQALLSGCSAGGLASILHCDQFKELFPGTTTVKCLSDAGMFMDAVDVSGGHSLRKMFQGVVTVQNLQKELSTACTKHLDPTSCFFPQNLVSGIKTPMFLLNAAYDAWQVQESLAPPSVDLSGSWKACKSDHSHCNSSQIQFFQDFRTHMVDAVKSFATSTHNGVFINSCFAHCQSERQDTWYAPDSPTLHGKTVAESVGDWYFDRTTVKAIDCPYPCDKTCHNLIFK

SEQ ID NO: 39430 - DNA, 1116 bp, Arabidopsis thaliana
  misc_feature (1)..(1116): Ceres Seq. ID no. 13487214
  misc_feature (1)..(1116): Ortholog of  Ceres SEQ ID NO 14304224 as cited in SEQ ID NO 56350
  misc_feature (1)..(1116): Ortholog of  Ceres SEQ ID NO 13597679 as cited in SEQ ID NO 65073
atggtgcttgacatggcttctcacttgtacacaaatccacctcaaaaccttcactttatttcttcttcttcttcccttaaacctcatttatgcctctctttcaaacgcataaaccctaaacacaaatcctcttcctcttccgtcttcgtcccttacgcatcacagagttccattgccattacctccaaggaaagatggtctctcaatggaatgtctgctcttgtcaccggcggcactcgtggaattgggcgtgcgattgtggaggaattggctggtcttggagcagaagttcacacttgcgctcggaatgagtacgagctggagaattgtttgagtgattggaaccgttctggttttcgagttgctggatccgtttgcgatgtctctgatcgatctcagagagaggctttgatggagaccgtgtcatctgtgtttgaagggaagcttcatatccttgtaaacaatgttgggacgaacattaggaaaccaatggtagagtttactgctggagaattttcgactctgatgtctacgaatttcgaatcggttttccatttatgtcaacttgcttatccattgcttagagaatctaaagctggaagtgttgtgttcatctcttctgtttctggttttgtttccctcaagaatatgtcggtccaatcttcaaccaaaggagcaattaatcaacttacgagaagtctggcttgcgagtgggccaaagacaatataaggatcaatgctgttgccccgtggtatatcaaaacatctatggtggagcaagtccttagcaacaaagagtacctagaagaagtctactcagtaactcctcttggtcgacttggcgaaccgagagaggtgtcttctgcagtggcttttttatgcctacctgcatcatcatatattacagggcagattctttgtgttgatggtggaatgtcaataaacggtttcttcccacgacatgattaggccactctattgttttactagtttccttgggatcctttttgttttatctttagcatgtctcctttctcccgtgaaagacagttcatcgatatgagatgagaattgaagttgtgctactaagtctactgttaatgaaaaggataattt

SEQ ID NO: 39431 - protein, 322 aa, Arabidopsis thaliana
  peptide (1)..(322): Ceres Seq. ID no. 13487215
MVLDMASHLYTNPPQNLHFISSSSSLKPHLCLSFKRINPKHKSSSSSVFVPYASQSSIAITSKERWSLNGMSALVTGGTRGIGRAIVEELAGLGAEVHTCARNEYELENCLSDWNRSGFRVAGSVCDVSDRSQREALMETVSSVFEGKLHILVNNVGTNIRKPMVEFTAGEFSTLMSTNFESVFHLCQLAYPLLRESKAGSVVFISSVSGFVSLKNMSVQSSTKGAINQLTRSLACEWAKDNIRINAVAPWYIKTSMVEQVLSNKEYLEEVYSVTPLGRLGEPREVSSAVAFLCLPASSYITGQILCVDGGMSINGFFPRHD

SEQ ID NO: 39432 - protein, 318 aa, Arabidopsis thaliana
  peptide (1)..(318): Ceres Seq. ID no. 13487216
MASHLYTNPPQNLHFISSSSSLKPHLCLSFKRINPKHKSSSSSVFVPYASQSSIAITSKERWSLNGMSALVTGGTRGIGRAIVEELAGLGAEVHTCARNEYELENCLSDWNRSGFRVAGSVCDVSDRSQREALMETVSSVFEGKLHILVNNVGTNIRKPMVEFTAGEFSTLMSTNFESVFHLCQLAYPLLRESKAGSVVFISSVSGFVSLKNMSVQSSTKGAINQLTRSLACEWAKDNIRINAVAPWYIKTSMVEQVLSNKEYLEEVYSVTPLGRLGEPREVSSAVAFLCLPASSYITGQILCVDGGMSINGFFPRHD

SEQ ID NO: 39433 - protein, 252 aa, Arabidopsis thaliana
  peptide (1)..(252): Ceres Seq. ID no. 13487217
MSALVTGGTRGIGRAIVEELAGLGAEVHTCARNEYELENCLSDWNRSGFRVAGSVCDVSDRSQREALMETVSSVFEGKLHILVNNVGTNIRKPMVEFTAGEFSTLMSTNFESVFHLCQLAYPLLRESKAGSVVFISSVSGFVSLKNMSVQSSTKGAINQLTRSLACEWAKDNIRINAVAPWYIKTSMVEQVLSNKEYLEEVYSVTPLGRLGEPREVSSAVAFLCLPASSYITGQILCVDGGMSINGFFPRHD

SEQ ID NO: 39434 - DNA, 1191 bp, Arabidopsis thaliana; identical to SEQ ID NO: 35737
  misc_feature (1)..(1191): Ceres Seq. ID no. 12328954
  misc_feature (1)..(1191): Ortholog of  Ceres SEQ ID NO 12609770 as cited in SEQ ID NO 51477
  misc_feature (1)..(1191): Ortholog of  Ceres SEQ ID NO 15177764 as cited in SEQ ID NO 57561

SEQ ID NO: 39435 - protein, 258 aa, Arabidopsis thaliana; identical to SEQ ID NO: 35738
  peptide (1)..(258): Ceres Seq. ID no. 12328955

SEQ ID NO: 39436 - protein, 242 aa, Arabidopsis thaliana; identical to SEQ ID NO: 35739
  peptide (1)..(242): Ceres Seq. ID no. 12328956

SEQ ID NO: 39437 - protein, 131 aa, Arabidopsis thaliana; identical to SEQ ID NO: 35740
  peptide (1)..(131): Ceres Seq. ID no. 12328957

SEQ ID NO: 39438 - DNA, 1930 bp, Arabidopsis thaliana
  misc_feature (1)..(1930): Ceres Seq. ID no. 13489532
  misc_feature (1)..(1930): Ortholog of  Ceres SEQ ID NO 14310803 as cited in SEQ ID NO 58463
  misc_feature (1)..(1930): Ortholog of  Ceres SEQ ID NO 13663769 as cited in SEQ ID NO 60793
agctccgtcatcataacagcgttaacaaacggcgtcccctgtcgaaagtctctctctttctcgcttctctgaaaaaattgggatcattttgataggagcgactctgttccttcgccgccgatacgcactcttcttcatcggatttgttcctctggtgggattgtagctctccatgtgttgtactagtgcctcttaggacaatgttttggagcttatagtcaaattctgtgaaaactttgaggtgggaattgtgagatcctgtatgatgaagatatccttgaattgcatatatggctttgttgattgatgttctcatctcttgccacctaagggttttgattcggccactgtatctgctaggggttcgcttctggaagaaatatgggtgagactctcatcaccaccctgtctatggagaactatcacccgtcaacactgctatccatggattcaggtgcttttactcatgaagaatcagagagggatatgaatgggtctctcatacttactggaccgcctgatattaatctaccactctcttctgaagctaggccatctctgcttttgtggaacgaacactgtgacatcttagacgttggacttggacctcagctatatgagcctgaggctgttgttcatgtgcctaaggttgctaagaagtacaacaagcgtgttgatagtgcatggggtgcttggcttttcttcagtttctacttcaaacctgttttggatgagaagtctaaaagtaagttaacgagggacagcaatggcttgtctgggtatgataaatctgatttgcagctcgactcgttcttggttcagcatgacatggagaatatgtacatgtgggtgttcaaggaaaagcctgaaaatgcccttggcaagatgcagctgcggagctacatgaacggacactcacgcgagggtgagcgtcctttcccttttagtgtggacaaaggttttgtccgctctcataggatgcagaggaaacattaccgtggtctctctaacccacagtgcctccatggaatcgaagttgtttattcacccaacctttctgtactcagcgaggatgaaaagaagaagtggacagaactcacaggtcgagatgtgaactttgctattccagctgaagctagtgattacggttcatggaggaatctcccaaacaccgaatttgaggctgagagacctcttcctctggctaaagctaacgggcacacccacctgaaaaagctgaatggtacctgtctaaacctgtctacacattccccagaccatgcagttgatacagtggaagttcaactcgctggtagcaataaacgcaaaagggattgtcttgctctaggaaactgcgatgactcgagctcaagtgagaaatctctggacatgaaaatccatgcaacggagctgccttggtcaaatgattttagcggggtgatgaagaatgtgtacggtccagtcacagccgcaaaaacgatatatgaagacgacagagggttcttgatagttatgagcctgccatttgttgattccggaagggtgaaagtgacatggaggaatacaccagcacatggaatagtgaagatatcatgtgtaagtacagcatgtgagccattcatcaagagacatgatagaacatttaagctaacagatccaacaccagagcattgcccaccgggggaatttgtccgcgaagtctccctgccgaacaggattccagatgacgccaagcttgaagcttaccgggacgaaacaggaacaacactagaggttttagtgcctaaacaccgaatgggaccagaggagcatgaggttcgcgtctgtctccgtccgttcgtgctagagtgagattgtagcgcataacttcttaaaagaattttattgttcatgtatcattggattattcatatttaatcatatttactcc

SEQ ID NO: 39439 - protein, 489 aa, Arabidopsis thaliana
  peptide (1)..(489): Ceres Seq. ID no. 13489533
MGETLITTLSMENYHPSTLLSMDSGAFTHEESERDMNGSLILTGPPDINLPLSSEARPSLLLWNEHCDILDVGLGPQLYEPEAVVHVPKVAKKYNKRVDSAWGAWLFFSFYFKPVLDEKSKSKLTRDSNGLSGYDKSDLQLDSFLVQHDMENMYMWVFKEKPENALGKMQLRSYMNGHSREGERPFPFSVDKGFVRSHRMQRKHYRGLSNPQCLHGIEVVYSPNLSVLSEDEKKKWTELTGRDVNFAIPAEASDYGSWRNLPNTEFEAERPLPLAKANGHTHLKKLNGTCLNLSTHSPDHAVDTVEVQLAGSNKRKRDCLALGNCDDSSSSEKSLDMKIHATELPWSNDFSGVMKNVYGPVTAAKTIYEDDRGFLIVMSLPFVDSGRVKVTWRNTPAHGIVKISCVSTACEPFIKRHDRTFKLTDPTPEHCPPGEFVREVSLPNRIPDDAKLEAYRDETGTTLEVLVPKHRMGPEEHEVRVCLRPFVLE

SEQ ID NO: 39440 - protein, 479 aa, Arabidopsis thaliana
  peptide (1)..(479): Ceres Seq. ID no. 13489534
MENYHPSTLLSMDSGAFTHEESERDMNGSLILTGPPDINLPLSSEARPSLLLWNEHCDILDVGLGPQLYEPEAVVHVPKVAKKYNKRVDSAWGAWLFFSFYFKPVLDEKSKSKLTRDSNGLSGYDKSDLQLDSFLVQHDMENMYMWVFKEKPENALGKMQLRSYMNGHSREGERPFPFSVDKGFVRSHRMQRKHYRGLSNPQCLHGIEVVYSPNLSVLSEDEKKKWTELTGRDVNFAIPAEASDYGSWRNLPNTEFEAERPLPLAKANGHTHLKKLNGTCLNLSTHSPDHAVDTVEVQLAGSNKRKRDCLALGNCDDSSSSEKSLDMKIHATELPWSNDFSGVMKNVYGPVTAAKTIYEDDRGFLIVMSLPFVDSGRVKVTWRNTPAHGIVKISCVSTACEPFIKRHDRTFKLTDPTPEHCPPGEFVREVSLPNRIPDDAKLEAYRDETGTTLEVLVPKHRMGPEEHEVRVCLRPFVLE

SEQ ID NO: 39441 - protein, 468 aa, Arabidopsis thaliana
  peptide (1)..(468): Ceres Seq. ID no. 13489535
MDSGAFTHEESERDMNGSLILTGPPDINLPLSSEARPSLLLWNEHCDILDVGLGPQLYEPEAVVHVPKVAKKYNKRVDSAWGAWLFFSFYFKPVLDEKSKSKLTRDSNGLSGYDKSDLQLDSFLVQHDMENMYMWVFKEKPENALGKMQLRSYMNGHSREGERPFPFSVDKGFVRSHRMQRKHYRGLSNPQCLHGIEVVYSPNLSVLSEDEKKKWTELTGRDVNFAIPAEASDYGSWRNLPNTEFEAERPLPLAKANGHTHLKKLNGTCLNLSTHSPDHAVDTVEVQLAGSNKRKRDCLALGNCDDSSSSEKSLDMKIHATELPWSNDFSGVMKNVYGPVTAAKTIYEDDRGFLIVMSLPFVDSGRVKVTWRNTPAHGIVKISCVSTACEPFIKRHDRTFKLTDPTPEHCPPGEFVREVSLPNRIPDDAKLEAYRDETGTTLEVLVPKHRMGPEEHEVRVCLRPFVLE

SEQ ID NO: 39442 - DNA, 1301 bp, Arabidopsis thaliana
  misc_feature (1)..(1301): Ceres Seq. ID no. 12329272
  misc_feature (1)..(1301): Ortholog of  Ceres SEQ ID NO 13582222 as cited in SEQ ID NO 56130
  misc_feature (1)..(1301): Ortholog of  Ceres SEQ ID NO 15175048 as cited in SEQ ID NO 59975
  misc_feature (1)..(1301): Ortholog of  Ceres SEQ ID NO 13597333 as cited in SEQ ID NO 63974
  misc_feature (1)..(1301): Ortholog of  Ceres SEQ ID NO 13599307 as cited in SEQ ID NO 0
  misc_feature (1)..(1301): Ortholog of  Ceres SEQ ID NO 15179517 as cited in SEQ ID NO 0
aaaacaaaatccccaaattttcaacaaggataagagccggaagctcatcgccggtgaacggaactagggtttcattcatccccaaattgataacaagaaaatggctcatgcttgcgtctctacatcggcttcttctctcagattcacagctggattcgtctccgctagtcccaatggctcctctttcgattctcccaagctttctcttcctttcgagcctctccgttcaaggaagacgaataagttagttagcgatagaaagaattggaagaattcaactccgaaagctgtatattccggcaatctctggacaccggagattccgtctcctcaaggagtttggtccattagagatgatttacaagtcccttcttcgccgtattttcctgcttatgctcaaggacaaggaccacctcctatggtgcaagaacgtttccagagtatcattagtcagctcttccaatataggattattcgctgtggtggtgctgtggatgacgatatggcaaacataattgtagctcaactcctgtatcttgatgctgttgatcctactaaggatattgtcatgtatgttaattctcctggtggatcagttacagctggcatggctatattcgatactatgaggcacatccggcctgatgtgtccactgtttgtgttggtctagctgctagtatgggagcttttctgcttagtgctggaaccaaaggaaaaagatacagtctaccaaactcaaggataatgatccatcagccgcttggtggagctcaaggtggccaaaccgacattgacattcaggcaaatgaaatgctgcatcacaaggcaaacctaaacggttacctcgcataccacactggtcaaagcctggagaagataaaccaggacacagaccgtgatttcttcatgagtgccaaagaagcaaaagagtatggacttatcgacggtgttatcatgaaccctcttaaagctctccagccacttgcagcagcttaatcgcctaaaggtagtggttcagctttagcacttgttcttttttgggcctttgatgaactgagattttccatgaaatatgtttctattctacaaggaaaatcagatttgtttgggatcaaactctgtagttgatacatacatgaagaccaaagtaaagtttcttactgtgctgtttgattgaacaacctatgatcttttaatttgttttactgaatctggtagttacacccagctttgtagcaacattcataataaggcttttgatgttgactgtctttagtggtaaggagtagaagattgatgc

SEQ ID NO: 39443 - protein, 298 aa, Arabidopsis thaliana
  peptide (1)..(298): Ceres Seq. ID no. 12329273
MAHACVSTSASSLRFTAGFVSASPNGSSFDSPKLSLPFEPLRSRKTNKLVSDRKNWKNSTPKAVYSGNLWTPEIPSPQGVWSIRDDLQVPSSPYFPAYAQGQGPPPMVQERFQSIISQLFQYRIIRCGGAVDDDMANIIVAQLLYLDAVDPTKDIVMYVNSPGGSVTAGMAIFDTMRHIRPDVSTVCVGLAASMGAFLLSAGTKGKRYSLPNSRIMIHQPLGGAQGGQTDIDIQANEMLHHKANLNGYLAYHTGQSLEKINQDTDRDFFMSAKEAKEYGLIDGVIMNPLKALQPLAAA

SEQ ID NO: 39444 - protein, 192 aa, Arabidopsis thaliana
  peptide (1)..(192): Ceres Seq. ID no. 12329274
MVQERFQSIISQLFQYRIIRCGGAVDDDMANIIVAQLLYLDAVDPTKDIVMYVNSPGGSVTAGMAIFDTMRHIRPDVSTVCVGLAASMGAFLLSAGTKGKRYSLPNSRIMIHQPLGGAQGGQTDIDIQANEMLHHKANLNGYLAYHTGQSLEKINQDTDRDFFMSAKEAKEYGLIDGVIMNPLKALQPLAAA

SEQ ID NO: 39445 - protein, 164 aa, Arabidopsis thaliana
  peptide (1)..(164): Ceres Seq. ID no. 12329275
MANIIVAQLLYLDAVDPTKDIVMYVNSPGGSVTAGMAIFDTMRHIRPDVSTVCVGLAASMGAFLLSAGTKGKRYSLPNSRIMIHQPLGGAQGGQTDIDIQANEMLHHKANLNGYLAYHTGQSLEKINQDTDRDFFMSAKEAKEYGLIDGVIMNPLKALQPLAAA

SEQ ID NO: 39446 - DNA, 1318 bp, Arabidopsis thaliana
  misc_feature (1)..(1318): Ceres Seq. ID no. 13494113
  misc_feature (1)..(1318): Ortholog of  Ceres SEQ ID NO 15174890 as cited in SEQ ID NO 53624
agacaaaacaaacaaacaaaacttcagtctctctgcaaagctccatcctttgtggttgtgtcgtagatagcccattcgagtggttaaaagttgaaacttttatgtccacttgaatcctttttttttggattttatctgatcactcgttttgtgtctctgaatctctatcccgtggattcgcatctggatttgttcttttttcatttttattcgagcggcttatctttctcggatccatctgatatcgatttgattctctttggtcaatcgttgaaatggcggatgcgtggaaggatttagcttcagggacagttggaggagcggctcagctagttgttggtcatccatttgacacaatcaaagtcaaacttcagagccaaccgactccagcaccaggccaacttccaaggtacaccggtgcaatcgatgcggttaaacagaccgttgcttctgaaggaactaaaggtttgtacaaaggtatgggagctccactggcaaccgttgctgccttcaatgcggttttgttcactgtgagaggtcaaatggaagggctgcttaggtctgaagctggaattcctttgaccattagtcaacagtttgtggccggtgcaggcgctggtttcgctgtttcgttccttgcttgtcctactgagttgatcaaatgcaggttgcaagcacaaggtgcattagctggtgcctctactacaagctcagtggttgcagccgtgaaatacggtggaccaatggatgtagcccgtcatgtcctacgatcagaaggcggagcacgaggtctattcaaaggtttattcccgacattcgcccgtgaagtcccgggaaatgcaacaatgtttgcagcctacgaagctttcaagcggtttttagccggtggttcagacacttcaagcttaggacaagggtcattgatcatggcgggtggagtcgctggtgcgtcgttttggggaattgtatatccgacagatgttgtgaagagtgttcttcaagtcgacgattacaaaaacccgaaatacacggggtcgatggatgctttccggaagattctgaaatctgaaggagttaaaggtttgtataaaggatttggtccagctatggctaggagtgttcctgctaatgctgcttgcttcttggcttatgagatgacaaggtcaagcttgggataaaccggttcgttttgggtttaactgttggtcctatttctggatgttccattgtcattaacctctctgtttttagatttgattcttttgaaatttctgcaaaaattatgtatctcttacacagtttatttcaactatctctt

SEQ ID NO: 39447 - protein, 300 aa, Arabidopsis thaliana
  peptide (1)..(300): Ceres Seq. ID no. 15222914
MADAWKDLASGTVGGAAQLVVGHPFDTIKVKLQSQPTPAPGQLPRYTGAIDAVKQTVASEGTKGLYKGMGAPLATVAAFNAVLFTVRGQMEGLLRSEAGIPLTISQQFVAGAGAGFAVSFLACPTELIKCRLQAQGALAGASTTSSVVAAVKYGGPMDVARHVLRSEGGARGLFKGLFPTFAREVPGNATMFAAYEAFKRFLAGGSDTSSLGQGSLIMAGGVAGASFWGIVYPTDVVKSVLQVDDYKNPKYTGSMDAFRKILKSEGVKGLYKGFGPAMARSVPANAACFLAYEMTRSSLG

SEQ ID NO: 39448 - protein, 232 aa, Arabidopsis thaliana
  peptide (1)..(232): Ceres Seq. ID no. 15222915
MGAPLATVAAFNAVLFTVRGQMEGLLRSEAGIPLTISQQFVAGAGAGFAVSFLACPTELIKCRLQAQGALAGASTTSSVVAAVKYGGPMDVARHVLRSEGGARGLFKGLFPTFAREVPGNATMFAAYEAFKRFLAGGSDTSSLGQGSLIMAGGVAGASFWGIVYPTDVVKSVLQVDDYKNPKYTGSMDAFRKILKSEGVKGLYKGFGPAMARSVPANAACFLAYEMTRSSLG

SEQ ID NO: 39449 - protein, 211 aa, Arabidopsis thaliana
  peptide (1)..(211): Ceres Seq. ID no. 15222916
MEGLLRSEAGIPLTISQQFVAGAGAGFAVSFLACPTELIKCRLQAQGALAGASTTSSVVAAVKYGGPMDVARHVLRSEGGARGLFKGLFPTFAREVPGNATMFAAYEAFKRFLAGGSDTSSLGQGSLIMAGGVAGASFWGIVYPTDVVKSVLQVDDYKNPKYTGSMDAFRKILKSEGVKGLYKGFGPAMARSVPANAACFLAYEMTRSSLG

SEQ ID NO: 39450 - DNA, 1294 bp, Arabidopsis thaliana
  misc_feature (1)..(1294): Ceres Seq. ID no. 12328856
  misc_feature (1)..(1294): Ortholog of  Ceres SEQ ID NO 13638750 as cited in SEQ ID NO 52185
atcagacatcagagggaacttggaggacacagagaagcgcaaattatcagacagagtgagaacgaagaagaagaaagcacaggatgctaagcttgagatattcattaccttatcttcttcttcaaacaagggaatcatcaactaagctcttcaccaaaaagcctaacaatgttgtggtttgtgcggcgagaggtccaagacctcggtctcctcgtgtatggaaaacaaggaagaggattggaactatctctaaagctgccaaaatgattgcttgtataaaaggattgtcgaatgttaaagaagaagtttatggagcgcttgattccttcattgcttgggaattagagttccctcttgttatagttaagaaggcattagttatacttgaagatgaaaaagaatggaagaagattattcaggtgacaaaatggatgctgagtaaaggccaaggaagaacaatgggaacttacttctcattactaaatgctttagcagaagataatcgccttgacgaagctgaggaattgtggaacaaattgttcatggaacatttagaaggaactcctagaaagttcttcaacaaaatgatctctatatattacaagagagatatgcaccaaaagctcttcgaggtctttgctgacatggaggagcttggagtgaaaccgaacgttgcgattgtgtctatggttggaaaagtgtttgtgaaactagagatgaaggataagtacgagaaactgatgaagaaatatcctccaccacagtgggagtttagatacatcaaaggaagacgtgttaaggtcaaggcaaagcagctgaatgagctaagcgaaggtgaaggtggtttaagcagcgacgaagataagattgacaatgagattgagagtgaagaagaagatggtgaggatctcagtgaagaggaagaagatgaaaaagaacttttgggtggaagtcaaggacagattacttctagagaacccagtcttgatcatttggactcttcatgagcttttgagatcgtatctaccgttgaatcatctataaggaaaatagatagacggccaaggttcttcaaagaagctttctggggctgagcttgggtttctgacgaaaacatgaccagaaaagttttgaactatctgagcttaagagtcaaaacaaggtatagatttgaagagtcaactaaaaagagtattaaactcagcaaaaagattaaatactgtaaaatcttttagtacgactgtgtaagctctgaaaacaaaaattattgtataatttcagacaataatttcag

SEQ ID NO: 39451 - protein, 307 aa, Arabidopsis thaliana
  peptide (1)..(307): Ceres Seq. ID no. 12328857
MLSLRYSLPYLLLQTRESSTKLFTKKPNNVVVCAARGPRPRSPRVWKTRKRIGTISKAAKMIACIKGLSNVKEEVYGALDSFIAWELEFPLVIVKKALVILEDEKEWKKIIQVTKWMLSKGQGRTMGTYFSLLNALAEDNRLDEAEELWNKLFMEHLEGTPRKFFNKMISIYYKRDMHQKLFEVFADMEELGVKPNVAIVSMVGKVFVKLEMKDKYEKLMKKYPPPQWEFRYIKGRRVKVKAKQLNELSEGEGGLSSDEDKIDNEIESEEEDGEDLSEEEEDEKELLGGSQGQITSREPSLDHLDSS

SEQ ID NO: 39452 - protein, 247 aa, Arabidopsis thaliana
  peptide (1)..(247): Ceres Seq. ID no. 12328858
MIACIKGLSNVKEEVYGALDSFIAWELEFPLVIVKKALVILEDEKEWKKIIQVTKWMLSKGQGRTMGTYFSLLNALAEDNRLDEAEELWNKLFMEHLEGTPRKFFNKMISIYYKRDMHQKLFEVFADMEELGVKPNVAIVSMVGKVFVKLEMKDKYEKLMKKYPPPQWEFRYIKGRRVKVKAKQLNELSEGEGGLSSDEDKIDNEIESEEEDGEDLSEEEEDEKELLGGSQGQITSREPSLDHLDSS

SEQ ID NO: 39453 - protein, 191 aa, Arabidopsis thaliana
  peptide (1)..(191): Ceres Seq. ID no. 12328859
MLSKGQGRTMGTYFSLLNALAEDNRLDEAEELWNKLFMEHLEGTPRKFFNKMISIYYKRDMHQKLFEVFADMEELGVKPNVAIVSMVGKVFVKLEMKDKYEKLMKKYPPPQWEFRYIKGRRVKVKAKQLNELSEGEGGLSSDEDKIDNEIESEEEDGEDLSEEEEDEKELLGGSQGQITSREPSLDHLDSS

SEQ ID NO: 39454 - DNA, 1248 bp, Arabidopsis thaliana
  misc_feature (1)..(1248): Ceres Seq. ID no. 13499909
  misc_feature (1)..(1248): Ortholog of  Ceres SEQ ID NO 14312293 as cited in SEQ ID NO 58744
  misc_feature (1)..(1248): Ortholog of  Ceres SEQ ID NO 15177596 as cited in SEQ ID NO 59731
ctctctctctctttttttctaatcatacgaacacaatctgcttcaagaattagggttttgatcagacacaaaaaagtatctctctccgtagttttgtgtcaaggttttgcaagaagcggcactaggtatgatgggagccaccgtaggcggagacggagacaccgcggtcgtggcggagcagaatagacagttgaaaggtgagatagcgacacatccgatgtatgagcaattattagccgcacacgtggcgtgtttaagagtagctactccaatagatcaacttccgatcattgaagctcagctttctcaatctcatcatcttctccgttcttacgcttccacggccgttggataccatcatgatcgtcacgagctcgataatttcttggcacaatatgtaatggtgttgtgtagcttcaaagaacagctgcaacagcacgtgagggttcatgccgtcgaagctgttatggcttgccgtgaaattgagaacaaccttcattctcttacaggagcaactttaggagaagggtcgggtgcgactatgtcggaggatgaggatgatcttccgatggatttctcgtcagataattccggcgttgattttagcggcggccacgatatgacgggatttggtccgttgctaccgactgaatcggaaagatcccttatggaaagagtcagacaagaactcaaactagaactcaaacagggttttaaatcgagaatcgaagatgtaagagaagagataatgaggaagagaagggctgggaaattgccaggagacacaactactgtcttgaagaattggtggcaacaacattgcaaatggccttaccctacggaagatgacaaggcaaaattggtggaggagacaggattgcagttgaagcaaatcaacaattggttcattaaccaacgcaagaggaattggcacaacaactctcactccctcacttccttgaagtccaagcgcaaacactaatctcttcttactatattagttactacctctacatatattcatactaattacactgctaagacatgcatgatacatacgtaattcatgttactgataataacgaggtgtgatcattcattaatatcatgtacttacttagcttattagatccaccgactactatatgatttgtgcgttgcgtgattactggttgttactagattgtaattcattttgtttgtattgtgcattcaaatttatctttttggtaagaacactgattttgt

SEQ ID NO: 39455 - protein, 284 aa, Arabidopsis thaliana
  peptide (1)..(284): Ceres Seq. ID no. 13499910
MMGATVGGDGDTAVVAEQNRQLKGEIATHPMYEQLLAAHVACLRVATPIDQLPIIEAQLSQSHHLLRSYASTAVGYHHDRHELDNFLAQYVMVLCSFKEQLQQHVRVHAVEAVMACREIENNLHSLTGATLGEGSGATMSEDEDDLPMDFSSDNSGVDFSGGHDMTGFGPLLPTESERSLMERVRQELKLELKQGFKSRIEDVREEIMRKRRAGKLPGDTTTVLKNWWQQHCKWPYPTEDDKAKLVEETGLQLKQINNWFINQRKRNWHNNSHSLTSLKSKRKH

SEQ ID NO: 39456 - protein, 283 aa, Arabidopsis thaliana
  peptide (1)..(283): Ceres Seq. ID no. 13499911
MGATVGGDGDTAVVAEQNRQLKGEIATHPMYEQLLAAHVACLRVATPIDQLPIIEAQLSQSHHLLRSYASTAVGYHHDRHELDNFLAQYVMVLCSFKEQLQQHVRVHAVEAVMACREIENNLHSLTGATLGEGSGATMSEDEDDLPMDFSSDNSGVDFSGGHDMTGFGPLLPTESERSLMERVRQELKLELKQGFKSRIEDVREEIMRKRRAGKLPGDTTTVLKNWWQQHCKWPYPTEDDKAKLVEETGLQLKQINNWFINQRKRNWHNNSHSLTSLKSKRKH

SEQ ID NO: 39457 - protein, 254 aa, Arabidopsis thaliana
  peptide (1)..(254): Ceres Seq. ID no. 13499912
MYEQLLAAHVACLRVATPIDQLPIIEAQLSQSHHLLRSYASTAVGYHHDRHELDNFLAQYVMVLCSFKEQLQQHVRVHAVEAVMACREIENNLHSLTGATLGEGSGATMSEDEDDLPMDFSSDNSGVDFSGGHDMTGFGPLLPTESERSLMERVRQELKLELKQGFKSRIEDVREEIMRKRRAGKLPGDTTTVLKNWWQQHCKWPYPTEDDKAKLVEETGLQLKQINNWFINQRKRNWHNNSHSLTSLKSKRKH

SEQ ID NO: 39458 - DNA, 1146 bp, Arabidopsis thaliana
  misc_feature (1)..(1146): Ceres Seq. ID no. 12489106
  misc_feature (1)..(1146): Ortholog of  Ceres SEQ ID NO 13599030 as cited in SEQ ID NO 0
ttttctctcaatcctccaattcccaaatttcaacaacaagacgaagcaaacgatgtggattgaaatcatctgcggtctcgtcatttacaaactcgtccgccgtttcttctacgacgatgaattgtccgacgtcgaaacttccgattccactgctctcttctccgtagctcacagacttgagaaactttatggtggaaaagcttatgtaggacttcgaattccagatgccgacactgcttctagacaggacattgatgttgtccttgttactaaaggagatgttgtagtgatttctgtgaagaatctatcggggattgttacggtaactagtgatggtagctgggtttgtgaaggtggcaagcatcatactactgagactttccctgatcctctggcggaggtcaagaaacaagcttcagttcttgaatcatatcttgaacagaggggagttactttacttgaaggaaatgtgtcttgcaaagttgtcattcccaatccaagttttcgtacaattcatgcattcccgagtgaggtaattacctatgaagattggcaacagctaaaaccagtatcgaaaagtaaactttctggttgggttaaaggcgcattcagcaccggaaaagagatgcaggaatcttcgcatcaaaaacttaatttcatccttggcacagcaccaacgtgggatagagtggagcttaaaagtagcaaaattgtgttaggggaattcctagagtttaaaggaaagcaggaagataccctggctttaagaaatatcaaaaggtcaaaagtcgaccgtgtctctattcagaaaacaagcatgtttggattagctccttcgaggttgcaggttctgtattcgtatagggactacagaagtgaaggcagttcagggtcagagtcgaaagaagtgactgtccggtcaagcacagaggttctgtttcaaccacgagactccacaaagatgaagaaattcaagctatcgtcgcttgtctccatttcactaagtgcctaactatgaagtgagcttattagcatgcagcagaggaagttgtcaatgtttattgtaacaattacattgtccatgactgaagtaagcttatgttattctcaagagtattgacctctttatggaaatgttttcttcgt

SEQ ID NO: 39459 - protein, 336 aa, Arabidopsis thaliana
  peptide (1)..(336): Ceres Seq. ID no. 12489107
FLSILQFPNFNNKTKQTMWIEIICGLVIYKLVRRFFYDDELSDVETSDSTALFSVAHRLEKLYGGKAYVGLRIPDADTASRQDIDVVLVTKGDVVVISVKNLSGIVTVTSDGSWVCEGGKHHTTETFPDPLAEVKKQASVLESYLEQRGVTLLEGNVSCKVVIPNPSFRTIHAFPSEVITYEDWQQLKPVSKSKLSGWVKGAFSTGKEMQESSHQKLNFILGTAPTWDRVELKSSKIVLGEFLEFKGKQEDTLALRNIKRSKVDRVSIQKTSMFGLAPSRLQVLYSYRDYRSEGSSGSESKEVTVRSSTEVLFQPRDSTKMKKFKLSSLVSISLSA

SEQ ID NO: 39460 - protein, 319 aa, Arabidopsis thaliana
  peptide (1)..(319): Ceres Seq. ID no. 12489108
MWIEIICGLVIYKLVRRFFYDDELSDVETSDSTALFSVAHRLEKLYGGKAYVGLRIPDADTASRQDIDVVLVTKGDVVVISVKNLSGIVTVTSDGSWVCEGGKHHTTETFPDPLAEVKKQASVLESYLEQRGVTLLEGNVSCKVVIPNPSFRTIHAFPSEVITYEDWQQLKPVSKSKLSGWVKGAFSTGKEMQESSHQKLNFILGTAPTWDRVELKSSKIVLGEFLEFKGKQEDTLALRNIKRSKVDRVSIQKTSMFGLAPSRLQVLYSYRDYRSEGSSGSESKEVTVRSSTEVLFQPRDSTKMKKFKLSSLVSISLSA

SEQ ID NO: 39461 - DNA, 1544 bp, Arabidopsis thaliana
  misc_feature (1)..(1544): Ceres Seq. ID no. 13491268
  misc_feature (1)..(1544): Ortholog of  Ceres SEQ ID NO 15171275 as cited in SEQ ID NO 51428
  misc_feature (1)..(1544): Ortholog of  Ceres SEQ ID NO 14307678 as cited in SEQ ID NO 59456
  misc_feature (1)..(1544): Ortholog of  Ceres SEQ ID NO 13586716 as cited in SEQ ID NO 0
aggaaaactaaaccaaagtctgtttaccagtaatatcaatcgatcgccattctcgacatttctctctctcaagctagtctaaagtttcttcttatctccttcctccgaccaaaacttcgacttctctcttattttcaccctcagagagtaaccatggatgccttgacctcgagtttggttcgatctcccatcgtaccatcgagaacttccgacaacggttctggatctatgttccttaccgccagtggccctggattcacgcgttctggttcttcaagacttcaacttcgtttaaggcaaaacgcgtctgctagatcctcaagatcattacagagcttaacaacgactgctaaaactcggagaagttttgtggttagagcttcttcagcgtctaatgatgcttcatctggttcttcccccaaaccgatcgctccgctccagctgcaatcgcctgctggtcagtttctgtctcagattttggtgagccatcctcatcttgtgcctgcagctgttgaacagcagcttgagcagcttcaaactgatcgggactctcagggacagaacaaagattcagcgtctgtacctggaaccgacatcgttctctacaggagaattgcggagttgaaggaaaacgagagaagaagaacattggaagagattttgtatgcattggtggttcaaaagttcatggaagctaacgtatcacttgtaccttcagtaagcccatcttcagatccgtctggtcgggttgatacttggccgaccaaagtggagaaactcgagcggcttcactcgcccgagatgtacgagatgattcacaaccatcttgccttgattcttggaagcagaatgggtgatctgaactctgttgcacagataagcaagctcagagttggccaagtttacgctgcttctgtgatgtatggatatttcttgaagagggtggaccaaaggtttcagcttgagaagacgatgaagattcttccgggtgggtcggatgaaagtaaaacaagcgttgagcaagccgaggggacggcaacatatcaggcggctgtatcgtctcacccagaggttggtgcatttgcgggcggagttagtgctaagggcttcggcagcgagattaaaccatcccgattaaggtcatatgtgatgtcatttgatgcggagacgctgcagagatacgccactataagatcaagagaagcagttggaatcatcgagaagcacacagaggcattgtttggtaagcctgagattgtaataacaccggagggcacagtcgattcatcgaaggacgaacagataaagatcagcttcggtggaatgaagaggctcgtcttggaggcagttactttcgggtcgttcctttgggatgttgagagccatgtagatgcgaggtaccactttgtattgaactaaaaacatggtctgtaatgcagttgactaacttatgtagcattaagaagatacccattaagggtatcattacacttgtatcaaaaatttgaggaaaagatcgtacattatatatgttattgtgatgc

SEQ ID NO: 39462 - protein, 421 aa, Arabidopsis thaliana
  peptide (1)..(421): Ceres Seq. ID no. 13491269
MDALTSSLVRSPIVPSRTSDNGSGSMFLTASGPGFTRSGSSRLQLRLRQNASARSSRSLQSLTTTAKTRRSFVVRASSASNDASSGSSPKPIAPLQLQSPAGQFLSQILVSHPHLVPAAVEQQLEQLQTDRDSQGQNKDSASVPGTDIVLYRRIAELKENERRRTLEEILYALVVQKFMEANVSLVPSVSPSSDPSGRVDTWPTKVEKLERLHSPEMYEMIHNHLALILGSRMGDLNSVAQISKLRVGQVYAASVMYGYFLKRVDQRFQLEKTMKILPGGSDESKTSVEQAEGTATYQAAVSSHPEVGAFAGGVSAKGFGSEIKPSRLRSYVMSFDAETLQRYATIRSREAVGIIEKHTEALFGKPEIVITPEGTVDSSKDEQIKISFGGMKRLVLEAVTFGSFLWDVESHVDARYHFVLN

SEQ ID NO: 39463 - protein, 396 aa, Arabidopsis thaliana
  peptide (1)..(396): Ceres Seq. ID no. 13491270
MFLTASGPGFTRSGSSRLQLRLRQNASARSSRSLQSLTTTAKTRRSFVVRASSASNDASSGSSPKPIAPLQLQSPAGQFLSQILVSHPHLVPAAVEQQLEQLQTDRDSQGQNKDSASVPGTDIVLYRRIAELKENERRRTLEEILYALVVQKFMEANVSLVPSVSPSSDPSGRVDTWPTKVEKLERLHSPEMYEMIHNHLALILGSRMGDLNSVAQISKLRVGQVYAASVMYGYFLKRVDQRFQLEKTMKILPGGSDESKTSVEQAEGTATYQAAVSSHPEVGAFAGGVSAKGFGSEIKPSRLRSYVMSFDAETLQRYATIRSREAVGIIEKHTEALFGKPEIVITPEGTVDSSKDEQIKISFGGMKRLVLEAVTFGSFLWDVESHVDARYHFVLN

SEQ ID NO: 39464 - protein, 243 aa, Arabidopsis thaliana
  peptide (1)..(243): Ceres Seq. ID no. 13491271
MEANVSLVPSVSPSSDPSGRVDTWPTKVEKLERLHSPEMYEMIHNHLALILGSRMGDLNSVAQISKLRVGQVYAASVMYGYFLKRVDQRFQLEKTMKILPGGSDESKTSVEQAEGTATYQAAVSSHPEVGAFAGGVSAKGFGSEIKPSRLRSYVMSFDAETLQRYATIRSREAVGIIEKHTEALFGKPEIVITPEGTVDSSKDEQIKISFGGMKRLVLEAVTFGSFLWDVESHVDARYHFVLN

SEQ ID NO: 39465 - DNA, 769 bp, Arabidopsis thaliana
  misc_feature (1)..(769): Ceres Seq. ID no. 13646063
  misc_feature (1)..(769): Ortholog of  Ceres SEQ ID NO 15176919 as cited in SEQ ID NO 54698
  misc_feature (1)..(769): Ortholog of  Ceres SEQ ID NO 14302702 as cited in SEQ ID NO 57154
  misc_feature (1)..(769): Ortholog of  Ceres SEQ ID NO 15179344 as cited in SEQ ID NO 0
aacgaacaaagaaacatacatcaaagctacatatactaaaagatatataatttctcgattgtcctgagccctcagaccaaaatctgaccatggacaaggttatgagaatgtcatcggagaaaggagtcgtgatcttcaccaaaagttcatgttgtctctgctacgccgtgcaaatccttttccgtgatcttagggttcaaccaacaatccacgagatcgacaactcggtcacgttaaggacttggcaacagcctttctcaacgtgcttggtaacgagaaagccagcagagagatattcaacatctcgggggagaaatatgttacctttgatgggttagcaaaagcttgcgcaaagcccggtgggtttccggagccagagattgttcattacaacccgaaagagttcgactttgggaagaagaaggcattccctttccgtgatcagcatttctttgcatcggtggagaaagcaaagcatgtcctcggatggaaaccggagttcgacttagtggagggtctcactgactcatacaaccttgatttcggtcgcggaacattccggaaagaagcggatttcaccactgacgacatgattctgagcaagaaacttgttcttcaataatcgaaatcctaagagttgctcattcttggcttgtatgattctgatcacccggttctcttaaagttctgaactttattgtcatctcacgtatgttatggtccggattttgttcgacttttctctaaagaagtcaagctagggacgatg

SEQ ID NO: 39466 - protein, 82 aa, Arabidopsis thaliana
  peptide (1)..(82): Ceres Seq. ID no. 13646064
MDKVMRMSSEKGVVIFTKSSCCLCYAVQILFRDLRVQPTIHEIDNSVTLRTWQQPFSTCLVTRKPAERYSTSRGRNMLPLMG

SEQ ID NO: 39467 - protein, 78 aa, Arabidopsis thaliana
  peptide (1)..(78): Ceres Seq. ID no. 13646065
MRMSSEKGVVIFTKSSCCLCYAVQILFRDLRVQPTIHEIDNSVTLRTWQQPFSTCLVTRKPAERYSTSRGRNMLPLMG

SEQ ID NO: 39468 - protein, 76 aa, Arabidopsis thaliana
  peptide (1)..(76): Ceres Seq. ID no. 13646066
MSSEKGVVIFTKSSCCLCYAVQILFRDLRVQPTIHEIDNSVTLRTWQQPFSTCLVTRKPAERYSTSRGRNMLPLMG

SEQ ID NO: 39469 - DNA, 2532 bp, Arabidopsis thaliana
  misc_feature (1)..(2532): Ceres Seq. ID no. 13504839
  misc_feature (1)..(2532): Ortholog of  Ceres SEQ ID NO 14306279 as cited in SEQ ID NO 56860
gaatggatataaacatcaaaattcaataattgcgatagagtatcaatcaagatcttacatataaaaaaagattcatcccccaaagaacggaacactcactcttctaaaacgatgggagagatagcaacagagttcacgccggttatggatgatgatgatgaccggtgcgttgtaccggaggtagagctcactgtacccaagaccgacgattcaactttaccggttttaacatttcggatgtgagttcttggtataggcgcgtgcattgtactctcctttatcaaccagtttttctggtacagaacgatgccgttgagtatcaccggaatctccgctcagatcgccgtcgtgccgcttggtcatctcatggcgagagtgcttccgacaaaaagattcttggaaggtacgaggtttcagtttaccttaaacccgggtgccttcaacgtcaaggaacatgttctgataactatctttgcaaattccggcgccggctctgtttacgctactcacatacttagtgctattaagctttactacaaacgttctcttcctttcctccctgcatttctcgtcatgatcaccactcagattcttggatttggttgggctggtctcttcaggaaacaccttgttgagcctggtgaaatgtggtggccaagcaatcttgttcaagtctctctctttggtgcgttacacgagaaagaaaagaaatcaagaggaggcatgagtagaactcaattcttcttaatcgtcctcgtagctagctttgcttactacatctttcctggttatcttttcaccatgttaacatcaatctcatgggtctgttggctcaatcccaaatcaattctggtaaaccaactcggttcaggtgaacatggtcttggcattggttccattggttttgattgggtcactattagtgcttatcttggaagccctttagctagtcctttgttcgcttccgtcaatgtagccattggtttcgtgctggttatgtatatcgtcacgcctgtttgttactggcttaacatttatgatgccaagaccttccctatcttctctagtcagctcttcatggggaatggctcacgttatgatgttttgagcattattgatagcaaattccatcttgaccgtgtggtttactctaggaccgggtccatcaatatgagcaccttctttgctgttacttatggtctcgggtttgctacattgtctgccaccattgtccatgttttagtcttcaacggaagtgacttgtggaagcagacaagaggggcgtttcagaagaataagaaaatggatatacacacgagaatcatgaagaaaaactacagggaagttccattgtggtggtttttggtaatccttttactgaatatcgcgcttatcatgttcatctccgtgcactacaacgctactgtgcagcttccttggtggggagtgttacttgcttgtgccattgccatcagtttcactcctttgatcggtgtcatagctgccaccactaatcaggcaccgggattgaatatcataacagagtatgttatcgggtatatctacccggaacgtcctgttgcaaacatgtgtttcaaggtctatggatacattagtatgactcaagcgctaactttcatttccgacttcaagcttggtcattacatgaagatcccgcctagatccatgttcatggctcaggtggctgggacacttgtggcggtggttgtgtacacaggaacagcctggtggttaatggaagagattcctcatctttgtgatacatccttgcttccttcagacagccaatggacttgtcccatggaccgcgttttctttgacgcctctgtgatttggggactagtgggaccacgcagggtgtttggagaccttggagaatactcaaatgtcaactggttcttcctcgttggagccatagctccactcttagtttggctagccacaaagatgtttccggctcagacatggatcgccaagattcatatccctgtccttgtgggagccaccgcaatgatgccaccagcaacagcagttaacttcactagttggctcatcgtcgcattcatctttggccacttcatcttcaagtacagaagagtgtggtggaccaagtataactatgtgttgtctggtggtttagatgctggctctgcttttatgaccatacttctgtttctagcactcggacgaaaaggaattgaagtgcagtggtggggaaattccggcgaccgagatacatgtcccttagcttcttgtccaactgctaaaggtgttgtcgtcaaaggctgtcccgtcttctagctcatgagtcatgagacaaaagcatataccaagtgctttgtacagaacacacagcaaactgataattgtaattctcggaaatgtctttactctccaagaactatatcttttgtgatagctttaaaactaggtactatcctgttctttgactgaacacaaatgctagtgattctatatgtggttccttaaaatgattttaatgcatgcttc

SEQ ID NO: 39470 - protein, 671 aa, Arabidopsis thaliana
  peptide (1)..(671): Ceres Seq. ID no. 13504840
MPLSITGISAQIAVVPLGHLMARVLPTKRFLEGTRFQFTLNPGAFNVKEHVLITIFANSGAGSVYATHILSAIKLYYKRSLPFLPAFLVMITTQILGFGWAGLFRKHLVEPGEMWWPSNLVQVSLFGALHEKEKKSRGGMSRTQFFLIVLVASFAYYIFPGYLFTMLTSISWVCWLNPKSILVNQLGSGEHGLGIGSIGFDWVTISAYLGSPLASPLFASVNVAIGFVLVMYIVTPVCYWLNIYDAKTFPIFSSQLFMGNGSRYDVLSIIDSKFHLDRVVYSRTGSINMSTFFAVTYGLGFATLSATIVHVLVFNGSDLWKQTRGAFQKNKKMDIHTRIMKKNYREVPLWWFLVILLLNIALIMFISVHYNATVQLPWWGVLLACAIAISFTPLIGVIAATTNQAPGLNIITEYVIGYIYPERPVANMCFKVYGYISMTQALTFISDFKLGHYMKIPPRSMFMAQVAGTLVAVVVYTGTAWWLMEEIPHLCDTSLLPSDSQWTCPMDRVFFDASVIWGLVGPRRVFGDLGEYSNVNWFFLVGAIAPLLVWLATKMFPAQTWIAKIHIPVLVGATAMMPPATAVNFTSWLIVAFIFGHFIFKYRRVWWTKYNYVLSGGLDAGSAFMTILLFLALGRKGIEVQWWGNSGDRDTCPLASCPTAKGVVVKGCPVF

SEQ ID NO: 39471 - protein, 651 aa, Arabidopsis thaliana
  peptide (1)..(651): Ceres Seq. ID no. 13504841
MARVLPTKRFLEGTRFQFTLNPGAFNVKEHVLITIFANSGAGSVYATHILSAIKLYYKRSLPFLPAFLVMITTQILGFGWAGLFRKHLVEPGEMWWPSNLVQVSLFGALHEKEKKSRGGMSRTQFFLIVLVASFAYYIFPGYLFTMLTSISWVCWLNPKSILVNQLGSGEHGLGIGSIGFDWVTISAYLGSPLASPLFASVNVAIGFVLVMYIVTPVCYWLNIYDAKTFPIFSSQLFMGNGSRYDVLSIIDSKFHLDRVVYSRTGSINMSTFFAVTYGLGFATLSATIVHVLVFNGSDLWKQTRGAFQKNKKMDIHTRIMKKNYREVPLWWFLVILLLNIALIMFISVHYNATVQLPWWGVLLACAIAISFTPLIGVIAATTNQAPGLNIITEYVIGYIYPERPVANMCFKVYGYISMTQALTFISDFKLGHYMKIPPRSMFMAQVAGTLVAVVVYTGTAWWLMEEIPHLCDTSLLPSDSQWTCPMDRVFFDASVIWGLVGPRRVFGDLGEYSNVNWFFLVGAIAPLLVWLATKMFPAQTWIAKIHIPVLVGATAMMPPATAVNFTSWLIVAFIFGHFIFKYRRVWWTKYNYVLSGGLDAGSAFMTILLFLALGRKGIEVQWWGNSGDRDTCPLASCPTAKGVVVKGCPVF

SEQ ID NO: 39472 - protein, 582 aa, Arabidopsis thaliana
  peptide (1)..(582): Ceres Seq. ID no. 13504842
MITTQILGFGWAGLFRKHLVEPGEMWWPSNLVQVSLFGALHEKEKKSRGGMSRTQFFLIVLVASFAYYIFPGYLFTMLTSISWVCWLNPKSILVNQLGSGEHGLGIGSIGFDWVTISAYLGSPLASPLFASVNVAIGFVLVMYIVTPVCYWLNIYDAKTFPIFSSQLFMGNGSRYDVLSIIDSKFHLDRVVYSRTGSINMSTFFAVTYGLGFATLSATIVHVLVFNGSDLWKQTRGAFQKNKKMDIHTRIMKKNYREVPLWWFLVILLLNIALIMFISVHYNATVQLPWWGVLLACAIAISFTPLIGVIAATTNQAPGLNIITEYVIGYIYPERPVANMCFKVYGYISMTQALTFISDFKLGHYMKIPPRSMFMAQVAGTLVAVVVYTGTAWWLMEEIPHLCDTSLLPSDSQWTCPMDRVFFDASVIWGLVGPRRVFGDLGEYSNVNWFFLVGAIAPLLVWLATKMFPAQTWIAKIHIPVLVGATAMMPPATAVNFTSWLIVAFIFGHFIFKYRRVWWTKYNYVLSGGLDAGSAFMTILLFLALGRKGIEVQWWGNSGDRDTCPLASCPTAKGVVVKGCPVF

SEQ ID NO: 39473 - DNA, 1435 bp, Arabidopsis thaliana
  misc_feature (1)..(1435): Ceres Seq. ID no. 12562265
  misc_feature (1)..(1435): Ortholog of  Ceres SEQ ID NO 14314404 as cited in SEQ ID NO 57421
  misc_feature (1)..(1435): Ortholog of  Ceres SEQ ID NO 13493536 as cited in SEQ ID NO 58515
  misc_feature (1)..(1435): Ortholog of  Ceres SEQ ID NO 15225741 as cited in SEQ ID NO 59606
  misc_feature (1)..(1435): Ortholog of  Ceres SEQ ID NO 12618461 as cited in SEQ ID NO 64349
atgatgaagtgagaaattctgaaaaatgggattacctcaaaataagctcagttttttctgcttcttcttcctcgtctctgtactaactcttgccccattggctttctccgagatcttcttagaggagcatttcgaaggtggatggaaaagtaggtgggtcttgtctgattggaaaagaaacgaaggcaaagctggaacctttaagcacactgccggtaaatggcccggcgatcctgacaataaaggtattcagacttataatgatgccaagcattatgcgatttctgcaaagattcctgagtttagcaacaaaaaccggactcttgttgtccagtactcagtcaagattgaacaagacattgaatgtggtggtgcttacattaagctcctgtctggctatgttaaccagaagcagtttggtggtgatactccatacagtctaatgtttggaccagatatatgcggaacacagacgaagaagcttcatgttatagtttcatatcagggacagaattatccaatcaaaaaggatttgcaatgtgaaacagacaaattaaatcatttctacacatttattctgcgtcctgacgcttcttacagcgttctggtggataataaagagagagaatttggcagtatgtacacagactgggacatccttcctccaaggaagatcaaggtcaagaatgcaaagaagccagaggactgggatgatagagagtacatcgatgaccccaacgatgtcaaacccgagggttttgattctattccacgtgaaattccagatcgtaaagctaaagagcccgaggactgggacgaggaagaaaatggtctctgggaacctccaaagatcccaaattctgcgtacaaaggtccttggaaagcaaagagaatcaagaacccgaactacaagggaaaatggaagaacccatggatagataatccagaatttgaagatgatccagatctttacgttctgaagtctatcaaatatgcaggcattgaagtatggcaggtgaaggctggctcaatctttgacaatatattgatctgcgatgacccggcatatgcaagaagcatcgtggatgactattttgcccaacacagggagtctgagaaggagttatttgcggaagcagagaaagaaagaaaagctagagaagatgaggaagctcggatagcacgggaagaaggtgaacgcaggcggaaagaaagggaccaccggtatggagacaggaggaggcgttacaaacggccgaatccacgtgattatatggatgattaccatgacgagctatgaggcgcagagtggtgggcatttggcaaagcattgggggaaattatctatattttgctttgaatgtgtgtttgtaatttcataatttgtaaccttttgtattcatattcttataatgtattttggcatgaaaacttg

SEQ ID NO: 39474 - protein, 424 aa, Arabidopsis thaliana
  peptide (1)..(424): Ceres Seq. ID no. 12562266
MGLPQNKLSFFCFFFLVSVLTLAPLAFSEIFLEEHFEGGWKSRWVLSDWKRNEGKAGTFKHTAGKWPGDPDNKGIQTYNDAKHYAISAKIPEFSNKNRTLVVQYSVKIEQDIECGGAYIKLLSGYVNQKQFGGDTPYSLMFGPDICGTQTKKLHVIVSYQGQNYPIKKDLQCETDKLNHFYTFILRPDASYSVLVDNKEREFGSMYTDWDILPPRKIKVKNAKKPEDWDDREYIDDPNDVKPEGFDSIPREIPDRKAKEPEDWDEEENGLWEPPKIPNSAYKGPWKAKRIKNPNYKGKWKNPWIDNPEFEDDPDLYVLKSIKYAGIEVWQVKAGSIFDNILICDDPAYARSIVDDYFAQHRESEKELFAEAEKERKAREDEEARIAREEGERRRKERDHRYGDRRRRYKRPNPRDYMDDYHDEL

SEQ ID NO: 39475 - protein, 285 aa, Arabidopsis thaliana
  peptide (1)..(285): Ceres Seq. ID no. 12562267
MFGPDICGTQTKKLHVIVSYQGQNYPIKKDLQCETDKLNHFYTFILRPDASYSVLVDNKEREFGSMYTDWDILPPRKIKVKNAKKPEDWDDREYIDDPNDVKPEGFDSIPREIPDRKAKEPEDWDEEENGLWEPPKIPNSAYKGPWKAKRIKNPNYKGKWKNPWIDNPEFEDDPDLYVLKSIKYAGIEVWQVKAGSIFDNILICDDPAYARSIVDDYFAQHRESEKELFAEAEKERKAREDEEARIAREEGERRRKERDHRYGDRRRRYKRPNPRDYMDDYHDEL

SEQ ID NO: 39476 - protein, 220 aa, Arabidopsis thaliana
  peptide (1)..(220): Ceres Seq. ID no. 12562268
MYTDWDILPPRKIKVKNAKKPEDWDDREYIDDPNDVKPEGFDSIPREIPDRKAKEPEDWDEEENGLWEPPKIPNSAYKGPWKAKRIKNPNYKGKWKNPWIDNPEFEDDPDLYVLKSIKYAGIEVWQVKAGSIFDNILICDDPAYARSIVDDYFAQHRESEKELFAEAEKERKAREDEEARIAREEGERRRKERDHRYGDRRRRYKRPNPRDYMDDYHDEL

SEQ ID NO: 39477 - DNA, 1282 bp, Arabidopsis thaliana
  misc_feature (1)..(1282): Ceres Seq. ID no. 12488272
  misc_feature (1)..(1282): Ortholog of  Ceres SEQ ID NO 14304879 as cited in SEQ ID NO 53767
  misc_feature (1)..(1282): Ortholog of  Ceres SEQ ID NO 12616439 as cited in SEQ ID NO 63634
atcaccattgctttgttttgttcgtcaaatataatcaattttaaatttcttctcttctcttcaaacgaatcgcctttttcgataatctctttgcatcgatttcatcatggctactcaaacggatctcgctcagcccaagcttgatatgaccaaggaggagaaagagaggttgaagtatttgcaattcgtgcaagctgctgctgtggaagctctgcttcgctttgctcttatttacgctaaggcaaaggacaagtctggtcctttgaaacctggtgttgaatctgttgaaggagctgtcaagactgtcgttggtcctgtctacgagaaataccacgacgtccctgttgaggtccttaaatacatggaccagaaggtacaattttgactctttccctatctttggatcttgctgaaagtgcctttgttgatgaacaatgaatgaatctgtgttgttgattgtatatccacttcatcgaacatatgtgattaaaaaagtacagttaaagttgtgatgatttcatatcatctctttggtagaaggttcaggttaacgggtcaatgtcattatgttctgtagagtccctctttttgaagctgacaagtttgttttgcgttgttgcaggttgatatgtctgtgactgagcttgaccgtcgtgtcccaccagtcgtcaagcaagtgtctgcccaagccatctccgctgctcagatagcacccattgtggcacgtgcgttggcctctgaggttcgacgtgctggtgttgttgaaaccgcttctggaatggctaaatccgtctactccaagtacgagcctgctgctaaggagttgtatgcaaactatgagccaaaagcaaagcagtgtgccgtttcagcttggaagaagcttaaccagcttcctctattcccaaggctgggctcaagttgctgtaccaacagctgctttctgctctgagaagtacaatgatactgtggttaaggctgcagagaaagggtacagagtcacatcgtacatgccattggttccaacagagaggatctcaaaaatcttcgctgaggagaaagctgagaccgagcctttggagttccatccacttgattgatatgggtgttttgttagtgtgattttttgttttgttgggattaaggtgaaccggatcttggttagcgattgatctctggttctcgttcttttttttctttgtcatgaacttttgttgtttcgtttaataatcaaaagttgtataatctaagtttgggattaccaccctattgagtattgagtgat

SEQ ID NO: 39478 - protein, 106 aa, Arabidopsis thaliana
  peptide (1)..(106): Ceres Seq. ID no. 12488273
MSVTELDRRVPPVVKQVSAQAISAAQIAPIVARALASEVRRAGVVETASGMAKSVYSKYEPAAKELYANYEPKAKQCAVSAWKKLNQLPLFPRLGSSCCTNSCFLL

SEQ ID NO: 39479 - protein, 92 aa, Arabidopsis thaliana
  peptide (1)..(92): Ceres Seq. ID no. 12488274
MATQTDLAQPKLDMTKEEKERLKYLQFVQAAAVEALLRFALIYAKAKDKSGPLKPGVESVEGAVKTVVGPVYEKYHDVPVEVLKYMDQKVQF

SEQ ID NO: 39480 - protein, 89 aa, Arabidopsis thaliana
  peptide (1)..(89): Ceres Seq. ID no. 12488275
MQTMSQKQSSVPFQLGRSLTSFLYSQGWAQVAVPTAAFCSEKYNDTVVKAAEKGYRVTSYMPLVPTERISKIFAEEKAETEPLEFHPLD

SEQ ID NO: 39481 - DNA, 745 bp, Arabidopsis thaliana
  misc_feature (1)..(745): Ceres Seq. ID no. 12337880
  misc_feature (1)..(745): Ortholog of  Ceres SEQ ID NO 15176099 as cited in SEQ ID NO 59451
atttcttcgtctctgtctccaaaatcgaatcaaaatctctaaagtttcaatttttttgttctgttctttttatttttttaaagaatggcttcaatttctgcaactttgccttcgccattgttactcacacagagaaaatccaatctcacatcgattcaaaaactcccattttctctaactcgaggtacgaatgatctttctccattatctcttactcgaaaccctagcagcatcagtctgatggtgaaagctagtggagaaagctcagattcatcgactgatctcgacgttgttagtacgattcagaatgtttgggataagtctgaagataggttaggtcttattggtttgggttttgctggtattgtagctctttgggcatcattgaatctcatcacggcaatcgacaaattgcccgttatctcgagcggattcgaactagttggtatcttgttctccacgtggttcacatatcgatatctcttgttcaaaccggacagacaggagctttcgaaaattgtcaagaaatcagtagcggatatacttggccagtgaaccttgtgtgtgtgataatacttcatctttggaagatgatttgtttgcaagtttgtaaaattacatgacagggtggttgttgtttctagtccaataatgtcatgcatttgaaacctgtaaatactttattgttggtttttggttgtgagcaaaatcaatcttttctaatttcaaagattctcttttatgt

SEQ ID NO: 39482 - protein, 156 aa, Arabidopsis thaliana; identical to SEQ ID NO: 34973
  peptide (1)..(156): Ceres Seq. ID no. 12337881

SEQ ID NO: 39483 - protein, 104 aa, Arabidopsis thaliana; identical to SEQ ID NO: 34974
  peptide (1)..(104): Ceres Seq. ID no. 12337882

SEQ ID NO: 39484 - DNA, 909 bp, Arabidopsis thaliana
  misc_feature (1)..(909): Ceres Seq. ID no. 13489337
  misc_feature (1)..(909): Ortholog of  Ceres SEQ ID NO 12609339 as cited in SEQ ID NO 51780
gtaatttttgggtttttttttttcgatttgatcaggcgaattccggcgaagagaagttgaagctctactcttactggagaagctcgtgtgctcatcgtgtccgtatcgccctcgctttgaaagggcttgattatgagtatataccagtgaatttgctcaagggtgatcaattcgattcagtttatcgttttgatcttcaagatttcaagaagatcaatccaatgggaactgtaccagctctggtggatggagatgttgtgattaatgattcttttgcgataataatgtatctggatgagaagtaccctgagccacctttgttacctcgtgacctccataaacgagctgtgaattaccaggcaatgagtattgtcttgtctggcatacagcctcatcaaaatctggctgttattaggtatatcgaggaaaagataaatgtggaggagaagactgcttgggttaataatgctatcacaaaaggatttacagctctcgagaaactgttggtgaattgcgctgggaaacttgcgactggtgatgaaatttacctggctgatctctttctagcaccacagatccacggagcaatcaacagattccagattaacatggaaccatacccaaatcttgcaaaatgttacgaatcatacaaggaactgcctgtgtttcaaaatgcactaccggaaaagcagccagatgctccttcttccaccaactgattccgtgaacccgtaagctacgctcagcttaataaaacctcagacaacaacaacaatgatgagagtaataccttgtactcgtacatgtatcatataaaccagttacatcttagttcctctacttttatcatataaaccagttacatcttactcacagagtttaaaatttgcaaagatatatcatacgttc

SEQ ID NO: 39485 - protein, 238 aa, Arabidopsis thaliana
  peptide (1)..(238): Ceres Seq. ID no. 13489338
NFWVFFFRFDQANSGEEKLKLYSYWRSSCAHRVRIALALKGLDYEYIPVNLLKGDQFDSVYRFDLQDFKKINPMGTVPALVDGDVVINDSFAIIMYLDEKYPEPPLLPRDLHKRAVNYQAMSIVLSGIQPHQNLAVIRYIEEKINVEEKTAWVNNAITKGFTALEKLLVNCAGKLATGDEIYLADLFLAPQIHGAINRFQINMEPYPNLAKCYESYKELPVFQNALPEKQPDAPSSTN

SEQ ID NO: 39486 - protein, 165 aa, Arabidopsis thaliana; identical to SEQ ID NO: 30557
  peptide (1)..(165): Ceres Seq. ID no. 13489339

SEQ ID NO: 39487 - protein, 144 aa, Arabidopsis thaliana
  peptide (1)..(144): Ceres Seq. ID no. 13489340
MYLDEKYPEPPLLPRDLHKRAVNYQAMSIVLSGIQPHQNLAVIRYIEEKINVEEKTAWVNNAITKGFTALEKLLVNCAGKLATGDEIYLADLFLAPQIHGAINRFQINMEPYPNLAKCYESYKELPVFQNALPEKQPDAPSSTN

SEQ ID NO: 39488 - DNA, 1644 bp, Arabidopsis thaliana
  misc_feature (1)..(1644): Ceres Seq. ID no. 13508986
  misc_feature (1)..(1644): Ortholog of  Ceres SEQ ID NO 15177141 as cited in SEQ ID NO 54147
atgtcaggattcgaagatggattttcagctgaaaagctattctcacaaggatactcatacacctacgacgatgtgatatttctaccacacttcatcgacttttccactgacgccgtctcgctatccacgcgtctcagcaagcgcgtcccactctcgatcccatgcgtcgcttcgccgatggacactgtctcggaatcccacatggctgctgcaatggctgctcttggaggaatcggaatcgtgcactataactgcgacatcgatactcaagcttccgttatccgtcacgctaaatcgcttcaagttccgattgcgtctgatgctgtttttaaatgcccagagcaccagattggttctgttgatgattttggtccttcttccttcgtttttgtctcgcagacgggaacattgacaccgaaattgttgggttatgtttcaaaatcggagtggtcgagtatgaaagatgaccaaaaggaggtgaagatatatgattacatgaagagttgtgagaacaaagattactatgtgccatgggatattgatcttgacaagattgaggcggttttggaagataagcagaaagggtttgttgttctggagaaggaaggtgagactgtgaacgtagtaacaaaagacgatgtggagagggttaaaggatatcccaagttagggtcaggaactgttggtgcagacaagaaatggatggttggtgctgctatagggacaagggaatcagacaaggagaggctagagcacttagtgaaagctggagctaatgttgtggtgttggatagttcgcaagggaactcgatttaccagcttgagatgatcaagtatgtgaagaatacgtatccggagttggatgtggtcggtgggaatgtggtgactatgtaccaggctgagaacttgatcaaagcaggagttgatgggttaagagttggtatgggatctggatctatatgcacaacacaagaggtttgtgccgttggacgaggacaggctactgccgtgtacaaagtctcgacactagctgctcagcacggtgtacctgttatcgcagatggtggcatctcaaactcaggtcacattgtgaaggctctagttctgggagcatcaacggtgatgatgggaagcttcttggctggaagcaccgaggctcctggagcctatgaatatcgaaacggtaggagagtgaagaaatacagaggtatgggttcattagaagcaatgaccaaaggaagcgaccagagatacttgggagataccgcgaaactcaagattgcacaaggagtggttggagcggttgcagataaaggctcagtgttgaagtttataccatacacaatgcatgccgtgaagcaaggttttcaagatctcggtgcttcttctttgcagtctgctcacgagctattgagagataatacccttagactcgaggctcgtaccggtgcagcacagatagaaggtggaatccatggactggtgtcttacgaaaagaaatcgttttagctttccccagtttactttcttatgttacaatgcactacagcacttgtagtgtcaacaataaggtcttgtctcacatgtaatcctgtaatagttgaatcgtgtttcttaatgctatttcactgccccatttcaatc

SEQ ID NO: 39489 - protein, 502 aa, Arabidopsis thaliana
  peptide (1)..(502): Ceres Seq. ID no. 13508987
MSGFEDGFSAEKLFSQGYSYTYDDVIFLPHFIDFSTDAVSLSTRLSKRVPLSIPCVASPMDTVSESHMAAAMAALGGIGIVHYNCDIDTQASVIRHAKSLQVPIASDAVFKCPEHQIGSVDDFGPSSFVFVSQTGTLTPKLLGYVSKSEWSSMKDDQKEVKIYDYMKSCENKDYYVPWDIDLDKIEAVLEDKQKGFVVLEKEGETVNVVTKDDVERVKGYPKLGSGTVGADKKWMVGAAIGTRESDKERLEHLVKAGANVVVLDSSQGNSIYQLEMIKYVKNTYPELDVVGGNVVTMYQAENLIKAGVDGLRVGMGSGSICTTQEVCAVGRGQATAVYKVSTLAAQHGVPVIADGGISNSGHIVKALVLGASTVMMGSFLAGSTEAPGAYEYRNGRRVKKYRGMGSLEAMTKGSDQRYLGDTAKLKIAQGVVGAVADKGSVLKFIPYTMHAVKQGFQDLGASSLQSAHELLRDNTLRLEARTGAAQIEGGIHGLVSYEKKSF

SEQ ID NO: 39490 - protein, 443 aa, Arabidopsis thaliana
  peptide (1)..(443): Ceres Seq. ID no. 13508988
MDTVSESHMAAAMAALGGIGIVHYNCDIDTQASVIRHAKSLQVPIASDAVFKCPEHQIGSVDDFGPSSFVFVSQTGTLTPKLLGYVSKSEWSSMKDDQKEVKIYDYMKSCENKDYYVPWDIDLDKIEAVLEDKQKGFVVLEKEGETVNVVTKDDVERVKGYPKLGSGTVGADKKWMVGAAIGTRESDKERLEHLVKAGANVVVLDSSQGNSIYQLEMIKYVKNTYPELDVVGGNVVTMYQAENLIKAGVDGLRVGMGSGSICTTQEVCAVGRGQATAVYKVSTLAAQHGVPVIADGGISNSGHIVKALVLGASTVMMGSFLAGSTEAPGAYEYRNGRRVKKYRGMGSLEAMTKGSDQRYLGDTAKLKIAQGVVGAVADKGSVLKFIPYTMHAVKQGFQDLGASSLQSAHELLRDNTLRLEARTGAAQIEGGIHGLVSYEKKSF

SEQ ID NO: 39491 - protein, 435 aa, Arabidopsis thaliana
  peptide (1)..(435): Ceres Seq. ID no. 13508989
MAAAMAALGGIGIVHYNCDIDTQASVIRHAKSLQVPIASDAVFKCPEHQIGSVDDFGPSSFVFVSQTGTLTPKLLGYVSKSEWSSMKDDQKEVKIYDYMKSCENKDYYVPWDIDLDKIEAVLEDKQKGFVVLEKEGETVNVVTKDDVERVKGYPKLGSGTVGADKKWMVGAAIGTRESDKERLEHLVKAGANVVVLDSSQGNSIYQLEMIKYVKNTYPELDVVGGNVVTMYQAENLIKAGVDGLRVGMGSGSICTTQEVCAVGRGQATAVYKVSTLAAQHGVPVIADGGISNSGHIVKALVLGASTVMMGSFLAGSTEAPGAYEYRNGRRVKKYRGMGSLEAMTKGSDQRYLGDTAKLKIAQGVVGAVADKGSVLKFIPYTMHAVKQGFQDLGASSLQSAHELLRDNTLRLEARTGAAQIEGGIHGLVSYEKKSF

SEQ ID NO: 39492 - DNA, 841 bp, Arabidopsis thaliana
  misc_feature (1)..(841): Ceres Seq. ID no. 13575786
  misc_feature (1)..(841): Ortholog of  Ceres SEQ ID NO 15172991 as cited in SEQ ID NO 51333
  misc_feature (1)..(841): Ortholog of  Ceres SEQ ID NO 13594870 as cited in SEQ ID NO 51929
  misc_feature (1)..(841): Ortholog of  Ceres SEQ ID NO 12635481 as cited in SEQ ID NO 0
ttttttccgctaggtttctgagatcttccattcgtctcgaattaagttgctacgatgaaaacagcaaaggggaaagataaagttaagaccacaaaggaagccttgaagccagttgatgacagaaaggtgggaaagaggaaggcaccggctgagaagcctactaaacgagagactcgtaaagagaagaaggctaaaaaggacccaaacaaaccaaaaagagctcctagtgccttctttgtctttctagaagattttagggtcacgttcaagaaagaaaatccaaatgtgaaggccgtctctgctgttgggaaagctggagggcagaaatggaagtcaatgtctcaagctgaaaaagctccatatgaagagaaagctgcaaaaaggaaagctgaatatgagaagcaaatggatgcatacaacaaaaacttggaggaagggagtgatgaatctgaaaagtctagatctgagataaatgatgaagatgaagccagtggggaggaagaactattagagaaggaagcggcaggtgatgatgaagaagaagaagaggaagaagatgacgatgatgatgacgacgaggaagaagactaaatcagggatagaaatcagattttgtatctcaagcttaactgcagatccttaagcagaagtaagtattttgtaatttgtgtgtcgacgagaactatagatctaaaatcgtgtgtttttttgtttttcttttcctaagaaagcgaaacagttgttagcatctctcaggatgtctgtttcagctttttgccacaacaaacaatgtaccaatgtctgcgttagtgatcatccaaaccaaaacataaactaatgt

SEQ ID NO: 39493 - protein, 178 aa, Arabidopsis thaliana
  peptide (1)..(178): Ceres Seq. ID no. 13575787
MKTAKGKDKVKTTKEALKPVDDRKVGKRKAPAEKPTKRETRKEKKAKKDPNKPKRAPSAFFVFLEDFRVTFKKENPNVKAVSAVGKAGGQKWKSMSQAEKAPYEEKAAKRKAEYEKQMDAYNKNLEEGSDESEKSRSEINDEDEASGEEELLEKEAAGDDEEEEEEEDDDDDDDEEED

SEQ ID NO: 39494 - DNA, 634 bp, Arabidopsis thaliana
  misc_feature (1)..(634): Ceres Seq. ID no. 12355519
  misc_feature (1)..(634): Ortholog of  Ceres SEQ ID NO 15178329 as cited in SEQ ID NO 52153
atctgtcttgtttaatttcgttactcgtcgtcgtcccttaactcgagaaaaattagggttacggattccgattagcaagcatggaagagatcaccgatggagtgaacaacatgaacttagccaccgattcgcagaagaaaaaccggattcaggtttccaacactaagaaaccattgttcttctatgtcaatctcgccaagaggtatatgcagcagtacaatgatgttgaattgtctgcccttggcatggccattgcaactgttgttactgttactgaaatactgaagaacaatggttttgctgttgagaagaagatcatgacttcaactgttgatattaaggatgatgcaagaggacgtcctgtgcagaaagctaagattgagattacgcttgtgaagtcagagaagtttgatgaactaatggctgcagccaatgaagaaaaagaagatgcagaagctcaggtgcagaactgaaaatagcttttaactattttgggtttcttgatgcttattctataaagggctttatttgtttaatttcattaatttttggcttgttatcacaatggatggtttgttgtatctgttaacttttgataggaagaatgatagctaaacaataaaacatctcggcc

SEQ ID NO: 39495 - protein, 130 aa, Arabidopsis thaliana
  peptide (1)..(130): Ceres Seq. ID no. 12355520
MEEITDGVNNMNLATDSQKKNRIQVSNTKKPLFFYVNLAKRYMQQYNDVELSALGMAIATVVTVTEILKNNGFAVEKKIMTSTVDIKDDARGRPVQKAKIEITLVKSEKFDELMAAANEEKEDAEAQVQN

SEQ ID NO: 39496 - protein, 120 aa, Arabidopsis thaliana
  peptide (1)..(120): Ceres Seq. ID no. 12355521
MNLATDSQKKNRIQVSNTKKPLFFYVNLAKRYMQQYNDVELSALGMAIATVVTVTEILKNNGFAVEKKIMTSTVDIKDDARGRPVQKAKIEITLVKSEKFDELMAAANEEKEDAEAQVQN

SEQ ID NO: 39497 - protein, 88 aa, Arabidopsis thaliana
  peptide (1)..(88): Ceres Seq. ID no. 12355522
MQQYNDVELSALGMAIATVVTVTEILKNNGFAVEKKIMTSTVDIKDDARGRPVQKAKIEITLVKSEKFDELMAAANEEKEDAEAQVQN

SEQ ID NO: 39498 - DNA, 1311 bp, Arabidopsis thaliana
  misc_feature (1)..(1311): Ceres Seq. ID no. 13491424
  misc_feature (1)..(1311): Ortholog of  Ceres SEQ ID NO 15170595 as cited in SEQ ID NO 57510
  misc_feature (1)..(1311): Ortholog of  Ceres SEQ ID NO 13655218 as cited in SEQ ID NO 68872
aaccatatgaatctcacgatcaaagataatatctcatcatctatatagtatttgtctcgatattagagacgtacacactttgtttatactcaaatcaatatgggatctttcgtgaaagaagaaacgtcgtcgttgatgacagattttttggagaagtgcggtggttatgcggtggtggatggagggtttgcgacggagctacagcgccacggagctgatatcaatgatccactttggagtgctaagtgccttattacttctcctcaccttgttacaaaggtgcacttggattaccttgaatctggagcaaatatcatcataacagcatcttaccaggcgacgatacaaggttttgtggcaaaaggtctatcggtgggagaagcagaaaatttacttagaaggagcgttgaaatcacgtacgaggcacgtgagattttctacaacagatgcaccaagggttcatgggatttcgcctacgctggaaaagcttcccggagaccaattcttgtcgcagcttccgttggtagctatggagcttatctcgctgacggctccgaatacagtgggatatatggagattctgtgagtaaggagacattaaaggatttccatagaagaagagttcaaatcttagcaaaatctggagccgacctaatagcattcgagactattccaaataagctcgaagcagaggcttatgcggatcttcttgaggaggaagatatcgatattccggcatggttctcgttcacttccaaggacggagtcagtgtgccacgaggagattcagttgtagaatgtgcgaaagtggcagattcatgcaagaacgtggtggccattggaatcaattgtactgcaccaagatacattcatgctttaattatctccttgcgccagatgacacgcaaaccaatcgttgtatacccaaacagcggggaagtctacgacggtctgaacaagaaatggattaagtcagagggagagtcagaggaggattttgtgtcgtacgtgagtaaatggagagatgcaggagcttctctgtttggaggatgttgtcggactactccaaacaccatcagagccattgctaaagttctctccgacgaaccttctgcagcatcaaaacccaaattcgggcaatagacttgtcaacggtgaatttctatgcttgtgatgtcaggaaggagtttaaaatgtacaataacgcaagcgtagttctgtaatctactaatatgttgaaactataaataatggtaaactatgttagagacaactgtgtaattagcgtatgataataatggagtttaaacg

SEQ ID NO: 39499 - protein, 347 aa, Arabidopsis thaliana
  peptide (1)..(347): Ceres Seq. ID no. 13491425
MGSFVKEETSSLMTDFLEKCGGYAVVDGGFATELQRHGADINDPLWSAKCLITSPHLVTKVHLDYLESGANIIITASYQATIQGFVAKGLSVGEAENLLRRSVEITYEAREIFYNRCTKGSWDFAYAGKASRRPILVAASVGSYGAYLADGSEYSGIYGDSVSKETLKDFHRRRVQILAKSGADLIAFETIPNKLEAEAYADLLEEEDIDIPAWFSFTSKDGVSVPRGDSVVECAKVADSCKNVVAIGINCTAPRYIHALIISLRQMTRKPIVVYPNSGEVYDGLNKKWIKSEGESEEDFVSYVSKWRDAGASLFGGCCRTTPNTIRAIAKVLSDEPSAASKPKFGQ

SEQ ID NO: 39500 - protein, 335 aa, Arabidopsis thaliana
  peptide (1)..(335): Ceres Seq. ID no. 13491426
MTDFLEKCGGYAVVDGGFATELQRHGADINDPLWSAKCLITSPHLVTKVHLDYLESGANIIITASYQATIQGFVAKGLSVGEAENLLRRSVEITYEAREIFYNRCTKGSWDFAYAGKASRRPILVAASVGSYGAYLADGSEYSGIYGDSVSKETLKDFHRRRVQILAKSGADLIAFETIPNKLEAEAYADLLEEEDIDIPAWFSFTSKDGVSVPRGDSVVECAKVADSCKNVVAIGINCTAPRYIHALIISLRQMTRKPIVVYPNSGEVYDGLNKKWIKSEGESEEDFVSYVSKWRDAGASLFGGCCRTTPNTIRAIAKVLSDEPSAASKPKFGQ

SEQ ID NO: 39501 - DNA, 1141 bp, Arabidopsis thaliana
  misc_feature (1)..(1141): Ceres Seq. ID no. 13593329
  misc_feature (1)..(1141): Ortholog of  Ceres SEQ ID NO 13503500 as cited in SEQ ID NO 68001
  misc_feature (1)..(1141): Ortholog of  Ceres SEQ ID NO 15174327 as cited in SEQ ID NO 0
atcttacactaattattaaactaatcacccattaactctaaatctcaacaaatcataatctattataaagaagacacacatctcctaaatcgaawwacccttattattattcattctctctaatcaaatcctcttctctctcaaatctcaatctccgattatgacagactacagagtttaccctgcatcaaaacctcccgccatcgtcggtggcggtgccccaaccaccaatccaactttcccggcgaacaaagctcagctctacaacgcaaatcgtcccgcttaccgtccaccagctggtcgtcgtcgtactagccatacccgtggatgttgctgccgttgctgttgctggacgatattcgtaatcatcctcttactcctcatcgtcgccgccgcatcagccgtcgtatacctaatctaccgtcctcaacgacctagcttcactgtctctgaactcaaaatctccactctcaacttcacatccgccgctcgtctcaccaccgccatttccctctccgtcatcgccagaaaccctaacaaaaacgtcggattcatctacgacgtcaccgacatcacactctataaagtatccaccggcggagatgatgatgtagtcattggtaaaggaacgatcgcggcgttttctcacgggaaagaacacgactacgcttagaagtacgatcggaagtcctccggaagaactcgatgagatctcggcgggtaagctgaaaggagatctgaaggcgaagaaagcagtggcgattaagattgttttgaactcgaaggtgaaagtgaagatgggagctctgaaaactcctaaatcgggaattagggttacttgtgaagggattaaattggtggctccgacgggaaagaaggcgacgacggctacgacttccgccgctaagtgtaaggttgatccaagatttaagatctggaaaattactttctaaatatagtaaacaaataatggaatcacattcttagttttttcttcattttctttttattactccattgtttcaattttcatttctttttaaatttgatttcatatacagttctttgattcctgtaagactttatttttttggtttatgtaaatgaagatataaatatttgtgttcaaawrawraamraa

SEQ ID NO: 39502 - protein, 170 aa, Arabidopsis thaliana
  peptide (1)..(170): Ceres Seq. ID no. 15221211
MTDYRVYPASKPPAIVGGGAPTTNPTFPANKAQLYNANRPAYRPPAGRRRTSHTRGCCCRCCCWTIFVIILLLLIVAAASAVVYLIYRPQRPSFTVSELKISTLNFTSAARLTTAISLSVIARNPNKNVGFIYDVTDITLYKVSTGGDDDVVIGKGTIAAFSHGKEHDYA

SEQ ID NO: 39503 - DNA, 1404 bp, Arabidopsis thaliana
  misc_feature (1)..(1404): Ceres Seq. ID no. 12379516
  misc_feature (1)..(1404): Ortholog of  Ceres SEQ ID NO 14315626 as cited in SEQ ID NO 52943
  misc_feature (1)..(1404): Ortholog of  Ceres SEQ ID NO 14302742 as cited in SEQ ID NO 66899
  misc_feature (1)..(1404): Ortholog of  Ceres SEQ ID NO 14313536 as cited in SEQ ID NO 67925
aaaaagtttaggttttggtttttttgtccgtcgtagtgatgcagcaaccaccgtcaaacgccgccggagctggacagataccatcaggacaacagcatttgtggatgatgatgcaacagcagcagcagcagcagcagatgcagttgtctgcggcgccactaggtcaacatcagtacggtattggatctcagaatccaggatccgctagcgatgttaagtcgttgtggatcggagacttgcagcaatggatggacgagaactacatcatgagcgtctttgctcagtctggcgaggctacatcagctaaagtcattcgtaataagctgacgggacaatctgaaggttatggattcattgagttcgtcagccactctgtagcagagcgggttttgcagacttacaatggtgctcccatgccgagcactgaacagacgtttaggctcaactgggctcaggctggggctggagagaaaagattccagactgaagggcctgaccataccattttcgtaggtgacttggcacctgaggtgactgactatatgctctcggacacattcaagaatgtgtatgggtctgtcaaaggggctaaagttgtgcttgacaggaccactggaaggtccaaggggtatgggtttgttaggtttgcggatgaaaatgagcagatgcgtgccatgactgaaatgaatggtcaatactgctcgacaaggcctatgcgtattggtccggctgccaataagaatgctcttccgatgcaaccagctatgtatcaaaacactcaaggagcaaatgctggagataatgatcctaataacacaacaatttttgttggaggtctggatgctaatgttacagacgatgaattaaagtcaatttttggtcaatttggtgaacttcttcatgtgaaaatacctccaggaaaacgttgtggattcgttcaatatgccaacaaggcgtctgcagagcatgcactttcggtgctgaatggaacacaattaggtggacaaagcatccgtctttcgtggggacgtagtccaaacaagcagtctgatcaagcgcaatggaacggtggtggatactatggataccctccacagccacagggcggctatggttatgcagctcaaccaccaactcaagaccctaatgcgtactatggtggttacactggctatggcaactatcagcagcaacgtcagtgaaacatcaacatcagctatttctaccaatgtcttggaacaaaagatgagcgattgtgtcttattaggacttctagattaaaagtgctctctttttgtttgagttttattttgcaaatgagtcgatcttgaatttgctatgaacaaagtgtttactgaatgttgaaactttattctgttgttttttaaaataaatatttatcct

SEQ ID NO: 39504 - protein, 387 aa, Arabidopsis thaliana
  peptide (1)..(387): Ceres Seq. ID no. 12379517
MQQPPSNAAGAGQIPSGQQHLWMMMQQQQQQQQMQLSAAPLGQHQYGIGSQNPGSASDVKSLWIGDLQQWMDENYIMSVFAQSGEATSAKVIRNKLTGQSEGYGFIEFVSHSVAERVLQTYNGAPMPSTEQTFRLNWAQAGAGEKRFQTEGPDHTIFVGDLAPEVTDYMLSDTFKNVYGSVKGAKVVLDRTTGRSKGYGFVRFADENEQMRAMTEMNGQYCSTRPMRIGPAANKNALPMQPAMYQNTQGANAGDNDPNNTTIFVGGLDANVTDDELKSIFGQFGELLHVKIPPGKRCGFVQYANKASAEHALSVLNGTQLGGQSIRLSWGRSPNKQSDQAQWNGGGYYGYPPQPQGGYGYAAQPPTQDPNAYYGGYTGYGNYQQQRQ

SEQ ID NO: 39505 - protein, 365 aa, Arabidopsis thaliana
  peptide (1)..(365): Ceres Seq. ID no. 12379518
MMMQQQQQQQQMQLSAAPLGQHQYGIGSQNPGSASDVKSLWIGDLQQWMDENYIMSVFAQSGEATSAKVIRNKLTGQSEGYGFIEFVSHSVAERVLQTYNGAPMPSTEQTFRLNWAQAGAGEKRFQTEGPDHTIFVGDLAPEVTDYMLSDTFKNVYGSVKGAKVVLDRTTGRSKGYGFVRFADENEQMRAMTEMNGQYCSTRPMRIGPAANKNALPMQPAMYQNTQGANAGDNDPNNTTIFVGGLDANVTDDELKSIFGQFGELLHVKIPPGKRCGFVQYANKASAEHALSVLNGTQLGGQSIRLSWGRSPNKQSDQAQWNGGGYYGYPPQPQGGYGYAAQPPTQDPNAYYGGYTGYGNYQQQRQ

SEQ ID NO: 39506 - protein, 364 aa, Arabidopsis thaliana
  peptide (1)..(364): Ceres Seq. ID no. 12379519
MMQQQQQQQQMQLSAAPLGQHQYGIGSQNPGSASDVKSLWIGDLQQWMDENYIMSVFAQSGEATSAKVIRNKLTGQSEGYGFIEFVSHSVAERVLQTYNGAPMPSTEQTFRLNWAQAGAGEKRFQTEGPDHTIFVGDLAPEVTDYMLSDTFKNVYGSVKGAKVVLDRTTGRSKGYGFVRFADENEQMRAMTEMNGQYCSTRPMRIGPAANKNALPMQPAMYQNTQGANAGDNDPNNTTIFVGGLDANVTDDELKSIFGQFGELLHVKIPPGKRCGFVQYANKASAEHALSVLNGTQLGGQSIRLSWGRSPNKQSDQAQWNGGGYYGYPPQPQGGYGYAAQPPTQDPNAYYGGYTGYGNYQQQRQ

SEQ ID NO: 39507 - DNA, 1900 bp, Arabidopsis thaliana
  misc_feature (1)..(1900): Ceres Seq. ID no. 13491239
  misc_feature (1)..(1900): Ortholog of  Ceres SEQ ID NO 14310375 as cited in SEQ ID NO 59612
ctctttctatcgctctttgattttgtttctcattgttttgcttcaaattacgcattcgaatctgatcttcgttgatctctgtggaagaaacagataagagaaaatcgcatgaatttttttagaaaactaggttttaatccttcgattgcaagctacttcactaatacgagtcttctgatctcaattcttagtttttctcctcaattgccgatttctctctttcttttcgagcagaaatcgttagatcctttatcgctgtgtaatagtagtactaattttaataatcttgagagtaattactccgttcattgttgaatcatggagtccggaggcaaaactaatcgtcagctgcgtaaagctatttgcgtctcaacagacgagaagatgaagaagaagagatcaccttcagtgatagtgattggaggtggtatggctggaatttcagccgctcgcactcttcaggatgcttcctttcaggttgttgtattggagtctcgtgacagaattggtggacgagttcacactgattactcatttggttttccagttgatctcggtgcatcttggttgcatggtgtctgtaaagagaatcctttggctgcagtaattggtagattaggattacctctttatcgtactagcggtgacaattcggttttgtatgatcacgatcttgagagttatgctctgttcgacaaggctggtaaccaagtttctcaagagttggtgacaaaagttggcgaaaattttgagcacattctggaagagatctgtaaagtcagggatgagcaggacgaagacatgtcaatagctcaagccttttctattgtatttaagaggaaccctgaattgaggttggagggacttgcccataatgtgcttcagtggtacttgtgccgcatggaaggatggtttgctgctgatgctgaaaccatctcggcaaagtgttgggatcaggaagaactgttgcccggtggacatggtcttatggttagagggtatcgccctgtaatcaacactctctcgaaaggtcttgatatacgactaagtcacagaattaccaagatttcaaggcgctacagtggtgtgaaggtgactacagagaaaggagacacgtttgttgcggatgctgcagtcattgctcttcctctaggagtcttaaagtcaggaatgataacattcgaaccaaagcttccacagtggaaacaagaagctatcaacgatctcggtgttggaatcgagaacaagatcatattgaattttgacaacgtcttttggccaaacgtagagtttttaggagtcgttgcagaaacttcctacggatgcagttatttcttgaacctgcataaagccacaagccatcctgtccttgtttacatgccggctggtcagctcgctagagacatcgagaaaaagtccgatgaagcagctgcaaattttgccttttcgcaactacagaaaattcttccagatgcctcttcaccgataaattatttggtatcaaggtggggatcagacatcaattcattgggatcatatagctatgacattgtgaacaaacctcacgacctctatgagagactgagagtgccattggataatctattctttgcgggggaagccactagctcaagctacccgggatcagtgcacggtgcttattcaaccggagtgctggcagctgaagactgcaggatgcgtgtgcttgagcgctatggagagctcgaacatgagatggaagaggaagctcctgcttctgtccctcttctgatctcccgtatgtaatttaaacctcaggtgttttatatcacctccatatgggaacattgttagatttgattttatgagatttcactagttggaactcttgtgcctattcaataccactcttttttccttc

SEQ ID NO: 39508 - protein, 488 aa, Arabidopsis thaliana
  peptide (1)..(488): Ceres Seq. ID no. 13491240
MESGGKTNRQLRKAICVSTDEKMKKKRSPSVIVIGGGMAGISAARTLQDASFQVVVLESRDRIGGRVHTDYSFGFPVDLGASWLHGVCKENPLAAVIGRLGLPLYRTSGDNSVLYDHDLESYALFDKAGNQVSQELVTKVGENFEHILEEICKVRDEQDEDMSIAQAFSIVFKRNPELRLEGLAHNVLQWYLCRMEGWFAADAETISAKCWDQEELLPGGHGLMVRGYRPVINTLSKGLDIRLSHRITKISRRYSGVKVTTEKGDTFVADAAVIALPLGVLKSGMITFEPKLPQWKQEAINDLGVGIENKIILNFDNVFWPNVEFLGVVAETSYGCSYFLNLHKATSHPVLVYMPAGQLARDIEKKSDEAAANFAFSQLQKILPDASSPINYLVSRWGSDINSLGSYSYDIVNKPHDLYERLRVPLDNLFFAGEATSSSYPGSVHGAYSTGVLAAEDCRMRVLERYGELEHEMEEEAPASVPLLISRM

SEQ ID NO: 39509 - protein, 466 aa, Arabidopsis thaliana
  peptide (1)..(466): Ceres Seq. ID no. 13491241
MKKKRSPSVIVIGGGMAGISAARTLQDASFQVVVLESRDRIGGRVHTDYSFGFPVDLGASWLHGVCKENPLAAVIGRLGLPLYRTSGDNSVLYDHDLESYALFDKAGNQVSQELVTKVGENFEHILEEICKVRDEQDEDMSIAQAFSIVFKRNPELRLEGLAHNVLQWYLCRMEGWFAADAETISAKCWDQEELLPGGHGLMVRGYRPVINTLSKGLDIRLSHRITKISRRYSGVKVTTEKGDTFVADAAVIALPLGVLKSGMITFEPKLPQWKQEAINDLGVGIENKIILNFDNVFWPNVEFLGVVAETSYGCSYFLNLHKATSHPVLVYMPAGQLARDIEKKSDEAAANFAFSQLQKILPDASSPINYLVSRWGSDINSLGSYSYDIVNKPHDLYERLRVPLDNLFFAGEATSSSYPGSVHGAYSTGVLAAEDCRMRVLERYGELEHEMEEEAPASVPLLISRM

SEQ ID NO: 39510 - protein, 451 aa, Arabidopsis thaliana
  peptide (1)..(451): Ceres Seq. ID no. 13491242
MAGISAARTLQDASFQVVVLESRDRIGGRVHTDYSFGFPVDLGASWLHGVCKENPLAAVIGRLGLPLYRTSGDNSVLYDHDLESYALFDKAGNQVSQELVTKVGENFEHILEEICKVRDEQDEDMSIAQAFSIVFKRNPELRLEGLAHNVLQWYLCRMEGWFAADAETISAKCWDQEELLPGGHGLMVRGYRPVINTLSKGLDIRLSHRITKISRRYSGVKVTTEKGDTFVADAAVIALPLGVLKSGMITFEPKLPQWKQEAINDLGVGIENKIILNFDNVFWPNVEFLGVVAETSYGCSYFLNLHKATSHPVLVYMPAGQLARDIEKKSDEAAANFAFSQLQKILPDASSPINYLVSRWGSDINSLGSYSYDIVNKPHDLYERLRVPLDNLFFAGEATSSSYPGSVHGAYSTGVLAAEDCRMRVLERYGELEHEMEEEAPASVPLLISRM

SEQ ID NO: 39511 - DNA, 1404 bp, Arabidopsis thaliana
  misc_feature (1)..(1404): Ceres Seq. ID no. 13495818
  misc_feature (1)..(1404): Ortholog of  Ceres SEQ ID NO 15178142 as cited in SEQ ID NO 1163
gggatcgtaagaacagaggatttttctcggccaagttttctctggctcaggttaaaattcgatttgtgagatctgttagttagattgtacatgacggtgcgaatttattgaatctgtttaaatctattgaacgtgaaacgcatttgagtattgtgaggctgaggaaatttctgaaagtggttttgggacgatgatgctggtgttgcggagtttgccataatcagatctgtatgtatgtgggtttcttgataaaagttgtatgaggaaggcattggagatttgtgttgaagaattgatgtatgggagtatgaaggaggtaatgttgttggtgtgtgtggttgatgttggcaggtgtttgatgtgaattttttgagggaggggaatgagttcaatgagcagaagcagaagtcgaagtagaagtcgtagtcgggatcggtttcgtagtcggagtccgagagacaggagaatgagatctgaacgagtttcttaccatgatgctccttctagaagggagagggagccacgtcgtgccttcagccaaggaaatctctgcaacaactgcaagcgacctggtcactttgcaagagactgttctaatgtttccgtctgtaacaactgtggtcttccagggcacattgcagcagaatgcactgcggaatcacgttgttggaactgtagagaaccgggccacgtagcctcaaactgttcaaacgaaggaatctgccactcctgtggtaaatctggacatcgagccagagactgctctaattcggattctcgtgcaggagacttaaggctctgcaacaactgcttcaaacagggacatcttgccgctgactgcacaaatgacaaggcgtgcaagaactgcaggacttcaggtcacatagctcgcgattgcaggaacgatccagtttgtaacatctgcagtatctcggggcatgttgctagacactgcccaaagggtgacagcaattactctgacagaggaagcagggttcgagatggtggtatgcaaagaggtggtttgagcagaatgagcagagacagagaaggcgttagtgctatgataatatgtcacaattgtggtggccgaggacacagggcgtacgagtgtccgtctgctcgagtcgctgaccgtggattccgccggtactgaggctcttaaatttaccaattgaagttccattcatcttcacctttacccttttagcttctgcactcttgtttttgttgagctacattgttgttttctaatctcatggtttttgtctattggagtgaatcaaggatggttttagttttggtttgttttcggaaaatttgagacattgcttgtgttgtatgaagtattgaacagattagtgtgatgcagagttctgagttttcagaactcaatattatatt

SEQ ID NO: 39512 - protein, 257 aa, Arabidopsis thaliana
  peptide (1)..(257): Ceres Seq. ID no. 13495819
MSSMSRSRSRSRSRSRDRFRSRSPRDRRMRSERVSYHDAPSRREREPRRAFSQGNLCNNCKRPGHFARDCSNVSVCNNCGLPGHIAAECTAESRCWNCREPGHVASNCSNEGICHSCGKSGHRARDCSNSDSRAGDLRLCNNCFKQGHLAADCTNDKACKNCRTSGHIARDCRNDPVCNICSISGHVARHCPKGDSNYSDRGSRVRDGGMQRGGLSRMSRDREGVSAMIICHNCGGRGHRAYECPSARVADRGFRRY

SEQ ID NO: 39513 - protein, 254 aa, Arabidopsis thaliana
  peptide (1)..(254): Ceres Seq. ID no. 13495820
MSRSRSRSRSRSRDRFRSRSPRDRRMRSERVSYHDAPSRREREPRRAFSQGNLCNNCKRPGHFARDCSNVSVCNNCGLPGHIAAECTAESRCWNCREPGHVASNCSNEGICHSCGKSGHRARDCSNSDSRAGDLRLCNNCFKQGHLAADCTNDKACKNCRTSGHIARDCRNDPVCNICSISGHVARHCPKGDSNYSDRGSRVRDGGMQRGGLSRMSRDREGVSAMIICHNCGGRGHRAYECPSARVADRGFRRY

SEQ ID NO: 39514 - protein, 229 aa, Arabidopsis thaliana
  peptide (1)..(229): Ceres Seq. ID no. 13495821
MRSERVSYHDAPSRREREPRRAFSQGNLCNNCKRPGHFARDCSNVSVCNNCGLPGHIAAECTAESRCWNCREPGHVASNCSNEGICHSCGKSGHRARDCSNSDSRAGDLRLCNNCFKQGHLAADCTNDKACKNCRTSGHIARDCRNDPVCNICSISGHVARHCPKGDSNYSDRGSRVRDGGMQRGGLSRMSRDREGVSAMIICHNCGGRGHRAYECPSARVADRGFRRY

SEQ ID NO: 39515 - DNA, 1218 bp, Arabidopsis thaliana
  misc_feature (1)..(1218): Ceres Seq. ID no. 13491690
  misc_feature (1)..(1218): Ortholog of  Ceres SEQ ID NO 13596030 as cited in SEQ ID NO 62043
ttctttacttgattgcttattcatctgttgattctgtggttagataagggtatatgagtttgttggacatgggtggagatatgatggaagatgattgggaatttgcgtcatcatcaaaccctaaaagaaccctagttcttgtgggccgtactggaaacggaaagagtgcgacaggtaacagtatccttgggaggaaagcttttaggtcaagagctagaactgtaggagtgacaagcacgtgcgagtcacagagagttgttcaagaagatggtgatatcattaatgttgttgatactcctggtttgtttgatttgtctactgcagctgattttattggtaaagagattgtgaggtgtataagtttggcagaagatgggattcatgcgatcttgttggtattctctgtgaggcggcttgctgaagaggagcaaactgtgcttagtttcttgcaagcgctattcggcagtaagatcgctgactatatgatcgttgtttttaccggtggcgatgagttggaagagaatgaggagacattggaggagtatttggctgactattgccctgagtttcttaaagaaattcttgggatatgtgacaatcggttggtgttgtttaataacaagactactgataaggtgaagaaagctgagcaagttcagaagcttctctcacttgttgaatctgttgttaaacataacaatggaaaaccgtattcagatgagttgttccatgagctacaggaagaggctatcaagctaagggaccagaaaaaggaggttgagttacttcagggttactctaataatgagatagatgagttcaagaagcaaatcgatatgtcctatgataggcagcttagccgcatcaccgagatggtggagactaagctgagagacactgctaagagactagagcagcaactaggtgaagagcaagctgcaagacttgaagcggagaagagggcaaacgaagttcagaagcggtcgagcgatgagattaagaagctcagagagaatctggagagggcggaaaaagagacgaaggaacttcagaaaaaactgggaaagtgcatcaatctatgatatgttgagatgttgtagctccagtgaaatctgataagatcattcatgtcaagtttttttatgtagtcttttgttttcttttggttttttaacaatatggttttatcattaatggcagtgtgttataagtttgctt

SEQ ID NO: 39516 - protein, 342 aa, Arabidopsis thaliana
  peptide (1)..(342): Ceres Seq. ID no. 13491691
MSLLDMGGDMMEDDWEFASSSNPKRTLVLVGRTGNGKSATGNSILGRKAFRSRARTVGVTSTCESQRVVQEDGDIINVVDTPGLFDLSTAADFIGKEIVRCISLAEDGIHAILLVFSVRRLAEEEQTVLSFLQALFGSKIADYMIVVFTGGDELEENEETLEEYLADYCPEFLKEILGICDNRLVLFNNKTTDKVKKAEQVQKLLSLVESVVKHNNGKPYSDELFHELQEEAIKLRDQKKEVELLQGYSNNEIDEFKKQIDMSYDRQLSRITEMVETKLRDTAKRLEQQLGEEQAARLEAEKRANEVQKRSSDEIKKLRENLERAEKETKELQKKLGKCINL

SEQ ID NO: 39517 - protein, 337 aa, Arabidopsis thaliana
  peptide (1)..(337): Ceres Seq. ID no. 13491692
MGGDMMEDDWEFASSSNPKRTLVLVGRTGNGKSATGNSILGRKAFRSRARTVGVTSTCESQRVVQEDGDIINVVDTPGLFDLSTAADFIGKEIVRCISLAEDGIHAILLVFSVRRLAEEEQTVLSFLQALFGSKIADYMIVVFTGGDELEENEETLEEYLADYCPEFLKEILGICDNRLVLFNNKTTDKVKKAEQVQKLLSLVESVVKHNNGKPYSDELFHELQEEAIKLRDQKKEVELLQGYSNNEIDEFKKQIDMSYDRQLSRITEMVETKLRDTAKRLEQQLGEEQAARLEAEKRANEVQKRSSDEIKKLRENLERAEKETKELQKKLGKCINL

SEQ ID NO: 39518 - protein, 333 aa, Arabidopsis thaliana
  peptide (1)..(333): Ceres Seq. ID no. 13491693
MMEDDWEFASSSNPKRTLVLVGRTGNGKSATGNSILGRKAFRSRARTVGVTSTCESQRVVQEDGDIINVVDTPGLFDLSTAADFIGKEIVRCISLAEDGIHAILLVFSVRRLAEEEQTVLSFLQALFGSKIADYMIVVFTGGDELEENEETLEEYLADYCPEFLKEILGICDNRLVLFNNKTTDKVKKAEQVQKLLSLVESVVKHNNGKPYSDELFHELQEEAIKLRDQKKEVELLQGYSNNEIDEFKKQIDMSYDRQLSRITEMVETKLRDTAKRLEQQLGEEQAARLEAEKRANEVQKRSSDEIKKLRENLERAEKETKELQKKLGKCINL

SEQ ID NO: 39519 - DNA, 1316 bp, Arabidopsis thaliana
  misc_feature (1)..(1316): Ceres Seq. ID no. 12367001
  misc_feature (1)..(1316): Ortholog of  Ceres SEQ ID NO 13664220 as cited in SEQ ID NO 61151
  misc_feature (1)..(1316): Ortholog of  Ceres SEQ ID NO 13597477 as cited in SEQ ID NO 65160
aacgccacaatcatggctttgttcttatctcctaaaaccatcactcttctcttcttctccctctccctcgcactctactgcagcatcgatcctttccaccactgcgccatttccgatttccccaatttcgtctctcacgaagttatctctccacgtcccgacgaagttccatgggagagagattcacaaaattcacttcagaaatcaaagattctgttttttaaccaaatccaaggtccagagagcgtcgcctttgattctctcggacgtggtccgtacacaggcgttgctgatggtagggttttgttttgggatggagagaaatggattgatttcgcttatacttcgagtaatcgatcggagatttgtgatccgaagccttctgctttgagttacttgaggaatgaacatatatgtggtcgtcctttaggtcttcgtttcgataagagaaccggagatttgtatatagctgatgcttatatgggacttttgaaagttggtcctgaaggtggtttagcaacgccgcttgtaactgaagctgaaggtgtgccgttggggtttactaatgatcttgacattgctgatgatggaactgtttactttacagatagcagcattagttaccagaggaggaacttcttgcagctcgttttctctggagacaatactgggagggttctaaagtatgatccagtagctaagaaagctgttgttttggtctcaaatcttcagtttccgaatggtgtctctatcagcagagacggttctttctttgtattctgcgaaggagatattggaagcctacgaagatactggttgaaaggcgagaaagctggaacgacagatgtgtttgcgtatttaccagggcatcctgataacgtaagaaccaaccaaaagggtgaattttgggtagcgcttcattgcagacgcaactactactcatacttaatggcaagatatcctaagctgaggatgttcatactgagactgccaatcactgcgagaactcactactcgttccagatagggttacggccgcacgggttggtggttaagtatagtcctgaagggaagcttatgcatgttttggaagatagtgaagggaaagttgtgagatcagtaagtgaagtggaagaaaaagatgggaagctttggatgggaagtgtgttgatgaactttgttgctgtctatgacctctgattacttgacctatacgtaaaccacttcactcagtttctagatttagcaaattctcaaaactgttaggtgtgtactgaaaaaatcaaacacttagcacaaacaaactcaatgttatt

SEQ ID NO: 39520 - protein, 399 aa, Arabidopsis thaliana
  peptide (1)..(399): Ceres Seq. ID no. 12367002
NATIMALFLSPKTITLLFFSLSLALYCSIDPFHHCAISDFPNFVSHEVISPRPDEVPWERDSQNSLQKSKILFFNQIQGPESVAFDSLGRGPYTGVADGRVLFWDGEKWIDFAYTSSNRSEICDPKPSALSYLRNEHICGRPLGLRFDKRTGDLYIADAYMGLLKVGPEGGLATPLVTEAEGVPLGFTNDLDIADDGTVYFTDSSISYQRRNFLQLVFSGDNTGRVLKYDPVAKKAVVLVSNLQFPNGVSISRDGSFFVFCEGDIGSLRRYWLKGEKAGTTDVFAYLPGHPDNVRTNQKGEFWVALHCRRNYYSYLMARYPKLRMFILRLPITARTHYSFQIGLRPHGLVVKYSPEGKLMHVLEDSEGKVVRSVSEVEEKDGKLWMGSVLMNFVAVYDL

SEQ ID NO: 39521 - protein, 395 aa, Arabidopsis thaliana
  peptide (1)..(395): Ceres Seq. ID no. 12367003
MALFLSPKTITLLFFSLSLALYCSIDPFHHCAISDFPNFVSHEVISPRPDEVPWERDSQNSLQKSKILFFNQIQGPESVAFDSLGRGPYTGVADGRVLFWDGEKWIDFAYTSSNRSEICDPKPSALSYLRNEHICGRPLGLRFDKRTGDLYIADAYMGLLKVGPEGGLATPLVTEAEGVPLGFTNDLDIADDGTVYFTDSSISYQRRNFLQLVFSGDNTGRVLKYDPVAKKAVVLVSNLQFPNGVSISRDGSFFVFCEGDIGSLRRYWLKGEKAGTTDVFAYLPGHPDNVRTNQKGEFWVALHCRRNYYSYLMARYPKLRMFILRLPITARTHYSFQIGLRPHGLVVKYSPEGKLMHVLEDSEGKVVRSVSEVEEKDGKLWMGSVLMNFVAVYDL

SEQ ID NO: 39522 - protein, 239 aa, Arabidopsis thaliana
  peptide (1)..(239): Ceres Seq. ID no. 12367004
MGLLKVGPEGGLATPLVTEAEGVPLGFTNDLDIADDGTVYFTDSSISYQRRNFLQLVFSGDNTGRVLKYDPVAKKAVVLVSNLQFPNGVSISRDGSFFVFCEGDIGSLRRYWLKGEKAGTTDVFAYLPGHPDNVRTNQKGEFWVALHCRRNYYSYLMARYPKLRMFILRLPITARTHYSFQIGLRPHGLVVKYSPEGKLMHVLEDSEGKVVRSVSEVEEKDGKLWMGSVLMNFVAVYDL

SEQ ID NO: 39523 - DNA, 1402 bp, Arabidopsis thaliana
  misc_feature (1)..(1402): Ceres Seq. ID no. 12422124
  misc_feature (1)..(1402): Ortholog of  Ceres SEQ ID NO 12611314 as cited in SEQ ID NO 56535
  misc_feature (1)..(1402): Ortholog of  Ceres SEQ ID NO 15178046 as cited in SEQ ID NO 60380
  misc_feature (1)..(1402): Ortholog of  Ceres SEQ ID NO 13661438 as cited in SEQ ID NO 61414
attctccttcttctttttttgtgcagttcaaatagtaaaaaaccgaatgacggtatgatgctcgtaatatcgattttcgctggagtagttatcggatttttattaggcatatctttccctacattgtcactaactaagatgaattttccatcaagcattcttccttctgttgctactgtttacatagaaaatgagaaaccagagaaaccatctaagacgagttcacaaaacgagtttaattcaagtgatgcatcacatcatcataagatttgggttccatcgaatcctcgaggtgcagagatgttacctccaagttttgttgcagccgaatcggatttttacttgcgaagattatggggattgcctaaagatgatttaccagtggtgaagcctaaatatctagttgcttttactgtttcttatgaacaaagaaaaaacatcgattcttgtgtcaaaaaattctcagataacttcaccattgttctgtttcattacgatggaaaaacctcggagtatgatgaatttgaatggtctaaacgggcgatacacgtcagtgtacctaagcaaaccaagtggtggtatgctaaaaggtttctgcatcctgatatcatagcaccatatgaatatatattcatttgggatgaagatcttggcgttgaaaacttcgacgcagaagagtacatcaagattgtgaagaagcatggtctagaaatatcgcaacccgctgtggaatcaagaaaatcaatcacatggaagataacaaaaagaatacccggaatcgaagttcacaaagaagtcgaagagaaaccaggccgctgcaatgaccctcacctacctccttgtgcagggtttatagagattatggctccagttttctctagagaggcatggcgctgcgtgtggcatatgattcagaatgacttggttcacggttggggtcttgactttgcgctaagaaaatgcgtcgagcctgcacatgagaagattggtgttgtggattctcaatggatcattcatcaaaagattccttctttaggcagccagggaactgcgcaggaagggaaaaccgcgttccaaggggtaagagagagatgtaaacgggaatggacaatgtttcagaaaagaatgacccgatcagagcagaagtatctgaaagaaattgcatcagcctcttcaaacgctacacgtacttaaaccaaaagaatagaggaactgaataacaaactttagtgttcagatagcattttcagtaataagagaaatagaatgttgatatgataagcacataagtatacacacacaatacacattctttgaaaagaacaatatagctctgttctagaaacagttatactgtagtaacaaaacagttaataaagttcttaataaactcttcatttct

SEQ ID NO: 39524 - protein, 397 aa, Arabidopsis thaliana
  peptide (1)..(397): Ceres Seq. ID no. 12422125
ILLLLFLCSSNSKKPNDGMMLVISIFAGVVIGFLLGISFPTLSLTKMNFPSSILPSVATVYIENEKPEKPSKTSSQNEFNSSDASHHHKIWVPSNPRGAEMLPPSFVAAESDFYLRRLWGLPKDDLPVVKPKYLVAFTVSYEQRKNIDSCVKKFSDNFTIVLFHYDGKTSEYDEFEWSKRAIHVSVPKQTKWWYAKRFLHPDIIAPYEYIFIWDEDLGVENFDAEEYIKIVKKHGLEISQPAVESRKSITWKITKRIPGIEVHKEVEEKPGRCNDPHLPPCAGFIEIMAPVFSREAWRCVWHMIQNDLVHGWGLDFALRKCVEPAHEKIGVVDSQWIIHQKIPSLGSQGTAQEGKTAFQGVRERCKREWTMFQKRMTRSEQKYLKEIASASSNATRT

SEQ ID NO: 39525 - protein, 379 aa, Arabidopsis thaliana
  peptide (1)..(379): Ceres Seq. ID no. 12422126
MMLVISIFAGVVIGFLLGISFPTLSLTKMNFPSSILPSVATVYIENEKPEKPSKTSSQNEFNSSDASHHHKIWVPSNPRGAEMLPPSFVAAESDFYLRRLWGLPKDDLPVVKPKYLVAFTVSYEQRKNIDSCVKKFSDNFTIVLFHYDGKTSEYDEFEWSKRAIHVSVPKQTKWWYAKRFLHPDIIAPYEYIFIWDEDLGVENFDAEEYIKIVKKHGLEISQPAVESRKSITWKITKRIPGIEVHKEVEEKPGRCNDPHLPPCAGFIEIMAPVFSREAWRCVWHMIQNDLVHGWGLDFALRKCVEPAHEKIGVVDSQWIIHQKIPSLGSQGTAQEGKTAFQGVRERCKREWTMFQKRMTRSEQKYLKEIASASSNATRT

SEQ ID NO: 39526 - protein, 378 aa, Arabidopsis thaliana
  peptide (1)..(378): Ceres Seq. ID no. 12422127
MLVISIFAGVVIGFLLGISFPTLSLTKMNFPSSILPSVATVYIENEKPEKPSKTSSQNEFNSSDASHHHKIWVPSNPRGAEMLPPSFVAAESDFYLRRLWGLPKDDLPVVKPKYLVAFTVSYEQRKNIDSCVKKFSDNFTIVLFHYDGKTSEYDEFEWSKRAIHVSVPKQTKWWYAKRFLHPDIIAPYEYIFIWDEDLGVENFDAEEYIKIVKKHGLEISQPAVESRKSITWKITKRIPGIEVHKEVEEKPGRCNDPHLPPCAGFIEIMAPVFSREAWRCVWHMIQNDLVHGWGLDFALRKCVEPAHEKIGVVDSQWIIHQKIPSLGSQGTAQEGKTAFQGVRERCKREWTMFQKRMTRSEQKYLKEIASASSNATRT

SEQ ID NO: 39527 - DNA, 1158 bp, Arabidopsis thaliana
  misc_feature (1)..(1158): Ceres Seq. ID no. 12328522
  misc_feature (1)..(1158): Ortholog of  Ceres SEQ ID NO 13594037 as cited in SEQ ID NO 55666
acctaaacctctgtaccacaattcgacgcaattcatcgttacccaaaaacctctgtttcgattcctagacactctcactagggttttacaactatggcaacgactcgaatggttagggtttcgcaagatggttcgggagattactgctctgttcaagacgcaattgattcggtgcctttaggtaacacttgcagaactgtgattcgtctctcacctgggatttatcggcaacctgtgtatgtacccaagaggaagaatttcattaccttcgccggaatctcaccggagatcacggttttgacttggaacaatacagcttccaagattgagcatcaccaggcgtctagagtcattgggactggtacgtttggttgtggtagtgttattgttgaaggtgaagattttattgcagagaacattacttttgagaactctgctcctgagggatcagggcaagctgtggcgatacgagtcactgcagaccgttgcgccttttataattgtcgatttctcggttggcaggatacattgtatttacatcatgggaaacaatatttgaaagactgttacatcgagggaagtgtggatttcatatttggaaacagtaccgctctcttggaacactgccatatccactgcaaatctcaggggtttataacagcacaaagccgaaaatcgtctcaggaatctactggttatgtattcttaagatgtgtgatcacgggtaatggtcagagcgggtatatgtatctcggaaggccatggggaccatttgggagggtagtccttgcttacacttacatggacgcgtgtatcagaaatgtgggttggcataactggggaaacgcagagaacgagagaagtgcttgcttttatgagtataggtgctttggtccgggtagctgttcgtctgaacgtgttccgtggtcgagagaactgatggatgacgaagctggacactttgtgcatcatagttttgtagatcctgaacaggaccggccttggttgtgtctaagaatgggtgtgaaaacaccatattcggcttagagtactgaaaaaaaatgttgtaactgccatggtgaggcctagaataacaaaggatcatgaagaacctattgtaaacaaccctagtatcaaactttggattatcttttgtcc

SEQ ID NO: 39528 - protein, 317 aa, Arabidopsis thaliana
  peptide (1)..(317): Ceres Seq. ID no. 12328523
MATTRMVRVSQDGSGDYCSVQDAIDSVPLGNTCRTVIRLSPGIYRQPVYVPKRKNFITFAGISPEITVLTWNNTASKIEHHQASRVIGTGTFGCGSVIVEGEDFIAENITFENSAPEGSGQAVAIRVTADRCAFYNCRFLGWQDTLYLHHGKQYLKDCYIEGSVDFIFGNSTALLEHCHIHCKSQGFITAQSRKSSQESTGYVFLRCVITGNGQSGYMYLGRPWGPFGRVVLAYTYMDACIRNVGWHNWGNAENERSACFYEYRCFGPGSCSSERVPWSRELMDDEAGHFVHHSFVDPEQDRPWLCLRMGVKTPYSA

SEQ ID NO: 39529 - protein, 312 aa, Arabidopsis thaliana
  peptide (1)..(312): Ceres Seq. ID no. 12328524
MVRVSQDGSGDYCSVQDAIDSVPLGNTCRTVIRLSPGIYRQPVYVPKRKNFITFAGISPEITVLTWNNTASKIEHHQASRVIGTGTFGCGSVIVEGEDFIAENITFENSAPEGSGQAVAIRVTADRCAFYNCRFLGWQDTLYLHHGKQYLKDCYIEGSVDFIFGNSTALLEHCHIHCKSQGFITAQSRKSSQESTGYVFLRCVITGNGQSGYMYLGRPWGPFGRVVLAYTYMDACIRNVGWHNWGNAENERSACFYEYRCFGPGSCSSERVPWSRELMDDEAGHFVHHSFVDPEQDRPWLCLRMGVKTPYSA

SEQ ID NO: 39530 - DNA, 5072 bp, Arabidopsis thaliana
  misc_feature (1)..(5072): Ceres Seq. ID no. 13504870
  misc_feature (1)..(5072): Ortholog of  Ceres SEQ ID NO 13660487 as cited in SEQ ID NO 60849
aagagaagagagatctctctctcgattgctctcaagaacccaagtgacgtctggtttcagctgatttgtttcttctcattctctatcttcttctctgggaaatatcgattttgatctattaagagctgctacgagctttgggatgtggtgagatgcttgttctatctcgaacaatccgccggttgttgattttaaacaaactctctatcacaaatctttcccgatcatggattttattgagatctcgttgatctttcgagagcatttgccactactggaactatgttcggtcatcatcaacctcctactctttcttgtctttctatttgctgtctccgcgaggcagattctcgtctgcgtgagaagaggcagagataggctctctaaggacgatacggtttcagcttctaatcttagcttggaaagagaggttaaccatgttagtgttgggtttgggtttaatctgtctttgctctgttgcttatatgtgttaggcgtccaagttttggtgttagtatatgatggggttaaggttagaagagaagtcagtgactggtttgttctttgctttccagcttctcagagtttagcttggtttgtccttagcttcttagttcttcatttgaaatacaagtcttcagagaagctacccttcttggtgaggatatggtggttcctggcgttttcgatttgcctctgtactatgtatgtcgatggaagaaggctagccattgaaggttggagcagatgttcttctcatgttgtcgccaatttagctgttacacctgctcttgggtttctctgctttctggcctggagaggcgtttctggtattcaagttaccagaagctcctctgatcttcaagagcctttgcttgttgaagaagaggcagcttgtcttaaagttactccatatagtactgctgggctagttagccttattacgctttcatggttggatccacttctctcggctggttcaaaaagaccgcttgagcttaaggatataccgcttcttgcaccaagagatagagccaaatcaagttacaaggtcttgaagtcgaattggaagagatgcaagtccgagaatccttcaaagcctccttctttagctcgtgcaattatgaaatcattttggaaagaagctgcttgcaatgccgtatttgctgggttgaatactcttgtgtcctatgtcggtccttacttgatcagctactttgttgattatcttggagggaaggagattttccctcatgaaggatacgtactcgctgggatattctttacgtccaagcttatagagacagtcaccacccgccagtggtatatgggtgttgatatcctagggatgcatgttagatcagctcttacagcaatggtataccgaaaaggtctcaaactttcaagtatagccaagcagaaccacacgagcggtgaaattgtaaactacatggcagtcgatgtccagcgcataggagattactcatggtatcttcatgatatttggatgcttccgatgcaaatagttcttgctcttgcaatcctatataaaagcgtgggcatagctgctgtagctacattggttgctacaataatctcgattcttgtcacgattccactcgctaaggtccaggaagactatcaagataagttgatgactgcgaaagatgaaagaatgaggaaaacctcagagtgtcttaggaacatgagagttctgaaattgcaggcatgggaagatcgttatagagtgagattggaagaaatgagggaagaggagtatggttggcttcgcaaagccttatattctcaggcttttgttacttttatcttttggagttcccccatttttgtcgccgcagttacattcgctacttcgatatttctaggcactcaacttaccgctggaggtgttctttctgctctggcgacattcagaattcttcaggagccacttcggaactttcctgatctggtttcaatgatggctcagacaaaggtttctcttgataggatttctgggttcttgcaggaggaagaacttcaagaagatgcaactgttgttattccacggggactttcgaatatagccatagagattaaagatggtgtgttttgttgggaccctttttcttcaaggccgacattatctgggattcagatgaaagtggagaagggtatgcgtgtggctgtctgtggcacagttggctctggaaaatcaagttttatctcttgcatcctaggggaaatcccaaaaatctctggcgaagttagaatatgtggtactactggttatgtgtctcaatcggcttggattcagtctggtaacattgaagaaaacattctatttggcagtccaatggagaaaacaaagtacaagaatgtgatacaagcatgttccctaaagaaagatatagagcttttctcacatggggaccaaactattatcggggagagaggtataaatctcagcggaggtcagaaacagcgtgtacaacttgcaagggcattatatcaagatgctgacatttatttactagacgacccttttagtgctcttgatgcacacactggctctgatttgtttagggattatattctatctgcattggctgagaaaactgtggtttttgtaacgcatcaagttgagtttctccctgcagctgatctaatattggttctgaaggaaggcaggattattcaatcgggtaaatatgatgatctgctgcaagcaggtactgattttaaggccttagtgtctgcccaccatgaagcaatcgaggcaatggacatcccaagtccctcctcagaagactctgatgaaaatcctattcgcgatagtttggtcttgcataatccaaagtctgatgtttttgaaaatgacatcgagactttggcaaaggaagtacaagagggaggatctgcttcagatctaaaggcaatcaaagagaagaagaagaaagctaagcgttcccgcaaaaagcagcttgttcaagaagaggaacgagtaaagggaaaagtcagcatgaaggtgtacttgtcatacatgggtgctgcatataaaggggctctgattcctcttattatactcgcacaagctgctttccaatttcttcagattgctagtaattggtggatggcttgggcaaatcctcaaactgaaggtgacgaatctaaagtggatcctactctgcttctcatcgtttatacggctttagctttcgggagctctgtgttcatatttgttcgagctgctctggttgcaacttttggtcttgcagctgcacagaaactgttcttaaatatgctcagaagtgtgttccgagcgccaatgtcattctttgattccactcctgcaggaagaattttgaatcgggtttctattgatcaaagtgttgtagatcttgacattccttttagactcggtgggtttgcttcaacaacaatacaactctgtggcattgtcgctgtaatgaccaatgttacctggcaagttttccttcttgttgttccggtagctgttgcttgcttttggatgcagaaatattacatggcttcttcaagagaattggttcggatagttagtatccagaagtctccaataattcatctttttggagaatcaattgctggtgctgccacaataagaggatttggccaggaaaaaagatttatcaaaaggaatctttatcttctagattgttttgttcgacctttcttctgcagtatcgctgctatcgaatggctttgtttacgcatggaattactttccacacttgtatttgctttctgtatggttttactcgtcagttttccacatggaaccattgatccaagcatggcaggtcttgctgtgacatatggacttaacttgaatggacgtctatcacgatggatacttagcttttgtaagcttgaaaacaaaataatctcaatcgaaaggatttatcagtacagtcagattgtaggagaggccccagcaattatagaagatttccgcccgccttcctcgtggcctgcaacgggaacaattgagctagttgatgttaaggttcgttatgctgagaatcttccaacagtactccatggggtgagctgtgtgtttccgggtggaaaaaagattgggattgttgggcgaacgggaagcggaaagtcgactttgattcaagctttgtttcgattgattgagccaactgctggaaaaattactattgacaacattgacatttctcaaattggtcttcatgatcttcgtagtcgccttgggattatacctcaagatcctacattatttgaaggaacaatccgagcaaatcttgacccacttgaagaacattcagatgataaaatctgggaggcgcttgataaatcccagcttggagacgttgttagaggaaaagacctaaaacttgactctccagtactggaaaatggagataactggagtgtagggcagagacagcttgtgtcacttggacgagcattactgaaacaagccaaaatacttgttcttgatgaagcaacagcatcggttgacacagcaacagacaatctgatccagaagataatcagaacagagtttgaagactgcacggtctgcaccattgctcaccggataccaactgttatagacagtgacctagttttggttctcagcgacggtagagtagcagagtttgatactcctgcacggctattagaagacaaatcatcgatgttcttgaaattggtaacagaatactcctcaagatctactggaatccctgaattatgatcctccatgttaaaaattcagtttagggggtttcttttctcaagaggatataaaagaactgatatgtgacaaaagcttaaggtctaaagtaagagagagttttccacagggtttaagaaaagaaaaagcatgaaaggatgccaaaatctccgcgcttaaaaaactttgggtttaaatctcttctgtcgaacattgggagaaactttttttgtatggaacagttagtttctttggttttcatgtttatcaataaactgcaaaaacaaacaaagattagagtagaaactactaatcattcgtc

SEQ ID NO: 39531 - protein, 1514 aa, Arabidopsis thaliana
  peptide (1)..(1514): Ceres Seq. ID no. 13504871
MDFIEISLIFREHLPLLELCSVIINLLLFLVFLFAVSARQILVCVRRGRDRLSKDDTVSASNLSLEREVNHVSVGFGFNLSLLCCLYVLGVQVLVLVYDGVKVRREVSDWFVLCFPASQSLAWFVLSFLVLHLKYKSSEKLPFLVRIWWFLAFSICLCTMYVDGRRLAIEGWSRCSSHVVANLAVTPALGFLCFLAWRGVSGIQVTRSSSDLQEPLLVEEEAACLKVTPYSTAGLVSLITLSWLDPLLSAGSKRPLELKDIPLLAPRDRAKSSYKVLKSNWKRCKSENPSKPPSLARAIMKSFWKEAACNAVFAGLNTLVSYVGPYLISYFVDYLGGKEIFPHEGYVLAGIFFTSKLIETVTTRQWYMGVDILGMHVRSALTAMVYRKGLKLSSIAKQNHTSGEIVNYMAVDVQRIGDYSWYLHDIWMLPMQIVLALAILYKSVGIAAVATLVATIISILVTIPLAKVQEDYQDKLMTAKDERMRKTSECLRNMRVLKLQAWEDRYRVRLEEMREEEYGWLRKALYSQAFVTFIFWSSPIFVAAVTFATSIFLGTQLTAGGVLSALATFRILQEPLRNFPDLVSMMAQTKVSLDRISGFLQEEELQEDATVVIPRGLSNIAIEIKDGVFCWDPFSSRPTLSGIQMKVEKGMRVAVCGTVGSGKSSFISCILGEIPKISGEVRICGTTGYVSQSAWIQSGNIEENILFGSPMEKTKYKNVIQACSLKKDIELFSHGDQTIIGERGINLSGGQKQRVQLARALYQDADIYLLDDPFSALDAHTGSDLFRDYILSALAEKTVVFVTHQVEFLPAADLILVLKEGRIIQSGKYDDLLQAGTDFKALVSAHHEAIEAMDIPSPSSEDSDENPIRDSLVLHNPKSDVFENDIETLAKEVQEGGSASDLKAIKEKKKKAKRSRKKQLVQEEERVKGKVSMKVYLSYMGAAYKGALIPLIILAQAAFQFLQIASNWWMAWANPQTEGDESKVDPTLLLIVYTALAFGSSVFIFVRAALVATFGLAAAQKLFLNMLRSVFRAPMSFFDSTPAGRILNRVSIDQSVVDLDIPFRLGGFASTTIQLCGIVAVMTNVTWQVFLLVVPVAVACFWMQKYYMASSRELVRIVSIQKSPIIHLFGESIAGAATIRGFGQEKRFIKRNLYLLDCFVRPFFCSIAAIEWLCLRMELLSTLVFAFCMVLLVSFPHGTIDPSMAGLAVTYGLNLNGRLSRWILSFCKLENKIISIERIYQYSQIVGEAPAIIEDFRPPSSWPATGTIELVDVKVRYAENLPTVLHGVSCVFPGGKKIGIVGRTGSGKSTLIQALFRLIEPTAGKITIDNIDISQIGLHDLRSRLGIIPQDPTLFEGTIRANLDPLEEHSDDKIWEALDKSQLGDVVRGKDLKLDSPVLENGDNWSVGQRQLVSLGRALLKQAKILVLDEATASVDTATDNLIQKIIRTEFEDCTVCTIAHRIPTVIDSDLVLVLSDGRVAEFDTPARLLEDKSSMFLKLVTEYSSRSTGIPEL

SEQ ID NO: 39532 - protein, 1355 aa, Arabidopsis thaliana
  peptide (1)..(1355): Ceres Seq. ID no. 13504872
MYVDGRRLAIEGWSRCSSHVVANLAVTPALGFLCFLAWRGVSGIQVTRSSSDLQEPLLVEEEAACLKVTPYSTAGLVSLITLSWLDPLLSAGSKRPLELKDIPLLAPRDRAKSSYKVLKSNWKRCKSENPSKPPSLARAIMKSFWKEAACNAVFAGLNTLVSYVGPYLISYFVDYLGGKEIFPHEGYVLAGIFFTSKLIETVTTRQWYMGVDILGMHVRSALTAMVYRKGLKLSSIAKQNHTSGEIVNYMAVDVQRIGDYSWYLHDIWMLPMQIVLALAILYKSVGIAAVATLVATIISILVTIPLAKVQEDYQDKLMTAKDERMRKTSECLRNMRVLKLQAWEDRYRVRLEEMREEEYGWLRKALYSQAFVTFIFWSSPIFVAAVTFATSIFLGTQLTAGGVLSALATFRILQEPLRNFPDLVSMMAQTKVSLDRISGFLQEEELQEDATVVIPRGLSNIAIEIKDGVFCWDPFSSRPTLSGIQMKVEKGMRVAVCGTVGSGKSSFISCILGEIPKISGEVRICGTTGYVSQSAWIQSGNIEENILFGSPMEKTKYKNVIQACSLKKDIELFSHGDQTIIGERGINLSGGQKQRVQLARALYQDADIYLLDDPFSALDAHTGSDLFRDYILSALAEKTVVFVTHQVEFLPAADLILVLKEGRIIQSGKYDDLLQAGTDFKALVSAHHEAIEAMDIPSPSSEDSDENPIRDSLVLHNPKSDVFENDIETLAKEVQEGGSASDLKAIKEKKKKAKRSRKKQLVQEEERVKGKVSMKVYLSYMGAAYKGALIPLIILAQAAFQFLQIASNWWMAWANPQTEGDESKVDPTLLLIVYTALAFGSSVFIFVRAALVATFGLAAAQKLFLNMLRSVFRAPMSFFDSTPAGRILNRVSIDQSVVDLDIPFRLGGFASTTIQLCGIVAVMTNVTWQVFLLVVPVAVACFWMQKYYMASSRELVRIVSIQKSPIIHLFGESIAGAATIRGFGQEKRFIKRNLYLLDCFVRPFFCSIAAIEWLCLRMELLSTLVFAFCMVLLVSFPHGTIDPSMAGLAVTYGLNLNGRLSRWILSFCKLENKIISIERIYQYSQIVGEAPAIIEDFRPPSSWPATGTIELVDVKVRYAENLPTVLHGVSCVFPGGKKIGIVGRTGSGKSTLIQALFRLIEPTAGKITIDNIDISQIGLHDLRSRLGIIPQDPTLFEGTIRANLDPLEEHSDDKIWEALDKSQLGDVVRGKDLKLDSPVLENGDNWSVGQRQLVSLGRALLKQAKILVLDEATASVDTATDNLIQKIIRTEFEDCTVCTIAHRIPTVIDSDLVLVLSDGRVAEFDTPARLLEDKSSMFLKLVTEYSSRSTGIPEL

SEQ ID NO: 39533 - protein, 1215 aa, Arabidopsis thaliana
  peptide (1)..(1215): Ceres Seq. ID no. 13504873
MKSFWKEAACNAVFAGLNTLVSYVGPYLISYFVDYLGGKEIFPHEGYVLAGIFFTSKLIETVTTRQWYMGVDILGMHVRSALTAMVYRKGLKLSSIAKQNHTSGEIVNYMAVDVQRIGDYSWYLHDIWMLPMQIVLALAILYKSVGIAAVATLVATIISILVTIPLAKVQEDYQDKLMTAKDERMRKTSECLRNMRVLKLQAWEDRYRVRLEEMREEEYGWLRKALYSQAFVTFIFWSSPIFVAAVTFATSIFLGTQLTAGGVLSALATFRILQEPLRNFPDLVSMMAQTKVSLDRISGFLQEEELQEDATVVIPRGLSNIAIEIKDGVFCWDPFSSRPTLSGIQMKVEKGMRVAVCGTVGSGKSSFISCILGEIPKISGEVRICGTTGYVSQSAWIQSGNIEENILFGSPMEKTKYKNVIQACSLKKDIELFSHGDQTIIGERGINLSGGQKQRVQLARALYQDADIYLLDDPFSALDAHTGSDLFRDYILSALAEKTVVFVTHQVEFLPAADLILVLKEGRIIQSGKYDDLLQAGTDFKALVSAHHEAIEAMDIPSPSSEDSDENPIRDSLVLHNPKSDVFENDIETLAKEVQEGGSASDLKAIKEKKKKAKRSRKKQLVQEEERVKGKVSMKVYLSYMGAAYKGALIPLIILAQAAFQFLQIASNWWMAWANPQTEGDESKVDPTLLLIVYTALAFGSSVFIFVRAALVATFGLAAAQKLFLNMLRSVFRAPMSFFDSTPAGRILNRVSIDQSVVDLDIPFRLGGFASTTIQLCGIVAVMTNVTWQVFLLVVPVAVACFWMQKYYMASSRELVRIVSIQKSPIIHLFGESIAGAATIRGFGQEKRFIKRNLYLLDCFVRPFFCSIAAIEWLCLRMELLSTLVFAFCMVLLVSFPHGTIDPSMAGLAVTYGLNLNGRLSRWILSFCKLENKIISIERIYQYSQIVGEAPAIIEDFRPPSSWPATGTIELVDVKVRYAENLPTVLHGVSCVFPGGKKIGIVGRTGSGKSTLIQALFRLIEPTAGKITIDNIDISQIGLHDLRSRLGIIPQDPTLFEGTIRANLDPLEEHSDDKIWEALDKSQLGDVVRGKDLKLDSPVLENGDNWSVGQRQLVSLGRALLKQAKILVLDEATASVDTATDNLIQKIIRTEFEDCTVCTIAHRIPTVIDSDLVLVLSDGRVAEFDTPARLLEDKSSMFLKLVTEYSSRSTGIPEL

SEQ ID NO: 39534 - DNA, 1562 bp, Arabidopsis thaliana; identical to SEQ ID NO: 29964
  misc_feature (1)..(1562): Ceres Seq. ID no. 12439764
  misc_feature (1)..(1562): Ortholog of  Ceres SEQ ID NO 13658590 as cited in SEQ ID NO 66762

SEQ ID NO: 39535 - protein, 423 aa, Arabidopsis thaliana; identical to SEQ ID NO: 29965
  peptide (1)..(423): Ceres Seq. ID no. 12439765

SEQ ID NO: 39536 - protein, 391 aa, Arabidopsis thaliana; identical to SEQ ID NO: 29966
  peptide (1)..(391): Ceres Seq. ID no. 12439766

SEQ ID NO: 39537 - protein, 290 aa, Arabidopsis thaliana; identical to SEQ ID NO: 29967
  peptide (1)..(290): Ceres Seq. ID no. 12439767

SEQ ID NO: 39538 - DNA, 742 bp, Arabidopsis thaliana
  misc_feature (1)..(742): Ceres Seq. ID no. 12422434
  misc_feature (1)..(742): Ortholog of  Ceres SEQ ID NO 15225415 as cited in SEQ ID NO 0
atcttgtgatcatcccaagacaaaaccagagaaaaagacctttctgtttttttaagaagtctttatatttttttttttgtcggagaatcttataagcatggcttcaggaggatcaaagtcggcagctttcatgcttctgatgctgaatcttggtctctatttcgtcatcaccatcatcgcttcttgggctgttaatcacggcatagagagaactcgcgagtctgcgtcgacactgtcacttccggcgaagatattcccgatatacttcccggtggggaacatggcgaccggttttttcgtaatattcacgttaatcgccggcgtcgtcggaatggccacatcactcaccggaatcatcaacgttcttcaatgggactctccgaatctccactccgccgcggcttcctctctaatctcctggtctctcactctcctcgccatgggattggcctgcaaggagatcaacataggctggaccgaagccaatctaagaactcttgaagttctgactataattgtgagtgctactcagttgttgtgcaccggagctattcatgctggagtcggagaaacagtcgcctccggagaaaggcctcatcttgggagagtttgagtttcatgattcttcttaaaagcggttttacatttgcttcagatcgtgtaatttgtgtgttgtgtcttgtgtgtgtttattcttttgttttgtttgattattatgatcatgtaaaatgattagtttatg

SEQ ID NO: 39539 - protein, 171 aa, Arabidopsis thaliana
  peptide (1)..(171): Ceres Seq. ID no. 12422435
MASGGSKSAAFMLLMLNLGLYFVITIIASWAVNHGIERTRESASTLSLPAKIFPIYFPVGNMATGFFVIFTLIAGVVGMATSLTGIINVLQWDSPNLHSAAASSLISWSLTLLAMGLACKEINIGWTEANLRTLEVLTIIVSATQLLCTGAIHAGVGETVASGERPHLGRV

SEQ ID NO: 39540 - protein, 160 aa, Arabidopsis thaliana
  peptide (1)..(160): Ceres Seq. ID no. 12422436
MLLMLNLGLYFVITIIASWAVNHGIERTRESASTLSLPAKIFPIYFPVGNMATGFFVIFTLIAGVVGMATSLTGIINVLQWDSPNLHSAAASSLISWSLTLLAMGLACKEINIGWTEANLRTLEVLTIIVSATQLLCTGAIHAGVGETVASGERPHLGRV

SEQ ID NO: 39541 - protein, 157 aa, Arabidopsis thaliana
  peptide (1)..(157): Ceres Seq. ID no. 12422437
MLNLGLYFVITIIASWAVNHGIERTRESASTLSLPAKIFPIYFPVGNMATGFFVIFTLIAGVVGMATSLTGIINVLQWDSPNLHSAAASSLISWSLTLLAMGLACKEINIGWTEANLRTLEVLTIIVSATQLLCTGAIHAGVGETVASGERPHLGRV

SEQ ID NO: 39542 - DNA, 1420 bp, Arabidopsis thaliana
  misc_feature (1)..(1420): Ceres Seq. ID no. 13488837
  misc_feature (1)..(1420): Ortholog of  Ceres SEQ ID NO 13595492 as cited in SEQ ID NO 51124
gccaacaatgaaagcgatccagttgctgtgggaagcgataatggaggcgacgaagagagaaagacggagagaagatgacgacggcgaaaaagcttcaccggaatcactcgttcttccaccagagatcattacagaaattcttctccgattaccagccaaatcgatcgggcgattcaggtgcgtatcaaagctcttttgcactttatcgtcagatccagggttcgcgaagattcacctcgatctgatccttcgaaacgaatccgtaagatcgctccaccgtaagctcattgtgtcttcacataatctgtactcgttagatttcaattcgatcggtgacggaattagggatttagcggctgtggaacacaattatcctcttaaagacgatccaagcattttctctgagatgattaggaattacgtgggggaccatctgtacgatgatcgtcgcgtgatgcttaagctgaatgcgaaatcgtatcgaagaaactgggttgagatcgttggatcttccaatggtttagtgtgtatctctcctggtgaaggagctgttttcttgtataatccaactaccggagattccaagagattacctgaaaattttcgtcccaaatctgtagaatacgaaagagataatttccaaacttatggatttggtttcgatggtctcactgatgattacaaattggtgaagcttgttgctaccagtgaagatattctcgatgctagtgtctattccttgaaggctgactcatggagacggatctgcaatttgaattatgagcacaacgatggctcctacacgtccggtgtgcatttcaacggtgcgattcactgggtgttcacagagagtaggcacaaccaaagagtggttgtagcatttgatattcaaaccgaggagtttcgagagatgccagtgcctgatgaagctgaagattgttcccataggtttagcaactttgtggtcggaagtctcaatggacgtctctgtgtggtcaatagttgctacgatgtgcatgatgatatatgggtgatgagtgagtacggtgaagctaaatcctggagcagaattcgaatcaacttgttgtataggtcgatgaaaccgctctgttcgactaagaacgatgaagaggttcttctggagcttgatggagacctggtgttgtacaactttgaaaccaatgcatcgagtaatctaggaatttgtggggttaagctcagtgacgggttcgaggcaaatacatacgtagagagcctcatatcacccaactcttatggtatagagagctgaggaagtctgctttttgctaagatataataaaccaacattcggattagaaatgttttagaaacataatcatgtaatatgtatcatgtaattaacaacgaatggtcaatgggtattttaagtttctttctc

SEQ ID NO: 39543 - protein, 429 aa, Arabidopsis thaliana
  peptide (1)..(429): Ceres Seq. ID no. 13488838
PTMKAIQLLWEAIMEATKRERRREDDDGEKASPESLVLPPEIITEILLRLPAKSIGRFRCVSKLFCTLSSDPGFAKIHLDLILRNESVRSLHRKLIVSSHNLYSLDFNSIGDGIRDLAAVEHNYPLKDDPSIFSEMIRNYVGDHLYDDRRVMLKLNAKSYRRNWVEIVGSSNGLVCISPGEGAVFLYNPTTGDSKRLPENFRPKSVEYERDNFQTYGFGFDGLTDDYKLVKLVATSEDILDASVYSLKADSWRRICNLNYEHNDGSYTSGVHFNGAIHWVFTESRHNQRVVVAFDIQTEEFREMPVPDEAEDCSHRFSNFVVGSLNGRLCVVNSCYDVHDDIWVMSEYGEAKSWSRIRINLLYRSMKPLCSTKNDEEVLLELDGDLVLYNFETNASSNLGICGVKLSDGFEANTYVESLISPNSYGIES

SEQ ID NO: 39544 - protein, 427 aa, Arabidopsis thaliana
  peptide (1)..(427): Ceres Seq. ID no. 13488839
MKAIQLLWEAIMEATKRERRREDDDGEKASPESLVLPPEIITEILLRLPAKSIGRFRCVSKLFCTLSSDPGFAKIHLDLILRNESVRSLHRKLIVSSHNLYSLDFNSIGDGIRDLAAVEHNYPLKDDPSIFSEMIRNYVGDHLYDDRRVMLKLNAKSYRRNWVEIVGSSNGLVCISPGEGAVFLYNPTTGDSKRLPENFRPKSVEYERDNFQTYGFGFDGLTDDYKLVKLVATSEDILDASVYSLKADSWRRICNLNYEHNDGSYTSGVHFNGAIHWVFTESRHNQRVVVAFDIQTEEFREMPVPDEAEDCSHRFSNFVVGSLNGRLCVVNSCYDVHDDIWVMSEYGEAKSWSRIRINLLYRSMKPLCSTKNDEEVLLELDGDLVLYNFETNASSNLGICGVKLSDGFEANTYVESLISPNSYGIES

SEQ ID NO: 39545 - protein, 416 aa, Arabidopsis thaliana
  peptide (1)..(416): Ceres Seq. ID no. 13488840
MEATKRERRREDDDGEKASPESLVLPPEIITEILLRLPAKSIGRFRCVSKLFCTLSSDPGFAKIHLDLILRNESVRSLHRKLIVSSHNLYSLDFNSIGDGIRDLAAVEHNYPLKDDPSIFSEMIRNYVGDHLYDDRRVMLKLNAKSYRRNWVEIVGSSNGLVCISPGEGAVFLYNPTTGDSKRLPENFRPKSVEYERDNFQTYGFGFDGLTDDYKLVKLVATSEDILDASVYSLKADSWRRICNLNYEHNDGSYTSGVHFNGAIHWVFTESRHNQRVVVAFDIQTEEFREMPVPDEAEDCSHRFSNFVVGSLNGRLCVVNSCYDVHDDIWVMSEYGEAKSWSRIRINLLYRSMKPLCSTKNDEEVLLELDGDLVLYNFETNASSNLGICGVKLSDGFEANTYVESLISPNSYGIES

SEQ ID NO: 39546 - DNA, 1257 bp, Arabidopsis thaliana
  misc_feature (1)..(1257): Ceres Seq. ID no. 12395322
  misc_feature (1)..(1257): Ortholog of  Ceres SEQ ID NO 14306059 as cited in SEQ ID NO 52249
  misc_feature (1)..(1257): Ortholog of  Ceres SEQ ID NO 15170479 as cited in SEQ ID NO 52835
  misc_feature (1)..(1257): Ortholog of  Ceres SEQ ID NO 13596087 as cited in SEQ ID NO 68336
agattctttcttctaaacccattcgctctctccgatcaacacaacatttgatctaacggtttaattttctcgagaaaccgaaggaaaacaaacagagcaatggcgtcgatgggacggtgcctgagctgaaattgagagtcgaagaagattccgataatggtgattatctgaaattgagaggaggatcaaatgaagaagatgaaggatcatcggcggaatcatcgagatgtccgataggatcggttacttctgtctggttctgggtgaaattgatctccttggtcgtttgtttgggttcattggcctttgttatcatcaaatgggttggtccctttttgattgaaaaggagctgattccatttataaattgggtgagaaacacattcagcataccggttctcggtcttctactatttgcctcagtggcattgtttccaagcattcttcttccttcttccccttccatgtggatggctggtcttacatttggttatggaaaagggtttcttctgattttatcagctgcttccatcggtgttactcttcctttcttaattggacatctcttcctccacaagatgcaagaatggttgaagaaataccctaaaaaagcagccatacttagagctgctggtgaaggaacctggtttcatcagtttcaagcagtcacactaatccgtgtctctccatttccttacatcatttacaactactgcgctttagcgactggagttcattatggtccttatatcttaggctctcttgttggaatggttcctgagatctttgtctcaatttacacgggtataatgctaaggacactagcagttgcatcagacacgagacacacactttcggttgtggagatagtcgtgaatgttcttggcttctgtgtaactgcgagcgcgactatagtctgcacaatctatgcgaagaagaagctaagtgcgatgcaatcagaggacgtagagacattacaaaatccaatactttattaactcttttcaccatgaccacaacataccatcatctaacacgatcttgaaattgataatatataatgttttttttttttttttgttattcttattcatttgaaaatgaatatttatgtctttttctcttgtatatatgatatgtatcaattgaattttgaaaatttccaatgtatatttattagatcatctaagtctttttctttccttgcatataatccaccttatgtatcatggaacaatgtcttgttgggttttgttc

SEQ ID NO: 39547 - protein, 177 aa, Arabidopsis thaliana; identical to SEQ ID NO: 26159
  peptide (1)..(177): Ceres Seq. ID no. 12395323

SEQ ID NO: 39548 - protein, 175 aa, Arabidopsis thaliana; identical to SEQ ID NO: 26160
  peptide (1)..(175): Ceres Seq. ID no. 12395324

SEQ ID NO: 39549 - protein, 139 aa, Arabidopsis thaliana
  peptide (1)..(139): Ceres Seq. ID no. 12395325
MQEWLKKYPKKAAILRAAGEGTWFHQFQAVTLIRVSPFPYIIYNYCALATGVHYGPYILGSLVGMVPEIFVSIYTGIMLRTLAVASDTRHTLSVVEIVVNVLGFCVTASATIVCTIYAKKKLSAMQSEDVETLQNPILY

SEQ ID NO: 39550 - DNA, 1317 bp, Arabidopsis thaliana
  misc_feature (1)..(1317): Ceres Seq. ID no. 13488574
  misc_feature (1)..(1317): Ortholog of  Ceres SEQ ID NO 13595351 as cited in SEQ ID NO 55934
  misc_feature (1)..(1317): Ortholog of  Ceres SEQ ID NO 13639645 as cited in SEQ ID NO 57488
ataacaaaccaaacactactcttttctaaccaagagaaaggttttatatatgcagaatgaagtttgagagagcaaggccattcatagccattgttttcatacaatgtttgtacgctttgatgtctatagtagcaaaattagctttgaacaagggaatgagccctcacgtcttagttgcttaccgaatggcagttgcttccgctctcattacgcctttcgctctcatcctcgagaggaacacaagaccaaagttgaccttcaagattttgttacaaatagccatccttagtttatttgagcctgtggtcgaacaaaacctgtactactcagggatgaaacttaccactgccacattcacatcagctttgtgcaatgctcttcctgctatgacattcataatggcctgcgttttcaagctcgagaaggtgacaatcgaaagacgccacagccaggcaaagctggtgggaaccatggtggctattgggggagcaatgctcatgacattcgtgaaagggaatgtcattgagctgccttggacaagcaactcaaggggtcttaatgggcacacacacgctatgaggattccaaagcaggcggatatagcaagaggatcaattatgcttgtagcaagctgcttcagttggtcatgttacatcattttacaggcaaagattctggctcaatataaagctgagctctcgctaacagctcttatgtgcattatggggatgttggaggctactgttatgggattgatatgggaaaggaaaaacatgtcggtctggaaaatcaacccggacgtgacgcttttagcttcaatctacggaggactagtctcagggttagcatactatgttattggatgggcgtcaaaggagagagggcctgtgtttgtgagcgcgtttaacccgctcagcatggttctcgttgctattctgagcacctttgttttcttggaaaaagtgtacgtaggaagggttattgggtcagttgtcattgtcattgggatatatttggtattatggggtaaaagcaaggacaaaggagggatgcttcaaccaaacgctggatgcgcagagactgtggtaaagattgaccaacagaaggttccgacgcctgataataaccaagtagtatctatcagttaccatttaatgatcccgaaggcagcagctcggtctcaagagtgagtctaagatgccgattctgttccaggatctctatatatcgcaaaaaaaacatttttgatagtattggtttgccagaataagagcaagcaatgcgctacattaagtctcataaaagctaagaacttgg

SEQ ID NO: 39551 - protein, 377 aa, Arabidopsis thaliana
  peptide (1)..(377): Ceres Seq. ID no. 13488575
MKFERARPFIAIVFIQCLYALMSIVAKLALNKGMSPHVLVAYRMAVASALITPFALILERNTRPKLTFKILLQIAILSLFEPVVEQNLYYSGMKLTTATFTSALCNALPAMTFIMACVFKLEKVTIERRHSQAKLVGTMVAIGGAMLMTFVKGNVIELPWTSNSRGLNGHTHAMRIPKQADIARGSIMLVASCFSWSCYIILQAKILAQYKAELSLTALMCIMGMLEATVMGLIWERKNMSVWKINPDVTLLASIYGGLVSGLAYYVIGWASKERGPVFVSAFNPLSMVLVAILSTFVFLEKVYVGRVIGSVVIVIGIYLVLWGKSKDKGGMLQPNAGCAETVVKIDQQKVPTPDNNQVVSISYHLMIPKAAARSQE

SEQ ID NO: 39552 - protein, 356 aa, Arabidopsis thaliana
  peptide (1)..(356): Ceres Seq. ID no. 13488576
MSIVAKLALNKGMSPHVLVAYRMAVASALITPFALILERNTRPKLTFKILLQIAILSLFEPVVEQNLYYSGMKLTTATFTSALCNALPAMTFIMACVFKLEKVTIERRHSQAKLVGTMVAIGGAMLMTFVKGNVIELPWTSNSRGLNGHTHAMRIPKQADIARGSIMLVASCFSWSCYIILQAKILAQYKAELSLTALMCIMGMLEATVMGLIWERKNMSVWKINPDVTLLASIYGGLVSGLAYYVIGWASKERGPVFVSAFNPLSMVLVAILSTFVFLEKVYVGRVIGSVVIVIGIYLVLWGKSKDKGGMLQPNAGCAETVVKIDQQKVPTPDNNQVVSISYHLMIPKAAARSQE

SEQ ID NO: 39553 - protein, 344 aa, Arabidopsis thaliana
  peptide (1)..(344): Ceres Seq. ID no. 13488577
MSPHVLVAYRMAVASALITPFALILERNTRPKLTFKILLQIAILSLFEPVVEQNLYYSGMKLTTATFTSALCNALPAMTFIMACVFKLEKVTIERRHSQAKLVGTMVAIGGAMLMTFVKGNVIELPWTSNSRGLNGHTHAMRIPKQADIARGSIMLVASCFSWSCYIILQAKILAQYKAELSLTALMCIMGMLEATVMGLIWERKNMSVWKINPDVTLLASIYGGLVSGLAYYVIGWASKERGPVFVSAFNPLSMVLVAILSTFVFLEKVYVGRVIGSVVIVIGIYLVLWGKSKDKGGMLQPNAGCAETVVKIDQQKVPTPDNNQVVSISYHLMIPKAAARSQE

SEQ ID NO: 39554 - DNA, 1760 bp, Arabidopsis thaliana
  misc_feature (1)..(1760): Ceres Seq. ID no. 12377425
  misc_feature (1)..(1760): Ortholog of  Ceres SEQ ID NO 15170670 as cited in SEQ ID NO 68165
agataaaaagattcaattttatttgatagcccggcgattaaaaagattcctatcatcatcactcgccggctaatggccacaacgatgacacgtgtctccgtcggcgtcgtcctctttgttctcttagtctcgctggttgccgtctccgccgcgagaagcggtcctgatgatgttatcaaactcccttcgcaggcttctcgcttcttccgtcctgctgaaaacgacgacgattctaactccggtactaggtgggctgttctagtcgccggatctagcggatattggaattacaggcatcaggctgatatatgccatgcctatcaacttctgaggaaaggtggattgaaagaggagaatattgtggtattcatgtatgatgatattgctaacaattacgagaatccaaggcctggaaccattatcaacagccctcatggaaaagatgtctatcaaggagttcccaaggattatactggagatgatgtcaatgttgataatctatttgctgtgatccttggagacaaaactgctgttaaagggggaagtgggaaggttgtggatagtggtcctaatgatcatatcttcatattctacagtgaccatggtggtcctggagttcttgggatgccaacttctccttacctatatgcaaatgatctcaatgatgtcttgaagaagaaacatgctttaggaacatataaaagcttggtgttttatctcgaagcttgcgaatctggaagtatctttgaagggcttcttcctgagggtttgaacatctatgccacaactgcatcaaacgccgaagaaagcagttggggtacctattgccctggagaggaacccagtcctccaccggagtatgaaacttgtttaggtgacttgtacagtgttgcttggatggaagatagtggtatgcacaatttacagactgagactctgcaccagcaatatgaacttgtgaaaaggaggactgcacctgttgggtactcttatggttctcatgtcatgcaatatggcgatgtaggaattagcaaggataatctcgatctttatatgggaacaaaccctgccaatgacaattttacctttgcggatgcgaattcactaaagccaccttcaagagttacaaaccagcgtgatgcagatcttgttcatttttgggaaaagtaccgaaaagcaccagaaggttcagcaagaaaaacagaagctcagaagcaagtacttgaagccatgtctcacagacttcatattgacaatagcgtgatactcgtcggaaaaatcttgtttggcatttcgagaggtcctgaagtgctaaacaaagtacggtctgctgggcaacctctagtcgatgactggaactgccttaaaaatcaggtgagagctttcgagaggcactgtggatcgctgtctcagtacggtatcaagcacatgaggtcttttgcaaacatctgcaatgcagggattcaaatggagcaaatggaggaggcagcttcacaggcttgtaccacactgccaactggtccttggagctcgcttaaccgtggattcagtgcatagaaaccctaaaccgtcttcgcatttgtttataccaccaatccccaaatattcctatttcgatttgttatgattaaatcagtattctctctgtatatctcagtatcatttccgtcgtcagtgtgtaatttcaaattatgtatttgccatgtacagaagcttgtagaactaaagttgaatgtatagaaggtttgtatattatgatg

SEQ ID NO: 39555 - protein, 494 aa, Arabidopsis thaliana
  peptide (1)..(494): Ceres Seq. ID no. 12377426
MATTMTRVSVGVVLFVLLVSLVAVSAARSGPDDVIKLPSQASRFFRPAENDDDSNSGTRWAVLVAGSSGYWNYRHQADICHAYQLLRKGGLKEENIVVFMYDDIANNYENPRPGTIINSPHGKDVYQGVPKDYTGDDVNVDNLFAVILGDKTAVKGGSGKVVDSGPNDHIFIFYSDHGGPGVLGMPTSPYLYANDLNDVLKKKHALGTYKSLVFYLEACESGSIFEGLLPEGLNIYATTASNAEESSWGTYCPGEEPSPPPEYETCLGDLYSVAWMEDSGMHNLQTETLHQQYELVKRRTAPVGYSYGSHVMQYGDVGISKDNLDLYMGTNPANDNFTFADANSLKPPSRVTNQRDADLVHFWEKYRKAPEGSARKTEAQKQVLEAMSHRLHIDNSVILVGKILFGISRGPEVLNKVRSAGQPLVDDWNCLKNQVRAFERHCGSLSQYGIKHMRSFANICNAGIQMEQMEEAASQACTTLPTGPWSSLNRGFSA

SEQ ID NO: 39556 - protein, 490 aa, Arabidopsis thaliana
  peptide (1)..(490): Ceres Seq. ID no. 12377427
MTRVSVGVVLFVLLVSLVAVSAARSGPDDVIKLPSQASRFFRPAENDDDSNSGTRWAVLVAGSSGYWNYRHQADICHAYQLLRKGGLKEENIVVFMYDDIANNYENPRPGTIINSPHGKDVYQGVPKDYTGDDVNVDNLFAVILGDKTAVKGGSGKVVDSGPNDHIFIFYSDHGGPGVLGMPTSPYLYANDLNDVLKKKHALGTYKSLVFYLEACESGSIFEGLLPEGLNIYATTASNAEESSWGTYCPGEEPSPPPEYETCLGDLYSVAWMEDSGMHNLQTETLHQQYELVKRRTAPVGYSYGSHVMQYGDVGISKDNLDLYMGTNPANDNFTFADANSLKPPSRVTNQRDADLVHFWEKYRKAPEGSARKTEAQKQVLEAMSHRLHIDNSVILVGKILFGISRGPEVLNKVRSAGQPLVDDWNCLKNQVRAFERHCGSLSQYGIKHMRSFANICNAGIQMEQMEEAASQACTTLPTGPWSSLNRGFSA

SEQ ID NO: 39557 - protein, 395 aa, Arabidopsis thaliana
  peptide (1)..(395): Ceres Seq. ID no. 12377428
MYDDIANNYENPRPGTIINSPHGKDVYQGVPKDYTGDDVNVDNLFAVILGDKTAVKGGSGKVVDSGPNDHIFIFYSDHGGPGVLGMPTSPYLYANDLNDVLKKKHALGTYKSLVFYLEACESGSIFEGLLPEGLNIYATTASNAEESSWGTYCPGEEPSPPPEYETCLGDLYSVAWMEDSGMHNLQTETLHQQYELVKRRTAPVGYSYGSHVMQYGDVGISKDNLDLYMGTNPANDNFTFADANSLKPPSRVTNQRDADLVHFWEKYRKAPEGSARKTEAQKQVLEAMSHRLHIDNSVILVGKILFGISRGPEVLNKVRSAGQPLVDDWNCLKNQVRAFERHCGSLSQYGIKHMRSFANICNAGIQMEQMEEAASQACTTLPTGPWSSLNRGFSA

SEQ ID NO: 39558 - DNA, 1530 bp, Arabidopsis thaliana
  misc_feature (1)..(1530): Ceres Seq. ID no. 12466572
  misc_feature (1)..(1530): Ortholog of  Ceres SEQ ID NO 14313264 as cited in SEQ ID NO 67300
agcaaaaagtctcctctttcctctctttctctctctgcgtccttctgaggctggaagcgatgaccatgacagcatttctcgcgagacggcttatcggtaacggatcgagccagattctcgggacttcgagttctagctccggtccgttcatttccgtttctagggctttcttctcctcctccactccgatcaaagctactctctttcccggtgatgggatcggtcccgaaatcgctgaatctgtcaagcaggtgtttactgccgctgatgtggttattgattgggacgaacagtttgttggtactgaagtagatcctagaaccaatagtttcttgacatgggataatcttcaatctgtgcttaaaaacaaggttggtttgaaaggaccaatggctactccaattggaaagggtcaccgttccttgaaccttactcttaggaaagagctgaatttgtatgccaatgttaggccttgttacagtcttcctggttacaaaacccgttatgatgatgttgatctcattaccattcgtgagaacactgaaggagagtacagtgggcttgaacaccaggtcgtcaagggtgtagtggaaagtcttaaaattattacccgtaaggcgagtatgagagttgccgagtatgcctttctttatgccaagactcacggaaggaagaaagtttctgcaattcacaaagccaacattatgcagaaaactgatggtcttttcctgcagtgttgtgatgaagttgctgcgaagtatcctgagatatattacgagaaggttgttattgacaattgctgtatgatgcttgtgaaaaacccagcactttttgatgtcttggtgatgccaaatctctatggagatattatcagcgatttgtgtgctggacttgttgggggactaggactgactcctagtatgaatattggggaggatggtattgcccttgctgaagctgttcacggctctgcacctgatattgctggaatgaacctggcgaacccaacagctttgctactgagtggagtgatgatgttgcggcacctgaagctcaacaaacaagcagagcaaatccacagtgccatcatcaacacaatagccgagggaaagtatagaactgctgatctcggaggttcctcaactacaacagatttcacaaaagccatctgtgatcatctctaaacacccgtgaaaaaccataattctttccttacttacttattggatcttcctcttggattttcactccaaaatttttctacatattgatcctcttcctatgaggagaaacaaagccgccataggctttagacattgacttgtgttttccttagatttgaagttcttgcagagctgtattacttcttctgcctttaagatccataacaaaagaaggatacagatattggaagaatccatcaaaaggttcacatttacagtttgtggattttgcctgaattgtttggcgttatgtcttattctctgtgaattttcaacaataataatatcgtcccttttgtccttacct

SEQ ID NO: 39559 - protein, 393 aa, Arabidopsis thaliana
  peptide (1)..(393): Ceres Seq. ID no. 12466573
QKVSSFLSFSLCVLLRLEAMTMTAFLARRLIGNGSSQILGTSSSSSGPFISVSRAFFSSSTPIKATLFPGDGIGPEIAESVKQVFTAADVVIDWDEQFVGTEVDPRTNSFLTWDNLQSVLKNKVGLKGPMATPIGKGHRSLNLTLRKELNLYANVRPCYSLPGYKTRYDDVDLITIRENTEGEYSGLEHQVVKGVVESLKIITRKASMRVAEYAFLYAKTHGRKKVSAIHKANIMQKTDGLFLQCCDEVAAKYPEIYYEKVVIDNCCMMLVKNPALFDVLVMPNLYGDIISDLCAGLVGGLGLTPSMNIGEDGIALAEAVHGSAPDIAGMNLANPTALLLSGVMMLRHLKLNKQAEQIHSAIINTIAEGKYRTADLGGSSTTTDFTKAICDHL

SEQ ID NO: 39560 - protein, 374 aa, Arabidopsis thaliana
  peptide (1)..(374): Ceres Seq. ID no. 12466574
MTMTAFLARRLIGNGSSQILGTSSSSSGPFISVSRAFFSSSTPIKATLFPGDGIGPEIAESVKQVFTAADVVIDWDEQFVGTEVDPRTNSFLTWDNLQSVLKNKVGLKGPMATPIGKGHRSLNLTLRKELNLYANVRPCYSLPGYKTRYDDVDLITIRENTEGEYSGLEHQVVKGVVESLKIITRKASMRVAEYAFLYAKTHGRKKVSAIHKANIMQKTDGLFLQCCDEVAAKYPEIYYEKVVIDNCCMMLVKNPALFDVLVMPNLYGDIISDLCAGLVGGLGLTPSMNIGEDGIALAEAVHGSAPDIAGMNLANPTALLLSGVMMLRHLKLNKQAEQIHSAIINTIAEGKYRTADLGGSSTTTDFTKAICDHL

SEQ ID NO: 39561 - protein, 372 aa, Arabidopsis thaliana
  peptide (1)..(372): Ceres Seq. ID no. 12466575
MTAFLARRLIGNGSSQILGTSSSSSGPFISVSRAFFSSSTPIKATLFPGDGIGPEIAESVKQVFTAADVVIDWDEQFVGTEVDPRTNSFLTWDNLQSVLKNKVGLKGPMATPIGKGHRSLNLTLRKELNLYANVRPCYSLPGYKTRYDDVDLITIRENTEGEYSGLEHQVVKGVVESLKIITRKASMRVAEYAFLYAKTHGRKKVSAIHKANIMQKTDGLFLQCCDEVAAKYPEIYYEKVVIDNCCMMLVKNPALFDVLVMPNLYGDIISDLCAGLVGGLGLTPSMNIGEDGIALAEAVHGSAPDIAGMNLANPTALLLSGVMMLRHLKLNKQAEQIHSAIINTIAEGKYRTADLGGSSTTTDFTKAICDHL

SEQ ID NO: 39562 - DNA, 1119 bp, Arabidopsis thaliana
  misc_feature (1)..(1119): Ceres Seq. ID no. 12328119
  misc_feature (1)..(1119): Ortholog of  Ceres SEQ ID NO 14311044 as cited in SEQ ID NO 53643
aaacttacagagagacaaatacctataataagccattcataatcttcttgcttcttgttcagaataatggggaatcttttctgttgcgtgcttgtgaagcaatcagatgttgcggtcaaggagagatttggcaaattccaaaaagtacttaatccaggtctccaatttgttccatgggtcatcggtgattacgtcgccggtacactgacccttcgtcttcagcaactcgatgttcagtgtgaaaccaaaacaaaggacaatgtgtttgtgacagtggttgcatccatacaatacagagtcttagctgacaaggcaagtgatgctttttacagactcagcaatccaaccacccaaatcaaagcctacgtctttgatgtgatcagagcatgtgttccaaagctgaacttggacgatgtgttcgagcagaagaatgaaattgccaaatctgtggaagaagagctagacaaagccatgactgcttatggttacgaaatccttcaaaccctaattatcgacattgagcctgatcaacaggttaaacgtgccatgaacgaaatcaacgccgcggcgaggatgagagtggcagcgagcgaaaaagcagaggctgagaaaatcattcagatcaaaagagcagagggtgaagcagagtcaaagtacctgtcgggactcggaatagctcggcagagacaagcgatcgtggacggtctgagagacagtgttctagggttcgcaggaaacgtgccagggacgtcagcgaaggatgtgttggacatggtgatgatgactcagtactttgacacaatgagagatatcggagcaacttctaaatcctctgcggtgtttatccctcacggtccaggcgccgtctctgacgtggcagcgcagattcgaaatggattattacaggccaacaatgcctcctaatcactcaagtcaaattgtcttggtcgtctctttatatatttttgtatcttcttattaaaaaggtaaattttacttttaatataatggtgtgcttattgtgatttgtcattatgtttgtacctatctcttttgtgagttgtgtgatagatatactttgtattttttcttaaaagtcaatataaatttctgtttgcg

SEQ ID NO: 39563 - protein, 285 aa, Arabidopsis thaliana
  peptide (1)..(285): Ceres Seq. ID no. 12328120
MGNLFCCVLVKQSDVAVKERFGKFQKVLNPGLQFVPWVIGDYVAGTLTLRLQQLDVQCETKTKDNVFVTVVASIQYRVLADKASDAFYRLSNPTTQIKAYVFDVIRACVPKLNLDDVFEQKNEIAKSVEEELDKAMTAYGYEILQTLIIDIEPDQQVKRAMNEINAAARMRVAASEKAEAEKIIQIKRAEGEAESKYLSGLGIARQRQAIVDGLRDSVLGFAGNVPGTSAKDVLDMVMMTQYFDTMRDIGATSKSSAVFIPHGPGAVSDVAAQIRNGLLQANNAS

SEQ ID NO: 39564 - protein, 150 aa, Arabidopsis thaliana
  peptide (1)..(150): Ceres Seq. ID no. 12328121
MTAYGYEILQTLIIDIEPDQQVKRAMNEINAAARMRVAASEKAEAEKIIQIKRAEGEAESKYLSGLGIARQRQAIVDGLRDSVLGFAGNVPGTSAKDVLDMVMMTQYFDTMRDIGATSKSSAVFIPHGPGAVSDVAAQIRNGLLQANNAS

SEQ ID NO: 39565 - DNA, 1391 bp, Arabidopsis thaliana
  misc_feature (1)..(1391): Ceres Seq. ID no. 12348403
  misc_feature (1)..(1391): Ortholog of  Ceres SEQ ID NO 14315234 as cited in SEQ ID NO 52501
aaaaacagcctggtaagcttcttcgttttcccttctagagaccattgattatcataattgttctacaaactttagctttttcattagtctctcgatctacttgatcgttgtcacttagcaaccctaatttctgggagaatcatccctgcagtattacccatcccgatgagtgttaaggttggatgatagaagacattttttgaccttctcttacaatgactacacgaagaaatggcgtttccaggcatcagcggtttgagagttttcgcggtgaaggaccaaattggatcttaattgctgggggtgctttgttgagtacattgtccattcgttttggctacaaattaaagcagtctattgactccaaacctcctcattccaatgccactggtggattaaaacctaatggaacaaccgacagaggaagatttaagggctgctgcttgcattctaatgcatcaccctgtgaaaggaataatgattgttgctttcactgcactcccggaactgagaatggggaaggaaatcatgctacaaatgagcaaatggcagagtccagtacttctctgcctcttgtgacagttcctgcttcatcatatagcaaagagagtgcagtcgtatggggatcttctcctgaccacctggaagtgccgatgaaagcataccatcaacattcgacctgctcagatactccttgcgtatctgaatccggctcagacatcttcagcaagcgagaagtaatacagaaactgaggcaacagctgaagagacgtgacgacatgatagttgaaatgcaggaacagattctagagctgcaaaactcgctaaacgcccagatgggacactctagccatatccaaacacagctagacgcaacaaacagggacctgtttgaatcagaaagagaagtccagagactgagaaaggcaatcgctgatcactgcgtgggacacacaggtagcaatggttggagtggcgatgtgaacagcgaaaacaactacgagtcaccagaaaatggaataagggatggagaaagaatagagatgttgagaaaagaagtgggtgagcttaaagaagtgatagatgggaaagagtatctacttaggagctataaggagcagaaaacagagcttttgcagaaggtaaaagagttgcagcagagactggactcgcagctcccaaacattttgtaggtgaagaaggttaggcattgtgcattcttaccactctcttttgtttccccgagtaaaaaatatgaatctttgttcaaaaatatctcaatttctccggggaaacttatcaactgactacattgttttgggtgtcaattatgattttatccaaattgtttttttctcttggtgaagtggatattcgaaagttgcaaaccc

SEQ ID NO: 39566 - protein, 325 aa, Arabidopsis thaliana
  peptide (1)..(325): Ceres Seq. ID no. 12348404
MTTRRNGVSRHQRFESFRGEGPNWILIAGGALLSTLSIRFGYKLKQSIDSKPPHSNATGGLKPNGTTDRGRFKGCCLHSNASPCERNNDCCFHCTPGTENGEGNHATNEQMAESSTSLPLVTVPASSYSKESAVVWGSSPDHLEVPMKAYHQHSTCSDTPCVSESGSDIFSKREVIQKLRQQLKRRDDMIVEMQEQILELQNSLNAQMGHSSHIQTQLDATNRDLFESEREVQRLRKAIADHCVGHTGSNGWSGDVNSENNYESPENGIRDGERIEMLRKEVGELKEVIDGKEYLLRSYKEQKTELLQKVKELQQRLDSQLPNIL

SEQ ID NO: 39567 - protein, 215 aa, Arabidopsis thaliana
  peptide (1)..(215): Ceres Seq. ID no. 12348405
MAESSTSLPLVTVPASSYSKESAVVWGSSPDHLEVPMKAYHQHSTCSDTPCVSESGSDIFSKREVIQKLRQQLKRRDDMIVEMQEQILELQNSLNAQMGHSSHIQTQLDATNRDLFESEREVQRLRKAIADHCVGHTGSNGWSGDVNSENNYESPENGIRDGERIEMLRKEVGELKEVIDGKEYLLRSYKEQKTELLQKVKELQQRLDSQLPNIL

SEQ ID NO: 39568 - protein, 179 aa, Arabidopsis thaliana
  peptide (1)..(179): Ceres Seq. ID no. 12348406
MKAYHQHSTCSDTPCVSESGSDIFSKREVIQKLRQQLKRRDDMIVEMQEQILELQNSLNAQMGHSSHIQTQLDATNRDLFESEREVQRLRKAIADHCVGHTGSNGWSGDVNSENNYESPENGIRDGERIEMLRKEVGELKEVIDGKEYLLRSYKEQKTELLQKVKELQQRLDSQLPNIL

SEQ ID NO: 39569 - DNA, 1128 bp, Arabidopsis thaliana
  misc_feature (1)..(1128): Ceres Seq. ID no. 13580354
  misc_feature (1)..(1128): Ortholog of  Ceres SEQ ID NO 13595164 as cited in SEQ ID NO 56222
  misc_feature (1)..(1128): Ortholog of  Ceres SEQ ID NO 13595665 as cited in SEQ ID NO 59902
  misc_feature (1)..(1128): Ortholog of  Ceres SEQ ID NO 14302438 as cited in SEQ ID NO 62982
  misc_feature (1)..(1128): Ortholog of  Ceres SEQ ID NO 13591068 as cited in SEQ ID NO 69043
  misc_feature (1)..(1128): Ortholog of  Ceres SEQ ID NO 13623041 as cited in SEQ ID NO 0
atcggtacgacgttctttttggttctttcttgtttctccattcatccataagaaaagataatgtagttctgcttgttcgtccattttctgattttggtatcagtttttgtatttgtgtatagtaaatctgaaggagttttccaaagacaaaccaacatggaagaccgcgtcttgatcaagaacgatgtcactgaattgataggtaacacaccaatggtgtatctaaataaaattgtggatggttgtgtggctcgtattgctgccaagcttgagatgatggagccttgctctagcatcaaagatagaatcgcatatagtatgatcaaagatgctgaagacaaaggattgattactccgggaaagagtacattgattgaggcaacgggtggtaacaccgggattggtttagccagcatcggggcttcaagaggttataaagtgatccttttgatgccttcaacaatgagtttagaaaggagaatcattctaagagcattaggtgcagaggttcatctcactgacattagcataggcattaaaggacagttggagaaagctaaagagatattaagcaaaactcccggtggttacataccacaccagtttattaatcctgaaaatccagagattcattatagaaccacgggtccggagatttggagagattcagcagggaaagtagatatcttagtcgccggtgttggaactggtggaacggttactggaacagggaagtttcttaaagaaaagaacaaagatattaaggtttgtgtggtggaaccttccgaaagtgcggtactcagcggaggaaaaccaggtccacatttgatccaaggaataggctctggtgaaattccagccaatttggacttaagcattgttgatgaaatcattcaagtgactggtgaggaagctattgaaacaaccaagcttcttgctatcaaagaaggattattggttggaatatcctctggagcctcagctgcggctgcgttaaaggttgcaaagcggcctgaaaacgtagggaaactcattgtggttatttttcctagtggaggagaacgttatttatcgactgaattgttcgagtcagtcagatatgaagctgagaatttgccagttgaatga

SEQ ID NO: 39570 - protein, 323 aa, Arabidopsis thaliana
  peptide (1)..(323): Ceres Seq. ID no. 13580355
MEDRVLIKNDVTELIGNTPMVYLNKIVDGCVARIAAKLEMMEPCSSIKDRIAYSMIKDAEDKGLITPGKSTLIEATGGNTGIGLASIGASRGYKVILLMPSTMSLERRIILRALGAEVHLTDISIGIKGQLEKAKEILSKTPGGYIPHQFINPENPEIHYRTTGPEIWRDSAGKVDILVAGVGTGGTVTGTGKFLKEKNKDIKVCVVEPSESAVLSGGKPGPHLIQGIGSGEIPANLDLSIVDEIIQVTGEEAIETTKLLAIKEGLLVGISSGASAAAALKVAKRPENVGKLIVVIFPSGGERYLSTELFESVRYEAENLPVE

SEQ ID NO: 39571 - protein, 304 aa, Arabidopsis thaliana
  peptide (1)..(304): Ceres Seq. ID no. 13580356
MVYLNKIVDGCVARIAAKLEMMEPCSSIKDRIAYSMIKDAEDKGLITPGKSTLIEATGGNTGIGLASIGASRGYKVILLMPSTMSLERRIILRALGAEVHLTDISIGIKGQLEKAKEILSKTPGGYIPHQFINPENPEIHYRTTGPEIWRDSAGKVDILVAGVGTGGTVTGTGKFLKEKNKDIKVCVVEPSESAVLSGGKPGPHLIQGIGSGEIPANLDLSIVDEIIQVTGEEAIETTKLLAIKEGLLVGISSGASAAAALKVAKRPENVGKLIVVIFPSGGERYLSTELFESVRYEAENLPVE

SEQ ID NO: 39572 - protein, 284 aa, Arabidopsis thaliana
  peptide (1)..(284): Ceres Seq. ID no. 13580357
MMEPCSSIKDRIAYSMIKDAEDKGLITPGKSTLIEATGGNTGIGLASIGASRGYKVILLMPSTMSLERRIILRALGAEVHLTDISIGIKGQLEKAKEILSKTPGGYIPHQFINPENPEIHYRTTGPEIWRDSAGKVDILVAGVGTGGTVTGTGKFLKEKNKDIKVCVVEPSESAVLSGGKPGPHLIQGIGSGEIPANLDLSIVDEIIQVTGEEAIETTKLLAIKEGLLVGISSGASAAAALKVAKRPENVGKLIVVIFPSGGERYLSTELFESVRYEAENLPVE

SEQ ID NO: 39573 - DNA, 1071 bp, Arabidopsis thaliana
  misc_feature (1)..(1071): Ceres Seq. ID no. 12394412
  misc_feature (1)..(1071): Ortholog of  Ceres SEQ ID NO 15177654 as cited in SEQ ID NO 59933
  misc_feature (1)..(1071): Ortholog of  Ceres SEQ ID NO 14303600 as cited in SEQ ID NO 64632
attgtgttagtggtaatcaaatccggtgaaaatggagcggagccgagtgaccagagaagcaccgaccggaaccaggatcctgcttgcttcactctctgcgatggttgcagagtcagttacgtttccgattgatctcacaaagactagaatgcagctccatggttcgggatccgcttctggtgcgcatcggattggcgctttcggagtcgtatcggagattgcgagaaaggaaggagtgattggtctctacaaaggtctatctccggcgattatcagacacctgttctacacgcctatcagaatcattggatacgagaatttgaaaggactcatcgtcagatctgaaactaacaatagcgagtctcttcctctcgccacaaaggctctcgtcggaggattttctggtgttatagctcaggtagtggctagtccagctgatttggtcaaagtgagaatgcaagcagatggtagattggtgagccaaggcctgaaaccgaggtactcgggaccaatcgaggcttttaccaaaatcctacaatcagaaggagtaaaagggttatggaaaggtgttcttccaaacatccagagagcatttctagtgaatatgggagaactagcttgctatgatcacgccaaacactttgtcatcgataagaagattgctgaggataacatttttgcgcacactcttgcttctataatgtccggtcttgcttcgacaagtttgagttgtccagctgatgtggtgaagacgaggatgatgaaccagggtgaaaatgctgtgtacagaaattcttacgactgtttggtgaagacggttaagtttgaaggaataagagctttgtggaaaggtttcttcccgacatgggcaaggcttggaccgtggcagttcgtgttttgggtctcctatgagaagtttagactgctggcaggaatctcttccttctagacctgagaaactggaaaagcaaatttgagatttgtgttctttagttcttacttgttagttgttacacattttgtaagaaccttgagaagtagcatcagtttctgattaacgcgagaagagtt

SEQ ID NO: 39574 - protein, 305 aa, Arabidopsis thaliana
  peptide (1)..(305): Ceres Seq. ID no. 12394413
MERSRVTREAPTGTRILLASLSAMVAESVTFPIDLTKTRMQLHGSGSASGAHRIGAFGVVSEIARKEGVIGLYKGLSPAIIRHLFYTPIRIIGYENLKGLIVRSETNNSESLPLATKALVGGFSGVIAQVVASPADLVKVRMQADGRLVSQGLKPRYSGPIEAFTKILQSEGVKGLWKGVLPNIQRAFLVNMGELACYDHAKHFVIDKKIAEDNIFAHTLASIMSGLASTSLSCPADVVKTRMMNQGENAVYRNSYDCLVKTVKFEGIRALWKGFFPTWARLGPWQFVFWVSYEKFRLLAGISSF

SEQ ID NO: 39575 - protein, 282 aa, Arabidopsis thaliana
  peptide (1)..(282): Ceres Seq. ID no. 12394414
MVAESVTFPIDLTKTRMQLHGSGSASGAHRIGAFGVVSEIARKEGVIGLYKGLSPAIIRHLFYTPIRIIGYENLKGLIVRSETNNSESLPLATKALVGGFSGVIAQVVASPADLVKVRMQADGRLVSQGLKPRYSGPIEAFTKILQSEGVKGLWKGVLPNIQRAFLVNMGELACYDHAKHFVIDKKIAEDNIFAHTLASIMSGLASTSLSCPADVVKTRMMNQGENAVYRNSYDCLVKTVKFEGIRALWKGFFPTWARLGPWQFVFWVSYEKFRLLAGISSF

SEQ ID NO: 39576 - protein, 266 aa, Arabidopsis thaliana
  peptide (1)..(266): Ceres Seq. ID no. 12394415
MQLHGSGSASGAHRIGAFGVVSEIARKEGVIGLYKGLSPAIIRHLFYTPIRIIGYENLKGLIVRSETNNSESLPLATKALVGGFSGVIAQVVASPADLVKVRMQADGRLVSQGLKPRYSGPIEAFTKILQSEGVKGLWKGVLPNIQRAFLVNMGELACYDHAKHFVIDKKIAEDNIFAHTLASIMSGLASTSLSCPADVVKTRMMNQGENAVYRNSYDCLVKTVKFEGIRALWKGFFPTWARLGPWQFVFWVSYEKFRLLAGISSF

SEQ ID NO: 39577 - DNA, 1178 bp, Arabidopsis thaliana
  misc_feature (1)..(1178): Ceres Seq. ID no. 13575024
  misc_feature (1)..(1178): Ortholog of  Ceres SEQ ID NO 14311576 as cited in SEQ ID NO 51551
gcttagtcttcttcgctctatcccaacactcgatcaaataatcccagtgagcttcttccattccaagttgataaggaatttgaagaagcctttgtttaatggaaagcaaaggaagaatccatccatctcatcatcatatgaggcgtcctcttccaggtcccggtggctgtatagcgcatccggagactttcggtaatcacggtgctataccaccttctgctgctcaaggtgtgtatccttccttcaacatgttacctccacctgaagttatggagcaaaagtttgtggcacaacacggggaattacagagacttgctatagagaatcagagacttggtggaactcatggtagtttaagacaagagttagcagcagcacagcatgaaatacagatgttgcacgcgcaaattgggtcgatgaagtccgagagagagcaacggatgatgggtcttgctgagaaagttgctaaaatggagactgagcttcagaaatctgaggctgttaagttggagatgcaacaagcacgtgctgaggcacggagtcttgttgtggctagggaggagcttatgtctaaagtgcatcagttgactcaggaacttcaaaaatctcgttctgatgtgcagcaaatacctgctctgatgtctgaacttgagaatctaagacaggagtaccagcagtgcagggcaacatatgactatgagaagaagttttataatgaccatctcgagtcacttcaggcaatggagaagaactacatgactatggctagggaagttgaaaaacttcaagcacagttgatgaacaatgcaaattcagatagaagagcaggtggcccttatggtaacaacataaatgctgaaattgacgcttctggacatcagagtggaaacggttattatgaagatgcttttggtcctcagggatatattcctcaaccagtagctggtaacgcaactggaccaaattcagttgttggcgcagctcaatacccttatcaaggagtaactcagccaggatacttccctcaaagacccggttacaactttccaagaggccctcctggttcatatgacccaacaacaaggttaccaacaggaccttacggcgctccattcccacctggaccatctaacaatactccttacgccggtacacacggaaaccctagtcgcagatga

SEQ ID NO: 39578 - protein, 359 aa, Arabidopsis thaliana
  peptide (1)..(359): Ceres Seq. ID no. 13575025
MESKGRIHPSHHHMRRPLPGPGGCIAHPETFGNHGAIPPSAAQGVYPSFNMLPPPEVMEQKFVAQHGELQRLAIENQRLGGTHGSLRQELAAAQHEIQMLHAQIGSMKSEREQRMMGLAEKVAKMETELQKSEAVKLEMQQARAEARSLVVAREELMSKVHQLTQELQKSRSDVQQIPALMSELENLRQEYQQCRATYDYEKKFYNDHLESLQAMEKNYMTMAREVEKLQAQLMNNANSDRRAGGPYGNNINAEIDASGHQSGNGYYEDAFGPQGYIPQPVAGNATGPNSVVGAAQYPYQGVTQPGYFPQRPGYNFPRGPPGSYDPTTRLPTGPYGAPFPPGPSNNTPYAGTHGNPSRR

SEQ ID NO: 39579 - protein, 346 aa, Arabidopsis thaliana
  peptide (1)..(346): Ceres Seq. ID no. 13575026
MRRPLPGPGGCIAHPETFGNHGAIPPSAAQGVYPSFNMLPPPEVMEQKFVAQHGELQRLAIENQRLGGTHGSLRQELAAAQHEIQMLHAQIGSMKSEREQRMMGLAEKVAKMETELQKSEAVKLEMQQARAEARSLVVAREELMSKVHQLTQELQKSRSDVQQIPALMSELENLRQEYQQCRATYDYEKKFYNDHLESLQAMEKNYMTMAREVEKLQAQLMNNANSDRRAGGPYGNNINAEIDASGHQSGNGYYEDAFGPQGYIPQPVAGNATGPNSVVGAAQYPYQGVTQPGYFPQRPGYNFPRGPPGSYDPTTRLPTGPYGAPFPPGPSNNTPYAGTHGNPSRR

SEQ ID NO: 39580 - protein, 309 aa, Arabidopsis thaliana
  peptide (1)..(309): Ceres Seq. ID no. 13575027
MLPPPEVMEQKFVAQHGELQRLAIENQRLGGTHGSLRQELAAAQHEIQMLHAQIGSMKSEREQRMMGLAEKVAKMETELQKSEAVKLEMQQARAEARSLVVAREELMSKVHQLTQELQKSRSDVQQIPALMSELENLRQEYQQCRATYDYEKKFYNDHLESLQAMEKNYMTMAREVEKLQAQLMNNANSDRRAGGPYGNNINAEIDASGHQSGNGYYEDAFGPQGYIPQPVAGNATGPNSVVGAAQYPYQGVTQPGYFPQRPGYNFPRGPPGSYDPTTRLPTGPYGAPFPPGPSNNTPYAGTHGNPSRR

SEQ ID NO: 39581 - DNA, 1709 bp, Arabidopsis thaliana
  misc_feature (1)..(1709): Ceres Seq. ID no. 13497388
  misc_feature (1)..(1709): Ortholog of  Ceres SEQ ID NO 15178096 as cited in SEQ ID NO 52497
atcacaaattacatactaaaaaaaaatagacgcggtcaaaattctctctcaattctatcaatataaagacaatctctttctcattagggtttttaattttcatcatcatcatcactctctctgctcccaaattcagaaaaaaaggaacgatttttatttccggtgaatgagaattttctctcgaatttgatcgatcacatatttcatctgtgtgttttcattttgaggatgccagcaacggaatatcaaagatcattcgggaggtcttttctgaatttacggcgagacacggcggtgaactcggttgagtcaacgacggttacccccgagttgactcagatggaagcagagcttgtttcgtttcagagaaaagttgctgagaggtttatcgatctcaatgcgtctagttgtgaagatctactgtctctcgaatgggttgggaagcttcttgattcgtttctatcttgtcaagaagagtttcgttccatagtcatcaatcatcgttcgatgattactaaaccaccgatggatcgattggtttcagattacttcgagagaagtgttaaagctcttgatgtttgtaacgcgattcgtgatggtgttgaacagatccgtcaatggcagaaacttatcgagattgtaatttgtgctttcaacaacaatggaggaggaagtagtggcaagagacctcttggagaaggtcagtttcgtcgtgcgaggaagactttgattgagttagctattggtatgcttgatgagaaggattcatcttctagctcagtgtcgtctcagcatcgtaaccggtcttttggaaggaacaaggagcagcttcatcaccgaacaatcgggcatttcaggtcgctttcttggagtgtttcgagatcatggtctgcttctaagcaactacaagctattggaaacaacttagctacgcctcgagctagtgacattactgcaactaatggtcttattgttccggtttatacaatgactacggtattgttgtttgtgatgtgggcacttgtagctgcgattccttgtcaagacagaggtttgcaagtacatttcaatgttcctaggaattaccaatggggaggttcgttgatgtcgttgcacgataggatcattgaggaatcgaagaagagagagaggaagaatacatgtgggttgttgaaagagattcatcagtttgagaagacttcaagattgatgaatgagttggttgattctgttcagtttcctttgtctgaagagaaagagatggaagtgagagagagagttgaggaattggggaagcttcaagaggctttgaagaatggtttggatccgtttgagaggaaagtgagggaagtgtttcatcggattgtaagaagcagaacagaaggtcttgatactgttggaaagcatcatggttctgaatgatgtttatcgaaaattcaatggaacatcatcatctgtttaatattctggagagttgaagtatgtttatcaaattgtgggtttgtttgtctggtgaacgtgaagatcatggagacaaattgctagagaacgagagaacattttggttaaaggttgttaatataaaagacaggagatacaaaccactccatttttccaatctttgttgtttatgtataattttctcatcaaagattgttaattatgaataaggttccattttatacggatcggaacttgcattacaattt

SEQ ID NO: 39582 - protein, 397 aa, Arabidopsis thaliana
  peptide (1)..(397): Ceres Seq. ID no. 13497389
MPATEYQRSFGRSFLNLRRDTAVNSVESTTVTPELTQMEAELVSFQRKVAERFIDLNASSCEDLLSLEWVGKLLDSFLSCQEEFRSIVINHRSMITKPPMDRLVSDYFERSVKALDVCNAIRDGVEQIRQWQKLIEIVICAFNNNGGGSSGKRPLGEGQFRRARKTLIELAIGMLDEKDSSSSSVSSQHRNRSFGRNKEQLHHRTIGHFRSLSWSVSRSWSASKQLQAIGNNLATPRASDITATNGLIVPVYTMTTVLLFVMWALVAAIPCQDRGLQVHFNVPRNYQWGGSLMSLHDRIIEESKKRERKNTCGLLKEIHQFEKTSRLMNELVDSVQFPLSEEKEMEVRERVEELGKLQEALKNGLDPFERKVREVFHRIVRSRTEGLDTVGKHHGSE

SEQ ID NO: 39583 - protein, 360 aa, Arabidopsis thaliana
  peptide (1)..(360): Ceres Seq. ID no. 13497390
MEAELVSFQRKVAERFIDLNASSCEDLLSLEWVGKLLDSFLSCQEEFRSIVINHRSMITKPPMDRLVSDYFERSVKALDVCNAIRDGVEQIRQWQKLIEIVICAFNNNGGGSSGKRPLGEGQFRRARKTLIELAIGMLDEKDSSSSSVSSQHRNRSFGRNKEQLHHRTIGHFRSLSWSVSRSWSASKQLQAIGNNLATPRASDITATNGLIVPVYTMTTVLLFVMWALVAAIPCQDRGLQVHFNVPRNYQWGGSLMSLHDRIIEESKKRERKNTCGLLKEIHQFEKTSRLMNELVDSVQFPLSEEKEMEVRERVEELGKLQEALKNGLDPFERKVREVFHRIVRSRTEGLDTVGKHHGSE

SEQ ID NO: 39584 - protein, 304 aa, Arabidopsis thaliana
  peptide (1)..(304): Ceres Seq. ID no. 13497391
MITKPPMDRLVSDYFERSVKALDVCNAIRDGVEQIRQWQKLIEIVICAFNNNGGGSSGKRPLGEGQFRRARKTLIELAIGMLDEKDSSSSSVSSQHRNRSFGRNKEQLHHRTIGHFRSLSWSVSRSWSASKQLQAIGNNLATPRASDITATNGLIVPVYTMTTVLLFVMWALVAAIPCQDRGLQVHFNVPRNYQWGGSLMSLHDRIIEESKKRERKNTCGLLKEIHQFEKTSRLMNELVDSVQFPLSEEKEMEVRERVEELGKLQEALKNGLDPFERKVREVFHRIVRSRTEGLDTVGKHHGSE

SEQ ID NO: 39585 - DNA, 787 bp, Arabidopsis thaliana; identical to SEQ ID NO: 29524
  misc_feature (1)..(787): Ceres Seq. ID no. 13580358
  misc_feature (1)..(787): Ortholog of  Ceres SEQ ID NO 13580204 as cited in SEQ ID NO 0

SEQ ID NO: 39586 - protein, 151 aa, Arabidopsis thaliana; identical to SEQ ID NO: 29525
  peptide (1)..(151): Ceres Seq. ID no. 13580359

SEQ ID NO: 39587 - protein, 148 aa, Arabidopsis thaliana; identical to SEQ ID NO: 29526
  peptide (1)..(148): Ceres Seq. ID no. 13580360

SEQ ID NO: 39588 - DNA, 1025 bp, Arabidopsis thaliana
  misc_feature (1)..(1025): Ceres Seq. ID no. 13497575
  misc_feature (1)..(1025): Ortholog of  Ceres SEQ ID NO 12609394 as cited in SEQ ID NO 52095
cacttggaaagaatccttcactcactttccctttaagaagcaagtctcctccacttgtacgataccaacatcatcagcatcacaaaaagtatcattatcatcttcatcgaattagatggcaccggtgaagaggagggtgttcaagacaaataatgaaatggcagtggagctggccaaatacacggctgatctttcctccaaattttgcaaagaaagaggagttttcaccgttgttctctccggcggcgacctcatagcctggctctggaaattgttagaagctccttatattgattcaattgagtggtctaagtggcacatcttttgggtcgacgagagggtttgtgcttgggatcatgcggatagcaactataaactcgcttacgatggttttctctccaaggttccagttccagctgaaaacatctacgctatcgataacggactcggggcagaaggcaacgccgagctagcagctgaaaggtacgaggagtgcctcaaacaaaaagtgaaccaaaacataatccgaacgtacaaatcttctggttttccacagttcgatcttcagcttctaggtatgggaccggacggtcacatggcgtctctattccctggacatgctcagatcaatgagaaggtgaaatgggtcacatctataaccgattcacctaagccaccgtcaaaaaggatcacattgactttaccggttatcaattgtgcttcctataatgttatggccgtatgtgataaagagcaggctgattcggttgcggctgctcttaatcataccaaagacttaccagctggtagactaaccgcggatgttgaagtggtttggttccttgaccaagctgctgcgtctaaactccctcatggctggtgctccatcctttgatttaaacgtttatgtttttgtctcactaagtcgtatggtttggtgttttgtaaaccgtgtattgcttaattacttgttatgttgtgtagcaacaccatattgtgatattgatcttggtgactttggtttt

SEQ ID NO: 39589 - protein, 259 aa, Arabidopsis thaliana
  peptide (1)..(259): Ceres Seq. ID no. 13497576
MAPVKRRVFKTNNEMAVELAKYTADLSSKFCKERGVFTVVLSGGDLIAWLWKLLEAPYIDSIEWSKWHIFWVDERVCAWDHADSNYKLAYDGFLSKVPVPAENIYAIDNGLGAEGNAELAAERYEECLKQKVNQNIIRTYKSSGFPQFDLQLLGMGPDGHMASLFPGHAQINEKVKWVTSITDSPKPPSKRITLTLPVINCASYNVMAVCDKEQADSVAAALNHTKDLPAGRLTADVEVVWFLDQAAASKLPHGWCSIL

SEQ ID NO: 39590 - protein, 245 aa, Arabidopsis thaliana
  peptide (1)..(245): Ceres Seq. ID no. 13497577
MAVELAKYTADLSSKFCKERGVFTVVLSGGDLIAWLWKLLEAPYIDSIEWSKWHIFWVDERVCAWDHADSNYKLAYDGFLSKVPVPAENIYAIDNGLGAEGNAELAAERYEECLKQKVNQNIIRTYKSSGFPQFDLQLLGMGPDGHMASLFPGHAQINEKVKWVTSITDSPKPPSKRITLTLPVINCASYNVMAVCDKEQADSVAAALNHTKDLPAGRLTADVEVVWFLDQAAASKLPHGWCSIL

SEQ ID NO: 39591 - DNA, 1648 bp, Arabidopsis thaliana
  misc_feature (1)..(1648): Ceres Seq. ID no. 12395358
  misc_feature (1)..(1648): Ortholog of  Ceres SEQ ID NO 13659033 as cited in SEQ ID NO 66372
  misc_feature (1)..(1648): Ortholog of  Ceres SEQ ID NO 13655724 as cited in SEQ ID NO 68973
  misc_feature (1)..(1648): Ortholog of  Ceres SEQ ID NO 12625899 as cited in SEQ ID NO 69079
aaagaaacaaaaggatttatttataaaaaaaaaaaagagatgaagacagctcaagggatgcaatagagccaagaggaggagaaagatgggatctgctccaaacttgtaccagtcgcatcaaagcaagttttggtgaagaagaagagacgaggtcttcctcttactgtggtggtgacattttctctaaaaagaaagtctccgatatgtcgcagagatggagtagaaagaagagtagacttccattagcgggtctcctctttattctcgttgtcacctttatgattctcttcaacgagcgtagcattcagcagattcatcaccacgccgcgagtcacactcaaaatctccgagaaccttccacgttcgatttcgtcaagcctaatgttcctcggattaactacttgggagctcatgaggttttgggtagattcagcaaatgcaactcgacgaaagagtacagtgggaagaaaatcggatgcgttgacccgtttgaagaccacccgggtcaagtaacaaaggaggagcagaaatgtgatgtcttttctgggaaatgggtctttgataattcatcatcataccctttacacaaggaatctcagtgtccttacatgtccgaccagttggcttgtcagaagcatggtaggaaggatttggagtatcagcattggagatggcaacctcatgcctgcaacttgaagagatggaatgtgatagaaatgtgggagaagctgagaggaaagagattgatgtttgttggagactcgttaaacagaagccaatggatttcaatggtttgtctcttacggtctgtcattccacgtgacaagcagtctatgtctcctaacgctcacctcaccattttcagggctgaggactacaatgccacagtggagtttctctgggcaccgttgctcgtggagtcgaattctgatgaccctgttaatcacagattgagcgagcggattatccgacccgattctgttcttaaacatgcatcaaagtggcaacatgctgatattctaatcttcaacacctacttatggtggagacaagactctgtcaagctccgatggagcagtgaagaaaaagggtcatgcgaggaggtgaagagcgccgagggaatggagatggcaatggatagttggggtgattgggttgctaacaatgtcgatccaaacaaaaagcgagttttcttcgttacaatgtctcctacacatcaatggagccgagaatggaacccgggaagcgaaggaaactgctacggggagaagaaaccaatagaggaagagagttattggggaagtgggtcggacattccgacaatgaggatggtgaagagagttttggagagattgggaccaaaggtctcagttataaacatcactcagttgtctgagtatcgaaaagatggtcatccatcggtgtaccggaaattctgggaacctctaaatgaagaccggttgaaaaacccggcatcgtattctgactgtactcattggtgtgtacctggagttcctgatgtctggaatcaattgcttttccattttttgtgaaaatgaaatgaatataaccttaccttgatggccgaatatcacccataaattatataacggggtgatttcagctagctataaggatccaaatttgt

SEQ ID NO: 39592 - protein, 449 aa, Arabidopsis thaliana
  peptide (1)..(449): Ceres Seq. ID no. 12395359
MSQRWSRKKSRLPLAGLLFILVVTFMILFNERSIQQIHHHAASHTQNLREPSTFDFVKPNVPRINYLGAHEVLGRFSKCNSTKEYSGKKIGCVDPFEDHPGQVTKEEQKCDVFSGKWVFDNSSSYPLHKESQCPYMSDQLACQKHGRKDLEYQHWRWQPHACNLKRWNVIEMWEKLRGKRLMFVGDSLNRSQWISMVCLLRSVIPRDKQSMSPNAHLTIFRAEDYNATVEFLWAPLLVESNSDDPVNHRLSERIIRPDSVLKHASKWQHADILIFNTYLWWRQDSVKLRWSSEEKGSCEEVKSAEGMEMAMDSWGDWVANNVDPNKKRVFFVTMSPTHQWSREWNPGSEGNCYGEKKPIEEESYWGSGSDIPTMRMVKRVLERLGPKVSVINITQLSEYRKDGHPSVYRKFWEPLNEDRLKNPASYSDCTHWCVPGVPDVWNQLLFHFL

SEQ ID NO: 39593 - protein, 424 aa, Arabidopsis thaliana
  peptide (1)..(424): Ceres Seq. ID no. 12395360
MILFNERSIQQIHHHAASHTQNLREPSTFDFVKPNVPRINYLGAHEVLGRFSKCNSTKEYSGKKIGCVDPFEDHPGQVTKEEQKCDVFSGKWVFDNSSSYPLHKESQCPYMSDQLACQKHGRKDLEYQHWRWQPHACNLKRWNVIEMWEKLRGKRLMFVGDSLNRSQWISMVCLLRSVIPRDKQSMSPNAHLTIFRAEDYNATVEFLWAPLLVESNSDDPVNHRLSERIIRPDSVLKHASKWQHADILIFNTYLWWRQDSVKLRWSSEEKGSCEEVKSAEGMEMAMDSWGDWVANNVDPNKKRVFFVTMSPTHQWSREWNPGSEGNCYGEKKPIEEESYWGSGSDIPTMRMVKRVLERLGPKVSVINITQLSEYRKDGHPSVYRKFWEPLNEDRLKNPASYSDCTHWCVPGVPDVWNQLLFHFL

SEQ ID NO: 39594 - protein, 314 aa, Arabidopsis thaliana
  peptide (1)..(314): Ceres Seq. ID no. 12395361
MSDQLACQKHGRKDLEYQHWRWQPHACNLKRWNVIEMWEKLRGKRLMFVGDSLNRSQWISMVCLLRSVIPRDKQSMSPNAHLTIFRAEDYNATVEFLWAPLLVESNSDDPVNHRLSERIIRPDSVLKHASKWQHADILIFNTYLWWRQDSVKLRWSSEEKGSCEEVKSAEGMEMAMDSWGDWVANNVDPNKKRVFFVTMSPTHQWSREWNPGSEGNCYGEKKPIEEESYWGSGSDIPTMRMVKRVLERLGPKVSVINITQLSEYRKDGHPSVYRKFWEPLNEDRLKNPASYSDCTHWCVPGVPDVWNQLLFHFL

SEQ ID NO: 39595 - DNA, 1117 bp, Arabidopsis thaliana
  misc_feature (1)..(1117): Ceres Seq. ID no. 12325040
  misc_feature (1)..(1117): Ortholog of  Ceres SEQ ID NO 12611971 as cited in SEQ ID NO 53205
  misc_feature (1)..(1117): Ortholog of  Ceres SEQ ID NO 12615976 as cited in SEQ ID NO 62440
actggatttgatgatgttgtagatgatgcaatggcgatattcgtagctttaaattcacctaaagttgatgtcattggcctcactactatctttggaaacgtgtataccactctcgccactcgaaacgccttgcatttgttggaggttgcgggtaggaccgatattccggtggctgaaggaacacataaaaccttcttgaacgatacgaagcttcgaatagctgactttgttcatggaaaagatgggcttagcaaccaaaacttccctccacctaaaggaaaaccaattgaaaagtctggacctgagtttttagttgaacaagcaaagctttaccctggtgaaatcacggttgttgctttgggaccactaacaaatctcgcgttggctgttcagcttgatccagagttttcgaaaaatgtcggacaaattgttcttcttggtggagcatttgcagtaaacggaaatgtaaatccagcttcggaagctaatatttttggcgatcccgaagctgcagatattgtgttcacatgtggggccgatataattgctgtgggaatcaatgtgacccatcaagttattatgacagctgatgacaaggacaaactagcatcatcgaaggggaaattagctcaatatctctgtaaaatccttgatgtgtactatgattatcatctcacggcttacgaaatcaaaggtgtgtaccttcatgatcctgcgacgatccttgcggctttccttccttctctattcacttatacagaaggagttgctagagtgcagacaagtggtatcactaggggactcactttactgtacaacaatcttaagaggtttgaggaagcgaacgagtggtcagacaaaccaacggtaaaagtggcagtgacggttgatgctcctgcagtcgtgaagctcataatggataggcttatggagtcttaaaccatcttgggtcgttaattagttatctctttctctttgatgtttcactattgcgagccatttctcttgttaaaaataaggctcctcttgctgcattatttatttattgtttaatctttattaaaacgaatattattatgttaccaattaccaataataaagttaagatttttcctcc

SEQ ID NO: 39596 - protein, 312 aa, Arabidopsis thaliana
  peptide (1)..(312): Ceres Seq. ID no. 12325041
TGFDDVVDDAMAIFVALNSPKVDVIGLTTIFGNVYTTLATRNALHLLEVAGRTDIPVAEGTHKTFLNDTKLRIADFVHGKDGLSNQNFPPPKGKPIEKSGPEFLVEQAKLYPGEITVVALGPLTNLALAVQLDPEFSKNVGQIVLLGGAFAVNGNVNPASEANIFGDPEAADIVFTCGADIIAVGINVTHQVIMTADDKDKLASSKGKLAQYLCKILDVYYDYHLTAYEIKGVYLHDPATILAAFLPSLFTYTEGVARVQTSGITRGLTLLYNNLKRFEEANEWSDKPTVKVAVTVDAPAVVKLIMDRLMES

SEQ ID NO: 39597 - protein, 302 aa, Arabidopsis thaliana
  peptide (1)..(302): Ceres Seq. ID no. 12325042
MAIFVALNSPKVDVIGLTTIFGNVYTTLATRNALHLLEVAGRTDIPVAEGTHKTFLNDTKLRIADFVHGKDGLSNQNFPPPKGKPIEKSGPEFLVEQAKLYPGEITVVALGPLTNLALAVQLDPEFSKNVGQIVLLGGAFAVNGNVNPASEANIFGDPEAADIVFTCGADIIAVGINVTHQVIMTADDKDKLASSKGKLAQYLCKILDVYYDYHLTAYEIKGVYLHDPATILAAFLPSLFTYTEGVARVQTSGITRGLTLLYNNLKRFEEANEWSDKPTVKVAVTVDAPAVVKLIMDRLMES

SEQ ID NO: 39598 - DNA, 1707 bp, Arabidopsis thaliana
  misc_feature (1)..(1707): Ceres Seq. ID no. 13488719
  misc_feature (1)..(1707): Ortholog of  Ceres SEQ ID NO 15226950 as cited in SEQ ID NO 68649
  misc_feature (1)..(1707): Ortholog of  Ceres SEQ ID NO 13502947 as cited in SEQ ID NO 69257
caaattccatcatcgtcgccgcaacaatatcttttgctttctctctcattcttcaccagtaacaagcccatctctcgattcttcactctcaaggaaggagacgttttgaaaatcagaaatggtgaagatatgctgcataggagctggttatgtgggtggtccaaccatggcggtgatggctcttaagtgtcctgagattgaagtagtcgttgtggatatctctgaaccaaggatcaatgcttggaacagtgataggcttcctatttacgagccgggattggaagatgtggtgaaacaatgcagagggaaaaacctcttctttagcacagacgtggagaaacatgtatttgagagtgatattgtatttgtctcagttaacactccaaccaaaacacaaggtcttggtgctggcaaagctgctgatcttacttactgggagagtgctgctcggatgatcgctgatgtctccaaatctagcaaaatcgttgttgagaaatccacggttcctgtgaggacagcagaggctattgaaaagatactgacacataacagcaaaggcatagagtttcagattctctctaaccctgaatttcttgctgagggtactgcaattaaggatctttataacccagaccgtgtgttgattggtggtagggatactgcagcagggcaaaaggctattaaagctttaagagatgtttatgctcattgggttccagtggaacaaatcatttgcacgaacctgtggtccgctgagctctctaagcttgcagcaaatgcattcttagctcagaggatatcatctgtcaatgccatgtcagctctatgtgaggcaactggcgctgatgttacacaagttgcgcatgccgtgggtacagatactagaattggtccaaagttcttgaatgctagtgttggttttggtggatcatgtttccaaaaggacatcctaaatcttatctatatttgtgaatgcaacggcttgcccgaagcagctaattactggaaacaagtcgtaaaggtgaacgactatcagaaaatacggtttgcaaaccgggttgtttcttcaatgtttaacacagtctcgggcaagaaaatcgcgatcctcggttttgccttcaagaaggacacaggtgacacgagagagactccagcgattgatgtttgtaacagattagttgcagacaaggccaagctgagcatatacgacccacaagttcttgaagaacagatcagaagagatctttccatggctaggtttgactgggaccaccctgttcctcttcagcagattaaagctgaaggtatctcagagcaagtgaatgtcgtctcagatgcttacgaggcaactaaagatgcgcacggcctatgtgtcttaaccgaatgggatgagtttaaatccttggacttcaagaaaatctttgacaatatgcagaaaccagcttttgtgttcgatggtaggaatgttgttgatgcagtgaagctgcgtgagatcggtttcatcgtctactccattggtaaaccgcttgattcatggctcaaggatatgcctgctgtggcatgaaggtgccaacttcaaccaaactatatgtcttttctaaaatatagtatcttaagattccttataaattctgttgtaaccaagctgaaacaatgatatgtatttgctgaatctgccttagctggaatagtatatgaatttctttc

SEQ ID NO: 39599 - protein, 481 aa, Arabidopsis thaliana
  peptide (1)..(481): Ceres Seq. ID no. 13488720
MVKICCIGAGYVGGPTMAVMALKCPEIEVVVVDISEPRINAWNSDRLPIYEPGLEDVVKQCRGKNLFFSTDVEKHVFESDIVFVSVNTPTKTQGLGAGKAADLTYWESAARMIADVSKSSKIVVEKSTVPVRTAEAIEKILTHNSKGIEFQILSNPEFLAEGTAIKDLYNPDRVLIGGRDTAAGQKAIKALRDVYAHWVPVEQIICTNLWSAELSKLAANAFLAQRISSVNAMSALCEATGADVTQVAHAVGTDTRIGPKFLNASVGFGGSCFQKDILNLIYICECNGLPEAANYWKQVVKVNDYQKIRFANRVVSSMFNTVSGKKIAILGFAFKKDTGDTRETPAIDVCNRLVADKAKLSIYDPQVLEEQIRRDLSMARFDWDHPVPLQQIKAEGISEQVNVVSDAYEATKDAHGLCVLTEWDEFKSLDFKKIFDNMQKPAFVFDGRNVVDAVKLREIGFIVYSIGKPLDSWLKDMPAVA

SEQ ID NO: 39600 - protein, 465 aa, Arabidopsis thaliana
  peptide (1)..(465): Ceres Seq. ID no. 13488721
MAVMALKCPEIEVVVVDISEPRINAWNSDRLPIYEPGLEDVVKQCRGKNLFFSTDVEKHVFESDIVFVSVNTPTKTQGLGAGKAADLTYWESAARMIADVSKSSKIVVEKSTVPVRTAEAIEKILTHNSKGIEFQILSNPEFLAEGTAIKDLYNPDRVLIGGRDTAAGQKAIKALRDVYAHWVPVEQIICTNLWSAELSKLAANAFLAQRISSVNAMSALCEATGADVTQVAHAVGTDTRIGPKFLNASVGFGGSCFQKDILNLIYICECNGLPEAANYWKQVVKVNDYQKIRFANRVVSSMFNTVSGKKIAILGFAFKKDTGDTRETPAIDVCNRLVADKAKLSIYDPQVLEEQIRRDLSMARFDWDHPVPLQQIKAEGISEQVNVVSDAYEATKDAHGLCVLTEWDEFKSLDFKKIFDNMQKPAFVFDGRNVVDAVKLREIGFIVYSIGKPLDSWLKDMPAVA

SEQ ID NO: 39601 - protein, 462 aa, Arabidopsis thaliana
  peptide (1)..(462): Ceres Seq. ID no. 13488722
MALKCPEIEVVVVDISEPRINAWNSDRLPIYEPGLEDVVKQCRGKNLFFSTDVEKHVFESDIVFVSVNTPTKTQGLGAGKAADLTYWESAARMIADVSKSSKIVVEKSTVPVRTAEAIEKILTHNSKGIEFQILSNPEFLAEGTAIKDLYNPDRVLIGGRDTAAGQKAIKALRDVYAHWVPVEQIICTNLWSAELSKLAANAFLAQRISSVNAMSALCEATGADVTQVAHAVGTDTRIGPKFLNASVGFGGSCFQKDILNLIYICECNGLPEAANYWKQVVKVNDYQKIRFANRVVSSMFNTVSGKKIAILGFAFKKDTGDTRETPAIDVCNRLVADKAKLSIYDPQVLEEQIRRDLSMARFDWDHPVPLQQIKAEGISEQVNVVSDAYEATKDAHGLCVLTEWDEFKSLDFKKIFDNMQKPAFVFDGRNVVDAVKLREIGFIVYSIGKPLDSWLKDMPAVA

SEQ ID NO: 39602 - DNA, 1628 bp, Arabidopsis thaliana
  misc_feature (1)..(1628): Ceres Seq. ID no. 12705166
  misc_feature (1)..(1628): Ortholog of  Ceres SEQ ID NO 13597648 as cited in SEQ ID NO 69125
atctgtgctcagctactcccaaaagctctctcatctctctcgtccgtctcctctttctccatagtttaaagcttcgtcgttccgtcaccagaatttcaactactttgagttgattctcgttggatttctcacgatgggagacagcgggaagcttgaggcaacgatagatcggcttctgaatgaagagaagcagatgagactcgccgaaaacgtagccggtacaaggaaagccgccactgagattcttcagctttgtttcgatgctaaggattggaaacttctgaatgagcagattctcaatctctctaagaaacgtggtcagctcaaacaggctgtgcaatccatggtgcagcaagcaatgcagtatatcgatcagacaccagacattgaaactcggatagagcttatcaagacgctgaacaatgtatctgctggaaagatatatgttgaaatcgagagggcacgtctcaccaagaaacttgctaagattaaggaagaacagggtcagatagctgaagctgcagatcttatgcaagaagttgctgtggagacatttggtgctatggcaaaaactgagaaaattgcatttatccttgaacaagttcgcttgtgcttggatcgtcaagattttgttcgtgcacaaatcttatctaggaagatcaatcctagagtttttgacgcagatacaaaaaaagataagaagaaacctaaggaaggtgataacatggtagaagaggctcctgctgatataccaacccttttggagcttaagcgaatttactacgagcttatgattcggtactattctcataacaatgagtacattgaaatctgccgtagctacaaggcgatatatgatatcccttcagtaaaagaaactccggagcagtggattccggtcctgaggaagatctgctggttcttggtcttggcacctcatgacccaatgcaatcaagcttgctcaatgcaactctggaagacaagaatttatcagaaatccctgatttcaagatgcttctaaaacaggtagtgacaatggaggttattcaatggacatctctgtggaacaaatacaaggatgagttcgagaaagagaaaagcatgattggaggttctttgggtgacaaagctggtgaagatctgaaactgagaatcatcgaacataatatcctcgttgtctcaaagtactacgcaaggataaccttaaagagacttgccgagcttttatgcctgagcatggaggaggcggagaagcatctatcggagatggtagtgtcaaaagcactgattgcaaaaatagacagaccatctggaattgtgtgcttccagatcgcaaaggacagcaacgagattctaaactcgtgggcagggaatttggagaagcttctagatcttgtggaaaagagttgccaccaaattcacaaggaaaccatggttcacaaagccgctctcagaccttgaaaacatgcggtcttcttcatgaaaacttttcaggatcttcttcgttgagttattagcatctttatgtggtaaaaactcgaatcagtgtttccttttaaaaattgtactatggatctgtacactaacgaagtgttttgccacttattggttatttcaagtgttggtg

SEQ ID NO: 39603 - protein, 442 aa, Arabidopsis thaliana
  peptide (1)..(442): Ceres Seq. ID no. 12705167
MGDSGKLEATIDRLLNEEKQMRLAENVAGTRKAATEILQLCFDAKDWKLLNEQILNLSKKRGQLKQAVQSMVQQAMQYIDQTPDIETRIELIKTLNNVSAGKIYVEIERARLTKKLAKIKEEQGQIAEAADLMQEVAVETFGAMAKTEKIAFILEQVRLCLDRQDFVRAQILSRKINPRVFDADTKKDKKKPKEGDNMVEEAPADIPTLLELKRIYYELMIRYYSHNNEYIEICRSYKAIYDIPSVKETPEQWIPVLRKICWFLVLAPHDPMQSSLLNATLEDKNLSEIPDFKMLLKQVVTMEVIQWTSLWNKYKDEFEKEKSMIGGSLGDKAGEDLKLRIIEHNILVVSKYYARITLKRLAELLCLSMEEAEKHLSEMVVSKALIAKIDRPSGIVCFQIAKDSNEILNSWAGNLEKLLDLVEKSCHQIHKETMVHKAALRP

SEQ ID NO: 39604 - protein, 422 aa, Arabidopsis thaliana
  peptide (1)..(422): Ceres Seq. ID no. 12705168
MRLAENVAGTRKAATEILQLCFDAKDWKLLNEQILNLSKKRGQLKQAVQSMVQQAMQYIDQTPDIETRIELIKTLNNVSAGKIYVEIERARLTKKLAKIKEEQGQIAEAADLMQEVAVETFGAMAKTEKIAFILEQVRLCLDRQDFVRAQILSRKINPRVFDADTKKDKKKPKEGDNMVEEAPADIPTLLELKRIYYELMIRYYSHNNEYIEICRSYKAIYDIPSVKETPEQWIPVLRKICWFLVLAPHDPMQSSLLNATLEDKNLSEIPDFKMLLKQVVTMEVIQWTSLWNKYKDEFEKEKSMIGGSLGDKAGEDLKLRIIEHNILVVSKYYARITLKRLAELLCLSMEEAEKHLSEMVVSKALIAKIDRPSGIVCFQIAKDSNEILNSWAGNLEKLLDLVEKSCHQIHKETMVHKAALRP

SEQ ID NO: 39605 - protein, 372 aa, Arabidopsis thaliana
  peptide (1)..(372): Ceres Seq. ID no. 12705169
MVQQAMQYIDQTPDIETRIELIKTLNNVSAGKIYVEIERARLTKKLAKIKEEQGQIAEAADLMQEVAVETFGAMAKTEKIAFILEQVRLCLDRQDFVRAQILSRKINPRVFDADTKKDKKKPKEGDNMVEEAPADIPTLLELKRIYYELMIRYYSHNNEYIEICRSYKAIYDIPSVKETPEQWIPVLRKICWFLVLAPHDPMQSSLLNATLEDKNLSEIPDFKMLLKQVVTMEVIQWTSLWNKYKDEFEKEKSMIGGSLGDKAGEDLKLRIIEHNILVVSKYYARITLKRLAELLCLSMEEAEKHLSEMVVSKALIAKIDRPSGIVCFQIAKDSNEILNSWAGNLEKLLDLVEKSCHQIHKETMVHKAALRP

SEQ ID NO: 39606 - DNA, 1160 bp, Arabidopsis thaliana
  misc_feature (1)..(1160): Ceres Seq. ID no. 12328218
  misc_feature (1)..(1160): Ortholog of  Ceres SEQ ID NO 14315418 as cited in SEQ ID NO 57506
aaaaaaatcaaaaacagaaagaagcagagagacgatggcgagcaaagacgaattttcccgagatctcactgcgattcgctgcgccagagctacgatgcttctctattcacttgcatcatctcgcacaatcgattccgccggcgtgaagcaggagaaaggagaaacgcgaagagagatagaggatctgaggagaaagcttaccatggtgaagataaagatgaatcggattaagctttgcggattgatggaactgcttcttctcgtctttttgaacattcttagctccacttgagagactaaagcttgaatatacagttcgtggtgaacagaggaacttgttggtggttgctaagtcaattgcaactacacagggcttgactggattctggaaaggtaatttgctcaatgttcttcgaactgctcctttcaaagccgtcaatttttgtgcctatgatacctatagaaagcaattgcttaaaatcgctgggaatcaagaagcaaccaactttgaaagattcgttgctggtgccgctgctgggattactgctactgtgctctgcttgccactcgacactatacgaaccaaactagtggctcggggtggagaagccttggggggaatcggaggagcttttcggtatatgatccaaacagaagggttgttctccctctacaagggtctagtgccgtccatagcaagcatggctctgtccggtgcagttttctatggcgtttacgacatccttaagtcatcgtttctgcatacaccagaaggccggaaaagactgatagacatgaagcagcagggacaagaactcaatgctctagacaggctcgagttaggacccatcagaactctcatgtacggtgctatagcaggtgcttgtactgaagtagccacttatcctttcgaagtagtgagacgacagcttcagatgcagatgggtaaaaacaagctcaatgctttagctatgggattcaatatcattgaaagaggagggatcccagctttatacgctggacttttacctagcttgctccaggtattgccttcggcttcaataagttactttgtctacgagtgtatgaagatagtacttaaagtagaataacaagattatgatattggaagagtactagagcttaaagaatcatccatt

SEQ ID NO: 39607 - protein, 156 aa, Arabidopsis thaliana
  peptide (1)..(156): Ceres Seq. ID no. 12328219
MIQTEGLFSLYKGLVPSIASMALSGAVFYGVYDILKSSFLHTPEGRKRLIDMKQQGQELNALDRLELGPIRTLMYGAIAGACTEVATYPFEVVRRQLQMQMGKNKLNALAMGFNIIERGGIPALYAGLLPSLLQVLPSASISYFVYECMKIVLKVE

SEQ ID NO: 39608 - protein, 136 aa, Arabidopsis thaliana
  peptide (1)..(136): Ceres Seq. ID no. 12328220
MALSGAVFYGVYDILKSSFLHTPEGRKRLIDMKQQGQELNALDRLELGPIRTLMYGAIAGACTEVATYPFEVVRRQLQMQMGKNKLNALAMGFNIIERGGIPALYAGLLPSLLQVLPSASISYFVYECMKIVLKVE

SEQ ID NO: 39609 - protein, 105 aa, Arabidopsis thaliana
  peptide (1)..(105): Ceres Seq. ID no. 12328221
MKQQGQELNALDRLELGPIRTLMYGAIAGACTEVATYPFEVVRRQLQMQMGKNKLNALAMGFNIIERGGIPALYAGLLPSLLQVLPSASISYFVYECMKIVLKVE

SEQ ID NO: 39610 - DNA, 1132 bp, Arabidopsis thaliana; identical to SEQ ID NO: 39087
  misc_feature (1)..(1132): Ceres Seq. ID no. 13503082
  misc_feature (1)..(1132): Ortholog of  Ceres SEQ ID NO 12612333 as cited in SEQ ID NO 56421

SEQ ID NO: 39611 - protein, 276 aa, Arabidopsis thaliana; identical to SEQ ID NO: 39088
  peptide (1)..(276): Ceres Seq. ID no. 13503083

SEQ ID NO: 39612 - protein, 271 aa, Arabidopsis thaliana; identical to SEQ ID NO: 39089
  peptide (1)..(271): Ceres Seq. ID no. 13503084

SEQ ID NO: 39613 - DNA, 885 bp, Arabidopsis thaliana
  misc_feature (1)..(885): Ceres Seq. ID no. 12325727
  misc_feature (1)..(885): Ortholog of  Ceres SEQ ID NO 12608127 as cited in SEQ ID NO 57579
  misc_feature (1)..(885): Ortholog of  Ceres SEQ ID NO 12634558 as cited in SEQ ID NO 0
  misc_feature (1)..(885): Ortholog of  Ceres SEQ ID NO 15180294 as cited in SEQ ID NO 0
atccaatagttgaaaaacagaaaaagcctctccaatgactttttctcgtagcagctcgattacgttcttcatcgttgctttattcaccgtcttaattaatccggcgatctcttctcgcgccgcgtccttcatcaagctgcctcgctcttccatcgcttcatactgcgagagttggagattagccgctgagaccaacaatgttggaccctggaaggtgattccgtcccaatgcgaaaactatattaaaaactacatcaacggaggccagttcgacaaagactacgatgtagtcgctagttacgccattgactacgctaaaacggtcaaggttggcggagacggcaaggacgcgtgggtctttgacatcgatgagacgcttctctccaatattgagtactacaaggctaatggttacgggtctgaaccgtacgatagtattaaatacaatgaggtggtggaaaaaggaaaagacccaggttatgatgcgagcttgaggctctacaaagctctcaagaaacttggtttcactatcattttactaactggccgagacgaaggtcatagaagtgtcaccgagaaaaatcttcgggatgccggttatttcggttggaaccgactcctcttgaggggtcaaaatgatcaagggaaaacagcaacacaatacaaatcagagcagcgatcacaagttgtaaaagaaggctacacaatccatggtaatactggagatcaatggagtgacttgctaggttttgccgtggcttctcgttctttcaaagtcccaaatcccatgtactatgttgcttgatcaccatctgccattgatatattgcatgataatttatcatttatgtatgaataaggatttatgaatgtatcccataattc

SEQ ID NO: 39614 - protein, 256 aa, Arabidopsis thaliana
  peptide (1)..(256): Ceres Seq. ID no. 12325728
MTFSRSSSITFFIVALFTVLINPAISSRAASFIKLPRSSIASYCESWRLAAETNNVGPWKVIPSQCENYIKNYINGGQFDKDYDVVASYAIDYAKTVKVGGDGKDAWVFDIDETLLSNIEYYKANGYGSEPYDSIKYNEVVEKGKDPGYDASLRLYKALKKLGFTIILLTGRDEGHRSVTEKNLRDAGYFGWNRLLLRGQNDQGKTATQYKSEQRSQVVKEGYTIHGNTGDQWSDLLGFAVASRSFKVPNPMYYVA

SEQ ID NO: 39615 - DNA, 1803 bp, Arabidopsis thaliana
  misc_feature (1)..(1803): Ceres Seq. ID no. 13497348
  misc_feature (1)..(1803): Ortholog of  Ceres SEQ ID NO 14311535 as cited in SEQ ID NO 51559
  misc_feature (1)..(1803): Ortholog of  Ceres SEQ ID NO 15176200 as cited in SEQ ID NO 55188
atactcagagacgtgtagcttcactaattccacatactcagagagaaatggcaaccgaaaccgtattagccacggcggtgagcaatgggaaaagcaaaggatgttgcaagtccggtccaggttacgcgacgcctctcgccgccatggccggtccacgggaaaagctcatctatgtcactgccctttactccggaacgggcgagacaaaccggactacttggcaacggtggatgtggatccaagctcacccacattttcaagcgtcattcacagactaaaaatgccatatataggagatgagcttcaccacactggttggaactcttgcagctcttgccatggtgatgcttctgctgatagacgttaccttgtcttaccaggcttaatttctggtcgcatctatgcaatcgacacaaagaccgacccaaaggctccgtctttgtacaaggttgtagagcctaaggagattgctgaaaagacaggattagcatttccacatacatctcattgcctagcttcaggggatatgttggtgtcatgccttggggacaaagaaggaaacgccaaagggaacgggtttcttttgctagactctgacttcaatgtcaaaagcaggtgggacaaaccaggacatggtcctttgtttggttatgatttttggtaccaacctcggttcaagaccatgatcagcacttcttggggtgcacctaaagccttctccaaaggtttcaatctccagcatgttgcggatggcttgtatggaagtcatttgcatatttatcaatggcctgaaggtgaaatgaaacagataattgaccttggaaataccggtctcttacctcttgagatcagattcttgcatgatccttctaaagatacagggtatgttgggagtgctttgtctagtaatatgataaggtttttcaagaacagtgatgacacgtggagccatgaggttgttatatcggttaaaccgttgaaagtagaaaactggatacttccagaaatgccggggcttatcaccgacttcttgatctccctcgatgaccggttcttctactttgtgaactggcttcatggagacattcgtcagtacaacatcgaggaccctaaaaacccggtcttaactggacaaatatgggttggaggcttactacaaaagggtagtccttataaggctgttggagaagatggcaacacttaccaattcgatgttcctcagatcaaggggaagtctctaagagcaggacctcagatgatccaactaagcctagatgggaaaagattgtatgcaacaaactcgctgtttagcgcatgggaccgtcagttttacccggaaatcatggagaaaggctcacacataattcaaatcgatgttgatacagacaaaggtggtctcactctaaaccctgacttctttgtggactttggtgatgaaccagacggtcctgcactagctcacgagatgagatatcccggcggagactgcacttccgatatctggatctgattttggctccctaagagagagtaagctggatttgtggctagattcgtgatcaagacaattaaagttgttcttactcctttgtggcttattccgtgataataaaactttctaattatgttatgttgtgtctctatctttcgagtaaccgaattgaaccgatcaaaaccgggtcgaattatggatcatcaactcaaaaacacgtcagatacagtgtacgtggacacatggaccagatttgttatcttcttcttgttattttgttaatggacaagatctggttaattgtttatgtt

SEQ ID NO: 39616 - protein, 502 aa, Arabidopsis thaliana
  peptide (1)..(502): Ceres Seq. ID no. 15223008
YSETCSFTNSTYSERNGNRNRISHGGEQWEKQRMLQVRSRLRDASRRHGRSTGKAHLCHCPLLRNGRDKPDYLATVDVDPSSPTFSSVIHRLKMPYIGDELHHTGWNSCSSCHGDASADRRYLVLPGLISGRIYAIDTKTDPKAPSLYKVVEPKEIAEKTGLAFPHTSHCLASGDMLVSCLGDKEGNAKGNGFLLLDSDFNVKSRWDKPGHGPLFGYDFWYQPRFKTMISTSWGAPKAFSKGFNLQHVADGLYGSHLHIYQWPEGEMKQIIDLGNTGLLPLEIRFLHDPSKDTGYVGSALSSNMIRFFKNSDDTWSHEVVISVKPLKVENWILPEMPGLITDFLISLDDRFFYFVNWLHGDIRQYNIEDPKNPVLTGQIWVGGLLQKGSPYKAVGEDGNTYQFDVPQIKGKSLRAGPQMIQLSLDGKRLYATNSLFSAWDRQFYPEIMEKGSHIIQIDVDTDKGGLTLNPDFFVDFGDEPDGPALAHEMRYPGGDCTSDIWI

SEQ ID NO: 39617 - protein, 469 aa, Arabidopsis thaliana
  peptide (1)..(469): Ceres Seq. ID no. 15223009
MLQVRSRLRDASRRHGRSTGKAHLCHCPLLRNGRDKPDYLATVDVDPSSPTFSSVIHRLKMPYIGDELHHTGWNSCSSCHGDASADRRYLVLPGLISGRIYAIDTKTDPKAPSLYKVVEPKEIAEKTGLAFPHTSHCLASGDMLVSCLGDKEGNAKGNGFLLLDSDFNVKSRWDKPGHGPLFGYDFWYQPRFKTMISTSWGAPKAFSKGFNLQHVADGLYGSHLHIYQWPEGEMKQIIDLGNTGLLPLEIRFLHDPSKDTGYVGSALSSNMIRFFKNSDDTWSHEVVISVKPLKVENWILPEMPGLITDFLISLDDRFFYFVNWLHGDIRQYNIEDPKNPVLTGQIWVGGLLQKGSPYKAVGEDGNTYQFDVPQIKGKSLRAGPQMIQLSLDGKRLYATNSLFSAWDRQFYPEIMEKGSHIIQIDVDTDKGGLTLNPDFFVDFGDEPDGPALAHEMRYPGGDCTSDIWI

SEQ ID NO: 39618 - protein, 409 aa, Arabidopsis thaliana
  peptide (1)..(409): Ceres Seq. ID no. 15223010
MPYIGDELHHTGWNSCSSCHGDASADRRYLVLPGLISGRIYAIDTKTDPKAPSLYKVVEPKEIAEKTGLAFPHTSHCLASGDMLVSCLGDKEGNAKGNGFLLLDSDFNVKSRWDKPGHGPLFGYDFWYQPRFKTMISTSWGAPKAFSKGFNLQHVADGLYGSHLHIYQWPEGEMKQIIDLGNTGLLPLEIRFLHDPSKDTGYVGSALSSNMIRFFKNSDDTWSHEVVISVKPLKVENWILPEMPGLITDFLISLDDRFFYFVNWLHGDIRQYNIEDPKNPVLTGQIWVGGLLQKGSPYKAVGEDGNTYQFDVPQIKGKSLRAGPQMIQLSLDGKRLYATNSLFSAWDRQFYPEIMEKGSHIIQIDVDTDKGGLTLNPDFFVDFGDEPDGPALAHEMRYPGGDCTSDIWI

SEQ ID NO: 39619 - DNA, 1209 bp, Arabidopsis thaliana
  misc_feature (1)..(1209): Ceres Seq. ID no. 12338936
  misc_feature (1)..(1209): Ortholog of  Ceres SEQ ID NO 15176375 as cited in SEQ ID NO 53238
  misc_feature (1)..(1209): Ortholog of  Ceres SEQ ID NO 15170532 as cited in SEQ ID NO 55671
  misc_feature (1)..(1209): Ortholog of  Ceres SEQ ID NO 14316507 as cited in SEQ ID NO 57397
  misc_feature (1)..(1209): Ortholog of  Ceres SEQ ID NO 13663060 as cited in SEQ ID NO 60964
  misc_feature (1)..(1209): Ortholog of  Ceres SEQ ID NO 13598532 as cited in SEQ ID NO 65204
  misc_feature (1)..(1209): Ortholog of  Ceres SEQ ID NO 13656849 as cited in SEQ ID NO 65764
  misc_feature (1)..(1209): Ortholog of  Ceres SEQ ID NO 13656501 as cited in SEQ ID NO 69206
ttcctctctctttccccaaattgaaaacaaaatctgagattcgcgaaggaagaagaagagttgtcttgagagattgatagagatggacaacaatggagttaaacccgctgtttccgccatggaagcctttgagaagcttgagaaagtaggtgaagggacttatgggaaagtttacagagcaagagagaaagctactgggatgatcgttgctttgaagaagacgcgtctccatgaggatgaagaaggtgttcctcccactactcttcgcgagatctctatcttgcgtatgctcgctcgtgatcctcacatcgttaggttgatggatgttaagcaaggaataaacaaagaaggaaaaactgtactttaccttgttttcgagtatgttgatactgatctcaagaaattcatcagaagctttcgtcaagctggacagaacattccacaaaatactgtcaagtgcttgatgtaccagttatgcaaaggcatggctttttgccatggtcatggagtgttgcacagggatcttaagcctcacaatctcttgatggaccggaagacaatgacgctcaaaatagcagatcttggattagccagagccttcactctcccaatgaaaaagtatacacatgagattctaactctatggtatagagctccggaagttcttcttggagcaacccattactctactggagtggatatgtggtctgttggctgtatttttgctgaactagtgaccaagcaagcaatctttgcgggagactctgagctccaacagctcctccgtatattcaggttgttgggaacaccaaacgaagaagtgtggcctggagtaagcaaactcaaggactggcatgaatacccgcaatggaaaccgttgagtctctccacagctgtgccaaacctcgacgaggctggacttgatctcttatctaaaatgctggagtacgagccagcaaaacgaatctcagcaaagaaagctatggagcatccttacttcgatgatttgcctgacaagtcctctctctgaggctctctttataaactctcaataggatattttgttctatctctgtctttgcttgtctcaagcatttatctgctatcttaggatgattgaagtttcaatattcccttttgattgggtctctattcccaattgtataaccttccaacattttttcaatgaaagaatatatcagtttctct

SEQ ID NO: 39620 - protein, 315 aa, Arabidopsis thaliana
  peptide (1)..(315): Ceres Seq. ID no. 12338938
MDNNGVKPAVSAMEAFEKLEKVGEGTYGKVYRAREKATGMIVALKKTRLHEDEEGVPPTTLREISILRMLARDPHIVRLMDVKQGINKEGKTVLYLVFEYVDTDLKKFIRSFRQAGQNIPQNTVKCLMYQLCKGMAFCHGHGVLHRDLKPHNLLMDRKTMTLKIADLGLARAFTLPMKKYTHEILTLWYRAPEVLLGATHYSTGVDMWSVGCIFAELVTKQAIFAGDSELQQLLRIFRLLGTPNEEVWPGVSKLKDWHEYPQWKPLSLSTAVPNLDEAGLDLLSKMLEYEPAKRISAKKAMEHPYFDDLPDKSSL

SEQ ID NO: 39621 - protein, 303 aa, Arabidopsis thaliana
  peptide (1)..(303): Ceres Seq. ID no. 12338939
MEAFEKLEKVGEGTYGKVYRAREKATGMIVALKKTRLHEDEEGVPPTTLREISILRMLARDPHIVRLMDVKQGINKEGKTVLYLVFEYVDTDLKKFIRSFRQAGQNIPQNTVKCLMYQLCKGMAFCHGHGVLHRDLKPHNLLMDRKTMTLKIADLGLARAFTLPMKKYTHEILTLWYRAPEVLLGATHYSTGVDMWSVGCIFAELVTKQAIFAGDSELQQLLRIFRLLGTPNEEVWPGVSKLKDWHEYPQWKPLSLSTAVPNLDEAGLDLLSKMLEYEPAKRISAKKAMEHPYFDDLPDKSSL

SEQ ID NO: 39622 - protein, 276 aa, Arabidopsis thaliana
  peptide (1)..(276): Ceres Seq. ID no. 12338940
MIVALKKTRLHEDEEGVPPTTLREISILRMLARDPHIVRLMDVKQGINKEGKTVLYLVFEYVDTDLKKFIRSFRQAGQNIPQNTVKCLMYQLCKGMAFCHGHGVLHRDLKPHNLLMDRKTMTLKIADLGLARAFTLPMKKYTHEILTLWYRAPEVLLGATHYSTGVDMWSVGCIFAELVTKQAIFAGDSELQQLLRIFRLLGTPNEEVWPGVSKLKDWHEYPQWKPLSLSTAVPNLDEAGLDLLSKMLEYEPAKRISAKKAMEHPYFDDLPDKSSL

SEQ ID NO: 39623 - DNA, 1132 bp, Arabidopsis thaliana
  misc_feature (1)..(1132): Ceres Seq. ID no. 12338387
  misc_feature (1)..(1132): Ortholog of  Ceres SEQ ID NO 13596519 as cited in SEQ ID NO 62572
  misc_feature (1)..(1132): Ortholog of  Ceres SEQ ID NO 12625108 as cited in SEQ ID NO 68102
atcatcatctctttcttcttccaaaagtcataatcatgtcaaagtctctagctggattggcggttttggccgctctttttattgctgttgatgcgtttaagccttctggtttaactaatggccacgctacattctatggaggaagtgacgcttctggaacaatgggtaatttcacactttagtttcttttatgttctgactctaaatctctaattttcttgtttttgcaggtggagcttgtgggtacggagatctttactcggcggggtacgggacaatgacggcagcgttaagcacggctctgttcaacgacggagcttcttgcggagaatgctataggataacgtgtgatcacgcggcggactcacggtggtgcttgaaaggagcttctgtggttattacagccactaacttttgcccaccaaactttgctttgcctaacaacaacggtggttggtgcaatccgccgcttaaacatttcgacatggcacaacccgcttgggaaaagatcggaatttacagaggaggaatcgttcccgtcgttttccaaagagtgagctgttacaagaaaggaggagttagattcagaataaacgggagagactacttcgagctagtgaacattcaaaatgtaggaggagcaggttctattaaatctgtatccatcaaaggatcaaagactggttggttagccatgtctcgtaattggggagctaattggcaatcgaatgcttatctagatggtcaagctctctctttctctattaccactactgatggtgctactagagtcttcctcaatgttgttccttcttcttggtcttttggacagatttattcttccaacgttcagttttaagtttttttttttgttttgtatgaaatatcattggcagtggtcgcgctttgagtctgtttcttttctccctgagcgacccgccctctttgttttttttatcttatggtatgatgggtctgttaatacaaaagacccgatatgatttgagggtatatgattatatgaagtgtattgtatttgaatgtttcagactcgaaaaagattctgtagcaaaaggagttttaacacatttgtacttggttttgtttatatgaagtttgttttagttttttc

SEQ ID NO: 39624 - protein, 193 aa, Arabidopsis thaliana; identical to SEQ ID NO: 28574
  peptide (1)..(193): Ceres Seq. ID no. 12338388

SEQ ID NO: 39625 - protein, 124 aa, Arabidopsis thaliana; identical to SEQ ID NO: 28575
  peptide (1)..(124): Ceres Seq. ID no. 12338390

SEQ ID NO: 39626 - DNA, 1631 bp, Arabidopsis thaliana
  misc_feature (1)..(1631): Ceres Seq. ID no. 12338356
  misc_feature (1)..(1631): Ortholog of  Ceres SEQ ID NO 15176219 as cited in SEQ ID NO 58640
  misc_feature (1)..(1631): Ortholog of  Ceres SEQ ID NO 14303413 as cited in SEQ ID NO 59769
aacgacaacacgacgaagatgaatccttctcacggtggcgacgacaagcaacgaccggcgatgtatccccaagttgatcaatccatacctgataatccttttgcttctacaaatccttacgtcgcttcttcaccttatctatatccttctctatcctctcataatctcggacctaatctcttcccagaccacggagatgcatccaacgaccaatcaccatctgctcctcctcaggcgacggaggaggttctcatccgtgttcccggcgctattctcaaccttatcgacaaatcctacagcgttgaactcgcgtgcggtgatttcaccatcgttcgaattatccaggggcaaaacattgtagcggttctagccaatgttggaaatgagattcaatggccgttgacgaagaacgaggttgcagctaaggttgatggatctcactatttcttttcgattcatccgccaaaggagaaaggtcaaggatctgggtctgattcagatgatgaacaagggcaaaagagtaaatcgaaatcggatgatgagattcttaattacggattgaccattgcttcgaaagggcaagagaatgtattacttgtgcttgatcaggttttacgagactacagttgtttcacagagcagagaatgtctgaaaaagccaaggagactggagaagaggtgctgggaaattcagtggtggcggacacttcgccggaggagcttaagggtgagagaaaggatgttgtggaaggtcaatgtgcggcgtattggacaacacttgcaccgaatgtcgaggattatactcacagtactgctaaaatgatagcttccgggtcaggtaagctgatcagagggatactgtggtgtggggatgtaactgtggagagactcaagaagggaaacgaggttatgaagaataggcttagtcgtgctgagaaggagaaagatgttagccctgagacactgaggagaatcaagagggttaagagagtgacacaaatgacagagaaagttgccactggtgttctttctggtgttgtcaaagtctcgggattcatcactggttcaatggcaaactcaaaagctggaaagaagctttttggtctcttgcctggagagattgttctcgcatccctcgatggatttagcaagatctgtgatgctgttgaagttgctgggaaaaacgtaatgtcgacttcatcaactgtcacaacagaattagtcaatcacaggtacggcacaaaagcagcagaggctactaacgaagggctagacgcagcgggacatgcatttggaacggcatgggttgctttcaagattcgaaaggcatttaaccccaaaaatgtcataaagccttcatcattggccaagtctgtttcggaactaaaggctaagaaaggctccaagtaaacactaaacagccttcaactgttctgtgttcatctaaacttgcatttagtttttcattttggaaaagtatatgaagattgattgatgtaactctatatttagttttctgtgtatattgtgattctatgtaaactatataaacagtttcttccaatcttctcccatttatgggtttgatttgtaacttcttaatgcatcgagaagcagtattagtactctct

SEQ ID NO: 39627 - protein, 469 aa, Arabidopsis thaliana
  peptide (1)..(469): Ceres Seq. ID no. 12338357
NDNTTKMNPSHGGDDKQRPAMYPQVDQSIPDNPFASTNPYVASSPYLYPSLSSHNLGPNLFPDHGDASNDQSPSAPPQATEEVLIRVPGAILNLIDKSYSVELACGDFTIVRIIQGQNIVAVLANVGNEIQWPLTKNEVAAKVDGSHYFFSIHPPKEKGQGSGSDSDDEQGQKSKSKSDDEILNYGLTIASKGQENVLLVLDQVLRDYSCFTEQRMSEKAKETGEEVLGNSVVADTSPEELKGERKDVVEGQCAAYWTTLAPNVEDYTHSTAKMIASGSGKLIRGILWCGDVTVERLKKGNEVMKNRLSRAEKEKDVSPETLRRIKRVKRVTQMTEKVATGVLSGVVKVSGFITGSMANSKAGKKLFGLLPGEIVLASLDGFSKICDAVEVAGKNVMSTSSTVTTELVNHRYGTKAAEATNEGLDAAGHAFGTAWVAFKIRKAFNPKNVIKPSSLAKSVSELKAKKGSK

SEQ ID NO: 39628 - protein, 463 aa, Arabidopsis thaliana
  peptide (1)..(463): Ceres Seq. ID no. 12338358
MNPSHGGDDKQRPAMYPQVDQSIPDNPFASTNPYVASSPYLYPSLSSHNLGPNLFPDHGDASNDQSPSAPPQATEEVLIRVPGAILNLIDKSYSVELACGDFTIVRIIQGQNIVAVLANVGNEIQWPLTKNEVAAKVDGSHYFFSIHPPKEKGQGSGSDSDDEQGQKSKSKSDDEILNYGLTIASKGQENVLLVLDQVLRDYSCFTEQRMSEKAKETGEEVLGNSVVADTSPEELKGERKDVVEGQCAAYWTTLAPNVEDYTHSTAKMIASGSGKLIRGILWCGDVTVERLKKGNEVMKNRLSRAEKEKDVSPETLRRIKRVKRVTQMTEKVATGVLSGVVKVSGFITGSMANSKAGKKLFGLLPGEIVLASLDGFSKICDAVEVAGKNVMSTSSTVTTELVNHRYGTKAAEATNEGLDAAGHAFGTAWVAFKIRKAFNPKNVIKPSSLAKSVSELKAKKGSK

SEQ ID NO: 39629 - protein, 449 aa, Arabidopsis thaliana
  peptide (1)..(449): Ceres Seq. ID no. 12338359
MYPQVDQSIPDNPFASTNPYVASSPYLYPSLSSHNLGPNLFPDHGDASNDQSPSAPPQATEEVLIRVPGAILNLIDKSYSVELACGDFTIVRIIQGQNIVAVLANVGNEIQWPLTKNEVAAKVDGSHYFFSIHPPKEKGQGSGSDSDDEQGQKSKSKSDDEILNYGLTIASKGQENVLLVLDQVLRDYSCFTEQRMSEKAKETGEEVLGNSVVADTSPEELKGERKDVVEGQCAAYWTTLAPNVEDYTHSTAKMIASGSGKLIRGILWCGDVTVERLKKGNEVMKNRLSRAEKEKDVSPETLRRIKRVKRVTQMTEKVATGVLSGVVKVSGFITGSMANSKAGKKLFGLLPGEIVLASLDGFSKICDAVEVAGKNVMSTSSTVTTELVNHRYGTKAAEATNEGLDAAGHAFGTAWVAFKIRKAFNPKNVIKPSSLAKSVSELKAKKGSK

SEQ ID NO: 39630 - DNA, 1110 bp, Arabidopsis thaliana
  misc_feature (1)..(1110): Ceres Seq. ID no. 12579637
  misc_feature (1)..(1110): Ortholog of  Ceres SEQ ID NO 15170627 as cited in SEQ ID NO 52703
  misc_feature (1)..(1110): Ortholog of  Ceres SEQ ID NO 13655124 as cited in SEQ ID NO 62896
  misc_feature (1)..(1110): Ortholog of  Ceres SEQ ID NO 13597493 as cited in SEQ ID NO 64613
  misc_feature (1)..(1110): Ortholog of  Ceres SEQ ID NO 14313540 as cited in SEQ ID NO 68110
  misc_feature (1)..(1110): Ortholog of  Ceres SEQ ID NO 13596175 as cited in SEQ ID NO 68297
aaggtatgactcaatcttcacttagttgttgaatttagttctgatctttattagattgtagttctggcttttgtagatatgctatagttactggagggaatagaggaattggatttgagatatgcagacaattagcaaacaaagggattagggttattttgacatctagagatgagaaacaagggcttgaagctgttgagacattgaagaaagagcttgagatttctgatcaaagcattgtctttcatcagcttgatgtctctgatccttctagtgtcacttctcttgctaagtttgtgaaaacccatttcggaaaactcgatatcttgatcaataatgctggggttggtggtgtaatcactgatgttgatgctcttagagctgggacagggaaagaaggtttcaagtgggaggaaactatcactgagacttatgagttagctgaagaatgcataaagattaactattatggaccaaagagaatgtgtgaggcttttattcatcttctgcagttatctaattctccaagaatcgttaatgtatcatccttcatgggtcaagtaaagaatttactaaacgaatgggcaaaagggatcctgagtgacgcagagaatctaacggaggtaagaattgaccaagtgatcaaccaacttctcaatgatctgaaagaagatacggctaagacaaaagattgggctaaagtcatgtcggcttacgttgtttcgaaagccggtttgaatgcttacacgaggatcttagcgaagaaacatcccgagattcgcgttaactcggtttgtcctggatttgtgaagactgatatgaattttaaaactggaattttatctgtggaagaaggagcatcaagtcctgtgaggttagctttgcttccacatcaagaatctccttctggttgtttctttgatcgcaaacaagtttcagagttctgaaatctttgtgtggagatagataagccaaagttttattcatgtaatgagaattattgtttgaaagctaaacagaaagtatcgactattcaataaacagaaacattattaagccttaaaaaaaaaaaaaaaaaaaaaaaaaaaaaaaaaaaaaaaatngttccgc

SEQ ID NO: 39631 - protein, 154 aa, Arabidopsis thaliana
  peptide (1)..(154): Ceres Seq. ID no. 12579638
MCEAFIHLLQLSNSPRIVNVSSFMGQVKNLLNEWAKGILSDAENLTEVRIDQVINQLLNDLKEDTAKTKDWAKVMSAYVVSKAGLNAYTRILAKKHPEIRVNSVCPGFVKTDMNFKTGILSVEEGASSPVRLALLPHQESPSGCFFDRKQVSEF

SEQ ID NO: 39632 - protein, 131 aa, Arabidopsis thaliana
  peptide (1)..(131): Ceres Seq. ID no. 12579639
MGQVKNLLNEWAKGILSDAENLTEVRIDQVINQLLNDLKEDTAKTKDWAKVMSAYVVSKAGLNAYTRILAKKHPEIRVNSVCPGFVKTDMNFKTGILSVEEGASSPVRLALLPHQESPSGCFFDRKQVSEF

SEQ ID NO: 39633 - protein, 80 aa, Arabidopsis thaliana
  peptide (1)..(80): Ceres Seq. ID no. 12579640
MSAYVVSKAGLNAYTRILAKKHPEIRVNSVCPGFVKTDMNFKTGILSVEEGASSPVRLALLPHQESPSGCFFDRKQVSEF

SEQ ID NO: 39634 - DNA, 1610 bp, Arabidopsis thaliana
  misc_feature (1)..(1610): Ceres Seq. ID no. 13580607
  misc_feature (1)..(1610): Ortholog of  Ceres SEQ ID NO 13594345 as cited in SEQ ID NO 58043
  misc_feature (1)..(1610): Ortholog of  Ceres SEQ ID NO 14302832 as cited in SEQ ID NO 64926
  misc_feature (1)..(1610): Ortholog of  Ceres SEQ ID NO 13662880 as cited in SEQ ID NO 65422
  misc_feature (1)..(1610): Ortholog of  Ceres SEQ ID NO 12779098 as cited in SEQ ID NO 67698
  misc_feature (1)..(1610): Ortholog of  Ceres SEQ ID NO 13591190 as cited in SEQ ID NO 68044
  misc_feature (1)..(1610): Ortholog of  Ceres SEQ ID NO 13596089 as cited in SEQ ID NO 68373
agatatatccacaaggagagacacagattcttgtattgatactcacttcagtggagctaagacaagtagaaaaaaaatggcgccaccgcattttctactggtaacgtttccggcgcaaggtcacgtgaacccatctctccgttttgctcgtcggctcatcaaaagaaccggcgcacgtgtcactttcgtcacttgtgtctccgtcttccacaactccatgatcgcaaaccacaacaaagtcgaaaatctctctttccttactttctccgacggtttcgacgatggaggcatttccacctacgaagaccgtcagaaaaggtcggtgaatctcaaggttaacggcgataaggcactatcggatttcatcgaagctactaagaatggtgactctcccgtgacttgcttgatctacacgattcttctcaattgggctccaaaagtagcacgtagatttcaacttccctccgctcttctctggatccaaccggctttggttttcaacatctattacactcatttcatgggaaacaagtccgttttcgagttacctaatctgtcttctctggaaatcagagatcttccatctttcctcacaccttccaacacaaacaaaggcgcatacgatgcggtttcaagaaatgatggagtttctcataaaagaaaccaaaccgaaaattctcatcaacactttcgattcgctggaaccagaggccttaacggctttcccgaatatcgatatggtggcggttggtcctttacttcccacggagattttctcaggaagcaccaacaaatcagttaaagatcaaagtagtagttatacactttggctagactcgaaaacagagtcctctgttatttacgtttcctttggaacaatggttgagttgtccaagaaacagatagaggaactagcgagagcactcatagaagggaaacgaccgtttttgtgggttataactgataaatccaacagagaaacgaaaacagaaggagaagaagagacagagattgagaagatagctggattcagacacgagcttgaagaggttgggatgattgtgtcgtggtgttcgcagatagaggttttaagtcaccgagccgtaggttgttttgtgactcattgtgggtggagctcgacgctggagagtttggttcttggcgttccggttgtggcgtttccgatgtggtcggatcaaccgacgaacgcgaagctactggaagaaagttggaagactggtgtgagggtaagagagaacaaggatggtttggtggagagaggagagatcaggaggtgtttggaagccgtgatggaggagaagtcggtggagttgagggaaaacgcaaagaaatggaagcgtttagcgatggaagcgggtagagaaggaggatcttcggataagaacatggaggcttttgtggaggatatttgtggagaatctcttattcaaaacttgtgtgaagcagaggaggtaaaagtaaagtaaataaaggacaaaagagttggtgtctagaagtggcggagtgttatttgctaatactgtcactttgtaatatcaaattcaattaaaacataaaatttactccatctagataaatatgttttttcg

SEQ ID NO: 39635 - protein, 287 aa, Arabidopsis thaliana
  peptide (1)..(287): Ceres Seq. ID no. 13580608
MRFQEMMEFLIKETKPKILINTFDSLEPEALTAFPNIDMVAVGPLLPTEIFSGSTNKSVKDQSSSYTLWLDSKTESSVIYVSFGTMVELSKKQIEELARALIEGKRPFLWVITDKSNRETKTEGEEETEIEKIAGFRHELEEVGMIVSWCSQIEVLSHRAVGCFVTHCGWSSTLESLVLGVPVVAFPMWSDQPTNAKLLEESWKTGVRVRENKDGLVERGEIRRCLEAVMEEKSVELRENAKKWKRLAMEAGREGGSSDKNMEAFVEDICGESLIQNLCEAEEVKVK

SEQ ID NO: 39636 - protein, 282 aa, Arabidopsis thaliana
  peptide (1)..(282): Ceres Seq. ID no. 13580609
MMEFLIKETKPKILINTFDSLEPEALTAFPNIDMVAVGPLLPTEIFSGSTNKSVKDQSSSYTLWLDSKTESSVIYVSFGTMVELSKKQIEELARALIEGKRPFLWVITDKSNRETKTEGEEETEIEKIAGFRHELEEVGMIVSWCSQIEVLSHRAVGCFVTHCGWSSTLESLVLGVPVVAFPMWSDQPTNAKLLEESWKTGVRVRENKDGLVERGEIRRCLEAVMEEKSVELRENAKKWKRLAMEAGREGGSSDKNMEAFVEDICGESLIQNLCEAEEVKVK

SEQ ID NO: 39637 - protein, 281 aa, Arabidopsis thaliana
  peptide (1)..(281): Ceres Seq. ID no. 13580610
MEFLIKETKPKILINTFDSLEPEALTAFPNIDMVAVGPLLPTEIFSGSTNKSVKDQSSSYTLWLDSKTESSVIYVSFGTMVELSKKQIEELARALIEGKRPFLWVITDKSNRETKTEGEEETEIEKIAGFRHELEEVGMIVSWCSQIEVLSHRAVGCFVTHCGWSSTLESLVLGVPVVAFPMWSDQPTNAKLLEESWKTGVRVRENKDGLVERGEIRRCLEAVMEEKSVELRENAKKWKRLAMEAGREGGSSDKNMEAFVEDICGESLIQNLCEAEEVKVK

SEQ ID NO: 39638 - DNA, 1282 bp, Arabidopsis thaliana; identical to SEQ ID NO: 39477
  misc_feature (1)..(1282): Ceres Seq. ID no. 12488272
  misc_feature (1)..(1282): Ortholog of  Ceres SEQ ID NO 14304879 as cited in SEQ ID NO 53767
  misc_feature (1)..(1282): Ortholog of  Ceres SEQ ID NO 12616439 as cited in SEQ ID NO 63634

SEQ ID NO: 39639 - protein, 106 aa, Arabidopsis thaliana; identical to SEQ ID NO: 39478
  peptide (1)..(106): Ceres Seq. ID no. 12488273

SEQ ID NO: 39640 - protein, 92 aa, Arabidopsis thaliana; identical to SEQ ID NO: 39479
  peptide (1)..(92): Ceres Seq. ID no. 12488274

SEQ ID NO: 39641 - protein, 89 aa, Arabidopsis thaliana; identical to SEQ ID NO: 39480
  peptide (1)..(89): Ceres Seq. ID no. 12488275

SEQ ID NO: 39642 - DNA, 2407 bp, Arabidopsis thaliana
  misc_feature (1)..(2407): Ceres Seq. ID no. 13491702
  misc_feature (1)..(2407): Ortholog of  Ceres SEQ ID NO 13584744 as cited in SEQ ID NO 69137
cttctgtctcatctggttttcgagagagatagagaaagtgagacaaggttaaggaggaagaagatgactgagaatcgggtggttttggctctgcttatactctgcattgttgggtttgagccaagtttcatccatggagctacggattcatcagatacttcggcgttaaacatcatgttcagctccatgaattctccaggacagctctcacaatggacagcatcaggaggtgatccttgtggccaaaactggaaaggcataacttgctctggctctcgagttacacaaataaagttaccaagtcttggactttctggatcacttggattcatgcttgataaattgacttctgttactgagtttgatatgagcaacaataaccttggaggcgatttgccttatcagcttcctccaaacttggagcgattgaatcttgctaataaccagttcactggatctgctcaatattccatttctatgatggctcctcttaagtacctcaaccttgctcacaaccagttgaagcagctagctattgacttcacaaaactcacctctctctctatattggacctctcttccaatgcttttatagggtctctcccaaacacttgtagctctcttacgagtgcaaaatcaatttatcttcagaacaatcagttctcaggcaccattgatattctagccacccttcctctcgaaaatctgaatattgcaaacaatcggttcacaggctggatccctgattctttgaaaggcattaacttgcaaaaagatggcaatttattaaattccgggcctgcacctccaccacctcctggtacaccaccgatcagtaaatcatcacctactccgaaatccgggaaccgtggaaaccgttccaatggtgattccagcaatagcaaagactccagcaaatcagggcttggagctggtggagtagcaggaatagtcatttctttgatagttgtaacagcagtcatagctttcttcttgatcaagagaaaaagatcaaagcggtcatcatccacggacattgaaaagactgataataacattaaccaacccattatactagcgtccaatgactttcatcaagagaataagtctgtacagaatccaccattggttgagacaaagaaactggatacgtcattgtcgatgaatctacgtcctccaccatctgagcgacataagtcgtttgatgacgatgattcaacaatgagaaaacctattgttgcaaagaaagctgctgttgttgttccttcaaatgtgaacacatatacggtttcagatcttcaagtagctaccaacagtttcagcgtagataatcttctcggtgaaggaacatttggaagagtatacagagctcagtttgaagatggaaaggtacttgctgtgaagaaaatcgactcatctgcgcttcccacggatactgctgatgattttaccgaaattgtatcgaaaatagcgcatttggatcacgaaaatgtcacaaagcttgatggttactgttctgaacacgggcaacacttggtggtctatgagttccatagaaacggctcattgcatgactttttacatcttgcagaagaggaaagcaaaccgttgatatggaatccccgtgtcaagatcgctcttggcactgcacgtgcattggagtacttgcatgaagtttgctcaccatctatagtccacaagaacattaaatcagcaaatattttacttgactcagagctgaatccacacctctcagactcaggtctcgctagcttccttcccactgcaaacgagctactaaaccaaaacgatgaaggatacagcgcaccagaaacttcaatgtcaggccaatactctttgaagagcgatgtttacagttttggagtagtgatgctcgagcttttaaccggaagaaaaccattcgacagcacaaggtcaagatcggaacaatcattggtaagatgggcaacacctcagcttcacgacattgatgctttgggcaaaatggttgatccagctctcaaagggctatacccggttaaatccctctcccgatttgcagatgttatcgccctttgcgtccagccggagccagagtttagaccacccatgtctgaagtggtgcaagcattggttgtattggtgcagagagctaacatgagcaagagaactgttggagtcggctccggtagctccggcgtcaatgattacatgtaaattctttacctgatgagaaccaacaaaaaaaaacataaaaatttgccctttttctcttgtctgctcggaatctggatgggacgacaacaagtgacaaccgaggacagacaaaacaaaacaaaatcctttttttctttcggtttcataaaactgatgatgagagaataacaacaacaacaacccttcacgc

SEQ ID NO: 39643 - protein, 738 aa, Arabidopsis thaliana
  peptide (1)..(738): Ceres Seq. ID no. 13491703
LLSHLVFERDRESETRLRRKKMTENRVVLALLILCIVGFEPSFIHGATDSSDTSALNIMFSSMNSPGQLSQWTASGGDPCGQNWKGITCSGSRVTQIKLPSLGLSGSLGFMLDKLTSVTEFDMSNNNLGGDLPYQLPPNLERLNLANNQFTGSAQYSISMMAPLKYLNLAHNQLKQLAIDFTKLTSLSILDLSSNAFIGSLPNTCSSLTSAKSIYLQNNQFSGTIDILATLPLENLNIANNRFTGWIPDSLKGINLQKDGNLLNSGPAPPPPPGTPPISKSSPTPKSGNRGNRSNGDSSNSKDSSKSGLGAGGVAGIVISLIVVTAVIAFFLIKRKRSKRSSSTDIEKTDNNINQPIILASNDFHQENKSVQNPPLVETKKLDTSLSMNLRPPPSERHKSFDDDDSTMRKPIVAKKAAVVVPSNVNTYTVSDLQVATNSFSVDNLLGEGTFGRVYRAQFEDGKVLAVKKIDSSALPTDTADDFTEIVSKIAHLDHENVTKLDGYCSEHGQHLVVYEFHRNGSLHDFLHLAEEESKPLIWNPRVKIALGTARALEYLHEVCSPSIVHKNIKSANILLDSELNPHLSDSGLASFLPTANELLNQNDEGYSAPETSMSGQYSLKSDVYSFGVVMLELLTGRKPFDSTRSRSEQSLVRWATPQLHDIDALGKMVDPALKGLYPVKSLSRFADVIALCVQPEPEFRPPMSEVVQALVVLVQRANMSKRTVGVGSGSSGVNDYM

SEQ ID NO: 39644 - protein, 717 aa, Arabidopsis thaliana
  peptide (1)..(717): Ceres Seq. ID no. 13491704
MTENRVVLALLILCIVGFEPSFIHGATDSSDTSALNIMFSSMNSPGQLSQWTASGGDPCGQNWKGITCSGSRVTQIKLPSLGLSGSLGFMLDKLTSVTEFDMSNNNLGGDLPYQLPPNLERLNLANNQFTGSAQYSISMMAPLKYLNLAHNQLKQLAIDFTKLTSLSILDLSSNAFIGSLPNTCSSLTSAKSIYLQNNQFSGTIDILATLPLENLNIANNRFTGWIPDSLKGINLQKDGNLLNSGPAPPPPPGTPPISKSSPTPKSGNRGNRSNGDSSNSKDSSKSGLGAGGVAGIVISLIVVTAVIAFFLIKRKRSKRSSSTDIEKTDNNINQPIILASNDFHQENKSVQNPPLVETKKLDTSLSMNLRPPPSERHKSFDDDDSTMRKPIVAKKAAVVVPSNVNTYTVSDLQVATNSFSVDNLLGEGTFGRVYRAQFEDGKVLAVKKIDSSALPTDTADDFTEIVSKIAHLDHENVTKLDGYCSEHGQHLVVYEFHRNGSLHDFLHLAEEESKPLIWNPRVKIALGTARALEYLHEVCSPSIVHKNIKSANILLDSELNPHLSDSGLASFLPTANELLNQNDEGYSAPETSMSGQYSLKSDVYSFGVVMLELLTGRKPFDSTRSRSEQSLVRWATPQLHDIDALGKMVDPALKGLYPVKSLSRFADVIALCVQPEPEFRPPMSEVVQALVVLVQRANMSKRTVGVGSGSSGVNDYM

SEQ ID NO: 39645 - protein, 680 aa, Arabidopsis thaliana
  peptide (1)..(680): Ceres Seq. ID no. 13491705
MFSSMNSPGQLSQWTASGGDPCGQNWKGITCSGSRVTQIKLPSLGLSGSLGFMLDKLTSVTEFDMSNNNLGGDLPYQLPPNLERLNLANNQFTGSAQYSISMMAPLKYLNLAHNQLKQLAIDFTKLTSLSILDLSSNAFIGSLPNTCSSLTSAKSIYLQNNQFSGTIDILATLPLENLNIANNRFTGWIPDSLKGINLQKDGNLLNSGPAPPPPPGTPPISKSSPTPKSGNRGNRSNGDSSNSKDSSKSGLGAGGVAGIVISLIVVTAVIAFFLIKRKRSKRSSSTDIEKTDNNINQPIILASNDFHQENKSVQNPPLVETKKLDTSLSMNLRPPPSERHKSFDDDDSTMRKPIVAKKAAVVVPSNVNTYTVSDLQVATNSFSVDNLLGEGTFGRVYRAQFEDGKVLAVKKIDSSALPTDTADDFTEIVSKIAHLDHENVTKLDGYCSEHGQHLVVYEFHRNGSLHDFLHLAEEESKPLIWNPRVKIALGTARALEYLHEVCSPSIVHKNIKSANILLDSELNPHLSDSGLASFLPTANELLNQNDEGYSAPETSMSGQYSLKSDVYSFGVVMLELLTGRKPFDSTRSRSEQSLVRWATPQLHDIDALGKMVDPALKGLYPVKSLSRFADVIALCVQPEPEFRPPMSEVVQALVVLVQRANMSKRTVGVGSGSSGVNDYM

SEQ ID NO: 39646 - DNA, 2101 bp, Arabidopsis thaliana
  misc_feature (1)..(2101): Ceres Seq. ID no. 12326823
  misc_feature (1)..(2101): Ortholog of  Ceres SEQ ID NO 13599900 as cited in SEQ ID NO 531
  misc_feature (1)..(2101): Ortholog of  Ceres SEQ ID NO 13596509 as cited in SEQ ID NO 62004
  misc_feature (1)..(2101): Ortholog of  Ceres SEQ ID NO 13659971 as cited in SEQ ID NO 67565
  misc_feature (1)..(2101): Ortholog of  Ceres SEQ ID NO 13500385 as cited in SEQ ID NO 67583
attttctctcaattcctcgcagctgaagctatttggcatatacttgtcttcgcttttcgtagctctttcgcgcataataataactgaggttgttgtttaatcaagaagagtgtgcaaaaattggaaggccagggaatgcagaaacatgtatttgaaagctgaactcaattgctctacaccaccctctcagatcctttgtccctttgggcccttgttctccctcatcccttatgtggacacccattttctaaacccctgcttccacaacttccagccttcctctcacaatgctagaaaaaacgccacttggaagcatgatctttgcgaagacggttgatccgacactaacagcctcctcctgagttcctcctctaccctttatgttgtctgcgttttagtatattctagggtggtctttttatttagtggtattagtagtgctctaagctaaccagttagtcaatggagaagaaaggatctgtgttgatgctccgttatgaggttgggaagtttctcggtcaaggtacctttgctaaggtataccatgctaggcatttgaaaactggtgatagtgtagcgattaaggtcatcgacaaagaaagaatcctcaaagttggcatgaccgagcagattaagcgagagatctctgccatgagactcttgaggcatcccaacatcgttgagctccatgaagtcatggccaccaaatctaaaatctacttcgtcatggaacatgttaagggtggtgagctcttcaacaaagtgtcaactgggaagctgagagaagacgttgcgagaaagtactttcagcagcttgtacgcgctgttgacttctgtcacagccgtggagtatgccacagggacctgaagccggagaatctcttgttggatgagcatgggaatcttaagatctctgattttggtctcagcgctctttctgactctagaaggcaagacgggttgctgcatactacatgcgggacccctacatattgtgcaccggaggtgataagcaggaacgggtatgatgggtttaaagcggatgtgtggtcctgtggagtgatattgttcgtcttgctcgctggatatcttcctttccgtgattccaatctgatggagctgtataagaagataggcaaagctgaagtcaagttccccaactggcttgctccgggggcaaagagattgctcaagaggatcttggatcctaaccccaacacaagggtatcaactgagaaaataatgaagagctcttggttccgtaaaggcctacaagaggaggtgaaagaatcagttgaggaagagacagaagtggacgcagaggcagagggaaacgcaagtgcagagaaggaaaagaagcggtgtatcaacctgaacgcgtttgagatcatatctctgtccacggggtttgatctctcgggactgttcgagaagggagaggagaaggaggagatgaggtttacatcaaacagagaggcatctgagataacagagaagctggtggagattgggaaggaccttaagatgaaagtgaggaagaaggaacacgaatggagggtgaaaatgtcggctgaggctacagtggtggaagcggaagtgtttgagattgcgccgagctatcacatggtggtgctaaagaagagcggtggagatactgctgagtataagagagtcatgaaggagagtataagaccggctttgatcgactttgtattagcttggcactgaaacatattctatcctttttatgtgtcttcttcttttagaatgtttttcttgttttgttttgccaatgtgtttagtttatgtattttctcttgagtctcatcttaagacgtgtttcgtatttttctaggtgtcagtgtaacaatagtaatatgtgaggaccaattatatagtttgagacaaaataagtagatttctttatcagataaaataaaataaattgagccttaatgaaataagccaatagaccgacaacggttttaggaagcattatactactattttgtagttatttcgtattattgtagtcttttggatgatcctttttgtgtattaacaaagtcaaaacaaatttataatttaccttacggtacag

SEQ ID NO: 39647 - protein, 421 aa, Arabidopsis thaliana
  peptide (1)..(421): Ceres Seq. ID no. 12326824
MEKKGSVLMLRYEVGKFLGQGTFAKVYHARHLKTGDSVAIKVIDKERILKVGMTEQIKREISAMRLLRHPNIVELHEVMATKSKIYFVMEHVKGGELFNKVSTGKLREDVARKYFQQLVRAVDFCHSRGVCHRDLKPENLLLDEHGNLKISDFGLSALSDSRRQDGLLHTTCGTPTYCAPEVISRNGYDGFKADVWSCGVILFVLLAGYLPFRDSNLMELYKKIGKAEVKFPNWLAPGAKRLLKRILDPNPNTRVSTEKIMKSSWFRKGLQEEVKESVEEETEVDAEAEGNASAEKEKKRCINLNAFEIISLSTGFDLSGLFEKGEEKEEMRFTSNREASEITEKLVEIGKDLKMKVRKKEHEWRVKMSAEATVVEAEVFEIAPSYHMVVLKKSGGDTAEYKRVMKESIRPALIDFVLAWH

SEQ ID NO: 39648 - protein, 413 aa, Arabidopsis thaliana
  peptide (1)..(413): Ceres Seq. ID no. 12326825
MLRYEVGKFLGQGTFAKVYHARHLKTGDSVAIKVIDKERILKVGMTEQIKREISAMRLLRHPNIVELHEVMATKSKIYFVMEHVKGGELFNKVSTGKLREDVARKYFQQLVRAVDFCHSRGVCHRDLKPENLLLDEHGNLKISDFGLSALSDSRRQDGLLHTTCGTPTYCAPEVISRNGYDGFKADVWSCGVILFVLLAGYLPFRDSNLMELYKKIGKAEVKFPNWLAPGAKRLLKRILDPNPNTRVSTEKIMKSSWFRKGLQEEVKESVEEETEVDAEAEGNASAEKEKKRCINLNAFEIISLSTGFDLSGLFEKGEEKEEMRFTSNREASEITEKLVEIGKDLKMKVRKKEHEWRVKMSAEATVVEAEVFEIAPSYHMVVLKKSGGDTAEYKRVMKESIRPALIDFVLAWH

SEQ ID NO: 39649 - protein, 369 aa, Arabidopsis thaliana
  peptide (1)..(369): Ceres Seq. ID no. 12326826
MTEQIKREISAMRLLRHPNIVELHEVMATKSKIYFVMEHVKGGELFNKVSTGKLREDVARKYFQQLVRAVDFCHSRGVCHRDLKPENLLLDEHGNLKISDFGLSALSDSRRQDGLLHTTCGTPTYCAPEVISRNGYDGFKADVWSCGVILFVLLAGYLPFRDSNLMELYKKIGKAEVKFPNWLAPGAKRLLKRILDPNPNTRVSTEKIMKSSWFRKGLQEEVKESVEEETEVDAEAEGNASAEKEKKRCINLNAFEIISLSTGFDLSGLFEKGEEKEEMRFTSNREASEITEKLVEIGKDLKMKVRKKEHEWRVKMSAEATVVEAEVFEIAPSYHMVVLKKSGGDTAEYKRVMKESIRPALIDFVLAWH

SEQ ID NO: 39650 - DNA, 1336 bp, Arabidopsis thaliana
  misc_feature (1)..(1336): Ceres Seq. ID no. 13488801
  misc_feature (1)..(1336): Ortholog of  Ceres SEQ ID NO 12614832 as cited in SEQ ID NO 68844
ctcagctaaagagagaaagagaagcaccatttttctttctcgtcgtgtcatcgttttctcagattcctgaataatcattcccttccgattccaaaatccccaaacctcatccactcctccatctcccggattcggattcccagaatcatgcccatggagaacgacaatggcccacacgttggcaacgtcgtcgtcaccgctgagcaagcgaccaagattaacgagactgatggacggttgccggagaatcggcagaccggtgttgtctctgacaccggaagtggtagcgagagaggagagcaaggggttggagagtcggcagttgctgtggcggtgccggtggaggagagcggatcgatttcggtgggagagctacctgctccccgatcttcctctgctagagttccgtttactaatctaagccaaattgatgcggatcttgctcttgctcgcacactccaagaacaggagcgggcgtatatgatgttgaccatgaatagtgaaatcagtgactatgggagctgggaaactggaagctatgtatacgatgaggatgagtttgatgaccccgagaatgaggatgaggatgatgatgaagatgaatatgaaacagatgatgatcctcaggaagatgggcttgatgtcaatgtgcacgccaatgaagatgatcaagaagatgacggtaactctgacattgaagaagttgcttatacagatgatgaggcctatgctagagctcttcaagaagctgaagaaagggatatggctgctagattgtctgccttatctgggttagcaaaccgggtggttgaagatctagaggatgagagtcatacttctcaggatgcctgggatgagatggatcctgatgagctttcatatgaggagttgcttgcacttggcgacattgtgggaaccgaaagtagaggattgtctgctgatacaattgcatctttgccttcaaaaagatataaagaaggagacaatcagaacggaaccaatgagtcatgtgttatatgtcgtttagactatgaggatgacgaagacctgatactgctcccatgcaaacattcttaccactcggagtgcataaacaactggttgaagataaacaaggtttgccccgtatgcagtgcagaagtttcaacttcgacctctggacaaagctgatgaggcaaaggaagaaagattcagaaagaatcataagctaagaacttcaaaaccttagctgcctgtttgtacacttcttataaacaaaataacatcatcagatttccttggatcctttaaaaaatctcaaagattggaacattctcaagcgtttttagtttttgcc

SEQ ID NO: 39651 - protein, 340 aa, Arabidopsis thaliana
  peptide (1)..(340): Ceres Seq. ID no. 13488802
MPMENDNGPHVGNVVVTAEQATKINETDGRLPENRQTGVVSDTGSGSERGEQGVGESAVAVAVPVEESGSISVGELPAPRSSSARVPFTNLSQIDADLALARTLQEQERAYMMLTMNSEISDYGSWETGSYVYDEDEFDDPENEDEDDDEDEYETDDDPQEDGLDVNVHANEDDQEDDGNSDIEEVAYTDDEAYARALQEAEERDMAARLSALSGLANRVVEDLEDESHTSQDAWDEMDPDELSYEELLALGDIVGTESRGLSADTIASLPSKRYKEGDNQNGTNESCVICRLDYEDDEDLILLPCKHSYHSECINNWLKINKVCPVCSAEVSTSTSGQS

SEQ ID NO: 39652 - protein, 338 aa, Arabidopsis thaliana
  peptide (1)..(338): Ceres Seq. ID no. 13488803
MENDNGPHVGNVVVTAEQATKINETDGRLPENRQTGVVSDTGSGSERGEQGVGESAVAVAVPVEESGSISVGELPAPRSSSARVPFTNLSQIDADLALARTLQEQERAYMMLTMNSEISDYGSWETGSYVYDEDEFDDPENEDEDDDEDEYETDDDPQEDGLDVNVHANEDDQEDDGNSDIEEVAYTDDEAYARALQEAEERDMAARLSALSGLANRVVEDLEDESHTSQDAWDEMDPDELSYEELLALGDIVGTESRGLSADTIASLPSKRYKEGDNQNGTNESCVICRLDYEDDEDLILLPCKHSYHSECINNWLKINKVCPVCSAEVSTSTSGQS

SEQ ID NO: 39653 - protein, 229 aa, Arabidopsis thaliana
  peptide (1)..(229): Ceres Seq. ID no. 13488804
MMLTMNSEISDYGSWETGSYVYDEDEFDDPENEDEDDDEDEYETDDDPQEDGLDVNVHANEDDQEDDGNSDIEEVAYTDDEAYARALQEAEERDMAARLSALSGLANRVVEDLEDESHTSQDAWDEMDPDELSYEELLALGDIVGTESRGLSADTIASLPSKRYKEGDNQNGTNESCVICRLDYEDDEDLILLPCKHSYHSECINNWLKINKVCPVCSAEVSTSTSGQS

SEQ ID NO: 39654 - DNA, 1613 bp, Arabidopsis thaliana
  misc_feature (1)..(1613): Ceres Seq. ID no. 13489349
  misc_feature (1)..(1613): Ortholog of  Ceres SEQ ID NO 15168513 as cited in SEQ ID NO 57022
aaagaaagaatcgtaacagacggatcacaaacagtcacagatccgagccctgttttgagtttacgagaagaatattaaaattctcatctttaaccattttatccgatcatgaatgtgagagacgagggaaaaactacggcggagaaacacggcggaggagaggagaataaatcaccggagaacaaatggcgatttaattctcctctagctcaagtgagcttaatgggattcgtttgtttctgttgtccaggaatgttcaacgctctctccggcatgggaggcggtggtcaagtagatccaaccgctgctaacaacgctaacaccgccgtttacaccgctttcaccgttttcggccttttaggcggcgggttttacaacgtcctcggtccacggctcacgttagccgctggatgttcgacttacgtactctacgccggatctttcctctactacaaccatcaccaccaccaagccttcgcgatagtcgccggagctttactcggttgcggcgcgggacttctctgggccggagaaggagctgtgatgacgtcataccctccgccgcatcggaaaggcacttacatagcgttgttctggagtatcttcaatctcggcggcgttatcggtggattaatcccgtttatcctcaactaccaacgtagctccgccgcatcggtcaacgactcgacgtacatagcgttcatgtgtttcatgttcgccggcgttcttctctctttcggtatcctcccggcgacctccgtgatccgtaacgacggatctagatgctctgccgtgaaatactcccgtccgtcaactgaagcagccgccgtgctacggctattcctcgatcggaaaatgctcctcatcgtccccgcggcttgggctagcaatttcttctacagctatcaattcaacaatgtgaatggactcctctttaacttaagaaccagaggattcaacaatgtcttctactggggagctcaaatggctggatccatcgccattggttacgtgatggacttcagcttcaaaagccggcgagctagaggattcaccggaatatcactagtcgcggtaatcggaaccattatatgggcgggcgggttagcgaatcagcacggttactcgttggacaaactaccggaaaagaaacttgattttaaagattccgggatagagtttgcgggaccattcgtgttatatatgagctatggattgttagatgcaatgtatcagagtatggtttattggttgataggagcattggctgatgattcgcagactttgagtagatatagtggattctacaaaggagtgcagagtgcaggagctgcagtggcttggcaagtggatactcgtaaggttccgttaatgtcacagcttattgttaattggtcacttactactgtaagttatcctttacttgttcttcttgtgtatttttatgttaaaaatgataatgatgatgatagtaatgataaggtttagaagatagtagtttattagaacattgagtaagttaactgttttttaatacgatgacgttctgttatgaatgtaacagttacatagagaaacaaagatttgaggctctgaaatgcctttattctttt

SEQ ID NO: 39655 - protein, 459 aa, Arabidopsis thaliana
  peptide (1)..(459): Ceres Seq. ID no. 13489350
MNVRDEGKTTAEKHGGGEENKSPENKWRFNSPLAQVSLMGFVCFCCPGMFNALSGMGGGGQVDPTAANNANTAVYTAFTVFGLLGGGFYNVLGPRLTLAAGCSTYVLYAGSFLYYNHHHHQAFAIVAGALLGCGAGLLWAGEGAVMTSYPPPHRKGTYIALFWSIFNLGGVIGGLIPFILNYQRSSAASVNDSTYIAFMCFMFAGVLLSFGILPATSVIRNDGSRCSAVKYSRPSTEAAAVLRLFLDRKMLLIVPAAWASNFFYSYQFNNVNGLLFNLRTRGFNNVFYWGAQMAGSIAIGYVMDFSFKSRRARGFTGISLVAVIGTIIWAGGLANQHGYSLDKLPEKKLDFKDSGIEFAGPFVLYMSYGLLDAMYQSMVYWLIGALADDSQTLSRYSGFYKGVQSAGAAVAWQVDTRKVPLMSQLIVNWSLTTVSYPLLVLLVYFYVKNDNDDDSNDKV

SEQ ID NO: 39656 - protein, 421 aa, Arabidopsis thaliana
  peptide (1)..(421): Ceres Seq. ID no. 13489351
MGFVCFCCPGMFNALSGMGGGGQVDPTAANNANTAVYTAFTVFGLLGGGFYNVLGPRLTLAAGCSTYVLYAGSFLYYNHHHHQAFAIVAGALLGCGAGLLWAGEGAVMTSYPPPHRKGTYIALFWSIFNLGGVIGGLIPFILNYQRSSAASVNDSTYIAFMCFMFAGVLLSFGILPATSVIRNDGSRCSAVKYSRPSTEAAAVLRLFLDRKMLLIVPAAWASNFFYSYQFNNVNGLLFNLRTRGFNNVFYWGAQMAGSIAIGYVMDFSFKSRRARGFTGISLVAVIGTIIWAGGLANQHGYSLDKLPEKKLDFKDSGIEFAGPFVLYMSYGLLDAMYQSMVYWLIGALADDSQTLSRYSGFYKGVQSAGAAVAWQVDTRKVPLMSQLIVNWSLTTVSYPLLVLLVYFYVKNDNDDDSNDKV

SEQ ID NO: 39657 - protein, 411 aa, Arabidopsis thaliana
  peptide (1)..(411): Ceres Seq. ID no. 13489352
MFNALSGMGGGGQVDPTAANNANTAVYTAFTVFGLLGGGFYNVLGPRLTLAAGCSTYVLYAGSFLYYNHHHHQAFAIVAGALLGCGAGLLWAGEGAVMTSYPPPHRKGTYIALFWSIFNLGGVIGGLIPFILNYQRSSAASVNDSTYIAFMCFMFAGVLLSFGILPATSVIRNDGSRCSAVKYSRPSTEAAAVLRLFLDRKMLLIVPAAWASNFFYSYQFNNVNGLLFNLRTRGFNNVFYWGAQMAGSIAIGYVMDFSFKSRRARGFTGISLVAVIGTIIWAGGLANQHGYSLDKLPEKKLDFKDSGIEFAGPFVLYMSYGLLDAMYQSMVYWLIGALADDSQTLSRYSGFYKGVQSAGAAVAWQVDTRKVPLMSQLIVNWSLTTVSYPLLVLLVYFYVKNDNDDDSNDKV

SEQ ID NO: 39658 - DNA, 2222 bp, Arabidopsis thaliana
  misc_feature (1)..(2222): Ceres Seq. ID no. 12371005
  misc_feature (1)..(2222): Ortholog of  Ceres SEQ ID NO 14310784 as cited in SEQ ID NO 58503
aaaaagaaaaatcgttactttaaagccaaaaagaagaatacacaaacttcattcactctctcccattctcggatctctctcagtgcacagtggttgtcactcttctcctttggtcgaaactctttcttggaaagagcattttgttatcaagactctgaagagctcttttgggaggatagtaaggttggatgatgagagggagatctgatggaggcctaaagaagcggcttattgcttcggtctgtgtcgtggctctattcgtctgtttcttgtttatgtactatggttcctctagccaaggtgcatcagcattggaatatggaagatctttgagaaaactcggatcgtcttatttgagtggagatgatgataatggtgataccaaacaggatgattctgtggctaatgcagaagacagtcttgttgtcgccaaaagttttcctgtttgtgatgaccggcactcggaaatcatcccttgcttagataggaatttcatctaccaaatgaggttgaagcttgatctctctttaatggaacattatgaacggcattgtcctcctcccgaaagacggtttaattgtttgattcctccaccatctggatacaaggttcctattaagtggcctaagagtagagatgaagtgtggaaagcaaacatacctcacactcaccttgcaaaagagaagtctgatcagaactggatggttgagaaaggcgagaaaatttcttttcccggtggaggcactcatttccattgcggtgctgataaatacattgcatcgatcgcaaatatgcttaacttttcgaacgatgtattgaatgacgaagggagattaagaacggttcttgatgtcggatgcggagttgcgagttttggagcttaccttctcgcgtctgatataatgacaatgtcactagcccctaatgatgttcatcagaaccaaatccagtttgcgttagaaagaggaatccctgcttatcttggtgttttaggtaccaaaaggcttccttacccgagcagatcattcgagtttgctcattgttctcgatgtaggattgattggcttcaaagagacggacttcttcttcttgagctcgatcgggtactaagaccgggaggttatttcgcgtattcgtctcctgaagcttacgcacaagatgaagagaatttgaaaatctggaaggagatgagtgctcttgttgaaagaatgtgttggagaattgccgttaaaagaaaccaaactgtggtttggcagaaaccgttgagtaatgactgttacttggagagagagcccgggacacagcctcctctctgtcgctcagatgctgatcctgatgcggttgcgggtgtttcaatggaagcttgcatcactccttactccaagcatgaccataaaaccaagggaagtgggttagctccttggccagctaggttgacttcttctcctccccgtcttgcggatttcggttattcaaccgacatgtttgagaaggacacggaactttggaaacaacaagtggacagttactggaatctgatgtcatcgaaagtcaaatcaaacactgtgaggaacataatggacatgaaagctcacatgggttctttcgcagctgctcttaaagacaaagatgtgtgggtgatgaacgttgtctctcccgacggtcccaacactctaaaactgatctacgaccgtggtttaatcggaacaaatcataactggtgtgaggctttctctacatatcctcgaacatacgatctgttgcacgcgtggtctatattttcagacattaaaagcaaaggatgcagtgcagaggatctactaatcgagatggatcggattcttagacctacgggattcgttatcatcagagataagcagagtgttgttgagtcaatcaagaagtatttgcaggctttgcattgggagactgtggcatcagagaaggtaaatacaagttcagaactcgaccaagacagtgaagatggtgagaacaatgtcgttttcattgtccagaagaaactttggctcaccagtgaaagccttagggacagcgagtaaaaaacatatcaaaagcaaagagagagaaattgttttatcccacaaagtttttatatagttttattttgatttttgtagttgatttgtacgacataaagcattattatataaaatactaaaattattcattgtttcttactttcttgaaatattctttaattt

SEQ ID NO: 39659 - protein, 623 aa, Arabidopsis thaliana
  peptide (1)..(623): Ceres Seq. ID no. 12371006
MMRGRSDGGLKKRLIASVCVVALFVCFLFMYYGSSSQGASALEYGRSLRKLGSSYLSGDDDNGDTKQDDSVANAEDSLVVAKSFPVCDDRHSEIIPCLDRNFIYQMRLKLDLSLMEHYERHCPPPERRFNCLIPPPSGYKVPIKWPKSRDEVWKANIPHTHLAKEKSDQNWMVEKGEKISFPGGGTHFHCGADKYIASIANMLNFSNDVLNDEGRLRTVLDVGCGVASFGAYLLASDIMTMSLAPNDVHQNQIQFALERGIPAYLGVLGTKRLPYPSRSFEFAHCSRCRIDWLQRDGLLLLELDRVLRPGGYFAYSSPEAYAQDEENLKIWKEMSALVERMCWRIAVKRNQTVVWQKPLSNDCYLEREPGTQPPLCRSDADPDAVAGVSMEACITPYSKHDHKTKGSGLAPWPARLTSSPPRLADFGYSTDMFEKDTELWKQQVDSYWNLMSSKVKSNTVRNIMDMKAHMGSFAAALKDKDVWVMNVVSPDGPNTLKLIYDRGLIGTNHNWCEAFSTYPRTYDLLHAWSIFSDIKSKGCSAEDLLIEMDRILRPTGFVIIRDKQSVVESIKKYLQALHWETVASEKVNTSSELDQDSEDGENNVVFIVQKKLWLTSESLRDSE

SEQ ID NO: 39660 - protein, 622 aa, Arabidopsis thaliana
  peptide (1)..(622): Ceres Seq. ID no. 12371007
MRGRSDGGLKKRLIASVCVVALFVCFLFMYYGSSSQGASALEYGRSLRKLGSSYLSGDDDNGDTKQDDSVANAEDSLVVAKSFPVCDDRHSEIIPCLDRNFIYQMRLKLDLSLMEHYERHCPPPERRFNCLIPPPSGYKVPIKWPKSRDEVWKANIPHTHLAKEKSDQNWMVEKGEKISFPGGGTHFHCGADKYIASIANMLNFSNDVLNDEGRLRTVLDVGCGVASFGAYLLASDIMTMSLAPNDVHQNQIQFALERGIPAYLGVLGTKRLPYPSRSFEFAHCSRCRIDWLQRDGLLLLELDRVLRPGGYFAYSSPEAYAQDEENLKIWKEMSALVERMCWRIAVKRNQTVVWQKPLSNDCYLEREPGTQPPLCRSDADPDAVAGVSMEACITPYSKHDHKTKGSGLAPWPARLTSSPPRLADFGYSTDMFEKDTELWKQQVDSYWNLMSSKVKSNTVRNIMDMKAHMGSFAAALKDKDVWVMNVVSPDGPNTLKLIYDRGLIGTNHNWCEAFSTYPRTYDLLHAWSIFSDIKSKGCSAEDLLIEMDRILRPTGFVIIRDKQSVVESIKKYLQALHWETVASEKVNTSSELDQDSEDGENNVVFIVQKKLWLTSESLRDSE

SEQ ID NO: 39661 - protein, 594 aa, Arabidopsis thaliana
  peptide (1)..(594): Ceres Seq. ID no. 12371008
MYYGSSSQGASALEYGRSLRKLGSSYLSGDDDNGDTKQDDSVANAEDSLVVAKSFPVCDDRHSEIIPCLDRNFIYQMRLKLDLSLMEHYERHCPPPERRFNCLIPPPSGYKVPIKWPKSRDEVWKANIPHTHLAKEKSDQNWMVEKGEKISFPGGGTHFHCGADKYIASIANMLNFSNDVLNDEGRLRTVLDVGCGVASFGAYLLASDIMTMSLAPNDVHQNQIQFALERGIPAYLGVLGTKRLPYPSRSFEFAHCSRCRIDWLQRDGLLLLELDRVLRPGGYFAYSSPEAYAQDEENLKIWKEMSALVERMCWRIAVKRNQTVVWQKPLSNDCYLEREPGTQPPLCRSDADPDAVAGVSMEACITPYSKHDHKTKGSGLAPWPARLTSSPPRLADFGYSTDMFEKDTELWKQQVDSYWNLMSSKVKSNTVRNIMDMKAHMGSFAAALKDKDVWVMNVVSPDGPNTLKLIYDRGLIGTNHNWCEAFSTYPRTYDLLHAWSIFSDIKSKGCSAEDLLIEMDRILRPTGFVIIRDKQSVVESIKKYLQALHWETVASEKVNTSSELDQDSEDGENNVVFIVQKKLWLTSESLRDSE

SEQ ID NO: 39662 - DNA, 1239 bp, Arabidopsis thaliana
  misc_feature (1)..(1239): Ceres Seq. ID no. 12422128
  misc_feature (1)..(1239): Ortholog of  Ceres SEQ ID NO 15177343 as cited in SEQ ID NO 51182
tgagtaatagtgagcaaaatgcaagagctagtgtgaacaagaatggattaagagacttgaggaacaaatctggttctgatgttcttccatctaattcaactccgacaagaaaaagtaacatctttagaaagaaaacctctgatggtgagagcagctcttcgagtagagggaataagacggaaggatcagtggttgggggaaagaatattagttcccctcaggggaatggcatcaccatgtctgaacctaggaggaacagaaacttaccaagtgttagggacaacagtgttgtttcaagtagtactaggagatcaactggttattatggtagaacaggacgtgctggagcggttgcaacactacaagcacctcggcctccaacaagagctgatctcaatccttctagatcggcagaagcttcgcgtagtcctttaaatagttacagtaggccaatcagtagtaatggcaggttacgtagcctgatgatgcctggtagcccctcagaagccggcctttctcgctctttgatgaaccgtgatacttacagacggtataacatgaatggagttgcagaggtattgttggccctggaaaggattgagcaagacgaagagcttacatacgagcaattggctgttttagagaccaatctgttcttaaatggtatgagcagcttccacgatcagcatagagatatgaggcttgacattgacaacatgtcgtatgaggaactgttagcattagaggagaaaatgggtacagtgagcactgctctaagcgaagaagcgcttctgaaaagcctcaagtcaagtatttaccgtccaaacgatgaatccgacgacatttgcctgaacaaagatgatgatgtcaagtgcagcatttgccaggaagagtatgttgatggagatgaagtagggactttgccttgccaacataaataccacgtgagctgcgcgcaacaatggctacggatgaagaattggtgtcctatatgtaaaacctctgcagaatctcagccacatccattttcatgatgatgggattgcagagacatttaccaaagtgtttgtgtctacttccactaccttgctctctattatttgtacataaaaggttttcttttttacttacacacaattgggaacaaatagaaaataagatcaggtggacaaattattgttttcaccttgtattggttcgtaatttcaacaatatttggtttaattccatatatagttt

SEQ ID NO: 39663 - protein, 343 aa, Arabidopsis thaliana
  peptide (1)..(343): Ceres Seq. ID no. 12422129
SNSEQNARASVNKNGLRDLRNKSGSDVLPSNSTPTRKSNIFRKKTSDGESSSSSRGNKTEGSVVGGKNISSPQGNGITMSEPRRNRNLPSVRDNSVVSSSTRRSTGYYGRTGRAGAVATLQAPRPPTRADLNPSRSAEASRSPLNSYSRPISSNGRLRSLMMPGSPSEAGLSRSLMNRDTYRRYNMNGVAEVLLALERIEQDEELTYEQLAVLETNLFLNGMSSFHDQHRDMRLDIDNMSYEELLALEEKMGTVSTALSEEALLKSLKSSIYRPNDESDDICLNKDDDVKCSICQEEYVDGDEVGTLPCQHKYHVSCAQQWLRMKNWCPICKTSAESQPHPFS

SEQ ID NO: 39664 - protein, 265 aa, Arabidopsis thaliana
  peptide (1)..(265): Ceres Seq. ID no. 12422130
MSEPRRNRNLPSVRDNSVVSSSTRRSTGYYGRTGRAGAVATLQAPRPPTRADLNPSRSAEASRSPLNSYSRPISSNGRLRSLMMPGSPSEAGLSRSLMNRDTYRRYNMNGVAEVLLALERIEQDEELTYEQLAVLETNLFLNGMSSFHDQHRDMRLDIDNMSYEELLALEEKMGTVSTALSEEALLKSLKSSIYRPNDESDDICLNKDDDVKCSICQEEYVDGDEVGTLPCQHKYHVSCAQQWLRMKNWCPICKTSAESQPHPFS

SEQ ID NO: 39665 - protein, 183 aa, Arabidopsis thaliana
  peptide (1)..(183): Ceres Seq. ID no. 12422131
MMPGSPSEAGLSRSLMNRDTYRRYNMNGVAEVLLALERIEQDEELTYEQLAVLETNLFLNGMSSFHDQHRDMRLDIDNMSYEELLALEEKMGTVSTALSEEALLKSLKSSIYRPNDESDDICLNKDDDVKCSICQEEYVDGDEVGTLPCQHKYHVSCAQQWLRMKNWCPICKTSAESQPHPFS

SEQ ID NO: 39666 - DNA, 1484 bp, Arabidopsis thaliana
  misc_feature (1)..(1484): Ceres Seq. ID no. 12328944
  misc_feature (1)..(1484): Ortholog of  Ceres SEQ ID NO 13595529 as cited in SEQ ID NO 56687
attttttcatcacttatcagcgatttgacgagaagagccttttggtttctgcgaatcatccaaaatccgccatggaagcaactacaagaatcttgagtacttcttctgctctcaatcgtcttcttcttctcagtaagctcaatctaaaatcagatccccgtaatatcaattccacaaatcagctactacacaatgccgttacccgaaaatcctctatctccgccgctcgtatacggtgctcttcgctccctgcgaatgcgaatctcttcagatcactcttcttcctaacgtcaacgtttcgtctcgagaacaccgccgttcacgctaatccattccgatccgaacctaacgacggcgtcgccgtctggaacagagctccacggatcgtgaacggaggtggaaacgcggcgatattcggcgggaacgaggggaaagagacgacggtggttctccttggttggctaggagcgaaagctaaacatctaaggagatacgttgagtggtacaactccaggggaattaacgccgttactttcactgttgacgttagggatttgctccggttagatcttggtcggcggcttgaacgaaggatagctgaatttgggaatgaattggttaattgggtatcggagaaagaagatgatggtagagagaaatgcttggtgtttcacagcttcagtaacactggttggcttgtatatggtgccttgctagagagcttcattggtagacaagatttagtagaaaggattgagggttgtatcattgactcgggaggagcagatcctcttgatactaagatttgggcagcggggtttaccgcagctatactgaagaagcgtagctccaccataaccacagaaccaaacagtcccataaaagaagaggatgcttcaacaccacaaaagaaggaacctttaggaatcgaaaacataatgctatcatctctggagaaactcttccccatcttcttaaaccacccagacgtcaatacgaggctaacaaaaatcattcaaaaactatatgagaaccatcctccatgtcctcagctctatctttacagctccggggacaaagttgttccatctcattccgttgagctccgcatccgagaacaacagaagattggaagaaagatacattctttcaatttcaagtcctctcctcacgtggatcattaccggaactttcctgacttgtattcctcacagcttcaaaacttcttgcaagaatgcttcacaccaacaaaacaacaagctctgtgactttggaacatctttttttgcagaatatttgtagccttggtttgtttgtttgttttctcctcaaaagttgtttattattgatgatagaacaagataatccgaaggagacagaaactccaaactgtgtcgacgagctactgagcagagatagtttctgaaactcttagattgttgttgctagtttggcttcatatgtgaaacttgaccgatgctcgg

SEQ ID NO: 39667 - protein, 421 aa, Arabidopsis thaliana
  peptide (1)..(421): Ceres Seq. ID no. 12328945
FFITYQRFDEKSLLVSANHPKSAMEATTRILSTSSALNRLLLLSKLNLKSDPRNINSTNQLLHNAVTRKSSISAARIRCSSLPANANLFRSLFFLTSTFRLENTAVHANPFRSEPNDGVAVWNRAPRIVNGGGNAAIFGGNEGKETTVVLLGWLGAKAKHLRRYVEWYNSRGINAVTFTVDVRDLLRLDLGRRLERRIAEFGNELVNWVSEKEDDGREKCLVFHSFSNTGWLVYGALLESFIGRQDLVERIEGCIIDSGGADPLDTKIWAAGFTAAILKKRSSTITTEPNSPIKEEDASTPQKKEPLGIENIMLSSLEKLFPIFLNHPDVNTRLTKIIQKLYENHPPCPQLYLYSSGDKVVPSHSVELRIREQQKIGRKIHSFNFKSSPHVDHYRNFPDLYSSQLQNFLQECFTPTKQQAL

SEQ ID NO: 39668 - protein, 398 aa, Arabidopsis thaliana
  peptide (1)..(398): Ceres Seq. ID no. 12328946
MEATTRILSTSSALNRLLLLSKLNLKSDPRNINSTNQLLHNAVTRKSSISAARIRCSSLPANANLFRSLFFLTSTFRLENTAVHANPFRSEPNDGVAVWNRAPRIVNGGGNAAIFGGNEGKETTVVLLGWLGAKAKHLRRYVEWYNSRGINAVTFTVDVRDLLRLDLGRRLERRIAEFGNELVNWVSEKEDDGREKCLVFHSFSNTGWLVYGALLESFIGRQDLVERIEGCIIDSGGADPLDTKIWAAGFTAAILKKRSSTITTEPNSPIKEEDASTPQKKEPLGIENIMLSSLEKLFPIFLNHPDVNTRLTKIIQKLYENHPPCPQLYLYSSGDKVVPSHSVELRIREQQKIGRKIHSFNFKSSPHVDHYRNFPDLYSSQLQNFLQECFTPTKQQAL

SEQ ID NO: 39669 - DNA, 1411 bp, Arabidopsis thaliana
  misc_feature (1)..(1411): Ceres Seq. ID no. 12336219
  misc_feature (1)..(1411): Ortholog of  Ceres SEQ ID NO 15171442 as cited in SEQ ID NO 51520
aaaaaatatttatgttgggtcaggcttaaaccagagagagactgtgtgtggtcgagccatttgaccaaaagcaaaaacttaaaactggtttcagatctgaagtaaaagggttttgcttcggattctccggcgtcgtttaaatgatctctgacccatcttccttggcttaataattctggtccctccttttatctctttttactgttgatttatctgaatatgccacgctctttcttccacatgtttattctctcttcctttcttcaacacaagcgtctggactaaggaaagccaacaacaaaatctggtttcaagacggttggcaggagtttgtcaaccgtttctccattcggattggtttcagatacaaagttacagtctacattttcaatttatcctccacactctgagatcaaccaccattctagtagtgaagctcttatgcaaatggattccgcacagaatcagttcaacaaacgtgctcgattgtttgaagatcctgaactcaaagatgctaaggtcatttatccatcgaaccctgaatctactgaaccagtgaataaaggttatggcggttctacagccatccaaagctttttcaaagaatctaaagctgaagaaacgcccaaggtacttaagaagagaggaaggaagaagaagaatcctaatcccgaggaagtaaactcttcaactcccggtggagatgactcagagaaccgctcaaagttctacgagagtgcttctgctagaaagagaactgtaactgcagaggaaagagagagagccgtcaatgcagccaaaacattcgaaccaacaaatccttactttagagttgttctgcgaccatcatatctatacagaggttgcatcatgtacttgccatctgggtttgctgagaaatacctaagtgggatatctggtttcatcaagctccagctcggtgagaaacaatggccagtgaggtgcctctacaaagcagggagagctaagtttagccaaggatggtatgagttcacactcgagaacaatataggcgaaggagatgtatgtgtgtttgagctactcagaactcgggatttcgttctcgaagtcaccgcctttcgtgtcaatgagtatgtgtgaccaaaaaagatttccctttcatcagcgatcttgcaggtagctttccaaagttaaaattttatgtaggggtctcttaaccattctctctcttgcattggttgtctctgttctagtagtgttttgagtgaaatttcaggttcctatgtttggatgtggataagtatttgacgattataataacctctgagtgggaaactctttgtttgagtggtagctaggttcaaaagtagagttgtatatacttttatcttcatcaggataattatgtttatttgaattgttgattatt

SEQ ID NO: 39670 - protein, 226 aa, Arabidopsis thaliana
  peptide (1)..(226): Ceres Seq. ID no. 12336220
MQMDSAQNQFNKRARLFEDPELKDAKVIYPSNPESTEPVNKGYGGSTAIQSFFKESKAEETPKVLKKRGRKKKNPNPEEVNSSTPGGDDSENRSKFYESASARKRTVTAEERERAVNAAKTFEPTNPYFRVVLRPSYLYRGCIMYLPSGFAEKYLSGISGFIKLQLGEKQWPVRCLYKAGRAKFSQGWYEFTLENNIGEGDVCVFELLRTRDFVLEVTAFRVNEYV

SEQ ID NO: 39671 - protein, 224 aa, Arabidopsis thaliana
  peptide (1)..(224): Ceres Seq. ID no. 12336221
MDSAQNQFNKRARLFEDPELKDAKVIYPSNPESTEPVNKGYGGSTAIQSFFKESKAEETPKVLKKRGRKKKNPNPEEVNSSTPGGDDSENRSKFYESASARKRTVTAEERERAVNAAKTFEPTNPYFRVVLRPSYLYRGCIMYLPSGFAEKYLSGISGFIKLQLGEKQWPVRCLYKAGRAKFSQGWYEFTLENNIGEGDVCVFELLRTRDFVLEVTAFRVNEYV

SEQ ID NO: 39672 - DNA, 680 bp, Arabidopsis thaliana
  misc_feature (1)..(680): Ceres Seq. ID no. 12326513
  misc_feature (1)..(680): Ortholog of  Ceres SEQ ID NO 13639243 as cited in SEQ ID NO 56820
aggaagggtttatagattaggtttttaagtcgcacctctctctctcactgccgcatcttttcttagggttcttgtttcgctatctcttaaacacaaacagctctgtccgaataatctctcttcaagtacctctttttcctgattctgtatatcgccatgaattactgatttccctctctataaacccatcaaagtaaaccaatttctcctgtgacttgtacctaactcgatcttaccagactggtgatggcgtctttgaaccctttcgatcttctaggagatgatgctgaggatccaagccagctcgctgtggctttgtctcagaaagtcgagaaagctgctgctgctgttcagcctcctaaggccgctaagttcccaaccaagccggctcctccttctcaagcagtgagggagtcgaggaatgctcctcaaggaggtcgtggtgggactggtggaggaggaaaccaaaggtatgcaaaagaagctgcagctccggcgattggagacacagctcagttcccttcgttgggctagtaaagacccctggtccttcagcctcgctatctctgtctttcgtttctctttggttgaattttgttagttttataattttttgttacactttctgaaggtcttttctgcgaaactattacgttttttaagttatgaaaaaaattatt

SEQ ID NO: 39673 - protein, 95 aa, Arabidopsis thaliana
  peptide (1)..(95): Ceres Seq. ID no. 12326514
MASLNPFDLLGDDAEDPSQLAVALSQKVEKAAAAVQPPKAAKFPTKPAPPSQAVRESRNAPQGGRGGTGGGGNQRYAKEAAAPAIGDTAQFPSLG

SEQ ID NO: 39674 - protein, 59 aa, Arabidopsis thaliana
  peptide (1)..(59): Ceres Seq. ID no. 12326515
MLLKEVVVGLVEEETKGMQKKLQLRRLETQLSSLRWASKDPWSFSLAISVFRFSLVEFC

SEQ ID NO: 39675 - DNA, 1293 bp, Arabidopsis thaliana
  misc_feature (1)..(1293): Ceres Seq. ID no. 13488711
  misc_feature (1)..(1293): Ortholog of  Ceres SEQ ID NO 14307273 as cited in SEQ ID NO 54302
  misc_feature (1)..(1293): Ortholog of  Ceres SEQ ID NO 14315317 as cited in SEQ ID NO 58242
  misc_feature (1)..(1293): Ortholog of  Ceres SEQ ID NO 13655375 as cited in SEQ ID NO 63347
  misc_feature (1)..(1293): Ortholog of  Ceres SEQ ID NO 12626166 as cited in SEQ ID NO 64505
  misc_feature (1)..(1293): Ortholog of  Ceres SEQ ID NO 14301599 as cited in SEQ ID NO 65699
  misc_feature (1)..(1293): Ortholog of  Ceres SEQ ID NO 14301978 as cited in SEQ ID NO 0
ggaaccaattggttctgatttcagatttcgaatttttttaatttgaatccaaatggagaaagcagagaacgagaataagccatcggctgtatctgacgtcggagcatgggctatgaacgtaacgagctccgttgggatcatcatggctaataaacaactaatgtcatcatctggattaggcttcagcttcgcgacaactctcacgggatttcactttgctcttactgctctcgttggtatggtgtcgaatgcgactggtttatcagcatctaagcatgttcctctttgggagcttctttggttctcactcgttgctaatatctcaatcgctgctatgaattttagtcttatgttgaactctgttggcttctaccagatatcgaaattgagcatgattccagttgtttgtgtgatggaatgggttctacatagtaagcattactcgagagaagtgaaggcatctgtcatggttgttgttgtaggagttgggatttgtactgttactgatgtcaaagttaatgccaaaggtttcatttgtgcttgcactgccgttttctccacttctctccagcagatctcaataggttcactgcagaagaaatactcgatcggatcattcgagttgctgagtaagacagctccaatccaagccatttcactcctcatctttggtccatttgttgactatttcttgagtggcagattcatttcgacttacaagatgacttatagcgcaatgttatgcattcttctctcctgcgcattggcggttttctgcaacataagccaatatctctgcatcggaagattctctgctacctcattccaagttcttggccacatgaaaacagtctgtgtcttaacattaggatggcttatctttgattcggagatgacattcaagaacatagcagggatggtcttagccgtggtgggaatggtgatatacagttgggcagtcgagttagagaaacagagaaagtcgaaagtgataccgcatggtaaacacagtatgacagaagatgagattaaacttctcaaagaaggtatagaacatatggatttgaaagacatggagcttggaaataataaagcataaatatagctctattcaagagaaacgttttttggttatatttttggttactcatttcccccatcatgtactcttttcttttgccctttttttcgttctttgtctcaaagaacctttttagcctcttattgatgagctctcctctgcagagcacattcttttttctatagaaatatatgattcctctacttctttgc

SEQ ID NO: 39676 - protein, 348 aa, Arabidopsis thaliana
  peptide (1)..(348): Ceres Seq. ID no. 13488712
MEKAENENKPSAVSDVGAWAMNVTSSVGIIMANKQLMSSSGLGFSFATTLTGFHFALTALVGMVSNATGLSASKHVPLWELLWFSLVANISIAAMNFSLMLNSVGFYQISKLSMIPVVCVMEWVLHSKHYSREVKASVMVVVVGVGICTVTDVKVNAKGFICACTAVFSTSLQQISIGSLQKKYSIGSFELLSKTAPIQAISLLIFGPFVDYFLSGRFISTYKMTYSAMLCILLSCALAVFCNISQYLCIGRFSATSFQVLGHMKTVCVLTLGWLIFDSEMTFKNIAGMVLAVVGMVIYSWAVELEKQRKSKVIPHGKHSMTEDEIKLLKEGIEHMDLKDMELGNNKA

SEQ ID NO: 39677 - protein, 328 aa, Arabidopsis thaliana
  peptide (1)..(328): Ceres Seq. ID no. 13488713
MNVTSSVGIIMANKQLMSSSGLGFSFATTLTGFHFALTALVGMVSNATGLSASKHVPLWELLWFSLVANISIAAMNFSLMLNSVGFYQISKLSMIPVVCVMEWVLHSKHYSREVKASVMVVVVGVGICTVTDVKVNAKGFICACTAVFSTSLQQISIGSLQKKYSIGSFELLSKTAPIQAISLLIFGPFVDYFLSGRFISTYKMTYSAMLCILLSCALAVFCNISQYLCIGRFSATSFQVLGHMKTVCVLTLGWLIFDSEMTFKNIAGMVLAVVGMVIYSWAVELEKQRKSKVIPHGKHSMTEDEIKLLKEGIEHMDLKDMELGNNKA

SEQ ID NO: 39678 - protein, 318 aa, Arabidopsis thaliana
  peptide (1)..(318): Ceres Seq. ID no. 13488714
MANKQLMSSSGLGFSFATTLTGFHFALTALVGMVSNATGLSASKHVPLWELLWFSLVANISIAAMNFSLMLNSVGFYQISKLSMIPVVCVMEWVLHSKHYSREVKASVMVVVVGVGICTVTDVKVNAKGFICACTAVFSTSLQQISIGSLQKKYSIGSFELLSKTAPIQAISLLIFGPFVDYFLSGRFISTYKMTYSAMLCILLSCALAVFCNISQYLCIGRFSATSFQVLGHMKTVCVLTLGWLIFDSEMTFKNIAGMVLAVVGMVIYSWAVELEKQRKSKVIPHGKHSMTEDEIKLLKEGIEHMDLKDMELGNNKA

SEQ ID NO: 39679 - DNA, 1413 bp, Arabidopsis thaliana
  misc_feature (1)..(1413): Ceres Seq. ID no. 12371224
  misc_feature (1)..(1413): Ortholog of  Ceres SEQ ID NO 15177963 as cited in SEQ ID NO 59105
aagtgatatgatactctcaagaaacctacccacctaaaaagagagaaaaacaaaacaaaagaatagtaaggcactaaacactaaaactaccacttctcttgtatcgccgacaaagctttgttcagtggcaaagatgatgaatcatttgcttttggctcttttccttgttggaaccatcgccttaccagatagaggaactcaacaattgaccaacgatggcctcaccggcgcgaggcgagagatactctctttcttagaccaaagacttgcagtggtgtacccagtgatccagagattcaagtcactcatcactctcgacccttataacgtgaccaagacatggattggttcagacatctgcagttatagaggcttccactgtgacaatcctcctcacaacaaaaccgcagttactgttgcttccatcgatttcaatggctttcagctctctgctccatccatcgaaggatttatcgatcaattcgctgacctagctctgtttcatgttaactcaaacaattttggaggtacggtgccttccaagatagtcaacctccggtatctctatgaactcgacatcagcaacaatagattcaccggtcagtttccgacagctgttgttggaatgtccggtttgacgtttattgacattcggttcaactctttctctggttcaatcccaccacaaatcctcggtcagaacctcgaagttctcttcatcaatgacaacggcttcactgcgagcctcccggagatacctggtgatggtacaacacacattctcttcttgactttagcaaacaacaagttcaacggtcctctcccaagaagcatcttaagatcaatgtcaactttaaccgaagtactcttcctcaataacgattttacgggttgtatccctcacgagatcgggttcctcaccggagcatcagtgatcgatatcggtggaaacaagctcacgggtcctttgccgctttccctaatgtgtttagagaaagtagagcagctcaactttgctgggaatctattgtttggtgccgtcccggaggcagtatgcatgctgctccgggacaatcttgtcaacttgtcgttgtcggataactatttcacgcacgtagggccttggtgtaggggtttacttgaaaaaggtgttcttgacgttggtaacaattgcattcctttcttcccaggacaaagatcgatgcaagaatgtgcggagttctttgtaaaacctaagaagtactactgtcctcacatgtggttccatagttttttctcttgtagatattctcacatatcttcttcctcttctagtgctttcatgcccatggtggctccctctccttaatgttcatcatcataaacgtgtttgatcacttttattgtaaggaaaaataatcggattatgtttcg

SEQ ID NO: 39680 - protein, 404 aa, Arabidopsis thaliana
  peptide (1)..(404): Ceres Seq. ID no. 12371225
MMNHLLLALFLVGTIALPDRGTQQLTNDGLTGARREILSFLDQRLAVVYPVIQRFKSLITLDPYNVTKTWIGSDICSYRGFHCDNPPHNKTAVTVASIDFNGFQLSAPSIEGFIDQFADLALFHVNSNNFGGTVPSKIVNLRYLYELDISNNRFTGQFPTAVVGMSGLTFIDIRFNSFSGSIPPQILGQNLEVLFINDNGFTASLPEIPGDGTTHILFLTLANNKFNGPLPRSILRSMSTLTEVLFLNNDFTGCIPHEIGFLTGASVIDIGGNKLTGPLPLSLMCLEKVEQLNFAGNLLFGAVPEAVCMLLRDNLVNLSLSDNYFTHVGPWCRGLLEKGVLDVGNNCIPFFPGQRSMQECAEFFVKPKKYYCPHMWFHSFFSCRYSHISSSSSSAFMPMVAPSP

SEQ ID NO: 39681 - protein, 403 aa, Arabidopsis thaliana
  peptide (1)..(403): Ceres Seq. ID no. 12371226
MNHLLLALFLVGTIALPDRGTQQLTNDGLTGARREILSFLDQRLAVVYPVIQRFKSLITLDPYNVTKTWIGSDICSYRGFHCDNPPHNKTAVTVASIDFNGFQLSAPSIEGFIDQFADLALFHVNSNNFGGTVPSKIVNLRYLYELDISNNRFTGQFPTAVVGMSGLTFIDIRFNSFSGSIPPQILGQNLEVLFINDNGFTASLPEIPGDGTTHILFLTLANNKFNGPLPRSILRSMSTLTEVLFLNNDFTGCIPHEIGFLTGASVIDIGGNKLTGPLPLSLMCLEKVEQLNFAGNLLFGAVPEAVCMLLRDNLVNLSLSDNYFTHVGPWCRGLLEKGVLDVGNNCIPFFPGQRSMQECAEFFVKPKKYYCPHMWFHSFFSCRYSHISSSSSSAFMPMVAPSP

SEQ ID NO: 39682 - protein, 240 aa, Arabidopsis thaliana
  peptide (1)..(240): Ceres Seq. ID no. 12371227
MSGLTFIDIRFNSFSGSIPPQILGQNLEVLFINDNGFTASLPEIPGDGTTHILFLTLANNKFNGPLPRSILRSMSTLTEVLFLNNDFTGCIPHEIGFLTGASVIDIGGNKLTGPLPLSLMCLEKVEQLNFAGNLLFGAVPEAVCMLLRDNLVNLSLSDNYFTHVGPWCRGLLEKGVLDVGNNCIPFFPGQRSMQECAEFFVKPKKYYCPHMWFHSFFSCRYSHISSSSSSAFMPMVAPSP

SEQ ID NO: 39683 - DNA, 1304 bp, Arabidopsis thaliana
  misc_feature (1)..(1304): Ceres Seq. ID no. 13612513
  misc_feature (1)..(1304): Ortholog of  Ceres SEQ ID NO 15171100 as cited in SEQ ID NO 50966
atcgggcaaggccttatagagattacacaacacagatagattacacactgagaaacagagaatggtagctgaggccttgcccaaatgccctgaagctccactcgtacttggactccaacccgcagctcttatcgataacgtcgctcctgttgattggtctttactcgatcaaattcccggtgatcgcggtggctccattgccgtgcaaaaggatgagttagagcacatgctaaaagagcttgatgcacatatcagtgtggctccattaaagaagatggctggaggaagtgtgaccaatacagttcgaggcttgagtgttgggttcggtgtagccactgggattattggtgcttatggagacgatgaacaaggccaattgtttgttagcaatatgggttttagtggtgtgagtatctcaaggctcaggaagaagaaaggttccactgctcagtgtgtttgcttggttgatgactctggtaatcgaacaatgcgaccatgtctctcgagtgctgtgaagattcaggcagatgaattaagcaaagaagatttcacaggctctaagtggttggttcttagatatgctgttcttaatttacaagtaattcaagcagccattcgatttgccaagcaagaaggtctttctgtttccttggatttagctagttttgagatggtcaggaattctaaatcagagcttcgacagcttctggagtctggtaacatagatctttgctttgctaacgaggacgaagcagcagagctccttaggggtgagcaagaagcgggtccggaggcagctcttgagttcctaggcagacattgcagatgggctgtggtaactttagggtcgaaagggtgcattgcaaaacatgataaagaggtggtacatatatcagccataggagagacagtagcaactgatgccacaggagccggtgacctattcgcaagcgggtttctgtacggactaataaagggattgtctttggaagaatgttgcaaagtgggatcatgcagtggtggatctgtcatccgtgctctcggtggagaagtaaccccagaaaactggcaatggatgcacaaacagttgcagttgaagggcttacctgttcctgacatccacaactgatgatatcaccatcagattgtagaatttcaaacaatttcgttgaagggccggttctgattcaagcagctcttagcattatgttgttcacagagattctcacagcatttacttcaatacacattgtgttgttttcaatctttttttgtgaaaaataaaaatgcgtttgtcagggttt

SEQ ID NO: 39684 - protein, 355 aa, Arabidopsis thaliana
  peptide (1)..(355): Ceres Seq. ID no. 13612514
MVAEALPKCPEAPLVLGLQPAALIDNVAPVDWSLLDQIPGDRGGSIAVQKDELEHMLKELDAHISVAPLKKMAGGSVTNTVRGLSVGFGVATGIIGAYGDDEQGQLFVSNMGFSGVSISRLRKKKGSTAQCVCLVDDSGNRTMRPCLSSAVKIQADELSKEDFTGSKWLVLRYAVLNLQVIQAAIRFAKQEGLSVSLDLASFEMVRNSKSELRQLLESGNIDLCFANEDEAAELLRGEQEAGPEAALEFLGRHCRWAVVTLGSKGCIAKHDKEVVHISAIGETVATDATGAGDLFASGFLYGLIKGLSLEECCKVGSCSGGSVIRALGGEVTPENWQWMHKQLQLKGLPVPDIHN

SEQ ID NO: 39685 - protein, 300 aa, Arabidopsis thaliana
  peptide (1)..(300): Ceres Seq. ID no. 13612515
MLKELDAHISVAPLKKMAGGSVTNTVRGLSVGFGVATGIIGAYGDDEQGQLFVSNMGFSGVSISRLRKKKGSTAQCVCLVDDSGNRTMRPCLSSAVKIQADELSKEDFTGSKWLVLRYAVLNLQVIQAAIRFAKQEGLSVSLDLASFEMVRNSKSELRQLLESGNIDLCFANEDEAAELLRGEQEAGPEAALEFLGRHCRWAVVTLGSKGCIAKHDKEVVHISAIGETVATDATGAGDLFASGFLYGLIKGLSLEECCKVGSCSGGSVIRALGGEVTPENWQWMHKQLQLKGLPVPDIHN

SEQ ID NO: 39686 - protein, 284 aa, Arabidopsis thaliana
  peptide (1)..(284): Ceres Seq. ID no. 13612516
MAGGSVTNTVRGLSVGFGVATGIIGAYGDDEQGQLFVSNMGFSGVSISRLRKKKGSTAQCVCLVDDSGNRTMRPCLSSAVKIQADELSKEDFTGSKWLVLRYAVLNLQVIQAAIRFAKQEGLSVSLDLASFEMVRNSKSELRQLLESGNIDLCFANEDEAAELLRGEQEAGPEAALEFLGRHCRWAVVTLGSKGCIAKHDKEVVHISAIGETVATDATGAGDLFASGFLYGLIKGLSLEECCKVGSCSGGSVIRALGGEVTPENWQWMHKQLQLKGLPVPDIHN

SEQ ID NO: 39687 - DNA, 1434 bp, Arabidopsis thaliana
  misc_feature (1)..(1434): Ceres Seq. ID no. 12328179
  misc_feature (1)..(1434): Ortholog of  Ceres SEQ ID NO 14314511 as cited in SEQ ID NO 52424
tttctttcttcttcttccgtttcttttgcctctttcttttgtcttcttccttctatttttttgtggctttaaatttattgggttttgttgttcttcttcttctatagccgtttcatcttcacaatagcatcttcttctttttttccctgtcaagatcctgaatcatcggatctagaaggaaactagagtttgtgaaatcagattaaatcttgtgagaaatctctgaaaaagctgcaggtttctatacttctgttagtactctaattcaaccgagaaagtcgaatacatacacacattcataacacttttgaggaagatgttaagtggaaacaatggaaacactgcaccaccggttttcatgaacgagaaccagttgcaataccagacaaacctacgatcgaatcagcttcacttgctcggaaacatgggaggtggatgcactgttgatccagtaaactactttgctaacgataacctcgttccaatgatccgccctaacaaaagaggaagggaagccgaaagcattagtaacaacatccaaagacaacagcagaagcttcaaatgtctttgaactataattataacaacactagtgttcgagaagaagtgcctaaagagaatctagtctcaactggtctgagactatcttatgacgacgatgaacacaattcttcagtgacttctgctagtggtagcattttagctgcttctccaatctttcagtcactcgatgatagtcttcggattgatctccatagacaaaaagatgagtttgaccagttcatcaagatccaggcagctcaaatggcgaaaggtgtgagggatatgaaacagagacacatcgcgtcttttctcacaacattagagaaaggagtgagcaagaagcttcaagagaaagatcacgagatcaatgatatgaacaagaagaataaagagcttgtggagcggataaagcaagtggcaatggaagctcagaattggcactacagagcaaagtacaatgagtctgtggttaatgtcttaaaggcaaatctccaacaagcaatgtcacacaacaacagtgtgatagctgctgcagatcaaggcaaagaaggttttggagacagcgaaatagatgatgcagcttcatcatacattgatccaaacaacaacaacaacatggggattcatcagaggatgagatgcaaaatgtgcaacgtcaaggaagtatcggtgttgatagtgccatgtcggcacttgagtttgtgtaaagaatgtgatgtattcactaagatttgtcctgtatgcaagtctttgaaaagttcttgcgtccaagtcttcttttcttgatttgtgaccaaatggaacagaaggaaaaagagaatccattatataagtctttcatactcttttttaaaaaatattttgttatataaatttatttgtatcggtgt

SEQ ID NO: 39688 - protein, 337 aa, Arabidopsis thaliana
  peptide (1)..(337): Ceres Seq. ID no. 12328180
MLSGNNGNTAPPVFMNENQLQYQTNLRSNQLHLLGNMGGGCTVDPVNYFANDNLVPMIRPNKRGREAESISNNIQRQQQKLQMSLNYNYNNTSVREEVPKENLVSTGLRLSYDDDEHNSSVTSASGSILAASPIFQSLDDSLRIDLHRQKDEFDQFIKIQAAQMAKGVRDMKQRHIASFLTTLEKGVSKKLQEKDHEINDMNKKNKELVERIKQVAMEAQNWHYRAKYNESVVNVLKANLQQAMSHNNSVIAAADQGKEGFGDSEIDDAASSYIDPNNNNNMGIHQRMRCKMCNVKEVSVLIVPCRHLSLCKECDVFTKICPVCKSLKSSCVQVFFS

SEQ ID NO: 39689 - protein, 323 aa, Arabidopsis thaliana
  peptide (1)..(323): Ceres Seq. ID no. 12328181
MNENQLQYQTNLRSNQLHLLGNMGGGCTVDPVNYFANDNLVPMIRPNKRGREAESISNNIQRQQQKLQMSLNYNYNNTSVREEVPKENLVSTGLRLSYDDDEHNSSVTSASGSILAASPIFQSLDDSLRIDLHRQKDEFDQFIKIQAAQMAKGVRDMKQRHIASFLTTLEKGVSKKLQEKDHEINDMNKKNKELVERIKQVAMEAQNWHYRAKYNESVVNVLKANLQQAMSHNNSVIAAADQGKEGFGDSEIDDAASSYIDPNNNNNMGIHQRMRCKMCNVKEVSVLIVPCRHLSLCKECDVFTKICPVCKSLKSSCVQVFFS

SEQ ID NO: 39690 - protein, 301 aa, Arabidopsis thaliana
  peptide (1)..(301): Ceres Seq. ID no. 12328182
MGGGCTVDPVNYFANDNLVPMIRPNKRGREAESISNNIQRQQQKLQMSLNYNYNNTSVREEVPKENLVSTGLRLSYDDDEHNSSVTSASGSILAASPIFQSLDDSLRIDLHRQKDEFDQFIKIQAAQMAKGVRDMKQRHIASFLTTLEKGVSKKLQEKDHEINDMNKKNKELVERIKQVAMEAQNWHYRAKYNESVVNVLKANLQQAMSHNNSVIAAADQGKEGFGDSEIDDAASSYIDPNNNNNMGIHQRMRCKMCNVKEVSVLIVPCRHLSLCKECDVFTKICPVCKSLKSSCVQVFFS

SEQ ID NO: 39691 - DNA, 444 bp, Arabidopsis thaliana
  misc_feature (1)..(444): Ceres Seq. ID no. 12580204
  misc_feature (1)..(444): Ortholog of  Ceres SEQ ID NO 13596581 as cited in SEQ ID NO 62420
  misc_feature (1)..(444): Ortholog of  Ceres SEQ ID NO 13591273 as cited in SEQ ID NO 65904
  misc_feature (1)..(444): Ortholog of  Ceres SEQ ID NO 13623086 as cited in SEQ ID NO 0
actctctctatctctctttctctctatctctctctatctctctcatttcttcctgcgtcaatggcgactcaaggtcaggttatcacttgcaaagctgcggtggcttacgagccgaacaagcctctggtcatcgaagatgtgcaagtggctccacctcaagctggtgaggttcggatcaagatcctctacactgctctttgtcacaccgacgcttacacttggagcggcaaggatcctgaaggtctctttccttgtattctaggtcatgaggctgctgggattgttgagagtgttggtgaaggagtaactgaagttcaagctggagatcatgttatcccttgttatcaagctgagtgtcgtgaatgcaagttttgcaaatctgggaagactaacctttgtggcaaggtgagatctgctactggtgttactccttcaccgtctccc

SEQ ID NO: 39692 - protein, 148 aa, Arabidopsis thaliana
  peptide (1)..(148): Ceres Seq. ID no. 12580205
TLSISLSLYLSLSLSFLPASMATQGQVITCKAAVAYEPNKPLVIEDVQVAPPQAGEVRIKILYTALCHTDAYTWSGKDPEGLFPCILGHEAAGIVESVGEGVTEVQAGDHVIPCYQAECRECKFCKSGKTNLCGKVRSATGVTPSPSP

SEQ ID NO: 39693 - protein, 128 aa, Arabidopsis thaliana
  peptide (1)..(128): Ceres Seq. ID no. 12580206
MATQGQVITCKAAVAYEPNKPLVIEDVQVAPPQAGEVRIKILYTALCHTDAYTWSGKDPEGLFPCILGHEAAGIVESVGEGVTEVQAGDHVIPCYQAECRECKFCKSGKTNLCGKVRSATGVTPSPSP

SEQ ID NO: 39694 - protein, 86 aa, Arabidopsis thaliana
  peptide (1)..(86): Ceres Seq. ID no. 12580207
LSLSLFLSISLYLSHFFLRQWRLKVRLSLAKLRWLTSRTSLWSSKMCKWLHLKLVRFGSRSSTLLFVTPTLTLGAARILKVSFLVF

SEQ ID NO: 39695 - DNA, 1271 bp, Arabidopsis thaliana
  misc_feature (1)..(1271): Ceres Seq. ID no. 12327725
  misc_feature (1)..(1271): Ortholog of  Ceres SEQ ID NO 13638097 as cited in SEQ ID NO 57043
  misc_feature (1)..(1271): Ortholog of  Ceres SEQ ID NO 13596416 as cited in SEQ ID NO 62177
  misc_feature (1)..(1271): Ortholog of  Ceres SEQ ID NO 13659338 as cited in SEQ ID NO 66875
agaaccgtttgccctctctctctctatcttccttatctctctccgccactctccttctctttctccgaactcttcgatggccggtctactcaaaacgccgtctttacatctcacaccaactcttcttcatgctccttctgtaccctttaagcccttttgcgtatctttcgccggaggaagaaacgttagcgtctcactctctcgccgagcttctctccggtctgtctctagcggctatcctctccgcttactaaacctcgtaccctttgcttcgggagaagctgagacgacggagacggaggtggaatcgaacgaacccgaagttcaggagacggatggtgctgttgatgtcgagaatgaaaatgccagtgctgaggagggtgaagctgaggaagaagaagcagctgttatcacagcgttgctgaaatcctataaagaagctttagcagacaacaacgaggggaagattgctgagatagaagcatctttaaagtccatagaagatgaaaaatttctgcttgcggataaagtagcgtctttatccaatgagttatcggtggagagggatcggcttataagaatcagtgcagatttcgacaacttcaggaagaggactgagagggaaaggctaaaccttgtttcaaatgctcaaggagaggttgtagagaatcttttggctgttttggataatttcgagagagctaaatcccaaattaaggtggagactgagggagaagagaaagtcactaatagctatcagagcatatacaaacagtttgtagaaattctgggatcacttggtgttatccatgtggagacagtcggcaagcagtttgatccaatgctacatgaggcaataatgagagaagactctgcggaatacgaagagggtatagtactagaagaatacaggaaaggtttcttgctaggtgaaaggcttttacgtccttcaatggtgaaagtatcagctggacctggaccagaaaagccccttgaagctgaaggagaagaagccacagcacaaggaagcgcagaagaagaatcatcttcatcttgaaattgaagatgatcaagactcagcagttttgtgtgcgtgtgtgtgagagagatacagagataaaagagggagaggtctgttttaccattattgttgttattgttattgatacgttatatcatttctacagagtctagaagtaatatagatcgacatttttaatgaattcttaagtattcaatccgaaagggaatgccataattgatttttttcc

SEQ ID NO: 39696 - protein, 351 aa, Arabidopsis thaliana
  peptide (1)..(351): Ceres Seq. ID no. 12327726
EPFALSLSIFLISLRHSPSLSPNSSMAGLLKTPSLHLTPTLLHAPSVPFKPFCVSFAGGRNVSVSLSRRASLRSVSSGYPLRLLNLVPFASGEAETTETEVESNEPEVQETDGAVDVENENASAEEGEAEEEEAAVITALLKSYKEALADNNEGKIAEIEASLKSIEDEKFLLADKVASLSNELSVERDRLIRISADFDNFRKRTERERLNLVSNAQGEVVENLLAVLDNFERAKSQIKVETEGEEKVTNSYQSIYKQFVEILGSLGVIHVETVGKQFDPMLHEAIMREDSAEYEEGIVLEEYRKGFLLGERLLRPSMVKVSAGPGPEKPLEAEGEEATAQGSAEEESSSS

SEQ ID NO: 39697 - protein, 326 aa, Arabidopsis thaliana
  peptide (1)..(326): Ceres Seq. ID no. 12327727
MAGLLKTPSLHLTPTLLHAPSVPFKPFCVSFAGGRNVSVSLSRRASLRSVSSGYPLRLLNLVPFASGEAETTETEVESNEPEVQETDGAVDVENENASAEEGEAEEEEAAVITALLKSYKEALADNNEGKIAEIEASLKSIEDEKFLLADKVASLSNELSVERDRLIRISADFDNFRKRTERERLNLVSNAQGEVVENLLAVLDNFERAKSQIKVETEGEEKVTNSYQSIYKQFVEILGSLGVIHVETVGKQFDPMLHEAIMREDSAEYEEGIVLEEYRKGFLLGERLLRPSMVKVSAGPGPEKPLEAEGEEATAQGSAEEESSSS

SEQ ID NO: 39698 - DNA, 1529 bp, Arabidopsis thaliana
  misc_feature (1)..(1529): Ceres Seq. ID no. 13488876
  misc_feature (1)..(1529): Ortholog of  Ceres SEQ ID NO 14303423 as cited in SEQ ID NO 54243
  misc_feature (1)..(1529): Ortholog of  Ceres SEQ ID NO 12611314 as cited in SEQ ID NO 56535
  misc_feature (1)..(1529): Ortholog of  Ceres SEQ ID NO 14312016 as cited in SEQ ID NO 60412
  misc_feature (1)..(1529): Ortholog of  Ceres SEQ ID NO 13661438 as cited in SEQ ID NO 61414
aaaataggcctctccaccaaatctctctctctttctctctgtcacactctttatcactctctgctctcacagatcggagaatctcctctgagagctctaatctctcagctttcttcaccggcgtctccggatctaataatcctgtaaggcctctactgcagaaaaaagattgaatttttacaatttggggtgactcaattttgttgactagagtgtttggagatatttctaactaaatgggaacaatgcaccgcagtggtgctcctcgaagaacgaatgaaaatgcaaaggttattattactactattttggggatagtgtttgggacttttattggtatcacattaccttcactttcgtttaagattaacttaccctcgcgccttatatcatctcttgatgtagccatatctggtgacaaatcccctgaagatttcggttcaagaaagtttcctgagatatatgttccaactaacccgcgtggtgcagaactactacctccaggaatcgttgtggcgaaaactgatttttacttgcgtagattatggggagaacctaatgaagatttgaagaagaagccaaaatatcttgtgacatttacagttggatttgagcagaggaaccatattaatggagttgttaagaagttttctgaagatttccaaattttgctcttccattatgatggccggacaactgaatgggaccaatttgagtggtcgaagagcgcgattcatattagtacaagaaagcaaacaaaatggtggtacgcgaagaggtttttgcatcctgatgttgtgtcagcttatgagtacatatttatatgggatgaagatcttggagtggagcatttcaatgcggataagtacattgagttagttaagaagcatggtttagagatttctcaaccaggcttagagcctaacaatggactcacatgggaaatgacaaagaggagaggtgaccgggaagtccataaagatacaaaagagaaaccaggatggtgtaaagacccacatttacctccatgtgccgcgtttgttgaaataatggcgcctgtattttctcgagaagcatggcgatgtgtgtggcatatgattcagaatgatctggttcatggatggggtctcgactttgcgcttagaagatgcgttgaacctgctcatgagaagattggtgttgtggattcgcaatggataatacataaagtgataccttcacttggaagtcaaggaaagacagagaatgggaaagctccatgacaaggagtgagagatagatgcaaaatggaatggacaatgtttcagaaccgattggctgatgctgataaagagtatcttgggaagatggtgaaagattagatttgtttttcttttttctttctatataattaatatattaaaaaaacttttacttttgtatatcaaatattttacactaaattaggttttcataggacatgtgtgaagccctttttattgatattgtgtaagatttatacattttgattgagctttattatgttgttt

SEQ ID NO: 39699 - protein, 341 aa, Arabidopsis thaliana
  peptide (1)..(341): Ceres Seq. ID no. 13488877
MGTMHRSGAPRRTNENAKVIITTILGIVFGTFIGITLPSLSFKINLPSRLISSLDVAISGDKSPEDFGSRKFPEIYVPTNPRGAELLPPGIVVAKTDFYLRRLWGEPNEDLKKKPKYLVTFTVGFEQRNHINGVVKKFSEDFQILLFHYDGRTTEWDQFEWSKSAIHISTRKQTKWWYAKRFLHPDVVSAYEYIFIWDEDLGVEHFNADKYIELVKKHGLEISQPGLEPNNGLTWEMTKRRGDREVHKDTKEKPGWCKDPHLPPCAAFVEIMAPVFSREAWRCVWHMIQNDLVHGWGLDFALRRCVEPAHEKIGVVDSQWIIHKVIPSLGSQGKTENGKAP

SEQ ID NO: 39700 - protein, 338 aa, Arabidopsis thaliana
  peptide (1)..(338): Ceres Seq. ID no. 13488878
MHRSGAPRRTNENAKVIITTILGIVFGTFIGITLPSLSFKINLPSRLISSLDVAISGDKSPEDFGSRKFPEIYVPTNPRGAELLPPGIVVAKTDFYLRRLWGEPNEDLKKKPKYLVTFTVGFEQRNHINGVVKKFSEDFQILLFHYDGRTTEWDQFEWSKSAIHISTRKQTKWWYAKRFLHPDVVSAYEYIFIWDEDLGVEHFNADKYIELVKKHGLEISQPGLEPNNGLTWEMTKRRGDREVHKDTKEKPGWCKDPHLPPCAAFVEIMAPVFSREAWRCVWHMIQNDLVHGWGLDFALRRCVEPAHEKIGVVDSQWIIHKVIPSLGSQGKTENGKAP

SEQ ID NO: 39701 - DNA, 1196 bp, Arabidopsis thaliana
  misc_feature (1)..(1196): Ceres Seq. ID no. 12331367
  misc_feature (1)..(1196): Ortholog of  Ceres SEQ ID NO 13593831 as cited in SEQ ID NO 53828
atgttttaattttgtttccatcatcttccaaccttgagtttcggtcactataaaaagccaccactctctctgcttctctgcaacacataacccactcacagaaaaacctagaaagctctagagagaaagagagagagagatggaaggtaaagaagaagatgttagagtcggagctaacaagtttccggagaggcaaccgatcggaacttcggctcagagtgacaaggactacaaagagccaccacctgcgccgttgttcgagcccggcgagctagcttcatggtccttctggagagctgggattgctgagtttatagctacgtttttgttcctgtacatcactgttttgactgttatgggtgtgaagaggtcaccgaacatgtgtgcttccgtcggaatccaaggtatcgcttgggctttcggtggtatgatcttcgctctcgtctactgcaccgctggtatctccggtggacacatcaacccagcggttacgttcggtttgttcttagctaggaagctttcgctcacacgagctgtgtactacatagtgatgcagtgcttaggagctatctgtggagctggtgtggtcaaggggttccagccaaagcaataccaggctttgggaggtggagccaacaccatagctcatggctacaccaaaggaagtggtcttggagctgagattattggaacctttgtccttgtttacaccgtcttctctgccactgatgccaagagaaacgctcgtgactctcatgttcctattctagcaccgctccctatcggattcgctgtgttcttggttcacttagcaaccatccccattactggaactggaatcaacccagcaagaagtcttggagctgcaatcatcttcaacaaggacaacgcttgggatgaccactgggtcttttgggttggaccattcattggtgctgcacttgctgctctctaccacgttatagtcatcagagccatcccattcaagtccagaagctaaagctgattgagttctatttaaaatctggcttttgttcttagtttgctttcttttgtgaatctactacctgtgtgtaacgtgtgtatctgttgtcctcttctttgcctaatggagacttatgtaaaacaaagacatgccccagaaacatctgttatctttcttctccattttatcagaggatttctataattggccc

SEQ ID NO: 39702 - protein, 286 aa, Arabidopsis thaliana
  peptide (1)..(286): Ceres Seq. ID no. 12331368
MEGKEEDVRVGANKFPERQPIGTSAQSDKDYKEPPPAPLFEPGELASWSFWRAGIAEFIATFLFLYITVLTVMGVKRSPNMCASVGIQGIAWAFGGMIFALVYCTAGISGGHINPAVTFGLFLARKLSLTRAVYYIVMQCLGAICGAGVVKGFQPKQYQALGGGANTIAHGYTKGSGLGAEIIGTFVLVYTVFSATDAKRNARDSHVPILAPLPIGFAVFLVHLATIPITGTGINPARSLGAAIIFNKDNAWDDHWVFWVGPFIGAALAALYHVIVIRAIPFKSRS

SEQ ID NO: 39703 - protein, 214 aa, Arabidopsis thaliana
  peptide (1)..(214): Ceres Seq. ID no. 12331369
MGVKRSPNMCASVGIQGIAWAFGGMIFALVYCTAGISGGHINPAVTFGLFLARKLSLTRAVYYIVMQCLGAICGAGVVKGFQPKQYQALGGGANTIAHGYTKGSGLGAEIIGTFVLVYTVFSATDAKRNARDSHVPILAPLPIGFAVFLVHLATIPITGTGINPARSLGAAIIFNKDNAWDDHWVFWVGPFIGAALAALYHVIVIRAIPFKSRS

SEQ ID NO: 39704 - protein, 206 aa, Arabidopsis thaliana
  peptide (1)..(206): Ceres Seq. ID no. 12331370
MCASVGIQGIAWAFGGMIFALVYCTAGISGGHINPAVTFGLFLARKLSLTRAVYYIVMQCLGAICGAGVVKGFQPKQYQALGGGANTIAHGYTKGSGLGAEIIGTFVLVYTVFSATDAKRNARDSHVPILAPLPIGFAVFLVHLATIPITGTGINPARSLGAAIIFNKDNAWDDHWVFWVGPFIGAALAALYHVIVIRAIPFKSRS

SEQ ID NO: 39705 - DNA, 1512 bp, Arabidopsis thaliana
  misc_feature (1)..(1512): Ceres Seq. ID no. 12330300
  misc_feature (1)..(1512): Ortholog of  Ceres SEQ ID NO 15172070 as cited in SEQ ID NO 59663
gaaagacgacagcgtttaataatctccttctcttgtcttgcttccttgtgaatcaaaaaccagcgatcaaaagtcttcttcttgtgaatctgtgatctcaaaagctcctttaaccatggcgacttttgatgatggagatttcccagctcaaacccattctccgtctgaacacgaagactttggtggctacgataatttctccgaagcacagcaacctccgactcaacatcaatccggtggattctcttctttcaatggagatcctgcttccccaaatggatatggatttggtgcttcttcacctaaccatgacttttcctcgccttttgaatcttccgttaacgatgctaacggaaacggcggcggcagcggtggtgatgcgatcttcgcttccgatggtccgattcttccagatccaaatgagatgagagaggagggtttccaacgccgtgagtggcgccgtttgaacaccattcaccttgaggagaaggaaaagaaagagaaggagatgcggaatcagatcataactgaagcagaagatttcaagaaagccttctatgagaaaagagacaagaccattgagaccaacaagactgataaccgtgaaaaggagaagctatactgggctaaccaagagaagttccacaaagaagttgacaagcattactggaaagcaattgcagagctaatccctcgtgaggttcccaacattgagaaaaagagagggaaaaaggatccggacaagaaaccatcagtgaatgttattcagggtcctaaacctgggaagccaactgatctagggagaatgaggcagatattcttgaagctcaagacaaatcccccacctcacatgatgccgcctcctcctccagccaaagatgccaaagatgggaaggatgcgaaagatggcaaagatgcaaaaactgggaaagatgggaaggatgcaaaaggagggaaagacgctaaggacttaaaagatgggaaacctgcagatccaaaggtgacagaggaaaaacgtccttcacctgccaaagacgcaagtgttgaaacagcgaaacctgatgctgctgcctcgggagagggagagaaacctgtagctgtgactgaggccgagggaaccaaggcggagtgaagggtctttagtattactgttgggggattatttgatattgatgaagtcacaatagctgcgggcgaaaataagaagaggtaagttatgtgcacatagaagctcttatgggcgctgtctgtgagcacaacatttcctcttctggggagagaattttagtccttttgtttttggttattattttttattaccattatatttgttctgcaaaatttggttattgtcttggatgatgttcaccttaaatcattttggttccacgtattttacatttataagacttgagagaagtaaaggtttgttggatgaatcatttgattgtattgtgtgatgtgggcatgaggtagttgaggagtgtcatggcatgtgaactatctttcttt

SEQ ID NO: 39706 - protein, 338 aa, Arabidopsis thaliana
  peptide (1)..(338): Ceres Seq. ID no. 12330301
MATFDDGDFPAQTHSPSEHEDFGGYDNFSEAQQPPTQHQSGGFSSFNGDPASPNGYGFGASSPNHDFSSPFESSVNDANGNGGGSGGDAIFASDGPILPDPNEMREEGFQRREWRRLNTIHLEEKEKKEKEMRNQIITEAEDFKKAFYEKRDKTIETNKTDNREKEKLYWANQEKFHKEVDKHYWKAIAELIPREVPNIEKKRGKKDPDKKPSVNVIQGPKPGKPTDLGRMRQIFLKLKTNPPPHMMPPPPPAKDAKDGKDAKDGKDAKTGKDGKDAKGGKDAKDLKDGKPADPKVTEEKRPSPAKDASVETAKPDAAASGEGEKPVAVTEAEGTKAE

SEQ ID NO: 39707 - protein, 235 aa, Arabidopsis thaliana
  peptide (1)..(235): Ceres Seq. ID no. 12330302
MREEGFQRREWRRLNTIHLEEKEKKEKEMRNQIITEAEDFKKAFYEKRDKTIETNKTDNREKEKLYWANQEKFHKEVDKHYWKAIAELIPREVPNIEKKRGKKDPDKKPSVNVIQGPKPGKPTDLGRMRQIFLKLKTNPPPHMMPPPPPAKDAKDGKDAKDGKDAKTGKDGKDAKGGKDAKDLKDGKPADPKVTEEKRPSPAKDASVETAKPDAAASGEGEKPVAVTEAEGTKAE

SEQ ID NO: 39708 - protein, 207 aa, Arabidopsis thaliana
  peptide (1)..(207): Ceres Seq. ID no. 12330303
MRNQIITEAEDFKKAFYEKRDKTIETNKTDNREKEKLYWANQEKFHKEVDKHYWKAIAELIPREVPNIEKKRGKKDPDKKPSVNVIQGPKPGKPTDLGRMRQIFLKLKTNPPPHMMPPPPPAKDAKDGKDAKDGKDAKTGKDGKDAKGGKDAKDLKDGKPADPKVTEEKRPSPAKDASVETAKPDAAASGEGEKPVAVTEAEGTKAE

SEQ ID NO: 39709 - DNA, 815 bp, Arabidopsis thaliana
  misc_feature (1)..(815): Ceres Seq. ID no. 12325720
  misc_feature (1)..(815): Ortholog of  Ceres SEQ ID NO 12556792 as cited in SEQ ID NO 37
  misc_feature (1)..(815): Ortholog of  Ceres SEQ ID NO 13594143 as cited in SEQ ID NO 58945
  misc_feature (1)..(815): Ortholog of  Ceres SEQ ID NO 15179171 as cited in SEQ ID NO 0
aacctggcctccacttttgtttttccacttctacggtaagtgaaagagagagagagagaggaaaaaaaaggggaaagcttaagatattggagagtaacaatgccttcaaattcaggagatgataatgttcttcaagttctcataaagaactttgatgtccttgctctcccattggttacactcgtctatcctctatatgcatcagtgaaagcaatagagacaagatcattaccagaagatgaacaatggcttacttactgggttctttacgcacttatctctctctttgaactcactttctccaaacctctcgagtggtttcctatatggccatacatgaagttgtttgggatctgttggttagtgttaccacaattcaatggagcagaacatatctacaaacatttcattagaccattctacagagatcctcaaagagctaccaccaaaatttggtatgttcctcacaagaaattcaatttcttccctaaacgcgacgacgacgacattctcactgctgctgaaaaatacatggaacaacacggtaccgaagcgtttgagcgaatgatcgttaagaaggatagttatgaaagaggtaggagtagtagaggaatcaataatcacatgatctttgatgatgactataggtactaataagttcttaaaccggtttaattagctactttcagtttataagtttgctatgtgacaatatattgtctgtttctatggttgttataatttgcgtggattatgtataagcccttatttaggactgcttatttttgtgaaaaatcaaataaacattttctctc

SEQ ID NO: 39710 - protein, 184 aa, Arabidopsis thaliana
  peptide (1)..(184): Ceres Seq. ID no. 12325721
MPSNSGDDNVLQVLIKNFDVLALPLVTLVYPLYASVKAIETRSLPEDEQWLTYWVLYALISLFELTFSKPLEWFPIWPYMKLFGICWLVLPQFNGAEHIYKHFIRPFYRDPQRATTKIWYVPHKKFNFFPKRDDDDILTAAEKYMEQHGTEAFERMIVKKDSYERGRSSRGINNHMIFDDDYRY

SEQ ID NO: 39711 - protein, 105 aa, Arabidopsis thaliana
  peptide (1)..(105): Ceres Seq. ID no. 12325722
MKLFGICWLVLPQFNGAEHIYKHFIRPFYRDPQRATTKIWYVPHKKFNFFPKRDDDDILTAAEKYMEQHGTEAFERMIVKKDSYERGRSSRGINNHMIFDDDYRY

SEQ ID NO: 39712 - DNA, 1133 bp, Arabidopsis thaliana
  misc_feature (1)..(1133): Ceres Seq. ID no. 13497295
  misc_feature (1)..(1133): Ortholog of  Ceres SEQ ID NO 15171289 as cited in SEQ ID NO 51570
aacaaaaatcatttcgttcttttccaaaatccccaaacaatagaaacgcgttttaaacgatttgattagttttaaattaaaaagaagatccgagcgatgtctggttcgacccggaaagaaatggatcggatcaaaggaccatggagtcctgaagaagacgatctgttacaatcgttggttcagaagcacggaccaaggaactggtctctgataagcaaatcaatccctggacgttccggtaaatcttgccgtctccgttggtgtaatcagctttctccggaggtagagcaccgtggattcacggcggaggaagatgatacgattatactagcgcacgctcggtttggtaacaagtgggcgacgattgcacggcttctcaatggtcgcactgataacgcgattaagaatcactggaactcaacgctgaagcggaaatgtagcggcggaggcggcggaggagaggaagggcagagttgtgatttcggtggtaatggagggtatgatggtaatttaactgatgaaaaaccgttaaaacggagggcgagtggtggaggaggagttgttgtggtgacggcgttaagtccaacgggatctgacgtcagcgagcaatcgcaatctagtggatctgttttaccggtttcttcttcttgtcatgtttttaaaccgacggcgagagctggtggagtggtgattgagtcatcatcgtcggaggaggaggagaaagatccgatgacttgtttgaggttgtctttgccttgggtcaatgagtcaacaactccaccggagttgtttccggtgaagagagaagaagaagaagagaaggaaagagagatttctggacttggtggagattttatgacggtggtgcaggagatgattaagacggaggttaggagttacatggcggatttacagctaggaaacggcggaggagctggaggaggagcaagttcgtgtatggtgcaaggaactaatggtcgtaatgtagggtttagagagtttattggattaggtaggatcgagtagtgagtgagaaaagagaagaattgtgtagcaaatgcagagaaagagccaatttcatgatttgagatttgattcattcgaaaaaaaactgaataaatgtattgattttg

SEQ ID NO: 39713 - protein, 309 aa, Arabidopsis thaliana
  peptide (1)..(309): Ceres Seq. ID no. 13497296
MSGSTRKEMDRIKGPWSPEEDDLLQSLVQKHGPRNWSLISKSIPGRSGKSCRLRWCNQLSPEVEHRGFTAEEDDTIILAHARFGNKWATIARLLNGRTDNAIKNHWNSTLKRKCSGGGGGGEEGQSCDFGGNGGYDGNLTDEKPLKRRASGGGGVVVVTALSPTGSDVSEQSQSSGSVLPVSSSCHVFKPTARAGGVVIESSSSEEEEKDPMTCLRLSLPWVNESTTPPELFPVKREEEEEKEREISGLGGDFMTVVQEMIKTEVRSYMADLQLGNGGGAGGGASSCMVQGTNGRNVGFREFIGLGRIE

SEQ ID NO: 39714 - protein, 301 aa, Arabidopsis thaliana
  peptide (1)..(301): Ceres Seq. ID no. 13497297
MDRIKGPWSPEEDDLLQSLVQKHGPRNWSLISKSIPGRSGKSCRLRWCNQLSPEVEHRGFTAEEDDTIILAHARFGNKWATIARLLNGRTDNAIKNHWNSTLKRKCSGGGGGGEEGQSCDFGGNGGYDGNLTDEKPLKRRASGGGGVVVVTALSPTGSDVSEQSQSSGSVLPVSSSCHVFKPTARAGGVVIESSSSEEEEKDPMTCLRLSLPWVNESTTPPELFPVKREEEEEKEREISGLGGDFMTVVQEMIKTEVRSYMADLQLGNGGGAGGGASSCMVQGTNGRNVGFREFIGLGRIE

SEQ ID NO: 39715 - DNA, 1240 bp, Arabidopsis thaliana
  misc_feature (1)..(1240): Ceres Seq. ID no. 12327606
  misc_feature (1)..(1240): Ortholog of  Ceres SEQ ID NO 13597854 as cited in SEQ ID NO 64292
aggtgggacacggaagctgagctctaatcctgatcggagatggcgactagcgattctgaattcaattctgatcttcttctcgctcacaagcttcccgagacgcgttacacctacaatgaaagagatgtagcaatctatgctttgggaatcggcgcttgtggccaagatgctgtggattccgatgagctcaagtttgtgtatcacagaaatgggcaggatttgatccaggtcttaccaacttttgcttcactattcacacttggatctttgacagaaggactggatttgccaggttttaaatatgatcctagtctcttgttgcatgggcagcagtatattgaaatatacaggccattaccttccaaggcttccttaattaacaaagtaagcctcgctggtttgcaagataaaggtaaagcagctatccttgaattagaaaccagaagttacgaggaagggtcaggggaactgttatgcatgaataggacgactgttttcctaagaggtgctggtggtttctcaaattcatctcaaccattctcttacaaaaactatccaagtaaccagggcttagctgtgaaaatcccacaaagacaacctttgacagtgtgcgaagagcgcactcagccatcgcaggcattactttataggctgtctggtgactataatcctctgcattcagatccagaatttgcaaaacttgccggattcccacgcccgatattgcatgggctatgcacactcgggtttgcaatcaaggcaatcatcaagtgtgtttgcaagggtgacccaactgctgtcaaaaccatatctggacgattcctcacgactgtttttcctggcgaaactctgataaccgaaatgtggcttgaaggcttgagggttatatatcagacgaaagtgaaggaaaggaacaaaactgtgttagctggttatgttgatattcgtgggttatcttcgtcactttagaatgttaggtccttagatatattgggctgtcataatattgcaaaggtaataaacatgtcagaagactcttgatgtttgcttggcgtaatgagccattgagccatcaataaacactctttgatgacggtcacaatttactgaaatggttagttgtatcgtgttactgttgtaataaatgttgagtgacgcaaaatgcacatgccggatgaagcaaaatgcattgaagaaaatcctttttgggtgtcaatgaactggaacataaagcctgagt

SEQ ID NO: 39716 - protein, 309 aa, Arabidopsis thaliana
  peptide (1)..(309): Ceres Seq. ID no. 12327607
MATSDSEFNSDLLLAHKLPETRYTYNERDVAIYALGIGACGQDAVDSDELKFVYHRNGQDLIQVLPTFASLFTLGSLTEGLDLPGFKYDPSLLLHGQQYIEIYRPLPSKASLINKVSLAGLQDKGKAAILELETRSYEEGSGELLCMNRTTVFLRGAGGFSNSSQPFSYKNYPSNQGLAVKIPQRQPLTVCEERTQPSQALLYRLSGDYNPLHSDPEFAKLAGFPRPILHGLCTLGFAIKAIIKCVCKGDPTAVKTISGRFLTTVFPGETLITEMWLEGLRVIYQTKVKERNKTVLAGYVDIRGLSSSL

SEQ ID NO: 39717 - protein, 163 aa, Arabidopsis thaliana
  peptide (1)..(163): Ceres Seq. ID no. 12327608
MNRTTVFLRGAGGFSNSSQPFSYKNYPSNQGLAVKIPQRQPLTVCEERTQPSQALLYRLSGDYNPLHSDPEFAKLAGFPRPILHGLCTLGFAIKAIIKCVCKGDPTAVKTISGRFLTTVFPGETLITEMWLEGLRVIYQTKVKERNKTVLAGYVDIRGLSSSL

SEQ ID NO: 39718 - DNA, 1839 bp, Arabidopsis thaliana
  misc_feature (1)..(1839): Ceres Seq. ID no. 13491552
  misc_feature (1)..(1839): Ortholog of  Ceres SEQ ID NO 13594536 as cited in SEQ ID NO 51382
  misc_feature (1)..(1839): Ortholog of  Ceres SEQ ID NO 15172549 as cited in SEQ ID NO 57185
aaattagttggcaaactccgcctgctcttcgataattccgaggagcttcttcactcttcttaaatctcatttctctctctctctctctctctctctctctctctctctctctctctctctctctctctctctctctctctcgcattgcgattaacgaaattcgaaaaatgtctcgtcttctccaaacacccttcttaccttcagtttccctccccacaaaaacacgatcttccgttacgggtttccgggtaaagcccagaatcatcccaatccaagcaaagatccgagaaatcttcatgcctgcactaagttctacaatgaccgaaggaaaaatcgtctcttgggttaaatcagaaggcgataaactcaacaaaggagagagtgttgttgttgttgaatccgataaagctgatatggatgttgagactttctatgatggttatctagctgcaatcatggttgaagaaggtggtgttgctcctgttggttctgctattgctttgttagctgaaactgaagatgagattgctgatgctaaggctaaagcttctggtggtggaggtgattctaaggctcctcctccggcttctcctcctacggctacagttgtagcacctgtggctgttgagaagaagattgcagctcctcctgtggcgattaaggcggtggcggcgtctgcggtgcatccggcgtctgaaggagggaagaggattgtggcgtctccttatgctaagaagttagctaaggaattgaatgtggaattggctggtttagttggaagtggaccaatgggaaggattgtggctaaagatgttgaggcggttgcagctggaggaggagttcaagctgctgtagctgttaaggaggtagtggcagttcctggtgtggagttgggatcagtggttccgtttacgacaatgcagggggctgtgagtaggaatatggtggagagtcttgctgttcctacttttagagtcggttacacgattagtacggatgctcttgatgctctctacaagaagattaagtcgaaaggtgtgacaatgacggcactcctagcaaaggcaactgcacttgcactggcgaaacatccagttgtaaactcgtcctgtagagatggtaacagttttgtgtataacagtagcatcaacgttgctgttgctgttgctattgatggtggtctgataactcctgtgcttcagaacgctgataaggttgacatttattcgttatctagaaaatggaaagaattggttgataaggctcgagccaagcagctgcagcctcaggagtacaacactggtaccttcactctctctaacctaggaatgtttggcgttgatcggtttgatgctattctaccccctggaacaggagcgattatggctgtaggagcatctcaaccttcagtggttgcaactaaagacggccgcattggcatgaaaaaccagatgcaggtgaatgtgacggcagatcatcgtgtcatctatggtgctgatcttgcacagttcttgcaaacattggcaagcattatagaggacccaaaggaccttacattctaggccaaattactacttttcgcagcccagtcttctctgttcttgattccatgggagcttgtatttctgcggtaatcagtttctttgatagaatcgaacttttaagagtaatgttgaacataatcatttctttgtttgagatatatcttctgcaacattttctgcatggaaaggccgtcccacatgattttgctactgacttcatatatttccacttcatgtgatgaatcttatatgaactgataactttagcatgattaataacatgaatcttatatgg

SEQ ID NO: 39719 - protein, 464 aa, Arabidopsis thaliana; identical to SEQ ID NO: 38965
  peptide (1)..(464): Ceres Seq. ID no. 15222866

SEQ ID NO: 39720 - protein, 421 aa, Arabidopsis thaliana; identical to SEQ ID NO: 38966
  peptide (1)..(421): Ceres Seq. ID no. 15222867

SEQ ID NO: 39721 - protein, 414 aa, Arabidopsis thaliana
  peptide (1)..(414): Ceres Seq. ID no. 15222868
MTEGKIVSWVKSEGDKLNKGESVVVVESDKADMDVETFYDGYLAAIMVEEGGVAPVGSAIALLAETEDEIADAKAKASGGGGDSKAPPPASPPTATVVAPVAVEKKIAAPPVAIKAVAASAVHPASEGGKRIVASPYAKKLAKELNVELAGLVGSGPMGRIVAKDVEAVAAGGGVQAAVAVKEVVAVPGVELGSVVPFTTMQGAVSRNMVESLAVPTFRVGYTISTDALDALYKKIKSKGVTMTALLAKATALALAKHPVVNSSCRDGNSFVYNSSINVAVAVAIDGGLITPVLQNADKVDIYSLSRKWKELVDKARAKQLQPQEYNTGTFTLSNLGMFGVDRFDAILPPGTGAIMAVGASQPSVVATKDGRIGMKNQMQVNVTADHRVIYGADLAQFLQTLASIIEDPKDLTF

SEQ ID NO: 39722 - DNA, 1310 bp, Arabidopsis thaliana
  misc_feature (1)..(1310): Ceres Seq. ID no. 12371052
  misc_feature (1)..(1310): Ortholog of  Ceres SEQ ID NO 13637685 as cited in SEQ ID NO 53978
aagtttctttatcttttagtttcccggtaaaaaatctctctgtcatgtctatgttcttccacgtcgttcctaatctcccaagacagaatctctaaacttcattttgctccttttccacacaaaactttctctccctccaaagaccacaaaaaatgttcttccttccttcaacttcaagtatctctctttattcacacgtatagcatccaaaaccaaaaatccataaccctttcctctgtaaaagtttcttcctttctaacttccccagaaaaaaaaaaaaaaaacattctgttagaaaaccatgagaggtctcgcggcttgttacagtgaacacgccattaaagtatcagatacatattgttcaggtccttcgaatcattcctatatatctccgacattacctccttcaatccccgacacagtaaccaccacttataaatcatatctcccttcttccgacaaacccgtctctgtttcactcacctggtcggataatctcaccgtcgtcatctcaacgccgccgaaatcatactctgtttcactcagaaaacctaaaggatcaagaaagttgacttcttcctccggttcactcaacgccgagatcctatgggatctatcggaagagagtacgaaaacaacggacctgaaccaataagaagattcttcgtcgtcgtcgttgtaaattccgagattaccctcggagtcggcgacgttgaccacgagcgagacacgtcatcatcgtcgtcgtggcgagtctcaaaaacggagagattctctggaacttgttggctcacgacgaaagctcaattctccgacgtcggaaggaaacacgagatacagattcaatgcggcggaggaggaggaggaggaggaggagaggaagggtatttatggaaagtgaaaagtcctgaaacgatgtcggtttatgttgataagaggaaagtgttttcggtgaagaagcttaagtggaactttagagggaatcaaaccatgtttttcgatggaatgcttatagacatgatgtgggatttacacgactggttctacaaagaaacgttgtcgtctgtttcgactagttcatcgtctaaaacggcgtcgtcgtcatcgtcttcttcaacttcatcgtctactcctccgtgtgctgtgtttatgtttaggaggaggagtggttttgatagtagattatggattgatgaagatgaacaagagagtaagatgaagaagaatattggttctagagatgagaaacattcgttttcacttatcatttgtgcctctaaaaagtgaccaaataaacaaataaacatttt

SEQ ID NO: 39723 - protein, 226 aa, Arabidopsis thaliana
  peptide (1)..(226): Ceres Seq. ID no. 12371053
MGSIGREYENNGPEPIRRFFVVVVVNSEITLGVGDVDHERDTSSSSSWRVSKTERFSGTCWLTTKAQFSDVGRKHEIQIQCGGGGGGGGGEEGYLWKVKSPETMSVYVDKRKVFSVKKLKWNFRGNQTMFFDGMLIDMMWDLHDWFYKETLSSVSTSSSSKTASSSSSSSTSSSTPPCAVFMFRRRSGFDSRLWIDEDEQESKMKKNIGSRDEKHSFSLIICASKK

SEQ ID NO: 39724 - protein, 123 aa, Arabidopsis thaliana
  peptide (1)..(123): Ceres Seq. ID no. 12371054
MSVYVDKRKVFSVKKLKWNFRGNQTMFFDGMLIDMMWDLHDWFYKETLSSVSTSSSSKTASSSSSSSTSSSTPPCAVFMFRRRSGFDSRLWIDEDEQESKMKKNIGSRDEKHSFSLIICASKK

SEQ ID NO: 39725 - protein, 117 aa, Arabidopsis thaliana
  peptide (1)..(117): Ceres Seq. ID no. 12371055
MRGLAACYSEHAIKVSDTYCSGPSNHSYISPTLPPSIPDTVTTTYKSYLPSSDKPVSVSLTWSDNLTVVISTPPKSYSVSLRKPKGSRKLTSSSGSLNAEILWDLSEESTKTTDLNQ

SEQ ID NO: 39726 - DNA, 1226 bp, Arabidopsis thaliana
  misc_feature (1)..(1226): Ceres Seq. ID no. 12562726
  misc_feature (1)..(1226): Ortholog of  Ceres SEQ ID NO 13597757 as cited in SEQ ID NO 65472
attcactgattattgttttaaggcaaattaagatcatcttcaaaatcttctcagatctcttccaattntctagaaaaaacatgtcttgctgtggtggaagctgtggttgtggatctgcctgcaagtgcggcaatggttgcggagcgttgcaaaaggtaccctgacttggagaacaccgccaccgagactcttgtcctcggtgttgctccggcgatgaactctcagtacgaggcttccggcgagactttcgttgccgagaatgatgcctgcaaatgcaggcaggatccacaaccacagcttccaccagctaaagggaagaagatcaacgaagagcgtgaagatcgccgtacgctaggtttagtgttgcttagaggtgaagaagttatctcaatgactgtcgaaggaccacctcctcctgaagaatctcgtgctaaagctggctctgcagctgctgttgctggtccaggaattggccgtgccgctgggcgtggagttcctactggtccgttagttcaagctcagcctggtttatctggtcctgttcgtggtgttggtggacctgctccgggaatgatgcagcctcagatctctcgtccaccacagctttcagctcctccgattattcgacctccgggacagatgttgccaccgcctccttttggtggtcaaggtcctcctatgggaagaggtcctccaccgccttatggtatgaggccaccgccacagcagttttctggaccaccaccgcctcagtatgggcaaaggccaatgattcctcctcctggtggtatgatgagaggacctcctcctccacctcatggaatgcaaggacctcctccgcctcgccctggaatgcctcctgctcctggtggttttgctccaccgcgtcctggcatgccaccacataatcagcagcagtgattaggttagcagtgaatgaacaggactcttgtctcggctttttactgtttttgtcgctgttttcttgagattatgaaggctttaagatgtttgattgaacttcctcaggtttacggtatcgtgctatcatgttgcctttcattgactttagccgcaatttctcatctatcttagctttcaaagtttgtagatttgttgacgagtgagttgtctttgccttatcttcttgtgttttcttttaagaacgaatccattaaactttgttatgacttcttaaggtgaacatctatcttgaggatcgtttt

SEQ ID NO: 39727 - protein, 262 aa, Arabidopsis thaliana
  peptide (1)..(262): Ceres Seq. ID no. 12562727
MVAERCKRYPDLENTATETLVLGVAPAMNSQYEASGETFVAENDACKCRQDPQPQLPPAKGKKINEEREDRRTLGLVLLRGEEVISMTVEGPPPPEESRAKAGSAAAVAGPGIGRAAGRGVPTGPLVQAQPGLSGPVRGVGGPAPGMMQPQISRPPQLSAPPIIRPPGQMLPPPPFGGQGPPMGRGPPPPYGMRPPPQQFSGPPPPQYGQRPMIPPPGGMMRGPPPPPHGMQGPPPPRPGMPPAPGGFAPPRPGMPPHNQQQ

SEQ ID NO: 39728 - protein, 235 aa, Arabidopsis thaliana
  peptide (1)..(235): Ceres Seq. ID no. 12562728
MNSQYEASGETFVAENDACKCRQDPQPQLPPAKGKKINEEREDRRTLGLVLLRGEEVISMTVEGPPPPEESRAKAGSAAAVAGPGIGRAAGRGVPTGPLVQAQPGLSGPVRGVGGPAPGMMQPQISRPPQLSAPPIIRPPGQMLPPPPFGGQGPPMGRGPPPPYGMRPPPQQFSGPPPPQYGQRPMIPPPGGMMRGPPPPPHGMQGPPPPRPGMPPAPGGFAPPRPGMPPHNQQQ

SEQ ID NO: 39729 - protein, 176 aa, Arabidopsis thaliana; identical to SEQ ID NO: 23260
  peptide (1)..(176): Ceres Seq. ID no. 12562729

SEQ ID NO: 39730 - DNA, 1134 bp, Arabidopsis thaliana
  misc_feature (1)..(1134): Ceres Seq. ID no. 13489091
  misc_feature (1)..(1134): Ortholog of  Ceres SEQ ID NO 14314068 as cited in SEQ ID NO 52242
  misc_feature (1)..(1134): Ortholog of  Ceres SEQ ID NO 14314999 as cited in SEQ ID NO 52342
  misc_feature (1)..(1134): Ortholog of  Ceres SEQ ID NO 15177057 as cited in SEQ ID NO 55817
  misc_feature (1)..(1134): Ortholog of  Ceres SEQ ID NO 13585458 as cited in SEQ ID NO 60907
  misc_feature (1)..(1134): Ortholog of  Ceres SEQ ID NO 13598678 as cited in SEQ ID NO 61508
  misc_feature (1)..(1134): Ortholog of  Ceres SEQ ID NO 12625392 as cited in SEQ ID NO 63315
  misc_feature (1)..(1134): Ortholog of  Ceres SEQ ID NO 13598319 as cited in SEQ ID NO 68758
  misc_feature (1)..(1134): Ortholog of  Ceres SEQ ID NO 12589816 as cited in SEQ ID NO 0
tcacttctccactttttttctcggttagtgtcagtttttttgttggctagtctcttcggtcaaaatgcagctctttccggtcatcctaccgacactatgcgtcttcctccaccttctaataagtggctctggctctactccaccgttgactcactccaatcaacaagtggcagccactcgttggcttcccgccaccgcaacctggtacggaagtgccgagggagacggcagcagcggaggagcttgtggttacggatcgttggtggacgtgaagccgtttaaggctagagtcggagcggtgagtccgattctgttcaaaggtggtgaaggctgcggtgcatgctacaaggtcaggtgtctcgacaagaccatttgctctaagagagcagtcaccattattgccaccgaccagtcaccgtcaggaccatctgctaaagcaaaacacactcatttcgacctcagtggcgccgcctttggacatatggctattcccggccataacggtgtcatccgcaaccgtggcctattaaacatcctctaccgccgaacggcatgcaaatacagagggaagaacatagcgtttcatgtgaacgcaggatcaactgattattggttatcgcttctcattgagtatgaagacggtgaaggagacattggctctatgcacattcgtcaagcgggatctaaggagtggatatcgatgaagcacatatggggagcgaactggtgcatcgtcgaaggaccactcaagggaccattctccgtgaagctcacaactttgtccaacaataagacactctccgccaccgacgtcatccccagtaactgggttcccaaagctacttacacctctcgcctcaacttctcccctgttctctaattagcctctcttcaaaaaaattttgttgtgggagagaggaacacagagaagacaatgagtgagccatctccaaagttaggggattaagagcttttcattgtgtgtgtgactactaacattctatgttgtcccttttcatttttttccttctccatagggatgtgtgtatcatctataatgttgtttgtgggacattactatataagaatttacaaaagatgtaataatgtaatatgcaatctcattcctttttt

SEQ ID NO: 39731 - protein, 271 aa, Arabidopsis thaliana
  peptide (1)..(271): Ceres Seq. ID no. 13489092
MQLFPVILPTLCVFLHLLISGSGSTPPLTHSNQQVAATRWLPATATWYGSAEGDGSSGGACGYGSLVDVKPFKARVGAVSPILFKGGEGCGACYKVRCLDKTICSKRAVTIIATDQSPSGPSAKAKHTHFDLSGAAFGHMAIPGHNGVIRNRGLLNILYRRTACKYRGKNIAFHVNAGSTDYWLSLLIEYEDGEGDIGSMHIRQAGSKEWISMKHIWGANWCIVEGPLKGPFSVKLTTLSNNKTLSATDVIPSNWVPKATYTSRLNFSPVL

SEQ ID NO: 39732 - DNA, 1313 bp, Arabidopsis thaliana
  misc_feature (1)..(1313): Ceres Seq. ID no. 12328800
  misc_feature (1)..(1313): Ortholog of  Ceres SEQ ID NO 15169350 as cited in SEQ ID NO 53271
tttttttttgagtggtactgataggtacaagaaacacaacaaaccctagatttatcttcatctctctcaattctgtatcaagcaaagacggattcaacgatgtcttcacctgaatcaccttccggttccgactcatccacaccacttatccgttcacggcaatcatcaccacgtcgtcaacctgtaatcgcggttctattaaatcgagcttcaggacgacgaggagcttcgatggtggttagagaaacagctgcacaagagcttgaagagcgacgagctgattggggttactcgaaacctgttgttgctttggatatgctttggaacactgcttttgttcttgttgcgattgttatgcttttggtttttaaagaagagaagccaaatgttcctattaggatttggatctgtggttatgcgattcagtgtcttgttcatgttgtccttgtttggcttgagtttagaaagaggaatgctagaagcagacctggagatttagaagctgctcaagctacgaatcaggatagtgaagatgaagacaacgatgagaggtttctgagcactaagacttgtgaatcaatgaacactataatatcatttgtctggtggattgttggattctactggcttgtttctggtggtgatatccttctgcaaaacgcgacgcatttgtattggttaacctttgttttccttgcatttgatgtgttctttgccatcttttgcgttgtgctggcatgtcttattggaatcgccctctgttgttgcctaccttgtattattgctcttctttacgccgtcgcggggcaggagggtgcatcagaagcagatctcagcatccttcccaagtacaggtttcacacgatgaacaatgatgaaaagcaaagtgacggtggtgggaaaatgatacctgtggatgcagcgagtgagaatttaggaaacgagcgtgtgcttcttcccgaggatgctgactgttgtatatgtttgagttcatatgaagatggagcagagctggtctcacttccttgcaaccaccactttcattctacgtgcattgtgaaatggctgaaaatgaatgcgacatgtccactatgcaagttcaatatcctcaaaggtaatgaacaagaatgaagtaatgtagaggaaacttttcttctttttatgttgtgtttctttttgttgtatatagagtagagaaaaaagaaaatgattgtgttgtttgtaagtcataagacagtttgtttctttgttgaaatttgttgtcaattctctttttttttttatcaaataataatagatatattcatcatgtc

SEQ ID NO: 39733 - protein, 343 aa, Arabidopsis thaliana
  peptide (1)..(343): Ceres Seq. ID no. 12328801
MSSPESPSGSDSSTPLIRSRQSSPRRQPVIAVLLNRASGRRGASMVVRETAAQELEERRADWGYSKPVVALDMLWNTAFVLVAIVMLLVFKEEKPNVPIRIWICGYAIQCLVHVVLVWLEFRKRNARSRPGDLEAAQATNQDSEDEDNDERFLSTKTCESMNTIISFVWWIVGFYWLVSGGDILLQNATHLYWLTFVFLAFDVFFAIFCVVLACLIGIALCCCLPCIIALLYAVAGQEGASEADLSILPKYRFHTMNNDEKQSDGGGKMIPVDAASENLGNERVLLPEDADCCICLSSYEDGAELVSLPCNHHFHSTCIVKWLKMNATCPLCKFNILKGNEQE

SEQ ID NO: 39734 - protein, 299 aa, Arabidopsis thaliana
  peptide (1)..(299): Ceres Seq. ID no. 12328802
MVVRETAAQELEERRADWGYSKPVVALDMLWNTAFVLVAIVMLLVFKEEKPNVPIRIWICGYAIQCLVHVVLVWLEFRKRNARSRPGDLEAAQATNQDSEDEDNDERFLSTKTCESMNTIISFVWWIVGFYWLVSGGDILLQNATHLYWLTFVFLAFDVFFAIFCVVLACLIGIALCCCLPCIIALLYAVAGQEGASEADLSILPKYRFHTMNNDEKQSDGGGKMIPVDAASENLGNERVLLPEDADCCICLSSYEDGAELVSLPCNHHFHSTCIVKWLKMNATCPLCKFNILKGNEQE

SEQ ID NO: 39735 - protein, 271 aa, Arabidopsis thaliana
  peptide (1)..(271): Ceres Seq. ID no. 12328803
MLWNTAFVLVAIVMLLVFKEEKPNVPIRIWICGYAIQCLVHVVLVWLEFRKRNARSRPGDLEAAQATNQDSEDEDNDERFLSTKTCESMNTIISFVWWIVGFYWLVSGGDILLQNATHLYWLTFVFLAFDVFFAIFCVVLACLIGIALCCCLPCIIALLYAVAGQEGASEADLSILPKYRFHTMNNDEKQSDGGGKMIPVDAASENLGNERVLLPEDADCCICLSSYEDGAELVSLPCNHHFHSTCIVKWLKMNATCPLCKFNILKGNEQE

SEQ ID NO: 39736 - DNA, 1683 bp, Arabidopsis thaliana
  misc_feature (1)..(1683): Ceres Seq. ID no. 13491363
  misc_feature (1)..(1683): Ortholog of  Ceres SEQ ID NO 12613725 as cited in SEQ ID NO 68196
atggctggaggagagaaaagaagaggacttagtaaatcttgtgctcttctcatagtgattgctgggatagagagatatgcattcaaaggagttgcatcaaacttagtgacatatctaactgatgtagtgaagatgagcaattcaagagcagccacgactgtgaacacttggagtggcttcactttcatgttgcctctcttctctgctccttttgccgattcttattgggacagattcttcaccatccttgcttcttcttctctctactttgtgggtctagtgggattgacatttacggcatttgctgggtcacgttcgactacaaaaacaatctctctttacttcctctacacttcactttccctcgtcgctctaggccttggcgtcttaaacccatctctacaagcctttggtgctgaccagctcgactacgaccttgaccatgacaatgaccacgagccatcctcagagaacaaagaagtcaaatcgaaccgcaagactcagtttttccaatggtggtattttggtgtctgcgccggtagtcttctaggagtcaccgtcatggcttacatccaagacacgtttggatgggttatcggttttgcaatcccaaccgcttcgatgttgttgttgatcttcttgttcttgtgtggctgcggggtctatgtttatgctgatccagacctcaaagctaaaccatttcaaaggatattagagattatcaaagaaagagtgtgtggaagaaataagatcactcttgttaacgaccacgatttaaatgccatggaactagagctgcaagatcagaagcctctatgtaactgtagcaacactgaagctaatactactaccaagagcttacctgatgatcataaaagctgcaaaaccggtttttcggggcttgaaaccgtcaagctattgcttcgacttttacctatatggacgatgcttcttatgtttgcagttatattccaacaacccgcgacctttttcacaaagcaaggtatgactatgaagagaaacatcggaccaaacttcaagatcccaccagcaacactacaaagcactatcactttatccataatccttcttatgcccttctacgacaaaatcttgataccgatcgccaaaaaactaacgaaaaacgaaaagggtatttctgtgaaggaaagaatggggattgggatgttcctgtccatcatcgccattgttattgccgcgttagtcgaaagaaaaagactaaagataagcaaaatgatgaagactacacctaatttggaccccgtaagcatattgtggctcctacctcagtacattctattgggaatctcggacattttcacagttgttggaatgcaagagttcttctacagcgaggttcctgttagcatgagaacaatgggatttgctttgtacacaagcgttttcggtgtggggagttttgtgagtgctgcgttgatttcgataatagagacttacacgagctcaagaggtggaaaacataactggtttgcagatgatatgtcggaagctagacttgataactattattggcttttggctttcacaagtgctattagcttcttgatgtatattgttatttgcaagcatttcaagagtagaagtgatgatgatgatcaatgtgatacaaattgttaataaactaaagaaacacctcttttt

SEQ ID NO: 39737 - protein, 552 aa, Arabidopsis thaliana
  peptide (1)..(552): Ceres Seq. ID no. 13491364
MAGGEKRRGLSKSCALLIVIAGIERYAFKGVASNLVTYLTDVVKMSNSRAATTVNTWSGFTFMLPLFSAPFADSYWDRFFTILASSSLYFVGLVGLTFTAFAGSRSTTKTISLYFLYTSLSLVALGLGVLNPSLQAFGADQLDYDLDHDNDHEPSSENKEVKSNRKTQFFQWWYFGVCAGSLLGVTVMAYIQDTFGWVIGFAIPTASMLLLIFLFLCGCGVYVYADPDLKAKPFQRILEIIKERVCGRNKITLVNDHDLNAMELELQDQKPLCNCSNTEANTTTKSLPDDHKSCKTGFSGLETVKLLLRLLPIWTMLLMFAVIFQQPATFFTKQGMTMKRNIGPNFKIPPATLQSTITLSIILLMPFYDKILIPIAKKLTKNEKGISVKERMGIGMFLSIIAIVIAALVERKRLKISKMMKTTPNLDPVSILWLLPQYILLGISDIFTVVGMQEFFYSEVPVSMRTMGFALYTSVFGVGSFVSAALISIIETYTSSRGGKHNWFADDMSEARLDNYYWLLAFTSAISFLMYIVICKHFKSRSDDDDQCDTNC

SEQ ID NO: 39738 - protein, 508 aa, Arabidopsis thaliana
  peptide (1)..(508): Ceres Seq. ID no. 13491365
MSNSRAATTVNTWSGFTFMLPLFSAPFADSYWDRFFTILASSSLYFVGLVGLTFTAFAGSRSTTKTISLYFLYTSLSLVALGLGVLNPSLQAFGADQLDYDLDHDNDHEPSSENKEVKSNRKTQFFQWWYFGVCAGSLLGVTVMAYIQDTFGWVIGFAIPTASMLLLIFLFLCGCGVYVYADPDLKAKPFQRILEIIKERVCGRNKITLVNDHDLNAMELELQDQKPLCNCSNTEANTTTKSLPDDHKSCKTGFSGLETVKLLLRLLPIWTMLLMFAVIFQQPATFFTKQGMTMKRNIGPNFKIPPATLQSTITLSIILLMPFYDKILIPIAKKLTKNEKGISVKERMGIGMFLSIIAIVIAALVERKRLKISKMMKTTPNLDPVSILWLLPQYILLGISDIFTVVGMQEFFYSEVPVSMRTMGFALYTSVFGVGSFVSAALISIIETYTSSRGGKHNWFADDMSEARLDNYYWLLAFTSAISFLMYIVICKHFKSRSDDDDQCDTNC

SEQ ID NO: 39739 - protein, 490 aa, Arabidopsis thaliana
  peptide (1)..(490): Ceres Seq. ID no. 13491366
MLPLFSAPFADSYWDRFFTILASSSLYFVGLVGLTFTAFAGSRSTTKTISLYFLYTSLSLVALGLGVLNPSLQAFGADQLDYDLDHDNDHEPSSENKEVKSNRKTQFFQWWYFGVCAGSLLGVTVMAYIQDTFGWVIGFAIPTASMLLLIFLFLCGCGVYVYADPDLKAKPFQRILEIIKERVCGRNKITLVNDHDLNAMELELQDQKPLCNCSNTEANTTTKSLPDDHKSCKTGFSGLETVKLLLRLLPIWTMLLMFAVIFQQPATFFTKQGMTMKRNIGPNFKIPPATLQSTITLSIILLMPFYDKILIPIAKKLTKNEKGISVKERMGIGMFLSIIAIVIAALVERKRLKISKMMKTTPNLDPVSILWLLPQYILLGISDIFTVVGMQEFFYSEVPVSMRTMGFALYTSVFGVGSFVSAALISIIETYTSSRGGKHNWFADDMSEARLDNYYWLLAFTSAISFLMYIVICKHFKSRSDDDDQCDTNC

SEQ ID NO: 39740 - DNA, 1422 bp, Arabidopsis thaliana
  misc_feature (1)..(1422): Ceres Seq. ID no. 12328804
  misc_feature (1)..(1422): Ortholog of  Ceres SEQ ID NO 13595321 as cited in SEQ ID NO 56260
  misc_feature (1)..(1422): Ortholog of  Ceres SEQ ID NO 14312270 as cited in SEQ ID NO 59086
  misc_feature (1)..(1422): Ortholog of  Ceres SEQ ID NO 14303177 as cited in SEQ ID NO 66365
acgttacgtattagcttatagccattagttttgtctcttcttcttcttctcgttggtcggcttcttcgtcttactaattccatgattcttcttcttccttctgcttcactttctcgatgatcctctgcaccagccgcgatcatgacgttgaatcctcctccgtcgcagcaaacgtctcactcgccgcgtcggattcccaatcgccgcgttctcatcgtcggaaattattgccacgacgttttaatccaaaacggatccgtcgtagctgaaactctcggcggcgccgcctctttcatatctaatgtcttagattcttcctctgtctcctgcgatttggtctccaaagtaggacacgacttcagatacgaggtcacccactctccgatcgtggctccggagaaggaaacaacagttttcgaggcgtatttcgatctgggaatcgatgggatcggtcatgctgatcgggtgttgaaaagagtctctgcatgtgatccgattcttccttcggatatacccgattcgagatttgatttcggaatggccgttggagtcggcggcgagattttaccggagacgcttgagaaaatggtggagatctgtgacgttgttgctgtggatattcaagctttgattagggtttttgatcctgttgacggagctgtgaagcttgttgatttgaaagaaagtggattttatcacatcttgcatcgaattggattcttgaaagcttcgtcagacgaagctcttttcatggatgttgaacaaatgaagcacttgtgttgtgtggtggtgactaatggtgaaaaagggtgtaggatttatcataaggatgatgaaatgacggttcctccgttcttggcgaagcaggtggatcctaccggtgccggagacagctttctcggaggtttgattgttgggcttgttgaaggtttgactgttcctgatgctgcattgttagggaacctctttggttccatcactgtagagcatattggtcagccaaagttcgatttgatgatgcttcagaaagtcaaggatgaggtacagagaaggaagaagcagtgtaacatatctagcagccataacaacgatcacaacgagttccatgagcgtctaagtccagctcggttttcatgcgtagactctcaacttcaaccaaagttattggtcaatggtcactcttgtgatgatcggtccctgtgaatacgaatcttgaatcaccttttttttactaacaaagctcttctgagttgtgtaagcttgcttcaacacgttgatgaattttggaaattttaatgtataaaacgcgttgaccagcgtcttcaaacgctctttctggtcgttcccgcaaagtttgtttatcaactccgcgtttcaaaattcgaaatgaagatgtcaaattttgttttaaaagttttggat

SEQ ID NO: 39741 - protein, 353 aa, Arabidopsis thaliana
  peptide (1)..(353): Ceres Seq. ID no. 12328805
MTLNPPPSQQTSHSPRRIPNRRVLIVGNYCHDVLIQNGSVVAETLGGAASFISNVLDSSSVSCDLVSKVGHDFRYEVTHSPIVAPEKETTVFEAYFDLGIDGIGHADRVLKRVSACDPILPSDIPDSRFDFGMAVGVGGEILPETLEKMVEICDVVAVDIQALIRVFDPVDGAVKLVDLKESGFYHILHRIGFLKASSDEALFMDVEQMKHLCCVVVTNGEKGCRIYHKDDEMTVPPFLAKQVDPTGAGDSFLGGLIVGLVEGLTVPDAALLGNLFGSITVEHIGQPKFDLMMLQKVKDEVQRRKKQCNISSSHNNDHNEFHERLSPARFSCVDSQLQPKLLVNGHSCDDRSL

SEQ ID NO: 39742 - protein, 221 aa, Arabidopsis thaliana
  peptide (1)..(221): Ceres Seq. ID no. 12328806
MAVGVGGEILPETLEKMVEICDVVAVDIQALIRVFDPVDGAVKLVDLKESGFYHILHRIGFLKASSDEALFMDVEQMKHLCCVVVTNGEKGCRIYHKDDEMTVPPFLAKQVDPTGAGDSFLGGLIVGLVEGLTVPDAALLGNLFGSITVEHIGQPKFDLMMLQKVKDEVQRRKKQCNISSSHNNDHNEFHERLSPARFSCVDSQLQPKLLVNGHSCDDRSL

SEQ ID NO: 39743 - protein, 205 aa, Arabidopsis thaliana
  peptide (1)..(205): Ceres Seq. ID no. 12328807
MVEICDVVAVDIQALIRVFDPVDGAVKLVDLKESGFYHILHRIGFLKASSDEALFMDVEQMKHLCCVVVTNGEKGCRIYHKDDEMTVPPFLAKQVDPTGAGDSFLGGLIVGLVEGLTVPDAALLGNLFGSITVEHIGQPKFDLMMLQKVKDEVQRRKKQCNISSSHNNDHNEFHERLSPARFSCVDSQLQPKLLVNGHSCDDRSL

SEQ ID NO: 39744 - DNA, 1137 bp, Arabidopsis thaliana
  misc_feature (1)..(1137): Ceres Seq. ID no. 13497222
  misc_feature (1)..(1137): Ortholog of  Ceres SEQ ID NO 13582052 as cited in SEQ ID NO 59823
  misc_feature (1)..(1137): Ortholog of  Ceres SEQ ID NO 13659378 as cited in SEQ ID NO 67014
  misc_feature (1)..(1137): Ortholog of  Ceres SEQ ID NO 13599365 as cited in SEQ ID NO 0
aagataaaaacctaaaatccatcttcgttgtcgtttcgtctgcttcacatcggaaagctacatctttttcgttttttgtggtggcgatttctattctccggctgaaacctaccttcaggattcagcctttctcaggttttcagttggattcagatagcagcttgtacttcttctagataatcggcgacacatatggatgattgggaggccgaggactttcaaccacttccctcaaaagttgaactgaaaagtaactgggatgatgaggatgtggatgagaatgatatcaaggactcgtgggaggaggaagatgtatctgctccgccacctatagtaaagcctgcttctgagaaggctccaaagaaaccagcagtaaaagctgttgaaaagaaggttaaaactgttgaagctccgaaaggaacatcaagggaagaacctctagatcctattgctgagaaacttcgcatgcagaggcttgtagaggaagctgattaccaatcaactgctgaactctttggagtaaagactgaagagaaaagcgtcgatatgttaattccgaagtctgaaagcgatttcttggattatgctgagttgatatctcagagacttgtaccatttgagaaaagctttcactatatcgggctactcaaagcagtgatgagactttctgtggctaatatgaaagcagcagatgttaaagacgttgcttcgtccattacagctatagcaaatgaaaaattgaaggcggagaaagaagctgctgctggcaaaaagaagtcaggtaagaagaaacaacttcatgttgataagcctgatgatgatcttgtttcgggtccttatgatgccatggacgatgatgatttcatgtgagaaaatggcaattttggagattgcattttacctcctataggattgtaactgagaagaggtttaaatcgtcggcggttttttgttttgtatactgaattgcaaaagtgtttttcttctgttttctttgctcggtttgatttaaaaatttgtgtaataagatttgttgtgggcacactatttcctattatatgaattgaacgagtactaagagcacggcctatgattcacttagaatttgaagccacattagtaagataagttttcgat

SEQ ID NO: 39745 - protein, 225 aa, Arabidopsis thaliana
  peptide (1)..(225): Ceres Seq. ID no. 13497223
MDDWEAEDFQPLPSKVELKSNWDDEDVDENDIKDSWEEEDVSAPPPIVKPASEKAPKKPAVKAVEKKVKTVEAPKGTSREEPLDPIAEKLRMQRLVEEADYQSTAELFGVKTEEKSVDMLIPKSESDFLDYAELISQRLVPFEKSFHYIGLLKAVMRLSVANMKAADVKDVASSITAIANEKLKAEKEAAAGKKKSGKKKQLHVDKPDDDLVSGPYDAMDDDDFM

SEQ ID NO: 39746 - protein, 134 aa, Arabidopsis thaliana
  peptide (1)..(134): Ceres Seq. ID no. 13497224
MQRLVEEADYQSTAELFGVKTEEKSVDMLIPKSESDFLDYAELISQRLVPFEKSFHYIGLLKAVMRLSVANMKAADVKDVASSITAIANEKLKAEKEAAAGKKKSGKKKQLHVDKPDDDLVSGPYDAMDDDDFM

SEQ ID NO: 39747 - DNA, 616 bp, Arabidopsis thaliana
  misc_feature (1)..(616): Ceres Seq. ID no. 12338942
  misc_feature (1)..(616): Ortholog of  Ceres SEQ ID NO 12617197 as cited in SEQ ID NO 63406
  misc_feature (1)..(616): Ortholog of  Ceres SEQ ID NO 13597804 as cited in SEQ ID NO 64182
  misc_feature (1)..(616): Ortholog of  Ceres SEQ ID NO 13598565 as cited in SEQ ID NO 65250
  misc_feature (1)..(616): Ortholog of  Ceres SEQ ID NO 13598597 as cited in SEQ ID NO 65496
  misc_feature (1)..(616): Ortholog of  Ceres SEQ ID NO 13596284 as cited in SEQ ID NO 68273
  misc_feature (1)..(616): Ortholog of  Ceres SEQ ID NO 14308995 as cited in SEQ ID NO 0
atcgaaaaaaagagcatcctattaagttgctaaagagagagacgccaatggctgtaaagcaaaaggtctgtgttactggtgcaggaggatttattgcttcatggctcgtcaagtttcttctctctcgtggctacactgtccatggaaccgttcgagatccttgtgatgaaaagaatgaccatttgaggaaactggataatgcttcaaaaaatctgaaacttttcaaggcagatttgtttgattatgaaggtcttttctcagccattgatggttgctctggcgttttccatatcgcttctcctgtgccttttgaaggagttcctgtcacagaggaagaactgattaaaccagctctcactggcaccaagaatgttctagaagcatgcacagaaaccaaagtgcagaaagttgtggttgtatcatcaatcgctgcagttgtttacaatccaaaatggcctcaagatgttgctaaggacgaggattgttggtcagacactcaataccttcactcacttgagggttattggcgttattactatcttgcaaaaacattaacggaacgtgaagctttagagtggagtaagaaaaactttgctgatgttgttacgctctgtcc

SEQ ID NO: 39748 - protein, 204 aa, Arabidopsis thaliana
  peptide (1)..(204): Ceres Seq. ID no. 12338943
RKKEHPIKLLKRETPMAVKQKVCVTGAGGFIASWLVKFLLSRGYTVHGTVRDPCDEKNDHLRKLDNASKNLKLFKADLFDYEGLFSAIDGCSGVFHIASPVPFEGVPVTEEELIKPALTGTKNVLEACTETKVQKVVVVSSIAAVVYNPKWPQDVAKDEDCWSDTQYLHSLEGYWRYYYLAKTLTEREALEWSKKNFADVVTLC

SEQ ID NO: 39749 - protein, 189 aa, Arabidopsis thaliana
  peptide (1)..(189): Ceres Seq. ID no. 12338944
MAVKQKVCVTGAGGFIASWLVKFLLSRGYTVHGTVRDPCDEKNDHLRKLDNASKNLKLFKADLFDYEGLFSAIDGCSGVFHIASPVPFEGVPVTEEELIKPALTGTKNVLEACTETKVQKVVVVSSIAAVVYNPKWPQDVAKDEDCWSDTQYLHSLEGYWRYYYLAKTLTEREALEWSKKNFADVVTLC

SEQ ID NO: 39750 - DNA, 1463 bp, Arabidopsis thaliana
  misc_feature (1)..(1463): Ceres Seq. ID no. 13488914
  misc_feature (1)..(1463): Ortholog of  Ceres SEQ ID NO 13503499 as cited in SEQ ID NO 68684
aataaaatccaacttcttctccttcaagaatctagagatagagagagagagagaacacaaagtgggaaaaaagataagaacccaccataaagtttttacatttctccctttaaaaggcgaaagcttttgatttgtataaaagtcccacttaatcacctctctagcttctcattccatttccatctcctctcttttgttttctaagttgcttcaagagttttggatagtgtagcagagagattttaactaatgggtttataaaattttgttcttttgcgtgaacaagttgtcaacttctagacagattttctttttgaagtgttttcttgtcgaaattcttcttcttttggtcaaagaacgcaagattcttctgtagttcctctaaaaaaaatcctaatggagggttattcaagaaacggtgaaatctctccgaagctgcttgacttgatgattccacaagagagaagaaattggtttcacgatgagaaaaactctgttttcaaaacagaggagaagaagcttgagctaaagcttggaccacctggtgaagaagatgatgatgaatcgatgataagacacatgaagaaagaaccaaaagacaaatctatcctctctctcgctggcaaatacttctctccttcttccaccaaaaccacatcccataaaagaactgctcctggtccagtggtgggatggcctccggttcgatccttcaggaagaatttagctagtggaagttcttcaaagcttggaaatgactcaaccacctccaatggtgttaccctcaagaaccaaaagtgtgatgctgctgctaagacaacagaaccaaagagacaaggaggcatgtttgtgaagatcaacatgtatggtgttcccattggtcgtaaagttgatctcagtgctcataatagctatgagcagttatctttcacagttgacaagctcttcagaggtcttcttgcagctcaaagagactttccatcatccatagaagatgaaaaaccaatcactggattattagatgggaatggagaatatactcttacatatgaagacaatgaaggagacaagatgcttgtaggagatgttccatggcaaatgtttgtgtcttcggtgaagaggctgcgtgtgattaaaacttctgagatttcttcagcattaacatatggaaatggtaagcaagagaaaatgagaagatgaagaaaaagatcttttacagcttttaaagaagtagagagatgttattaattgcattttgcctttaaactttgatgagtttttggtcttggaaaagtttctgatataagtctgatgtacattctggtttgttacatcttcttttggcttttgagatatcatagagttttgttggaactcaaagaccaaacagtgcaatgatgattttggggtcttgagtaaatttacaaacccttttaggcatattataatagtcttctgttttt

SEQ ID NO: 39751 - protein, 267 aa, Arabidopsis thaliana
  peptide (1)..(267): Ceres Seq. ID no. 13488915
MEGYSRNGEISPKLLDLMIPQERRNWFHDEKNSVFKTEEKKLELKLGPPGEEDDDESMIRHMKKEPKDKSILSLAGKYFSPSSTKTTSHKRTAPGPVVGWPPVRSFRKNLASGSSSKLGNDSTTSNGVTLKNQKCDAAAKTTEPKRQGGMFVKINMYGVPIGRKVDLSAHNSYEQLSFTVDKLFRGLLAAQRDFPSSIEDEKPITGLLDGNGEYTLTYEDNEGDKMLVGDVPWQMFVSSVKRLRVIKTSEISSALTYGNGKQEKMRR

SEQ ID NO: 39752 - protein, 250 aa, Arabidopsis thaliana
  peptide (1)..(250): Ceres Seq. ID no. 13488916
MIPQERRNWFHDEKNSVFKTEEKKLELKLGPPGEEDDDESMIRHMKKEPKDKSILSLAGKYFSPSSTKTTSHKRTAPGPVVGWPPVRSFRKNLASGSSSKLGNDSTTSNGVTLKNQKCDAAAKTTEPKRQGGMFVKINMYGVPIGRKVDLSAHNSYEQLSFTVDKLFRGLLAAQRDFPSSIEDEKPITGLLDGNGEYTLTYEDNEGDKMLVGDVPWQMFVSSVKRLRVIKTSEISSALTYGNGKQEKMRR

SEQ ID NO: 39753 - protein, 210 aa, Arabidopsis thaliana
  peptide (1)..(210): Ceres Seq. ID no. 13488917
MIRHMKKEPKDKSILSLAGKYFSPSSTKTTSHKRTAPGPVVGWPPVRSFRKNLASGSSSKLGNDSTTSNGVTLKNQKCDAAAKTTEPKRQGGMFVKINMYGVPIGRKVDLSAHNSYEQLSFTVDKLFRGLLAAQRDFPSSIEDEKPITGLLDGNGEYTLTYEDNEGDKMLVGDVPWQMFVSSVKRLRVIKTSEISSALTYGNGKQEKMRR

SEQ ID NO: 39754 - DNA, 1513 bp, Arabidopsis thaliana; identical to SEQ ID NO: 25707
  misc_feature (1)..(1513): Ceres Seq. ID no. 12331556
  misc_feature (1)..(1513): Ortholog of  Ceres SEQ ID NO 14314559 as cited in SEQ ID NO 52317
  misc_feature (1)..(1513): Ortholog of  Ceres SEQ ID NO 15174571 as cited in SEQ ID NO 53570
  misc_feature (1)..(1513): Ortholog of  Ceres SEQ ID NO 14314367 as cited in SEQ ID NO 57446

SEQ ID NO: 39755 - protein, 393 aa, Arabidopsis thaliana; identical to SEQ ID NO: 25708
  peptide (1)..(393): Ceres Seq. ID no. 12331557

SEQ ID NO: 39756 - protein, 344 aa, Arabidopsis thaliana; identical to SEQ ID NO: 25709
  peptide (1)..(344): Ceres Seq. ID no. 12331558

SEQ ID NO: 39757 - protein, 342 aa, Arabidopsis thaliana; identical to SEQ ID NO: 25710
  peptide (1)..(342): Ceres Seq. ID no. 12331559

SEQ ID NO: 39758 - DNA, 1169 bp, Arabidopsis thaliana
  misc_feature (1)..(1169): Ceres Seq. ID no. 12348407
  misc_feature (1)..(1169): Ortholog of  Ceres SEQ ID NO 13638441 as cited in SEQ ID NO 58066
actgggtcttcttcagcttctgagtcttctcctctctctctatctctcaagtgggctttgctttgctgtttttgtcttccttcgacgactcacttttgcagattctcataaattcttcaaagctttgagtcttttttcagattcgaaggtcggttttatatatgcttcaaatctcttacccaaatcaggtatggagactctgcatccattctctcacctacctatctctgaccaccggttcgttgttcaagagatggtgagctttcacagctcgagtagcggtagctggactaaagaagagaacaagatgttcgaacgagctcttgcgatatacgctgaagactcgcctgatcgctggtttaaagttgcttccatgatccctggaaagactgtttttgatgttatgaagcaatatagtaagcttgaagaagacgttttcgatattgaagcaggacgtgttcccattcctggttatcctgcagcttcttctcccttggggtttgacacggacatgtgtcgtaaacggcctagtggagctagaggatctgatcaagatcgaaagaaaggagtcccttggacagaggaagaacacaggagattcttgttaggcctactcaagtacggtaaaggagattggagaaacatatcgagaaacttcgtggtgtcaaagacgccaacgcaagtggcgagccacgcccaaaagtattaccagagacagctctccggagccaaggacaaacgcaggccaagtatccatgacatcacaaccggcaatcttctcaatgccaatctcaaccgttccttttccgatcatagagatattctccctgatttagggtttatcgataaggatgatacggaggagggagtaatatttatgggtcagaatctctcttcagaaaatctgttttctccatcaccaacttcattcgaagctgccattaacttcgccggagaaaatgtcttcagtgccggagcttaaggcaacatagaatccccaaactcagcgttcttaagaatctgagttttgaaactgtaattagagaaatataagcaaaaccaagtttattatatatgtattgtgtggtttaaaagtaagaacttgtttttactctgtatttttgtgtttctgtctactaaatacctgttatgttaaaaaattctgtgct

SEQ ID NO: 39759 - protein, 326 aa, Arabidopsis thaliana
  peptide (1)..(326): Ceres Seq. ID no. 12348408
LGLLQLLSLLLSLYLSSGLCFAVFVFLRRLTFADSHKFFKALSLFSDSKVGFIYASNLLPKSGMETLHPFSHLPISDHRFVVQEMVSFHSSSSGSWTKEENKMFERALAIYAEDSPDRWFKVASMIPGKTVFDVMKQYSKLEEDVFDIEAGRVPIPGYPAASSPLGFDTDMCRKRPSGARGSDQDRKKGVPWTEEEHRRFLLGLLKYGKGDWRNISRNFVVSKTPTQVASHAQKYYQRQLSGAKDKRRPSIHDITTGNLLNANLNRSFSDHRDILPDLGFIDKDDTEEGVIFMGQNLSSENLFSPSPTSFEAAINFAGENVFSAGA

SEQ ID NO: 39760 - protein, 263 aa, Arabidopsis thaliana
  peptide (1)..(263): Ceres Seq. ID no. 12348409
METLHPFSHLPISDHRFVVQEMVSFHSSSSGSWTKEENKMFERALAIYAEDSPDRWFKVASMIPGKTVFDVMKQYSKLEEDVFDIEAGRVPIPGYPAASSPLGFDTDMCRKRPSGARGSDQDRKKGVPWTEEEHRRFLLGLLKYGKGDWRNISRNFVVSKTPTQVASHAQKYYQRQLSGAKDKRRPSIHDITTGNLLNANLNRSFSDHRDILPDLGFIDKDDTEEGVIFMGQNLSSENLFSPSPTSFEAAINFAGENVFSAGA

SEQ ID NO: 39761 - protein, 242 aa, Arabidopsis thaliana
  peptide (1)..(242): Ceres Seq. ID no. 12348410
MVSFHSSSSGSWTKEENKMFERALAIYAEDSPDRWFKVASMIPGKTVFDVMKQYSKLEEDVFDIEAGRVPIPGYPAASSPLGFDTDMCRKRPSGARGSDQDRKKGVPWTEEEHRRFLLGLLKYGKGDWRNISRNFVVSKTPTQVASHAQKYYQRQLSGAKDKRRPSIHDITTGNLLNANLNRSFSDHRDILPDLGFIDKDDTEEGVIFMGQNLSSENLFSPSPTSFEAAINFAGENVFSAGA

SEQ ID NO: 39762 - DNA, 1555 bp, Arabidopsis thaliana; identical to SEQ ID NO: 23117
  misc_feature (1)..(1555): Ceres Seq. ID no. 12562703
  misc_feature (1)..(1555): Ortholog of  Ceres SEQ ID NO 14304944 as cited in SEQ ID NO 53041
  misc_feature (1)..(1555): Ortholog of  Ceres SEQ ID NO 15170354 as cited in SEQ ID NO 54190
  misc_feature (1)..(1555): Ortholog of  Ceres SEQ ID NO 14307253 as cited in SEQ ID NO 54783
  misc_feature (1)..(1555): Ortholog of  Ceres SEQ ID NO 14312300 as cited in SEQ ID NO 58632
  misc_feature (1)..(1555): Ortholog of  Ceres SEQ ID NO 13654989 as cited in SEQ ID NO 63117
  misc_feature (1)..(1555): Ortholog of  Ceres SEQ ID NO 13584744 as cited in SEQ ID NO 69137

SEQ ID NO: 39763 - protein, 413 aa, Arabidopsis thaliana; identical to SEQ ID NO: 23118
  peptide (1)..(413): Ceres Seq. ID no. 12562704

SEQ ID NO: 39764 - protein, 258 aa, Arabidopsis thaliana; identical to SEQ ID NO: 23119
  peptide (1)..(258): Ceres Seq. ID no. 12562705

SEQ ID NO: 39765 - protein, 229 aa, Arabidopsis thaliana; identical to SEQ ID NO: 23120
  peptide (1)..(229): Ceres Seq. ID no. 12562706

SEQ ID NO: 39766 - DNA, 2298 bp, Arabidopsis thaliana
  misc_feature (1)..(2298): Ceres Seq. ID no. 13489521
  misc_feature (1)..(2298): Ortholog of  Ceres SEQ ID NO 15169072 as cited in SEQ ID NO 53955
  misc_feature (1)..(2298): Ortholog of  Ceres SEQ ID NO 15224912 as cited in SEQ ID NO 63475
  misc_feature (1)..(2298): Ortholog of  Ceres SEQ ID NO 13659394 as cited in SEQ ID NO 67049
aaaaaaaatcagaacccaaagccaaagcgtttttatcatttctgtcttcttctgtgtaaacagtaagaccccaaaggtcaaacctttaggctttgtttcttcctttaaggcttttttccgacgtttatatcagatttcttcttgtcaatttcttcatttggacaacctccataatccaagaccgacccttttcctctaatctctcctgttgcagctgaatggtggaacaaactgtggttagagaacatatcaaagcgagagtcatgtcattagtgaggtctgcagagccatcctcatataggaacccgaagctttacacgttgaatgagaatggtaataacaatggtgtcagttctgctcaaatctttgatccagataggtcaaagaatccttgtctgactgatgattcttacccaagccaaagttatgagaagtactttcttgattcgccaactgatgagtttgttcaacatcctattggctctggtgcctcggttagctcatttggctctttagactcatttccttatcagtcaagaccagttcttggatgttccatggaatttcagttaccgttggattcaacctctacttcatctacaaggcttttgggagattaccaagcggtttcttacagtccgagcatggatgtagtggaggagtttgatgatgagcaaatgagatcaaagattcaagagcttgaaagagcgcttctcggcgatgaagatgataaaatggttggaatagataacctcatggagattgacagcgaatggtcgtaccaaaacgaaagcgaacagcatcaagactcgcccaaagaatcatcgtctgcagattccaactctcatgtaagtagcaaagaagtggtgtctcaagccactccaaagcaaatcttgatatcttgtgctcgtgcgctatctgaaggaaaattagaagaagctttgtcaatggtaaatgagctgaggcagatagtttctatccaaggagacccttctcagagaatcgcagcttacatggtggaaggtctagctgcaagaatggccgcttcaggaaaattcatctacagagcattgaaatgcaaagagcctccttcggatgagaggcttgcagctatgcaagtcctgtttgaagtctgcccttgtttcaagttcgggtttttagcagctaatggtgcgatacttgaagcaatcaaaggtgaagaagaagttcacataatcgatttcgatataaaccaagggaaccaatacatgacactgatacgaagcattgctgagttgcctggtaaacgacctcgcctgaggttaacaggaattgatgaccctgaatcagtccaacgctccattggagggctaagaatcatcggtctaagactcgagcaactcgcagaggataatggagtatccttcaaattcaaagcaatgccttcaaagacttcgattgtctctccatcaacactcggttgcaaaccaggagaaaccttaatagtgaactttgcattccaacttcaccacatgcctgacgagagtgtcacaacagtaaaccagcgggacgagctacttcacatggtcaaaagcttaaacccaaagcttgtcacggtcgttgaacaagacgtgaacacaaacacttcaccgttctttcccagattcatagaggcttacgaatactactcagcagttttcgagtctctagacatgacacttccaagagaaagccaagagaggatgaatgtagaaagacagtgtctcgctagagacatagtcaacattgttgcttgcgaaggagaagaacggatagagagatacgaggctgcgggaaaatggagagcaaggatgatgatggctggattcaatccaaaaccaatgagtgctaaagtaaccaacaatatacaaaacctgataaagcaacaatattgcaataagtacaagcttaaagaagaaatgggtgagctccatttttgctgggaggagaaaagcttaatcgttgcttcagcttggaggtaagataagtgacaagagcatatagtctttatgtttcataaaacataattatgtttttactgtaatcttgggttattgtgtaactggttaaatcatctccatgtattattaccagaggttaggggtgatcacaggtactaaaagctaatctaacacttatggaagaatttttctttcttttttttccctattatataaaaataattagagttttggttctaaacctatttgctaagtgtgaatgagtctttacatgttcatatttcagttcaaatggttaaatttgttaaggttctcactt

SEQ ID NO: 39767 - protein, 593 aa, Arabidopsis thaliana
  peptide (1)..(593): Ceres Seq. ID no. 13489522
MVEQTVVREHIKARVMSLVRSAEPSSYRNPKLYTLNENGNNNGVSSAQIFDPDRSKNPCLTDDSYPSQSYEKYFLDSPTDEFVQHPIGSGASVSSFGSLDSFPYQSRPVLGCSMEFQLPLDSTSTSSTRLLGDYQAVSYSPSMDVVEEFDDEQMRSKIQELERALLGDEDDKMVGIDNLMEIDSEWSYQNESEQHQDSPKESSSADSNSHVSSKEVVSQATPKQILISCARALSEGKLEEALSMVNELRQIVSIQGDPSQRIAAYMVEGLAARMAASGKFIYRALKCKEPPSDERLAAMQVLFEVCPCFKFGFLAANGAILEAIKGEEEVHIIDFDINQGNQYMTLIRSIAELPGKRPRLRLTGIDDPESVQRSIGGLRIIGLRLEQLAEDNGVSFKFKAMPSKTSIVSPSTLGCKPGETLIVNFAFQLHHMPDESVTTVNQRDELLHMVKSLNPKLVTVVEQDVNTNTSPFFPRFIEAYEYYSAVFESLDMTLPRESQERMNVERQCLARDIVNIVACEGEERIERYEAAGKWRARMMMAGFNPKPMSAKVTNNIQNLIKQQYCNKYKLKEEMGELHFCWEEKSLIVASAWR

SEQ ID NO: 39768 - protein, 578 aa, Arabidopsis thaliana
  peptide (1)..(578): Ceres Seq. ID no. 13489523
MSLVRSAEPSSYRNPKLYTLNENGNNNGVSSAQIFDPDRSKNPCLTDDSYPSQSYEKYFLDSPTDEFVQHPIGSGASVSSFGSLDSFPYQSRPVLGCSMEFQLPLDSTSTSSTRLLGDYQAVSYSPSMDVVEEFDDEQMRSKIQELERALLGDEDDKMVGIDNLMEIDSEWSYQNESEQHQDSPKESSSADSNSHVSSKEVVSQATPKQILISCARALSEGKLEEALSMVNELRQIVSIQGDPSQRIAAYMVEGLAARMAASGKFIYRALKCKEPPSDERLAAMQVLFEVCPCFKFGFLAANGAILEAIKGEEEVHIIDFDINQGNQYMTLIRSIAELPGKRPRLRLTGIDDPESVQRSIGGLRIIGLRLEQLAEDNGVSFKFKAMPSKTSIVSPSTLGCKPGETLIVNFAFQLHHMPDESVTTVNQRDELLHMVKSLNPKLVTVVEQDVNTNTSPFFPRFIEAYEYYSAVFESLDMTLPRESQERMNVERQCLARDIVNIVACEGEERIERYEAAGKWRARMMMAGFNPKPMSAKVTNNIQNLIKQQYCNKYKLKEEMGELHFCWEEKSLIVASAWR

SEQ ID NO: 39769 - protein, 480 aa, Arabidopsis thaliana
  peptide (1)..(480): Ceres Seq. ID no. 13489524
MEFQLPLDSTSTSSTRLLGDYQAVSYSPSMDVVEEFDDEQMRSKIQELERALLGDEDDKMVGIDNLMEIDSEWSYQNESEQHQDSPKESSSADSNSHVSSKEVVSQATPKQILISCARALSEGKLEEALSMVNELRQIVSIQGDPSQRIAAYMVEGLAARMAASGKFIYRALKCKEPPSDERLAAMQVLFEVCPCFKFGFLAANGAILEAIKGEEEVHIIDFDINQGNQYMTLIRSIAELPGKRPRLRLTGIDDPESVQRSIGGLRIIGLRLEQLAEDNGVSFKFKAMPSKTSIVSPSTLGCKPGETLIVNFAFQLHHMPDESVTTVNQRDELLHMVKSLNPKLVTVVEQDVNTNTSPFFPRFIEAYEYYSAVFESLDMTLPRESQERMNVERQCLARDIVNIVACEGEERIERYEAAGKWRARMMMAGFNPKPMSAKVTNNIQNLIKQQYCNKYKLKEEMGELHFCWEEKSLIVASAWR

SEQ ID NO: 39770 - DNA, 1598 bp, Arabidopsis thaliana
  misc_feature (1)..(1598): Ceres Seq. ID no. 12328576
  misc_feature (1)..(1598): Ortholog of  Ceres SEQ ID NO 13587235 as cited in SEQ ID NO 0
aaaatcgcgtcaattctcaacccagttttcagatttggtttttggaagctaacttattgttggaggtggagagatatggctgactttggtttgttctgtttcccttgtttaatggaagttgtttcatcatcatcatcatctctgtgattgtaattgatctcacaccatgtctgattacaatggtgatgatcttgaagatgaatatatggctgatgagtatgacatggatgatctcgaggatgatatgaatgccgcgtttgatggaagagatatcgatgcttctgattccgaagtcgaagatttcgatcaattgaacaaggctgcagatacttctgctgctcaagcacggaatgggaaggatattcagggtataccgtgggatagtcttactcttactagaaaagattacagaaaaactaggctagaacaatataaaaactatgaaaatatacccaattctggtgatgaatctgccaagaaatgcatgaatactgagaaaggcagctctttctatgagttcagaaggaattctagatccgtgagatcaacgattctccattttcagttgaggaatttggtctgggctacctcaaaacacgatgtttatttattgtccaactactccatcagccactggtcttctttgacaggttgtaggagtgaaattcttaacgttaaaggtcatgtggctccgtctgagaaacatcccgagagtttgttggaaggatttacagagactcaagttagcactcttgcagtaaaagaaaggctactagttgctggtggattccaaggagaactcatttgcaagcatctcgatagacctggtgtgagcttctgctcacgcacaacttacaccgaaaacgctatcaccaatgcagtagatatatatagaaactccaacggcgcactgcatttcatggcctcaaataatgactgtggagtcagagactttgacatggagagatataagcttgtccaactcttccgttatctatggcccgtcaatcatagttccctaagtcctgatggaaaactagtagcagtcgttggagatgacccagatggtctactggtagacacaagtaacggacagacgatcgggacgctaaaaggtcacttagattattcatttgcatcagcttggcatccaaacggtgtaacatttgccacaggaagccaagacaagacctgtcgtatttgggacacaaggaaactctcggaatcagtcgctgtcctaaaaggtaaccttggagccgtacggtccattaggttcacatctgacggacggtacgttgccatggccgagccagcagatttcgttcatatctatgacacaaaatcaggatacaaaaaggagcaagagattgatttctttggagagatttctgggatatcgtttagcccagatactgaatctctcttcatcggtgtttgggacaggacttatggaagtctcttggagtatggtcgaaccagagactacacttatctcgattcattactttgatggaaatttaagctaagcctaaagaaaaaaaacttacgtaaaaataatttgttatacgccgtcttggttaggtttcataatcatatcg

SEQ ID NO: 39771 - protein, 447 aa, Arabidopsis thaliana
  peptide (1)..(447): Ceres Seq. ID no. 12328577
MSDYNGDDLEDEYMADEYDMDDLEDDMNAAFDGRDIDASDSEVEDFDQLNKAADTSAAQARNGKDIQGIPWDSLTLTRKDYRKTRLEQYKNYENIPNSGDESAKKCMNTEKGSSFYEFRRNSRSVRSTILHFQLRNLVWATSKHDVYLLSNYSISHWSSLTGCRSEILNVKGHVAPSEKHPESLLEGFTETQVSTLAVKERLLVAGGFQGELICKHLDRPGVSFCSRTTYTENAITNAVDIYRNSNGALHFMASNNDCGVRDFDMERYKLVQLFRYLWPVNHSSLSPDGKLVAVVGDDPDGLLVDTSNGQTIGTLKGHLDYSFASAWHPNGVTFATGSQDKTCRIWDTRKLSESVAVLKGNLGAVRSIRFTSDGRYVAMAEPADFVHIYDTKSGYKKEQEIDFFGEISGISFSPDTESLFIGVWDRTYGSLLEYGRTRDYTYLDSLL

SEQ ID NO: 39772 - protein, 434 aa, Arabidopsis thaliana
  peptide (1)..(434): Ceres Seq. ID no. 12328578
MADEYDMDDLEDDMNAAFDGRDIDASDSEVEDFDQLNKAADTSAAQARNGKDIQGIPWDSLTLTRKDYRKTRLEQYKNYENIPNSGDESAKKCMNTEKGSSFYEFRRNSRSVRSTILHFQLRNLVWATSKHDVYLLSNYSISHWSSLTGCRSEILNVKGHVAPSEKHPESLLEGFTETQVSTLAVKERLLVAGGFQGELICKHLDRPGVSFCSRTTYTENAITNAVDIYRNSNGALHFMASNNDCGVRDFDMERYKLVQLFRYLWPVNHSSLSPDGKLVAVVGDDPDGLLVDTSNGQTIGTLKGHLDYSFASAWHPNGVTFATGSQDKTCRIWDTRKLSESVAVLKGNLGAVRSIRFTSDGRYVAMAEPADFVHIYDTKSGYKKEQEIDFFGEISGISFSPDTESLFIGVWDRTYGSLLEYGRTRDYTYLDSLL

SEQ ID NO: 39773 - protein, 428 aa, Arabidopsis thaliana
  peptide (1)..(428): Ceres Seq. ID no. 12328579
MDDLEDDMNAAFDGRDIDASDSEVEDFDQLNKAADTSAAQARNGKDIQGIPWDSLTLTRKDYRKTRLEQYKNYENIPNSGDESAKKCMNTEKGSSFYEFRRNSRSVRSTILHFQLRNLVWATSKHDVYLLSNYSISHWSSLTGCRSEILNVKGHVAPSEKHPESLLEGFTETQVSTLAVKERLLVAGGFQGELICKHLDRPGVSFCSRTTYTENAITNAVDIYRNSNGALHFMASNNDCGVRDFDMERYKLVQLFRYLWPVNHSSLSPDGKLVAVVGDDPDGLLVDTSNGQTIGTLKGHLDYSFASAWHPNGVTFATGSQDKTCRIWDTRKLSESVAVLKGNLGAVRSIRFTSDGRYVAMAEPADFVHIYDTKSGYKKEQEIDFFGEISGISFSPDTESLFIGVWDRTYGSLLEYGRTRDYTYLDSLL

SEQ ID NO: 39774 - DNA, 1169 bp, Arabidopsis thaliana
  misc_feature (1)..(1169): Ceres Seq. ID no. 13487856
  misc_feature (1)..(1169): Ortholog of  Ceres SEQ ID NO 13594193 as cited in SEQ ID NO 58558
  misc_feature (1)..(1169): Ortholog of  Ceres SEQ ID NO 15177545 as cited in SEQ ID NO 0
attctcacaagtcataaacagtcgtttatagttcaatccttttcctcttctttgtttctaaaaagagaaaagtcacttatggcggatatctcgggaaacggctatggcaacgccagagaagaagtagtaatggtgaatctcaaggatgaagtcgaacatcaacaagaaatggaagacattcataacccaagacccttgaagaaacaagactctctactctcagtctctgtccctttcttacaaaagttgatcgcggagtttcttggaacctactttttggtattcaccggttgtgcatcggtggttgtaaacatgcaaaacgacaatgtcgtgactcttccagggatcgctatcgtttggggactcaccattatggtcctcatttactctcttggtcacatctctggtgctcatatcaatccggccgttaccattgccttcgcctcttgtggccgtttccctctcaaacaggttccagcttatgtcatatcacaagtgataggatcaacgctcgcggctgcgacattacggttgttgttcggacttgatcacgacgtttgtagcggaaaacacgatgtgtttatcggatcatcaccagtgggatcagatcttcaggcgtttacgatggagtttatcgtcactttctatctaatgttcatcatttctggcgttgctaccgataatagagcgatcggagaacttgctggattagcaataggatcaacggtgctacttaacgtgctaattgccgcaccggtatcgagtgcgtcgatgaatccaggaagaagtttaggacctgcactggtctatggttgctacaaaggaatttggatatacttagttgcgccaactcttggtgcgattgcgggtgcatgggtttataacacagttagatataccgataaaccattgcgagaaatcactaaaagtggttcatttctaaagaccgtgagaatcggtagcacttgataagagaaaagaaaacatgggtggagttgatggagtattttcaaatgaatgtaacaactttcaccacaccttacgtatatggcctttgtattaattgctacgtttatctcttttattgttaacgccaagattctctatcttgttattaatgtgtaactgtatcgtatattttttaaataataaaattcaattttcgaaag

SEQ ID NO: 39775 - protein, 322 aa, Arabidopsis thaliana
  peptide (1)..(322): Ceres Seq. ID no. 13487857
ILTSHKQSFIVQSFSSSLFLKREKSLMADISGNGYGNAREEVVMVNLKDEVEHQQEMEDIHNPRPLKKQDSLLSVSVPFLQKLIAEFLGTYFLVFTGCASVVVNMQNDNVVTLPGIAIVWGLTIMVLIYSLGHISGAHINPAVTIAFASCGRFPLKQVPAYVISQVIGSTLAAATLRLLFGLDHDVCSGKHDVFIGSSPVGSDLQAFTMEFIVTFYLMFIISGVATDNRAIGELAGLAIGSTVLLNVLIAAPVSSASMNPGRSLGPALVYGCYKGIWIYLVAPTLGAIAGAWVYNTVRYTDKPLREITKSGSFLKTVRIGST

SEQ ID NO: 39776 - protein, 296 aa, Arabidopsis thaliana
  peptide (1)..(296): Ceres Seq. ID no. 13487858
MADISGNGYGNAREEVVMVNLKDEVEHQQEMEDIHNPRPLKKQDSLLSVSVPFLQKLIAEFLGTYFLVFTGCASVVVNMQNDNVVTLPGIAIVWGLTIMVLIYSLGHISGAHINPAVTIAFASCGRFPLKQVPAYVISQVIGSTLAAATLRLLFGLDHDVCSGKHDVFIGSSPVGSDLQAFTMEFIVTFYLMFIISGVATDNRAIGELAGLAIGSTVLLNVLIAAPVSSASMNPGRSLGPALVYGCYKGIWIYLVAPTLGAIAGAWVYNTVRYTDKPLREITKSGSFLKTVRIGST

SEQ ID NO: 39777 - protein, 279 aa, Arabidopsis thaliana
  peptide (1)..(279): Ceres Seq. ID no. 13487859
MVNLKDEVEHQQEMEDIHNPRPLKKQDSLLSVSVPFLQKLIAEFLGTYFLVFTGCASVVVNMQNDNVVTLPGIAIVWGLTIMVLIYSLGHISGAHINPAVTIAFASCGRFPLKQVPAYVISQVIGSTLAAATLRLLFGLDHDVCSGKHDVFIGSSPVGSDLQAFTMEFIVTFYLMFIISGVATDNRAIGELAGLAIGSTVLLNVLIAAPVSSASMNPGRSLGPALVYGCYKGIWIYLVAPTLGAIAGAWVYNTVRYTDKPLREITKSGSFLKTVRIGST

SEQ ID NO: 39778 - DNA, 2028 bp, Arabidopsis thaliana
  misc_feature (1)..(2028): Ceres Seq. ID no. 13497630
  misc_feature (1)..(2028): Ortholog of  Ceres SEQ ID NO 15174947 as cited in SEQ ID NO 236
tgaggcatcacaacaatcaatataagcctgggatccaattttcttatttccccaaccaaaacaggggaagaaaaaaaaagaaaacaaaaaaatcaaaaaaaattagaaaatgaaagcctcaacaagagtcatatggacaatatctgtccttatgctcgctgctgtgtccgaggccatcttccctctaccgtttctaccgttcctccctgggttcaacaacggctttagggacaatgaggctgtcaaggttgcgaaaccacagcctgcaggagcagttggtggaaaagccgcaagaaggcagcgtggcggcggtttagacgctcagacaacctggggtggtaagtgggagctcttcttggaaaactcgggtgtgtcagggatgcatgcgatccttatgccagttatcaacaaggtccagtactatgacgccaccatttggagaatttcaaagattaagttgcctccaggcgtaccatgccatgtcgtggacgctaagactaacaaggtcgattgttgggctcattcgattctcatggatgtcaacaccggcgcccttaagcctctagggctttccaccgatacatggtgctcatccggaggtctgaccgtaaatggtacattggtgagcactggaggatacggaggaggagccaacaccgcgaggtacctatccagctgtgaaaactgcaagtgggaagaataccctcaggcattggccgcgaagagatggtactcaacgcaagcaactctccctgacggaaagttcttcgtgattggtggaagagacgccttgaactacgaatacattcctgaggagggacaaaacaacaggaagctctttgactcattgctcctcaggcaaacagacgacccgaaagaaaacaacctttaccctttcgtctggcttaacaccgacggtaacctcttcattttcgctaacaaccgatccatccttctaagccccaaaacaaaccaagtcatcaaggagttccctcagctcccaggtggtgcccgtaactacccgggatcaggttcttccgcactcctccccatccaactttacgtgaaaaaccccaaggtcatcccagccgaggttctcgtctgtggtggttccaaacaagacgcgtattacaaggctggtaaaaaaatatacgaaccagcactacaagactgcgccaggataaggatcaacagcgcaaagccacgatggaagacggagatgatgccaaccccacgaatcatgagtgatactgtcatcctccctaacggagacatccttctagtcaacggagctaaacgtggttgttcaggctggggatatggtaaagaccctgcctttgctcccctcttgtacaagccccatgctgcacgtggcaagcgtttcagacagctcaagcccaccaccatcccacgtatgtaccactccagcgccatcattcttccagacggtaaggttcttgtcggtggcagcaacaccaacgacggttacaagtacaacgttgagttcccaacggagcttcgcgttgagaaattctccccaccttacctcgacccggctctagccaacataaggccaaagatcgtcaccaccggcaccccaaaacaggtcaaatacggacaattcttcaacgtgaaggtcgaccttaaagaaaagggagcaaccaagggaaatctcaaggttaccatgttagcccctgccttcacaacacacagtatctcaatgaacatgaggatgctcatcttgggtgtcaataatgtcaaacctgctggtgccggttacgatatccaggccgttgcaccaccaaatggaaacatcgctccaccgggttactatcttatctttgccatctacaaaggtgttcccagcactggagaatggattcaggtcgtctaatgacgataatttttacccattttgtcttatgaccgtaacatcttaatataaaacaatcacataatatcagtttttttttccttctatatatattgtttatgccaccattaatggatccaaattacttgtgttct

SEQ ID NO: 39779 - protein, 594 aa, Arabidopsis thaliana
  peptide (1)..(594): Ceres Seq. ID no. 13497631
MKASTRVIWTISVLMLAAVSEAIFPLPFLPFLPGFNNGFRDNEAVKVAKPQPAGAVGGKAARRQRGGGLDAQTTWGGKWELFLENSGVSGMHAILMPVINKVQYYDATIWRISKIKLPPGVPCHVVDAKTNKVDCWAHSILMDVNTGALKPLGLSTDTWCSSGGLTVNGTLVSTGGYGGGANTARYLSSCENCKWEEYPQALAAKRWYSTQATLPDGKFFVIGGRDALNYEYIPEEGQNNRKLFDSLLLRQTDDPKENNLYPFVWLNTDGNLFIFANNRSILLSPKTNQVIKEFPQLPGGARNYPGSGSSALLPIQLYVKNPKVIPAEVLVCGGSKQDAYYKAGKKIYEPALQDCARIRINSAKPRWKTEMMPTPRIMSDTVILPNGDILLVNGAKRGCSGWGYGKDPAFAPLLYKPHAARGKRFRQLKPTTIPRMYHSSAIILPDGKVLVGGSNTNDGYKYNVEFPTELRVEKFSPPYLDPALANIRPKIVTTGTPKQVKYGQFFNVKVDLKEKGATKGNLKVTMLAPAFTTHSISMNMRMLILGVNNVKPAGAGYDIQAVAPPNGNIAPPGYYLIFAIYKGVPSTGEWIQVV

SEQ ID NO: 39780 - protein, 580 aa, Arabidopsis thaliana
  peptide (1)..(580): Ceres Seq. ID no. 13497632
MLAAVSEAIFPLPFLPFLPGFNNGFRDNEAVKVAKPQPAGAVGGKAARRQRGGGLDAQTTWGGKWELFLENSGVSGMHAILMPVINKVQYYDATIWRISKIKLPPGVPCHVVDAKTNKVDCWAHSILMDVNTGALKPLGLSTDTWCSSGGLTVNGTLVSTGGYGGGANTARYLSSCENCKWEEYPQALAAKRWYSTQATLPDGKFFVIGGRDALNYEYIPEEGQNNRKLFDSLLLRQTDDPKENNLYPFVWLNTDGNLFIFANNRSILLSPKTNQVIKEFPQLPGGARNYPGSGSSALLPIQLYVKNPKVIPAEVLVCGGSKQDAYYKAGKKIYEPALQDCARIRINSAKPRWKTEMMPTPRIMSDTVILPNGDILLVNGAKRGCSGWGYGKDPAFAPLLYKPHAARGKRFRQLKPTTIPRMYHSSAIILPDGKVLVGGSNTNDGYKYNVEFPTELRVEKFSPPYLDPALANIRPKIVTTGTPKQVKYGQFFNVKVDLKEKGATKGNLKVTMLAPAFTTHSISMNMRMLILGVNNVKPAGAGYDIQAVAPPNGNIAPPGYYLIFAIYKGVPSTGEWIQVV

SEQ ID NO: 39781 - protein, 504 aa, Arabidopsis thaliana
  peptide (1)..(504): Ceres Seq. ID no. 13497633
MHAILMPVINKVQYYDATIWRISKIKLPPGVPCHVVDAKTNKVDCWAHSILMDVNTGALKPLGLSTDTWCSSGGLTVNGTLVSTGGYGGGANTARYLSSCENCKWEEYPQALAAKRWYSTQATLPDGKFFVIGGRDALNYEYIPEEGQNNRKLFDSLLLRQTDDPKENNLYPFVWLNTDGNLFIFANNRSILLSPKTNQVIKEFPQLPGGARNYPGSGSSALLPIQLYVKNPKVIPAEVLVCGGSKQDAYYKAGKKIYEPALQDCARIRINSAKPRWKTEMMPTPRIMSDTVILPNGDILLVNGAKRGCSGWGYGKDPAFAPLLYKPHAARGKRFRQLKPTTIPRMYHSSAIILPDGKVLVGGSNTNDGYKYNVEFPTELRVEKFSPPYLDPALANIRPKIVTTGTPKQVKYGQFFNVKVDLKEKGATKGNLKVTMLAPAFTTHSISMNMRMLILGVNNVKPAGAGYDIQAVAPPNGNIAPPGYYLIFAIYKGVPSTGEWIQVV

SEQ ID NO: 39782 - DNA, 469 bp, Arabidopsis thaliana
  misc_feature (1)..(469): Ceres Seq. ID no. 12602826
  misc_feature (1)..(469): Ortholog of  Ceres SEQ ID NO 13596039 as cited in SEQ ID NO 62117
acaattcagattccaattttctcaaactctaaaatcaatctctcaaatctctcaaccgtgatcaagatgcagatcttcgttaagactctcaccggaaagactatcaccctcgaggtggaaagctctgacaccatcgacaacgttaaggccaagatccaggataaggaaggtattcctccggatcagcagaggcttatcttcgccggaaagcagttggaggatggccgcacgttggcggattacaacatccagaaggagtctactcttcacttggtcctccgtctccgtggtggtttctaaaccttgtctctctcttatggttactgaaccaagttcatgtctcgtttcatctagtactttggtggtttatgttttggggccatgtaagcctctgataaataattgatcgactatgtttccgtttctttcatctctcttttctttcaaacaacaaatcgaacttattcgc

SEQ ID NO: 39783 - protein, 99 aa, Arabidopsis thaliana
  peptide (1)..(99): Ceres Seq. ID no. 13645873
TIQIPIFSNSKINLSNLSTVIKMQIFVKTLTGKTITLEVESSDTIDNVKAKIQDKEGIPPDQQRLIFAGKQLEDGRTLADYNIQKESTLHLVLRLRGGF

SEQ ID NO: 39784 - protein, 77 aa, Arabidopsis thaliana; identical to SEQ ID NO: 36575
  peptide (1)..(77): Ceres Seq. ID no. 13645874

SEQ ID NO: 39785 - protein, 61 aa, Arabidopsis thaliana
  peptide (1)..(61): Ceres Seq. ID no. 13645875
MAARWRITTSRRSLLFTWSSVSVVVSKPCLSLMVTEPSSCLVSSSTLVVYVLGPCKPLINN

SEQ ID NO: 39786 - DNA, 1598 bp, Arabidopsis thaliana
  misc_feature (1)..(1598): Ceres Seq. ID no. 12562571
  misc_feature (1)..(1598): Ortholog of  Ceres SEQ ID NO 13659033 as cited in SEQ ID NO 66372
  misc_feature (1)..(1598): Ortholog of  Ceres SEQ ID NO 12625899 as cited in SEQ ID NO 69079
actacaccataaaaagagaaaggcgtaaaaaggaaaaagaaaaaaaaaggtaaacgttataataaaagaaaaaaaaaatatatgacaacggcgttgttttcaccgtctaaccgtagaaaacgccgtctcacacacttcttcttcaccggtactcgctttcatcttactcgccgccttcatctacggccacgatttcatctctttctctcgtcggatctcttcactctccggacgatcgtccaccagtccgcaatcgtcgttgtagttgacgaacctcctccgcctccaccaacatctcctcctccgccttctcctccaccaccgtctcctccaccaccatctcctccaccgccatctcctccgccacctgcttttgcagtaggtaaaacgccggaaggatgcgatgtcttcaaagggaattgggtcaaagactggtcaacgcgtccactttacagagaatccgagtgtccgtacattcagccgcagctcacttgccgcacgcatggccgtcccgatagtgattatcagtcatggagatggcgacctgattcctgctcacttccttcgttagtctctctctccgttcgattttgaatgcgattcggtgattgatcttcagatcggatttgctctgtggttgttgaatgtgttaataggtttaatgcgacggtgatgttggagagcttaagagggaagaagatgatgttcgttggagattcgttgaacagaggaatgtatgtttctctcatctgtcttcttcattcacaaatcccagagaactccaaatccatggatactttcggatcactcaccgtcttctctctcaaggattacaatgcaacgattgagttctattgggcaccgtttcttctagaatcgaattcagataacgcaacagttcatagagtatcagatcgaattgtgaggaaaggatcgatcaacaaacacggtaggcattggcgaggggctgatatagttgtgttcaacacatacttgtggtggaggactggcttcaaaatgaagatcttgttctttcaaggatgagaagaagagaatcgttgagatggagagtgaagatgcttatagaatggcgttgaagactatggttaaatgggtgaagaagaatatggatccattgaagacgagggttttctttgctaccatgtctcctactcattacaagggcgaggattggggaggcgaacaaggaaaaaattgttacaatcaaacgacaccgatccaagacatgaaccattggccatcagactgcagcaaaaccttaatgaaagtgataggagaggaattagaccaaagagcagagtttccggtgacggtacttaacattacacaactctctggctatcggaaagacgcgcacacgtcaatctacaagaagcaatggagcccattgacgaaggagcagctagcaaatccggctagctactcagactgtatacattggtgcttgcctggtcttcaagatacttggaacgagcttttctttgccaagttattttatccatgattcttttctctaaattcaagatttttttagaactgtaattgtaaattatggttataatttttgttaattacgc

SEQ ID NO: 39787 - protein, 170 aa, Arabidopsis thaliana
  peptide (1)..(170): Ceres Seq. ID no. 12562572
MTTALFSPSNRRKRRLTHFFFTGTRFHLTRRLHLRPRFHLFLSSDLFTLRTIVHQSAIVVVVDEPPPPPPTSPPPPSPPPPSPPPPSPPPPSPPPPAFAVGKTPEGCDVFKGNWVKDWSTRPLYRESECPYIQPQLTCRTHGRPDSDYQSWRWRPDSCSLPSLVSLSVRF

SEQ ID NO: 39788 - protein, 153 aa, Arabidopsis thaliana
  peptide (1)..(153): Ceres Seq. ID no. 12562573
MESEDAYRMALKTMVKWVKKNMDPLKTRVFFATMSPTHYKGEDWGGEQGKNCYNQTTPIQDMNHWPSDCSKTLMKVIGEELDQRAEFPVTVLNITQLSGYRKDAHTSIYKKQWSPLTKEQLANPASYSDCIHWCLPGLQDTWNELFFAKLFYP

SEQ ID NO: 39789 - protein, 145 aa, Arabidopsis thaliana
  peptide (1)..(145): Ceres Seq. ID no. 12562574
MALKTMVKWVKKNMDPLKTRVFFATMSPTHYKGEDWGGEQGKNCYNQTTPIQDMNHWPSDCSKTLMKVIGEELDQRAEFPVTVLNITQLSGYRKDAHTSIYKKQWSPLTKEQLANPASYSDCIHWCLPGLQDTWNELFFAKLFYP

SEQ ID NO: 39790 - DNA, 1400 bp, Arabidopsis thaliana
  misc_feature (1)..(1400): Ceres Seq. ID no. 13576600
  misc_feature (1)..(1400): Ortholog of  Ceres SEQ ID NO 13596816 as cited in SEQ ID NO 62287
aaaattctaaagaacaaaaaaggaaaaacagagcagccatgagagcttctgtttattcattgatcctactcttcttctcgtgtttactacatctatcaaagtctcaaccgttcctcggagtaaactacggcctaaccgccgacaatcttccacctccgtcagcgagtgcaaagctccttcaatccacaactttccaaaaagtccgtctttacggatccgacccggctgtaatcaaggccctagcaaacacggggatcgagatcgtcatcggggcgtctaacggcgatgtacccggtctagcatcggacccgagtttcgcccgaagctgggtcgaaaccaacgtggtaccttattatccagcgagcaagattgttctcattgccgtgggaaatgagatcacatcattcggcgacaacagtctcatgtcgcagcttttgccggcgatgaaaaatgtccaaactgccctcgaggcggcgtctcttggtggcgggaaaatcaaagtctcgacagtacacataatgtcggttctagccgggtcagaccctccttcgaccgcggtatttaaaccggagcatgctgatatattgaagggattgctagagtttaatagtgaaaccgggtcgcctttcgcggttaacccctacccgtttttcgcttaccaagatgaccggagacccgaaacgttggcctattgcttgtttcaggccaatcctggccgtgtcgaccccaacagcaacctcaagtatatgaacatgttcgatgctcaggttgatgcggtgtattcagctttgaactcgatggggttcaaggacgtagagataatggtcgctgagactggatggccatacaagggagacccggaggaggctggtgcaacagttgagaacgctagagcttacaataaaaatctcattgctcatttaaaatctgggtccgggacgccacttatgcccgggagagtgatcgacacatacttgttcgcattgtacgacgagaatctcaagcccgggaaaggttctgaacgagccttcggtttgtttagacctgatctaaccatgacttatgatatcgggctcaccaagactaccaattataaccaaacttccatggctccattgtcaccaacaaggccacgtcttccaccagccgcggccccgacgagacaaacattaccttctcctccgcagatgattcttccttcaccagttactccctccgacaaaaactctgggcaaaccgatgttcacaattccactccgcgctctgcctctctggctcacatatgccgctctctctctatttcggcatcgatgttctttgtctccgttttgtatgcattgatcatattgttgtaaaatctcttcatcgatcttatattatgtctcttactaatttaaact

SEQ ID NO: 39791 - protein, 450 aa, Arabidopsis thaliana
  peptide (1)..(450): Ceres Seq. ID no. 13576601
NSKEQKRKNRAAMRASVYSLILLFFSCLLHLSKSQPFLGVNYGLTADNLPPPSASAKLLQSTTFQKVRLYGSDPAVIKALANTGIEIVIGASNGDVPGLASDPSFARSWVETNVVPYYPASKIVLIAVGNEITSFGDNSLMSQLLPAMKNVQTALEAASLGGGKIKVSTVHIMSVLAGSDPPSTAVFKPEHADILKGLLEFNSETGSPFAVNPYPFFAYQDDRRPETLAYCLFQANPGRVDPNSNLKYMNMFDAQVDAVYSALNSMGFKDVEIMVAETGWPYKGDPEEAGATVENARAYNKNLIAHLKSGSGTPLMPGRVIDTYLFALYDENLKPGKGSERAFGLFRPDLTMTYDIGLTKTTNYNQTSMAPLSPTRPRLPPAAAPTRQTLPSPPQMILPSPVTPSDKNSGQTDVHNSTPRSASLAHICRSLSISASMFFVSVLYALIILL

SEQ ID NO: 39792 - protein, 438 aa, Arabidopsis thaliana
  peptide (1)..(438): Ceres Seq. ID no. 13576602
MRASVYSLILLFFSCLLHLSKSQPFLGVNYGLTADNLPPPSASAKLLQSTTFQKVRLYGSDPAVIKALANTGIEIVIGASNGDVPGLASDPSFARSWVETNVVPYYPASKIVLIAVGNEITSFGDNSLMSQLLPAMKNVQTALEAASLGGGKIKVSTVHIMSVLAGSDPPSTAVFKPEHADILKGLLEFNSETGSPFAVNPYPFFAYQDDRRPETLAYCLFQANPGRVDPNSNLKYMNMFDAQVDAVYSALNSMGFKDVEIMVAETGWPYKGDPEEAGATVENARAYNKNLIAHLKSGSGTPLMPGRVIDTYLFALYDENLKPGKGSERAFGLFRPDLTMTYDIGLTKTTNYNQTSMAPLSPTRPRLPPAAAPTRQTLPSPPQMILPSPVTPSDKNSGQTDVHNSTPRSASLAHICRSLSISASMFFVSVLYALIILL

SEQ ID NO: 39793 - protein, 310 aa, Arabidopsis thaliana
  peptide (1)..(310): Ceres Seq. ID no. 13576603
MSQLLPAMKNVQTALEAASLGGGKIKVSTVHIMSVLAGSDPPSTAVFKPEHADILKGLLEFNSETGSPFAVNPYPFFAYQDDRRPETLAYCLFQANPGRVDPNSNLKYMNMFDAQVDAVYSALNSMGFKDVEIMVAETGWPYKGDPEEAGATVENARAYNKNLIAHLKSGSGTPLMPGRVIDTYLFALYDENLKPGKGSERAFGLFRPDLTMTYDIGLTKTTNYNQTSMAPLSPTRPRLPPAAAPTRQTLPSPPQMILPSPVTPSDKNSGQTDVHNSTPRSASLAHICRSLSISASMFFVSVLYALIILL

SEQ ID NO: 39794 - DNA, 2082 bp, Arabidopsis thaliana
  misc_feature (1)..(2082): Ceres Seq. ID no. 12396520
  misc_feature (1)..(2082): Ortholog of  Ceres SEQ ID NO 13584538 as cited in SEQ ID NO 64739
aagcacttcttctccgccttcgtaagttccgccgaaaagaaccaaatccttcactactctgtctcagctttcgacctctctcttctcattcctttgcaacttctcacttctcgaattccttctcttcaaaatcagaaatggctcaagtggttgctaccaggtcaattcaaggctcgatgttatctcccaacggtggatctgtgtctacaagatccgagaagctattgaaaccagcgagttttgcagtgaaggttcttggcaacgaagcaaagagaagtggaagagtctctgtaagaagcagaagagtggttgatactactgtgagatccgctcgtgttgagactgaagtcattcctgtttctcctgaagatgtgcctaacagagaggagcagcttgagaggttgttggaaatgcagcagtttggtgatacatcggtagggatgtggtcgaagccgacagtgaggaggaagacaaagattgtttgcaccgttggtccgtcgaccaacacacgagaaatgatatggaaattggctgaagctgggatgaatgttgctaggatgaatatgtctcatggagatcatgcttcacataagaaggttattgatttggttaaagaatacaatgcacaaactaaagacaacactattgctatcatgcttgacaccaagggtccggaagttaggagtggagatttacctcagccaattatgttagatcctggtcaagagtttacctttacaattgagagaggagtcagcacaccaagttgtgtcagtgttaactatgatgatttcgttaatgacgtggaagcgggtgacatgcttcttgttgatggtggtatgatgtcgtttatggtgaagtcaaagaccaaagactctgtcaaatgtgaagttgttgatggtggagaacttaagtcaaggagacacctgaatgtccgaggaaagagtgcaactttaccttcaatcactgagaaggactgggaggatattaaatttggagtggagaacaaagttgacttttatgcagtttcctttgtcaaagatgctcaagttgtacacgagttgaagaaataccttcaaaatagtggtgctgatatacacgtgatagtgaaaattgagagtgcagactccatacctaacttgcactccattatcacagcaccagatggggcaatggttgcaagaggtgatcttggtgcagagcttccaattgaagaagtccccattcttcaggaggagatcattaacctgtgccgtagtatgggaaaagctgttattgttgcgactaacatgcttgagagtatgatagttcatccaactccaacccgggcagaggtctcagacattgctatcgctgttagagaaggtgctgatgcggtaatgctttcaggagaaactgctcacggaaagttcccattgaaagctgctggagtgatgcacactgttgcattgcgaacagaagcaaccattactagcggtgaaatgccacctaatcttggtcaagccttcaagaaccatatgagtgagatgtttgcataccatgcaaccatgatgtcaaacacacttggaacttcaactgttgtcttcaccagaaccggtttcatggccatattgttaagtcactatcgtccttccggcacaatctatgccttcacaaatgagaaaaaaatacaacaaagattagctttgtatcaaggtgtatgccccatatatatggagttcacagatgatgcagaagaaacttttgctaatgctttggctacattactgaaacaaggaatggtgaagaagggagaggaaatagcaatcgtacagagcggtacacagccaatctggcgatctcaatcgacacataacatccaagtccgcaaggtttaaagcttcttttaagatgggatgtctttaatatgtagaacctcgtttttggttataattttcgttgcatgtctctcttctcttgtactattcacacttgttgtttgctgtatcttcttcttcagtttgctttgctacgattgtggtttttggagacattatagctcattaactgtttgtgagaccaaatgtgtcagaatccgctatt

SEQ ID NO: 39795 - protein, 624 aa, Arabidopsis thaliana
  peptide (1)..(624): Ceres Seq. ID no. 12396521
ALLLRLRKFRRKEPNPSLLCLSFRPLSSHSFATSHFSNSFSSKSEMAQVVATRSIQGSMLSPNGGSVSTRSEKLLKPASFAVKVLGNEAKRSGRVSVRSRRVVDTTVRSARVETEVIPVSPEDVPNREEQLERLLEMQQFGDTSVGMWSKPTVRRKTKIVCTVGPSTNTREMIWKLAEAGMNVARMNMSHGDHASHKKVIDLVKEYNAQTKDNTIAIMLDTKGPEVRSGDLPQPIMLDPGQEFTFTIERGVSTPSCVSVNYDDFVNDVEAGDMLLVDGGMMSFMVKSKTKDSVKCEVVDGGELKSRRHLNVRGKSATLPSITEKDWEDIKFGVENKVDFYAVSFVKDAQVVHELKKYLQNSGADIHVIVKIESADSIPNLHSIITAPDGAMVARGDLGAELPIEEVPILQEEIINLCRSMGKAVIVATNMLESMIVHPTPTRAEVSDIAIAVREGADAVMLSGETAHGKFPLKAAGVMHTVALRTEATITSGEMPPNLGQAFKNHMSEMFAYHATMMSNTLGTSTVVFTRTGFMAILLSHYRPSGTIYAFTNEKKIQQRLALYQGVCPIYMEFTDDAEETFANALATLLKQGMVKKGEEIAIVQSGTQPIWRSQSTHNIQVRKV

SEQ ID NO: 39796 - protein, 579 aa, Arabidopsis thaliana
  peptide (1)..(579): Ceres Seq. ID no. 12396522
MAQVVATRSIQGSMLSPNGGSVSTRSEKLLKPASFAVKVLGNEAKRSGRVSVRSRRVVDTTVRSARVETEVIPVSPEDVPNREEQLERLLEMQQFGDTSVGMWSKPTVRRKTKIVCTVGPSTNTREMIWKLAEAGMNVARMNMSHGDHASHKKVIDLVKEYNAQTKDNTIAIMLDTKGPEVRSGDLPQPIMLDPGQEFTFTIERGVSTPSCVSVNYDDFVNDVEAGDMLLVDGGMMSFMVKSKTKDSVKCEVVDGGELKSRRHLNVRGKSATLPSITEKDWEDIKFGVENKVDFYAVSFVKDAQVVHELKKYLQNSGADIHVIVKIESADSIPNLHSIITAPDGAMVARGDLGAELPIEEVPILQEEIINLCRSMGKAVIVATNMLESMIVHPTPTRAEVSDIAIAVREGADAVMLSGETAHGKFPLKAAGVMHTVALRTEATITSGEMPPNLGQAFKNHMSEMFAYHATMMSNTLGTSTVVFTRTGFMAILLSHYRPSGTIYAFTNEKKIQQRLALYQGVCPIYMEFTDDAEETFANALATLLKQGMVKKGEEIAIVQSGTQPIWRSQSTHNIQVRKV

SEQ ID NO: 39797 - protein, 566 aa, Arabidopsis thaliana
  peptide (1)..(566): Ceres Seq. ID no. 12396523
MLSPNGGSVSTRSEKLLKPASFAVKVLGNEAKRSGRVSVRSRRVVDTTVRSARVETEVIPVSPEDVPNREEQLERLLEMQQFGDTSVGMWSKPTVRRKTKIVCTVGPSTNTREMIWKLAEAGMNVARMNMSHGDHASHKKVIDLVKEYNAQTKDNTIAIMLDTKGPEVRSGDLPQPIMLDPGQEFTFTIERGVSTPSCVSVNYDDFVNDVEAGDMLLVDGGMMSFMVKSKTKDSVKCEVVDGGELKSRRHLNVRGKSATLPSITEKDWEDIKFGVENKVDFYAVSFVKDAQVVHELKKYLQNSGADIHVIVKIESADSIPNLHSIITAPDGAMVARGDLGAELPIEEVPILQEEIINLCRSMGKAVIVATNMLESMIVHPTPTRAEVSDIAIAVREGADAVMLSGETAHGKFPLKAAGVMHTVALRTEATITSGEMPPNLGQAFKNHMSEMFAYHATMMSNTLGTSTVVFTRTGFMAILLSHYRPSGTIYAFTNEKKIQQRLALYQGVCPIYMEFTDDAEETFANALATLLKQGMVKKGEEIAIVQSGTQPIWRSQSTHNIQVRKV

SEQ ID NO: 39798 - DNA, 692 bp, Arabidopsis thaliana
  misc_feature (1)..(692): Ceres Seq. ID no. 12562575
  misc_feature (1)..(692): Ortholog of  Ceres SEQ ID NO 12562293 as cited in SEQ ID NO 20690
atcacttacttaacatactaagagagttattagatcttgaaaaacatggcttccaaggctttgattctgttgggtctcttcgcaattcttctggtggtctccgaagtttctgccgcaaggatncgggcatggtgaagccagagagtgaggaaactgtgcaacctgaaggttatcacggaggacatggtggtcacggagggggaggccactacggaggaggaggccacgggcatggaggacacaacggaggagggggccacggacttgacggatacggaggaggacatggaggacactacggaggaggaggccacggacttgacggatacggaggaggtggaggacactatggaggaggtggaggacactacggaggaggtggaggacactacggaggaggtggaggacactacggaggaggtggtggaggacacggaggtggaggacactacggaggtggtggaggaggatacggaggtggaggaggacaccacggaggaggaggccacgggctaaacgaacctgttcagactaagccgggtgtttaaaactatataatatcttcactaccatgcatgattgcatatatatatatacgcttatgtattatctatatgcctataaataaaccatggtgagtttgtaacgcagtgccttcagaaatgttcggaataaatttccataatattagt

SEQ ID NO: 39799 - protein, 181 aa, Arabidopsis thaliana
  peptide (1)..(181): Ceres Seq. ID no. 12562576
  misc_feature (41)..(41): Xaa is any aa, unknown or other
HLLNILRELLDLEKHGFQGFDSVGSLRNSSGGLRSFCRKDXGMVKPESEETVQPEGYHGGHGGHGGGGHYGGGGHGHGGHNGGGGHGLDGYGGGHGGHYGGGGHGLDGYGGGGGHYGGGGGHYGGGGGHYGGGGGHYGGGGGGHGGGGHYGGGGGGYGGGGGHHGGGGHGLNEPVQTKPGV

SEQ ID NO: 39800 - protein, 139 aa, Arabidopsis thaliana
  peptide (1)..(139): Ceres Seq. ID no. 12562577
MVKPESEETVQPEGYHGGHGGHGGGGHYGGGGHGHGGHNGGGGHGLDGYGGGHGGHYGGGGHGLDGYGGGGGHYGGGGGHYGGGGGHYGGGGGHYGGGGGGHGGGGHYGGGGGGYGGGGGHHGGGGHGLNEPVQTKPGV

SEQ ID NO: 39801 - protein, 110 aa, Arabidopsis thaliana
  peptide (1)..(110): Ceres Seq. ID no. 12562578
MVVTEGEATTEEEATGMEDTTEEGATDLTDTEEDMEDTTEEEATDLTDTEEVEDTMEEVEDTTEEVEDTTEEVEDTTEEVVEDTEVEDTTEVVEEDTEVEEDTTEEEATG

SEQ ID NO: 39802 - DNA, 1273 bp, Arabidopsis thaliana
  misc_feature (1)..(1273): Ceres Seq. ID no. 13500210
  misc_feature (1)..(1273): Ortholog of  Ceres SEQ ID NO 13660872 as cited in SEQ ID NO 60830
  misc_feature (1)..(1273): Ortholog of  Ceres SEQ ID NO 12616221 as cited in SEQ ID NO 63291
ggagatctttaatctcagaatacaaaaaagaaaatcaaagaagatagttttgtgattgttttctataaaaagtgcagatattttctttgtcctagagaaagaggtgataggaaaaatgggtctccaagagcttgacccgttagcccaattgagcttaccgccgggttttcggttttatccgactgacgaagagctgatggttgaatatctctgtagaaaagccgccggtcacgacttctctctccagctcatagctgaaatcgatctctacaagtttgatccatgggttttaccaagtaaggcgttattcggtgaaaaagaatggtattttttcagcccgagggataggaagtatccaaacgggtcaagacctaatcgggttgccgggtcgggttattggtaagccaccggtacggataaagttatctcgacggagggaagaagagttggtatcaagaaagctttggtgttttacattggaaaagctccaaaaggaaccaaaaccaattggattatgcatgagtaccgtctcatcgaaccctctcgtcgaaatggaagcaccaagcttgatgattgggttttatgtcgaatatacaaaaagcaaacaagcgcacaaaaacaagcttacaataatctaatgacgagtggtcgtgaatacagcaacaatggttcgtcgacatcttcttcgtctcatcaatacgacgacgttctcgagtcgttgcatgagattgacaacagaagtttggggtttgccgccggttcatcaaacgcgctgcctcatagtcatagaccggttttaaccaatcataaaaccgggtttcagggtttagccagggagccaagttttgattgggcgaatttgattggacagaactcggtcccggaactcggactgagtcataacgttccgagtattcgttacggtgacggtggaacgcagcaacaaactgaggggattcctcggtttaataataactcggacgtctcggctaatcagggttttagtgttgacccggttaacggatttgggtactcgggtcaacaatctagtgggttcgggtttatttgattgtgtaatggtaacgtaataagaaaaacatatttttattttttgtccgtgtcagattagttaattaatatagcgtagaattcgaactctagggttagatttaggttctacgacttgtattgtatattcgtcgtcatttgtcctgacatttacatttttgtaaacttttatagctggaacttttgtattgatcaattatttatt

SEQ ID NO: 39803 - protein, 184 aa, Arabidopsis thaliana
  peptide (1)..(184): Ceres Seq. ID no. 13500211
MHEYRLIEPSRRNGSTKLDDWVLCRIYKKQTSAQKQAYNNLMTSGREYSNNGSSTSSSSHQYDDVLESLHEIDNRSLGFAAGSSNALPHSHRPVLTNHKTGFQGLAREPSFDWANLIGQNSVPELGLSHNVPSIRYGDGGTQQQTEGIPRFNNNSDVSANQGFSVDPVNGFGYSGQQSSGFGFI

SEQ ID NO: 39804 - protein, 143 aa, Arabidopsis thaliana
  peptide (1)..(143): Ceres Seq. ID no. 13500212
MTSGREYSNNGSSTSSSSHQYDDVLESLHEIDNRSLGFAAGSSNALPHSHRPVLTNHKTGFQGLAREPSFDWANLIGQNSVPELGLSHNVPSIRYGDGGTQQQTEGIPRFNNNSDVSANQGFSVDPVNGFGYSGQQSSGFGFI

SEQ ID NO: 39805 - protein, 95 aa, Arabidopsis thaliana
  peptide (1)..(95): Ceres Seq. ID no. 13500213
MGLQELDPLAQLSLPPGFRFYPTDEELMVEYLCRKAAGHDFSLQLIAEIDLYKFDPWVLPSKALFGEKEWYFFSPRDRKYPNGSRPNRVAGSGYW

SEQ ID NO: 39806 - DNA, 611 bp, Arabidopsis thaliana
  misc_feature (1)..(611): Ceres Seq. ID no. 12338945
  misc_feature (1)..(611): Ortholog of  Ceres SEQ ID NO 14308991 as cited in SEQ ID NO 0
acaacatgaacattagggtgagaagagatcgagagaagaatagtttgatcatcttgtgagaaaaataatggctgcttcagtgatgctatcttcggtgacattgaaaccagctggtttcacggtggagaagacggcggctagaggattaccgtcgctcacaagagctcgtccctccttcaaaattgtcgccagtggcgtcaagaagatcaagaccgacaagcccttcggaattaacggcagcatggacttgagggacggcgtcgacgcctccggcagaaagggcaagggatacggtgtttacaagtacgtcgacaagtatggagctaacgtcgatggatacagtcctatttacaacgagaacgagtggtcagcgagtggtgacgtgtacaagggaggagtcaccggattggcaatttgggcggtaactctcgccggaattcttgccggaggtgctcttcttgtgtacaacacaagtgctttggctcagtaaatcttaaagttgttagcgcatgtgtaatcatgtttctataaatgtttctgtgttgttctctttctctctaatgttgtaaaactcagacatactttgaatttataagacttctagtgtttgt

SEQ ID NO: 39807 - protein, 140 aa, Arabidopsis thaliana
  peptide (1)..(140): Ceres Seq. ID no. 12338947
MAASVMLSSVTLKPAGFTVEKTAARGLPSLTRARPSFKIVASGVKKIKTDKPFGINGSMDLRDGVDASGRKGKGYGVYKYVDKYGANVDGYSPIYNENEWSASGDVYKGGVTGLAIWAVTLAGILAGGALLVYNTSALAQ

SEQ ID NO: 39808 - protein, 135 aa, Arabidopsis thaliana
  peptide (1)..(135): Ceres Seq. ID no. 12338948
MLSSVTLKPAGFTVEKTAARGLPSLTRARPSFKIVASGVKKIKTDKPFGINGSMDLRDGVDASGRKGKGYGVYKYVDKYGANVDGYSPIYNENEWSASGDVYKGGVTGLAIWAVTLAGILAGGALLVYNTSALAQ

SEQ ID NO: 39809 - protein, 82 aa, Arabidopsis thaliana
  peptide (1)..(82): Ceres Seq. ID no. 12338949
MDLRDGVDASGRKGKGYGVYKYVDKYGANVDGYSPIYNENEWSASGDVYKGGVTGLAIWAVTLAGILAGGALLVYNTSALAQ

SEQ ID NO: 39810 - DNA, 1505 bp, Arabidopsis thaliana
  misc_feature (1)..(1505): Ceres Seq. ID no. 12396743
  misc_feature (1)..(1505): Ortholog of  Ceres SEQ ID NO 14311961 as cited in SEQ ID NO 51512
aaaatttgctccaatgcctgtacttttctcctctcgttctctcatactctccattattgtccccttacttatatctatcgctctctacaaactcgacacattcgaccccgctattgttccttccgatgcattcacatcctctgctacttcactcccgccgcttataaacgacgaatttctcaccggagctgagtttatcggtgtcggtcttctcaatatacccgaagatatcgcctaccataaggaatctaatctcatctacactggttgtgttgatggatgggtgaaacgagtcaaggtcgccgactcggttaatgactcagtcgttgaggattgggtcaatactggtggtagaccgctcggaatcgcgttcggaatccacggcgaagtcattgtcgcagagtacacaaggttggggttttgaaatcgaattttgaaaaatcacaatcttaggtttgactttgttgttatgtatagggactgttgaatataagcggtgacggaaagaagacggaattgttgacggacgaagcggacggtgtgaagtttaagctgacggatgcagttaccgttgcagataacggcgttttgtatttcacagatgcttcttacaagtacactctcaatcaattgagtttagacatgttagaagggaaaccttttggacgactcttgagctttgatcccaccacacgtgttacaaaagtacttctcaaagacctctacttcgctaatggcatcaccatctctcctgatcaaactcatctcatcttctgtgaaactccaatgtatgtgcattggatcagttaaattttttataaatttccgactcagtttgatttggcaataagttaatttatctatatctgttatatactactttaggaaaaggtgcagcaagtattacatcagtgaggagcgtgtggaggtattcactcaaagcttaccaggttatccagataacattcgttacgatggagatggacattactggattgcattgccttcggtaacgttacaaattgaatttcttttcttttctttgaggtcatgttattaactcattacatgctaataaaggatcatctttgtgttgtggttgtgcaaacagggagtcacgacattgtggaatatctcgttgaaataccctttcttgaggaaactcacagcaatggtggctaagtacggcgtggatcttatgtttatggagaatgcaggcgttttacaggtggatttggatggaaatcccatcgcgtactaccatgatccaaaactctctcacatagccacatgtgacaagattgggaaatatctctattgtggaagtctctcgcaatcacatatcctccgacttgatctcctgaaatatcctgcacagaacaagaaactttgaaatattatgttttcacaaataaggaaagtttccattttaggaaggagcattcactgtcacaaaaatgtaaactcatttcctgagaatgaatgatgattgtatctcttttttt

SEQ ID NO: 39811 - protein, 140 aa, Arabidopsis thaliana
  peptide (1)..(140): Ceres Seq. ID no. 12396744
KFAPMPVLFSSRSLILSIIVPLLISIALYKLDTFDPAIVPSDAFTSSATSLPPLINDEFLTGAEFIGVGLLNIPEDIAYHKESNLIYTGCVDGWVKRVKVADSVNDSVVEDWVNTGGRPLGIAFGIHGEVIVAEYTRLGF

SEQ ID NO: 39812 - protein, 136 aa, Arabidopsis thaliana
  peptide (1)..(136): Ceres Seq. ID no. 12396745
MPVLFSSRSLILSIIVPLLISIALYKLDTFDPAIVPSDAFTSSATSLPPLINDEFLTGAEFIGVGLLNIPEDIAYHKESNLIYTGCVDGWVKRVKVADSVNDSVVEDWVNTGGRPLGIAFGIHGEVIVAEYTRLGF

SEQ ID NO: 39813 - protein, 73 aa, Arabidopsis thaliana
  peptide (1)..(73): Ceres Seq. ID no. 12396746
MVAKYGVDLMFMENAGVLQVDLDGNPIAYYHDPKLSHIATCDKIGKYLYCGSLSQSHILRLDLLKYPAQNKKL

SEQ ID NO: 39814 - DNA, 1906 bp, Arabidopsis thaliana
  misc_feature (1)..(1906): Ceres Seq. ID no. 13488813
  misc_feature (1)..(1906): Ortholog of  Ceres SEQ ID NO 14311854 as cited in SEQ ID NO 51455
  misc_feature (1)..(1906): Ortholog of  Ceres SEQ ID NO 14313097 as cited in SEQ ID NO 58902
ggcaaaatgaatagagataatatataaacacaagcattaggctgtcgagaaaacataaattttctatgattaggccatacaaatcataataagtagtagaaatacaaaaaaatctgtttgttggctaaagagaaatcgaaggaattagtcttttcacccatttttctctctctgtgtggcttcttcttcttcttcttcttcctatcaaaatcatcatcatcatcttctctatattactaaaatagagagagccaacaaaagagaggagagggcgtaaaacagcagacggtggcgcaccgtagcaccgccccctcctaacctgcgcctttcttccttctctttcattttttttttttccggtttcaggaattattcctctcctcctctctcaggtcgcttcgatcccaaggcaaaatagtttcctgatttttgattcttaccttcgattttggcttcttcttcttcttcttcagatgcattcacctagaaaactctggcggacatcaaaggaaccctagcttttctccggtcttgttatatcgcctctatcgccgccgatcggtggtttgatttcaaatccaagagaaagaaacgcagaggttcatttctcaggatgctttggatcatgagattctccggtttattctccgccgctttggttatcatcgtcctctctccttctctccaatcgtttcctccagctgaagctatcagatcctctcatctcgacgcttacctccgtttcccctcctccgatccaccgccgcatagattctccttcagaaaagctcctgttttccgcaatgccgccgattgcgccgccgcagatatcgattccggcgtctgtaacccttccttggtccacgtcgcgattactctcgatttcgagtacctgcgtggctcaatcgccgccgttcattcgattctcaagcactcgtcgtgtcccgagagcgtcttcttccatttcctcgtctccgagactgacctagaatccttgattcgttcgacttttcccgaattgaaattaaaggtttactacttcgatccggagattgtacggacgctgatctcaacctccgtgagacaagcgctcgagcagccgttgaattacgctagaaattacctagctgaccttctcgagccttgcgtgcgtcgcgtgatctacctagattccgatctaatcgtcgtcgacgacatcgcaaagctctggatgacgaaactgggatcgaaaacgatcggagctcccgagtactgtcacgcgaacttcacaaagtatttcacaccggcgttctggtccgacgagaggttctccggagctttctccgggaggaaaccgtgctacttcaacacgggagtgatggtgatggatctagagagatggaggcgcgtagggtacacggaggtgatagagaaatggatggagattcagaagagtgataggatttacgagctgggatcattgccgccgttcttgttggtgttcgccggagaagtagctccgatagagcatcggtggaaccagcatgggcttggtggagataacgtgagaggaagctgtagagatttacatcccggtccggttagcttgcttcattggtccggtagtggtaaaccgtggtttcggttagattcgagacggccttgtccacttgatactctttgggcaccttatgatttgtatggacactactctcgctgatgatgattgatgatctctgttattacatattattatagtctcagtctcagctggtaaattctctcatctcctttgacaaaaaaaaaaacattctttcttctctcttttgattttaccaacttttggttggaatttgtttcgttactctgtattctattcgattgttctgtgcatcaaaccataggatacaatcagatttgttgttgt

SEQ ID NO: 39815 - protein, 361 aa, Arabidopsis thaliana
  peptide (1)..(361): Ceres Seq. ID no. 13488814
MLWIMRFSGLFSAALVIIVLSPSLQSFPPAEAIRSSHLDAYLRFPSSDPPPHRFSFRKAPVFRNAADCAAADIDSGVCNPSLVHVAITLDFEYLRGSIAAVHSILKHSSCPESVFFHFLVSETDLESLIRSTFPELKLKVYYFDPEIVRTLISTSVRQALEQPLNYARNYLADLLEPCVRRVIYLDSDLIVVDDIAKLWMTKLGSKTIGAPEYCHANFTKYFTPAFWSDERFSGAFSGRKPCYFNTGVMVMDLERWRRVGYTEVIEKWMEIQKSDRIYELGSLPPFLLVFAGEVAPIEHRWNQHGLGGDNVRGSCRDLHPGPVSLLHWSGSGKPWFRLDSRRPCPLDTLWAPYDLYGHYSR

SEQ ID NO: 39816 - protein, 357 aa, Arabidopsis thaliana
  peptide (1)..(357): Ceres Seq. ID no. 13488815
MRFSGLFSAALVIIVLSPSLQSFPPAEAIRSSHLDAYLRFPSSDPPPHRFSFRKAPVFRNAADCAAADIDSGVCNPSLVHVAITLDFEYLRGSIAAVHSILKHSSCPESVFFHFLVSETDLESLIRSTFPELKLKVYYFDPEIVRTLISTSVRQALEQPLNYARNYLADLLEPCVRRVIYLDSDLIVVDDIAKLWMTKLGSKTIGAPEYCHANFTKYFTPAFWSDERFSGAFSGRKPCYFNTGVMVMDLERWRRVGYTEVIEKWMEIQKSDRIYELGSLPPFLLVFAGEVAPIEHRWNQHGLGGDNVRGSCRDLHPGPVSLLHWSGSGKPWFRLDSRRPCPLDTLWAPYDLYGHYSR

SEQ ID NO: 39817 - DNA, 1565 bp, Arabidopsis thaliana
  misc_feature (1)..(1565): Ceres Seq. ID no. 12330249
  misc_feature (1)..(1565): Ortholog of  Ceres SEQ ID NO 14311989 as cited in SEQ ID NO 54997
acttgaatagagatcattcgtatttcatcgacgtttctaattcgcaatcacaattgttttcttcaaggaattggtttgcttgctttgatcctcagttttgtcaaaggtcttttttttttttttcctggacttgctaaaatctcttgtggcttttgctctgatacttgttagtttgggtttcgtgagtctcgctttataaaggatatgggacaaaagagatggttcttcttgttggcaatttttgtttgtcttgtttcatcttcatgtgttagagttctcaagtttaagagcgatgatggtcgacctgtgtacaatcatacgcttgccatcacacttgtggagtatacttctgcggtctatatgtctgatttgtcagaactcttcacttggacatgcgaaagatgcaatggtttgacaaagggttttgaggtaatagagataatagttgacgttgagcactgcttacaggcatatgttggggtggctaaggatttgaatgctatcattattgcatttcggggaactcaagaacaccatacaaaattgggtctcagacttgttctggaaacagctcgatctaaattaccctgatatgcaagatgcaatggtgcaccatggcttttatagtgcttatcacaatacaactgtacggcctgcagttttggatgcagtaaaacgagcaaaggaatcctatggggccaacctcaacatcatggtgactggtcattcaatgggaggagccatggcttccttttgtgcgctagacctagttgttaatgaaggagaagaaaacgtacaagttatgacatttgggcaacctcgtgttgggaatgctgcttttgcatcttatttcaatttgcttgtgcctaataccttccggatcatacatgaccatgacatagttcctcatctgcctccttactatcatcttttccctcaaaaaacatatcaccacttccccacagaggtgtggttgacagaactaagtattttgaatattgttatccgtggtgtggaaaaagtttgtgacaacaccggtgaagatcctacatgcagcagatcggtaatgggaaatagcatatctgaccatttaacgtactttggagtggaattgatgggtgagacttggaggcaatgtaacatagtgatgggccatgagatggagagttacagtaggaaagattcaaagggtaacatattcctttcgcggacagttccttccacggaggtaatcaaaacaaaaagtatatccaaaaccggaatctcaagtctataggagttggttgattcgagactcgaacaagaatgcttgcttgaaagggaggttgggagattcaaatgtgcaggaagaagaagggttctttcattctttgtggtcgtcaaagaaagtgaaacaaatgacaatcaagacattgtaaataagtcgtaggttgataccataataccatgtagcaaaaacaatacactgttcatttgttattcccttaatttaaatccatgatcacatatgtattggattcaaccttgtaaatatgtgaatgaatatccaattgctgtggatggtt

SEQ ID NO: 39818 - protein, 259 aa, Arabidopsis thaliana
  peptide (1)..(259): Ceres Seq. ID no. 12330250
MLSLLHFGELKNTIQNWVSDLFWKQLDLNYPDMQDAMVHHGFYSAYHNTTVRPAVLDAVKRAKESYGANLNIMVTGHSMGGAMASFCALDLVVNEGEENVQVMTFGQPRVGNAAFASYFNLLVPNTFRIIHDHDIVPHLPPYYHLFPQKTYHHFPTEVWLTELSILNIVIRGVEKVCDNTGEDPTCSRSVMGNSISDHLTYFGVELMGETWRQCNIVMGHEMESYSRKDSKGNIFLSRTVPSTEVIKTKSISKTGISSL

SEQ ID NO: 39819 - protein, 227 aa, Arabidopsis thaliana
  peptide (1)..(227): Ceres Seq. ID no. 12330251
MQDAMVHHGFYSAYHNTTVRPAVLDAVKRAKESYGANLNIMVTGHSMGGAMASFCALDLVVNEGEENVQVMTFGQPRVGNAAFASYFNLLVPNTFRIIHDHDIVPHLPPYYHLFPQKTYHHFPTEVWLTELSILNIVIRGVEKVCDNTGEDPTCSRSVMGNSISDHLTYFGVELMGETWRQCNIVMGHEMESYSRKDSKGNIFLSRTVPSTEVIKTKSISKTGISSL

SEQ ID NO: 39820 - protein, 223 aa, Arabidopsis thaliana
  peptide (1)..(223): Ceres Seq. ID no. 12330252
MVHHGFYSAYHNTTVRPAVLDAVKRAKESYGANLNIMVTGHSMGGAMASFCALDLVVNEGEENVQVMTFGQPRVGNAAFASYFNLLVPNTFRIIHDHDIVPHLPPYYHLFPQKTYHHFPTEVWLTELSILNIVIRGVEKVCDNTGEDPTCSRSVMGNSISDHLTYFGVELMGETWRQCNIVMGHEMESYSRKDSKGNIFLSRTVPSTEVIKTKSISKTGISSL

SEQ ID NO: 39821 - DNA, 1138 bp, Arabidopsis thaliana
  misc_feature (1)..(1138): Ceres Seq. ID no. 12329720
  misc_feature (1)..(1138): Ortholog of  Ceres SEQ ID NO 14307300 as cited in SEQ ID NO 54107
actacatcttctctctcttcttcgctcattctctcttcctcatatatttccaaaacaatacctttcttcttctctcttcagaagaaacgagagattcgagtgatgttttatgaactactactagtgtttttttccgtgaagtaaagagaaacggtaactttttctatttgttttcaagaaaagccaaagaaaaaaagaatttttaatatactctgttttttgcaatgattttgttttgtgaaatttttctcggagaagaaagtaatttagaagacggagagtggcaaaacgaaatataaaaaaaaaagttttcaatttcttttaagaaaaaaaaaaagctttttcccttcttaaaacccttcctctgtttcagaaacagagacataagaagaaaatagatcacaagctaattgcgttctcttctcttcttcttctactgggttttaaaatcaagaaaccatgtctgcaagtgttctaagtgatccaacaatgttaatttcaacaccagaggtaatactcgtttcgccggtgccggttactcaaatctccggagatgagccagattcggtaacttgtgactgttgcggattaaccgaggagtgtacacaatcgtacatagagatgatcagagagcgttacatggggaaatggatctgtgggctttgttctgaagctgtgaagtatgaagtcatgagaactaaacgattgttaacgacagaagaagccatggcaagacacatgaacatgtgtaataagttcaaatcctcaagcccaccaccgaatccgacaggacatttgatctctgcgatgagacagatcttgagaagaagcttagattcaccaagaatgcttagatctatgcctaatagcccatctaaagacgaccaagatcatcatcatgattgtgtttctaatgttttgtctaggtccgatagctgtttcgctagtttgacttgaaaaaaactcatcgttgaaaaaattgttttaaaccgtcggtttagggacccacttggatcaaatccggttttctgatttgaaattttcgtcggtaaatcaaaaattggtttctgtatgtgtttttgccggatttgttgttgtacttgtggaaaattttgggctaaaagaataatttggtgcc

SEQ ID NO: 39822 - protein, 165 aa, Arabidopsis thaliana
  peptide (1)..(165): Ceres Seq. ID no. 12329721
MSASVLSDPTMLISTPEVILVSPVPVTQISGDEPDSVTCDCCGLTEECTQSYIEMIRERYMGKWICGLCSEAVKYEVMRTKRLLTTEEAMARHMNMCNKFKSSSPPPNPTGHLISAMRQILRRSLDSPRMLRSMPNSPSKDDQDHHHDCVSNVLSRSDSCFASLT

SEQ ID NO: 39823 - protein, 155 aa, Arabidopsis thaliana
  peptide (1)..(155): Ceres Seq. ID no. 12329722
MLISTPEVILVSPVPVTQISGDEPDSVTCDCCGLTEECTQSYIEMIRERYMGKWICGLCSEAVKYEVMRTKRLLTTEEAMARHMNMCNKFKSSSPPPNPTGHLISAMRQILRRSLDSPRMLRSMPNSPSKDDQDHHHDCVSNVLSRSDSCFASLT

SEQ ID NO: 39824 - protein, 111 aa, Arabidopsis thaliana
  peptide (1)..(111): Ceres Seq. ID no. 12329723
MIRERYMGKWICGLCSEAVKYEVMRTKRLLTTEEAMARHMNMCNKFKSSSPPPNPTGHLISAMRQILRRSLDSPRMLRSMPNSPSKDDQDHHHDCVSNVLSRSDSCFASLT

SEQ ID NO: 39825 - DNA, 1170 bp, Arabidopsis thaliana
  misc_feature (1)..(1170): Ceres Seq. ID no. 12370981
  misc_feature (1)..(1170): Ortholog of  Ceres SEQ ID NO 13647847 as cited in SEQ ID NO 20430
  misc_feature (1)..(1170): Ortholog of  Ceres SEQ ID NO 15171696 as cited in SEQ ID NO 59997
atctttttgtaatcgatttgcaatttcaatttcgcaaagttggatcatgggcaatgtcataagcggtggaagccgcccggaaaatcatcgggaccgtacttcgccgccgtatccaaaccctaatgctcagtaccaaggcaattatccgtcgccgtaccaagattgtgctaggtatccgtatggagagatggcgtctccagtgcaatacgtagagcatcaggaagcagtgactataaggaacgacatcaatctgaagaaagaaactttgagacttgagcctgatgaacagaaccctggcaagtttttgctctccttcacttttgacgcctctgttcctggaagcatcactgtaatgttctttgctaaagaaggcaaagactgtaaccttattgcgacaaaggaggatctttttccatccactcaagttagttttgcaaaaggtctggaacagagattcaagcaggcttgtgggacagggattgatttctcagatatgtcagaggcagatttggttgaggcaaacgagacagatgtgtatcatgtggcagtgaaagcagaggtagtatcagaagatgatcatcctgagtctgggacaccaaacagacagataactcatgtggttttagagaaagatcataagggtgagtacaaggcgagagtggtgaagcagatcctgtgggtgaatgggaataggtatgttcttcaagagatttatgggattggtaatacagttgatgataatggagaagatgcgaatgaaagaggaaaagaatgcgtcatctgcttatctgagccacgggataccactgttctcccttgcaggcacatgtgtatgtgtagcggttgtgcaaagcttttgaggtttcagacaaacctctgccccatctgtagacaaccggtggataggcttttggagataacagtgaacaacaacgacaggaactagtgagccttgctacgttactcttctcctgtttttatataaagactgcttcccaatgttcttgtttgtggtatcggtatatatgcaggcattagaactcaagttacaaacttacatatgccaaatgacacttaaattccgggttttacttccaagtgttttgtaaatcatcatgctactttgtctagcggtcttcgttgttaatgaagtgaacaacttttgcagtg

SEQ ID NO: 39826 - protein, 314 aa, Arabidopsis thaliana
  peptide (1)..(314): Ceres Seq. ID no. 12370982
SFCNRFAISISQSWIMGNVISGGSRPENHRDRTSPPYPNPNAQYQGNYPSPYQDCARYPYGEMASPVQYVEHQEAVTIRNDINLKKETLRLEPDEQNPGKFLLSFTFDASVPGSITVMFFAKEGKDCNLIATKEDLFPSTQVSFAKGLEQRFKQACGTGIDFSDMSEADLVEANETDVYHVAVKAEVVSEDDHPESGTPNRQITHVVLEKDHKGEYKARVVKQILWVNGNRYVLQEIYGIGNTVDDNGEDANERGKECVICLSEPRDTTVLPCRHMCMCSGCAKLLRFQTNLCPICRQPVDRLLEITVNNNDRN

SEQ ID NO: 39827 - protein, 299 aa, Arabidopsis thaliana
  peptide (1)..(299): Ceres Seq. ID no. 12370983
MGNVISGGSRPENHRDRTSPPYPNPNAQYQGNYPSPYQDCARYPYGEMASPVQYVEHQEAVTIRNDINLKKETLRLEPDEQNPGKFLLSFTFDASVPGSITVMFFAKEGKDCNLIATKEDLFPSTQVSFAKGLEQRFKQACGTGIDFSDMSEADLVEANETDVYHVAVKAEVVSEDDHPESGTPNRQITHVVLEKDHKGEYKARVVKQILWVNGNRYVLQEIYGIGNTVDDNGEDANERGKECVICLSEPRDTTVLPCRHMCMCSGCAKLLRFQTNLCPICRQPVDRLLEITVNNNDRN

SEQ ID NO: 39828 - protein, 252 aa, Arabidopsis thaliana
  peptide (1)..(252): Ceres Seq. ID no. 12370984
MASPVQYVEHQEAVTIRNDINLKKETLRLEPDEQNPGKFLLSFTFDASVPGSITVMFFAKEGKDCNLIATKEDLFPSTQVSFAKGLEQRFKQACGTGIDFSDMSEADLVEANETDVYHVAVKAEVVSEDDHPESGTPNRQITHVVLEKDHKGEYKARVVKQILWVNGNRYVLQEIYGIGNTVDDNGEDANERGKECVICLSEPRDTTVLPCRHMCMCSGCAKLLRFQTNLCPICRQPVDRLLEITVNNNDRN

SEQ ID NO: 39829 - DNA, 1659 bp, Arabidopsis thaliana
  misc_feature (1)..(1659): Ceres Seq. ID no. 13491257
  misc_feature (1)..(1659): Ortholog of  Ceres SEQ ID NO 15169511 as cited in SEQ ID NO 65927
aatttctcaataacgctctcagagagaccatttgatgaagcttctcgcttctggaatttgaaaaggaacttgttatggagataatctcactgaacgttgtgccccagtgctctgtggttacttggagtagtaaattagcaacgaaaagattggtcccaaatcggtcaagtttgttattctcaggggtcaaaaaatccagacttgtgattcgaagtggaaattccgatggttatgttgttggtgagaatgatgacttgggtcgtatagccagaagaggagaatcaacgtcaaaggttttgattcctggtttgcctgatgaatcaaatggtgaaattgctgctcgaatcagtcattctcactgcgagtggaagcccaagcttagagtacattatgagaaaagccggttgtgacaatctcgatgctcctgcggtgttgtttcttcctgggctttggcgttggttcatttcactatgagaagcagcttaccgatttgggaagggattatcgagtatgggctattgattttcttggacagggtttatctctccctactgaagatcctactaccatgactgaagaaaccagttcctcggaagataaggaaccattttggggatttggtgacaaaactgaaccgtgggctgatcaacttgtattctctctggatctctggagggatcaagttcagtattttgtagaagaggttatcggtgagcctgtgtacattgctgggaactcacttggagggtatgtagctctctactttgcagcaacccatcctcacctggttaagggtgttaccttgcttaatgcaacacctttctggggtttcttccctaatccagtaagatccccaaagctagcacgtctctttccatggcccggagcattccctctgccggaaagagtgaaaaaaatcacagaattggtgtggcaaaagataagtgatcctgaaagcatagctgagatacttaaacaggtctacacagaccattctaccaatgtggataaagtattctcacgtattgtggaggtcacacagcatccggctgctgcagcatcgtttgcttcaattatgcttgctcctggtggagagctatctttctccgaagctttatctaggtgtaaggaaaacaatgttcagatatgtctcatgtatggaagagaagatccatgggtgagaccgttatggggaaagaagataaagaaggaaatccccaacgctccatactacgagatcagcccagcgggtcactgcccacacgatgaagtccctgaggtggtgaactatctgatgcgcgggtggatcaagcacctggagtctggtggttttgaagcgctcccgcttttggaggacactgaagaagattgggaggagtccaggattggtagagaaattgagttcccgagagatggttggaaaaaagcagtgaatctgtggttatatgggtcaaactatacgtactggagaggagttagagaatctttcagatccagttttataagggtgtttggagggaagtctgcatagaagaagcatggaacagtcgtctagtgtaaattaattgtaatctatgttgcatccgatgctagctatataatgttgtctgtagaatcaagtttctaaaatgttcaaaaggaaaagttagaaaaatatcc

SEQ ID NO: 39830 - protein, 370 aa, Arabidopsis thaliana
  peptide (1)..(370): Ceres Seq. ID no. 13491258
MLLRCCFFLGFGVGSFHYEKQLTDLGRDYRVWAIDFLGQGLSLPTEDPTTMTEETSSSEDKEPFWGFGDKTEPWADQLVFSLDLWRDQVQYFVEEVIGEPVYIAGNSLGGYVALYFAATHPHLVKGVTLLNATPFWGFFPNPVRSPKLARLFPWPGAFPLPERVKKITELVWQKISDPESIAEILKQVYTDHSTNVDKVFSRIVEVTQHPAAAASFASIMLAPGGELSFSEALSRCKENNVQICLMYGREDPWVRPLWGKKIKKEIPNAPYYEISPAGHCPHDEVPEVVNYLMRGWIKHLESGGFEALPLLEDTEEDWEESRIGREIEFPRDGWKKAVNLWLYGSNYTYWRGVRESFRSSFIRVFGGKSA

SEQ ID NO: 39831 - protein, 320 aa, Arabidopsis thaliana
  peptide (1)..(320): Ceres Seq. ID no. 13491259
MTEETSSSEDKEPFWGFGDKTEPWADQLVFSLDLWRDQVQYFVEEVIGEPVYIAGNSLGGYVALYFAATHPHLVKGVTLLNATPFWGFFPNPVRSPKLARLFPWPGAFPLPERVKKITELVWQKISDPESIAEILKQVYTDHSTNVDKVFSRIVEVTQHPAAAASFASIMLAPGGELSFSEALSRCKENNVQICLMYGREDPWVRPLWGKKIKKEIPNAPYYEISPAGHCPHDEVPEVVNYLMRGWIKHLESGGFEALPLLEDTEEDWEESRIGREIEFPRDGWKKAVNLWLYGSNYTYWRGVRESFRSSFIRVFGGKSA

SEQ ID NO: 39832 - DNA, 3209 bp, Arabidopsis thaliana
  misc_feature (1)..(3209): Ceres Seq. ID no. 12599971
  misc_feature (1)..(3209): Ortholog of  Ceres SEQ ID NO 13646569 as cited in SEQ ID NO 20745
ctttctctctctctctctcgtgtgtgtgtgtgtgatcgagtggtgaaacgacagagaggggcgtcgttttgttgatttcttctgggtgaagatgtcaggtctcgaagatatcaagaacgagaccgttgatctggaaaaaattccgattgaggaagttttccagcagctaaaatgtacaagggaaggattgacaacgcaggaaggggaagacaggattgtgatatttggccccaacaagctcgaagagaagaaggaaagcaaaattctgaagtttctggggttcatgtggaatccgctttcatgggttatggaagctgcagctctcatggccattgctttggctaatggtgataatcgacctccggattggcaagattttgtgggtattatctgtctgcttgttatcaactccacaatcagtttcattgaagaaaacaacgccggaaatgctgcagctgctctcatggctggtcttgctcctaaaaccaaggttcttagggatggaaaatggagtgaacaagaggctgctatccttgtcccaggtgatattgttagcattaaacttggagacattatcccagccgatgcccgtcttcttgaaggagatcctttaaaggttgatcagtctgctctaactggagagtcccttcctgtgaccaagcaccctggtcaagaagttttctctggttcaacttgtaaacaaggagaaatcgaagcggttgttatagccactggagttcacaccttctttggtaaagctgctcaccttgtggacagcactaaccaagttgggcacttccagaaagttcttacatccattggaaacttctgtatctgttctattgctattggtatagcgattgaaatagtcgtcatgtaccctatccaacaccgaaagtacagagatggaattgacaatctcttggtcctcttgatcggtggtatccccattgctatgcccacggtcttgtctgtgactatggctatcgggtctcacaggttgtctcagcaaggtgctatcaccaaacgtatgacagccattgaagaaatggcgggaatggatgtcctttgcagtgacaaaaccgggacactaacccttaataaattgagtgtggataaaaacttggttgaggttttctgcaagggtgtggagaaagatcaagttctactatttgcagctatggcttctagggtggagaaccaggacgctattgatgcagccatggttggaatgcttgctgatccgaaagaggcccgagctggaatcagagaggttcacttccttccattcaaccctgtggataagagaactgctttgacttacatcgactctgatggtaactggcacagagtcagcaaaggtgctcccgagcagatccttgaccttgccaatgccaggcctgaccttaggaagaaggtactctcttgtattgacaagtacgctgagcgcggtcttaggtcgttggcagtagctcgtcaggtggtacccgagaaaacaaaagaaagcccaggtggaccatgggaatttgttggcttgttgcctctttttgaccctccaagacacgacagtgccgaaaccattcgtagggcgttgaatctaggtgttaatgtgaagatgatcactggtgatcaacttgctattggtaaggaaaccggtcgcaggcttggaatgggaaccaatatgtatccatctgcggctcttctcggtaccgacaaggactcgaacattgcatccatccctgttgaggagttgatcgagaaggctgatgggtttgccggcgtctttccagagcacaaatatgaaattgtgaaaaagctgcaggagaggaagcacattgttggtatgaccggtgatggtgttaatgatgcacccgctttgaagaaagcagatatcggtattgctgtggccgatgctacagatgctgctcgtggtgcttcagatatcgtcctcacggaacctgggctgagtgtcatcatcagtgccgttctcactagcagagctatcttccagagaatgaagaactacaccatttatgcagtctcaatcacaatccgtattgtgtttggtttcatgcttattgctttgatatgggaatttgacttctcagcgttcatggttctgattattgccatccttaatgatggtactatcatgacaatctcaaaggacagagtcaagccatctcccacacctgatagctggaagctcaaagaaattttcgccactggaattgtgctgggaggctaccaagccattatgagtgttattttcttctgggctgctcacaagaccgactttttctcggacaagttcggtgtgaggtcaatcagggacaataacgatgaactaatgggtgctgtgtatctacaagttagtatcatcagtcaagctctaatctttgtcaccaggtcaaggagttggtcatttgtcgaacgtcctggggcgcttctgatgattgcattcgtcattgcacaactggttgcaactttgatcgcagtgtatgccgactggacatttgcaaaggtgaagggtatcggttggggatgggcaggtgtgatttggatttacagtatcgtaacatacttcccacaggacattttgaagtttgccattcggtatatcttgagtggaaaggcttgggccagcttgtttgacaacaggaccgctttcacaaccaagaaagattacggtattggagaaagagaagctcaatgggcacaagctcaaaggacattgcacggtctgcagccaaaagaagatgttaatatcttcccagagaaaggaagttacagagagctgtctgagatcgcagagcaagccaagagaagggccgagatagctaggcttagggagcttcacacattgaagggacatgtggaatcagtcgcaaagctaaagggattggacattgatacagcaggacatcactacactgtgtagttggagttgcacaacaacacaaacatttaccgaaaaccaaccccatcatgactcatcttttgttttgtcttcacaaatctctctttaaaagtcattacagtagagggaagagaactcttgtgtattgccataactcttccaaaactcttttttctttttgttattgttagtcattgttcttaaaactcctactcgatatgagctttgcaaatttgcctttgaagaaacaaggccctttgcctttgaagagacaaggcactttgctttt

SEQ ID NO: 39833 - protein, 949 aa, Arabidopsis thaliana
  peptide (1)..(949): Ceres Seq. ID no. 12599972
MSGLEDIKNETVDLEKIPIEEVFQQLKCTREGLTTQEGEDRIVIFGPNKLEEKKESKILKFLGFMWNPLSWVMEAAALMAIALANGDNRPPDWQDFVGIICLLVINSTISFIEENNAGNAAAALMAGLAPKTKVLRDGKWSEQEAAILVPGDIVSIKLGDIIPADARLLEGDPLKVDQSALTGESLPVTKHPGQEVFSGSTCKQGEIEAVVIATGVHTFFGKAAHLVDSTNQVGHFQKVLTSIGNFCICSIAIGIAIEIVVMYPIQHRKYRDGIDNLLVLLIGGIPIAMPTVLSVTMAIGSHRLSQQGAITKRMTAIEEMAGMDVLCSDKTGTLTLNKLSVDKNLVEVFCKGVEKDQVLLFAAMASRVENQDAIDAAMVGMLADPKEARAGIREVHFLPFNPVDKRTALTYIDSDGNWHRVSKGAPEQILDLANARPDLRKKVLSCIDKYAERGLRSLAVARQVVPEKTKESPGGPWEFVGLLPLFDPPRHDSAETIRRALNLGVNVKMITGDQLAIGKETGRRLGMGTNMYPSAALLGTDKDSNIASIPVEELIEKADGFAGVFPEHKYEIVKKLQERKHIVGMTGDGVNDAPALKKADIGIAVADATDAARGASDIVLTEPGLSVIISAVLTSRAIFQRMKNYTIYAVSITIRIVFGFMLIALIWEFDFSAFMVLIIAILNDGTIMTISKDRVKPSPTPDSWKLKEIFATGIVLGGYQAIMSVIFFWAAHKTDFFSDKFGVRSIRDNNDELMGAVYLQVSIISQALIFVTRSRSWSFVERPGALLMIAFVIAQLVATLIAVYADWTFAKVKGIGWGWAGVIWIYSIVTYFPQDILKFAIRYILSGKAWASLFDNRTAFTTKKDYGIGEREAQWAQAQRTLHGLQPKEDVNIFPEKGSYRELSEIAEQAKRRAEIARLRELHTLKGHVESVAKLKGLDIDTAGHHYTV

SEQ ID NO: 39834 - protein, 885 aa, Arabidopsis thaliana
  peptide (1)..(885): Ceres Seq. ID no. 12599973
MWNPLSWVMEAAALMAIALANGDNRPPDWQDFVGIICLLVINSTISFIEENNAGNAAAALMAGLAPKTKVLRDGKWSEQEAAILVPGDIVSIKLGDIIPADARLLEGDPLKVDQSALTGESLPVTKHPGQEVFSGSTCKQGEIEAVVIATGVHTFFGKAAHLVDSTNQVGHFQKVLTSIGNFCICSIAIGIAIEIVVMYPIQHRKYRDGIDNLLVLLIGGIPIAMPTVLSVTMAIGSHRLSQQGAITKRMTAIEEMAGMDVLCSDKTGTLTLNKLSVDKNLVEVFCKGVEKDQVLLFAAMASRVENQDAIDAAMVGMLADPKEARAGIREVHFLPFNPVDKRTALTYIDSDGNWHRVSKGAPEQILDLANARPDLRKKVLSCIDKYAERGLRSLAVARQVVPEKTKESPGGPWEFVGLLPLFDPPRHDSAETIRRALNLGVNVKMITGDQLAIGKETGRRLGMGTNMYPSAALLGTDKDSNIASIPVEELIEKADGFAGVFPEHKYEIVKKLQERKHIVGMTGDGVNDAPALKKADIGIAVADATDAARGASDIVLTEPGLSVIISAVLTSRAIFQRMKNYTIYAVSITIRIVFGFMLIALIWEFDFSAFMVLIIAILNDGTIMTISKDRVKPSPTPDSWKLKEIFATGIVLGGYQAIMSVIFFWAAHKTDFFSDKFGVRSIRDNNDELMGAVYLQVSIISQALIFVTRSRSWSFVERPGALLMIAFVIAQLVATLIAVYADWTFAKVKGIGWGWAGVIWIYSIVTYFPQDILKFAIRYILSGKAWASLFDNRTAFTTKKDYGIGEREAQWAQAQRTLHGLQPKEDVNIFPEKGSYRELSEIAEQAKRRAEIARLRELHTLKGHVESVAKLKGLDIDTAGHHYTV

SEQ ID NO: 39835 - protein, 877 aa, Arabidopsis thaliana
  peptide (1)..(877): Ceres Seq. ID no. 12599974
MEAAALMAIALANGDNRPPDWQDFVGIICLLVINSTISFIEENNAGNAAAALMAGLAPKTKVLRDGKWSEQEAAILVPGDIVSIKLGDIIPADARLLEGDPLKVDQSALTGESLPVTKHPGQEVFSGSTCKQGEIEAVVIATGVHTFFGKAAHLVDSTNQVGHFQKVLTSIGNFCICSIAIGIAIEIVVMYPIQHRKYRDGIDNLLVLLIGGIPIAMPTVLSVTMAIGSHRLSQQGAITKRMTAIEEMAGMDVLCSDKTGTLTLNKLSVDKNLVEVFCKGVEKDQVLLFAAMASRVENQDAIDAAMVGMLADPKEARAGIREVHFLPFNPVDKRTALTYIDSDGNWHRVSKGAPEQILDLANARPDLRKKVLSCIDKYAERGLRSLAVARQVVPEKTKESPGGPWEFVGLLPLFDPPRHDSAETIRRALNLGVNVKMITGDQLAIGKETGRRLGMGTNMYPSAALLGTDKDSNIASIPVEELIEKADGFAGVFPEHKYEIVKKLQERKHIVGMTGDGVNDAPALKKADIGIAVADATDAARGASDIVLTEPGLSVIISAVLTSRAIFQRMKNYTIYAVSITIRIVFGFMLIALIWEFDFSAFMVLIIAILNDGTIMTISKDRVKPSPTPDSWKLKEIFATGIVLGGYQAIMSVIFFWAAHKTDFFSDKFGVRSIRDNNDELMGAVYLQVSIISQALIFVTRSRSWSFVERPGALLMIAFVIAQLVATLIAVYADWTFAKVKGIGWGWAGVIWIYSIVTYFPQDILKFAIRYILSGKAWASLFDNRTAFTTKKDYGIGEREAQWAQAQRTLHGLQPKEDVNIFPEKGSYRELSEIAEQAKRRAEIARLRELHTLKGHVESVAKLKGLDIDTAGHHYTV

SEQ ID NO: 39836 - DNA, 1812 bp, Arabidopsis thaliana
  misc_feature (1)..(1812): Ceres Seq. ID no. 13494298
  misc_feature (1)..(1812): Ortholog of  Ceres SEQ ID NO 14311219 as cited in SEQ ID NO 56635
  misc_feature (1)..(1812): Ortholog of  Ceres SEQ ID NO 15169615 as cited in SEQ ID NO 66708
  misc_feature (1)..(1812): Ortholog of  Ceres SEQ ID NO 15169619 as cited in SEQ ID NO 67512
tggagagaaatcagcttcaagcttaagagagcttcgaaagcgaaagcgacgatttcttctccatcgtgagagcaaatctccagagccgttttctcttcttcttcttcctcctcgcgccgtctctgaaactccatcatcgtatcaatcaaattgcttcctcctccaaattgaaaaacaatggaattggattcggagaacaaattgttgaagacgggtttggttatagtggcgacacttgttatagccaaactcatcttctctttcttcacttctgattctaagaagaagcgtcttcctcctactcttaaagcttggcctccattggttggaagtcttatcaaattcttgaaaggacctattattatgcttagagaggaataccctaagcttggaagtgtgtttactgttaatcttgttcacaaaaagattacttttcttattggtcctgaagtctctgctcattttttcaaagcttctgaatctgatcttagtcagcaggaagtgtatcagttcaatgtccctacttttggtcctggagttgttttcgatgttgattattctgttcgtcaggagcagtttcggttcttcactgaggcacttagagttaacaagttgaagggttatgtggatatgatggttactgaagctgaggattacttctctaaatggggagagagtggtgaagttgatattaaggttgagctagagaggctcatcatcttgactgcaagtagatgtttactgggtcgagaagttcgtgatcagctttttgatgatgtctctgctttgttccatgaccttgacaatggaatgcttcccatcagtgttctcttcccatatctcccaattccagctcaccgccgtcgtgaccgtgcccgagaaaagctttcggagattttcgcaaaaatcattgggtcgagaaaacgctctggaaaaacagagaacgacatgctgcagtgtttcatcgaatcaaagtacaaagatggtagacagacaaccgaatctgaagtcactggtttgctcattgctgctctgtttgcaggacaacacacgagctctatcacttccacctggaccggtgcttatctgatgcgatacaaagagtacttctcagctgctcttgatgagcagaagaacctgattgcgaaacatggagacaagatcgatcatgatatcttatccgagatggatgttctctaccgctgcattaaggaagcgttgaggcttcaccctccactcatcatgttaatgagagcctcgcacagtgatttcagcgtgacagctcgggatggaaaaacttacgatatcccaaagggtcacatcgttgcaacctcccctgcatttgccaaccgcttaccgcacatcttcaaagaccccgacacctacgacccagaaagattctcccctggaagagaagaggacaaagccgcaggggcattctcgtacattgcattcggagggggaaggcacgggtgccttggagagccgtttgcttacctgcagatcaaagccatatggagtcatttgttgaggaacttcgagcttgagctagtttcaccgttccctgagattgactggaacgctatggtggttggagttaaaggcaatgtgatggtgcgttacaagaggcgccagctttcttaaagacaagtttaaggttattgcagctttggatttttctctctggtttctgctttgcttttgtccctctctggttttagttttgttgttgaataattcttctgtttttataaactgttgttactctttaattgacatttatttttaagcttctaagtttgttggttctgc

SEQ ID NO: 39837 - protein, 488 aa, Arabidopsis thaliana
  peptide (1)..(488): Ceres Seq. ID no. 13494299
MELDSENKLLKTGLVIVATLVIAKLIFSFFTSDSKKKRLPPTLKAWPPLVGSLIKFLKGPIIMLREEYPKLGSVFTVNLVHKKITFLIGPEVSAHFFKASESDLSQQEVYQFNVPTFGPGVVFDVDYSVRQEQFRFFTEALRVNKLKGYVDMMVTEAEDYFSKWGESGEVDIKVELERLIILTASRCLLGREVRDQLFDDVSALFHDLDNGMLPISVLFPYLPIPAHRRRDRAREKLSEIFAKIIGSRKRSGKTENDMLQCFIESKYKDGRQTTESEVTGLLIAALFAGQHTSSITSTWTGAYLMRYKEYFSAALDEQKNLIAKHGDKIDHDILSEMDVLYRCIKEALRLHPPLIMLMRASHSDFSVTARDGKTYDIPKGHIVATSPAFANRLPHIFKDPDTYDPERFSPGREEDKAAGAFSYIAFGGGRHGCLGEPFAYLQIKAIWSHLLRNFELELVSPFPEIDWNAMVVGVKGNVMVRYKRRQLS

SEQ ID NO: 39838 - protein, 426 aa, Arabidopsis thaliana
  peptide (1)..(426): Ceres Seq. ID no. 13494300
MLREEYPKLGSVFTVNLVHKKITFLIGPEVSAHFFKASESDLSQQEVYQFNVPTFGPGVVFDVDYSVRQEQFRFFTEALRVNKLKGYVDMMVTEAEDYFSKWGESGEVDIKVELERLIILTASRCLLGREVRDQLFDDVSALFHDLDNGMLPISVLFPYLPIPAHRRRDRAREKLSEIFAKIIGSRKRSGKTENDMLQCFIESKYKDGRQTTESEVTGLLIAALFAGQHTSSITSTWTGAYLMRYKEYFSAALDEQKNLIAKHGDKIDHDILSEMDVLYRCIKEALRLHPPLIMLMRASHSDFSVTARDGKTYDIPKGHIVATSPAFANRLPHIFKDPDTYDPERFSPGREEDKAAGAFSYIAFGGGRHGCLGEPFAYLQIKAIWSHLLRNFELELVSPFPEIDWNAMVVGVKGNVMVRYKRRQLS

SEQ ID NO: 39839 - protein, 337 aa, Arabidopsis thaliana
  peptide (1)..(337): Ceres Seq. ID no. 13494301
MMVTEAEDYFSKWGESGEVDIKVELERLIILTASRCLLGREVRDQLFDDVSALFHDLDNGMLPISVLFPYLPIPAHRRRDRAREKLSEIFAKIIGSRKRSGKTENDMLQCFIESKYKDGRQTTESEVTGLLIAALFAGQHTSSITSTWTGAYLMRYKEYFSAALDEQKNLIAKHGDKIDHDILSEMDVLYRCIKEALRLHPPLIMLMRASHSDFSVTARDGKTYDIPKGHIVATSPAFANRLPHIFKDPDTYDPERFSPGREEDKAAGAFSYIAFGGGRHGCLGEPFAYLQIKAIWSHLLRNFELELVSPFPEIDWNAMVVGVKGNVMVRYKRRQLS

SEQ ID NO: 39840 - DNA, 756 bp, Arabidopsis thaliana
  misc_feature (1)..(756): Ceres Seq. ID no. 12673930
  misc_feature (1)..(756): Ortholog of  Ceres SEQ ID NO 12635272 as cited in SEQ ID NO 495
  misc_feature (1)..(756): Ortholog of  Ceres SEQ ID NO 13594789 as cited in SEQ ID NO 52172
  misc_feature (1)..(756): Ortholog of  Ceres SEQ ID NO 14306131 as cited in SEQ ID NO 52246
  misc_feature (1)..(756): Ortholog of  Ceres SEQ ID NO 14309585 as cited in SEQ ID NO 52660
  misc_feature (1)..(756): Ortholog of  Ceres SEQ ID NO 14305267 as cited in SEQ ID NO 0
agaatccaaaaccaaaccttcagatcataaatccaaaaccactcatttttctattactgaaatttttcttagagaagaagaagaagaagcaaaatggccacaagcgcatcagctttgctctcaccaaccacattctccactgcaatctcccacaaaaaccctaactccatctcattccatggccttcgtcccctccgtctaggtggctcctcctccgccctacccaaactatcaaccaccgggagaaaatcctcctccgctgtcgtgagagctgagctaagcccttccatcgtcataagtctcagcacaggtctctccctcttcctcggccgtttcgtcttcttcaacttccagagagagaacgtagcaaaacagggcttaccggagcagaacggaaaaacccatttcgaagctggagatgatcgtgctaaggagtacgtcagtctcttgaaatcgaacgatccaattggattcaacattgttgatgttcttgcttggggttctattggacacatcgttgcttactacatcttggctacttccagcaatggatacgacccaagcttctttggatgattcgtttcaatgtcaatctctcgtatatgtatatgtatatgtttgacttgtgttgcaagctatctaatctgttctctatctctgtttcttcttctgttgttgttgttgttgtctaagacttgtccctctttttgcaaatgttttatttctccatttacaaagattggtttgcagagtttt

SEQ ID NO: 39841 - protein, 160 aa, Arabidopsis thaliana
  peptide (1)..(160): Ceres Seq. ID no. 12673931
MATSASALLSPTTFSTAISHKNPNSISFHGLRPLRLGGSSSALPKLSTTGRKSSSAVVRAELSPSIVISLSTGLSLFLGRFVFFNFQRENVAKQGLPEQNGKTHFEAGDDRAKEYVSLLKSNDPIGFNIVDVLAWGSIGHIVAYYILATSSNGYDPSFFG

SEQ ID NO: 39842 - DNA, 1381 bp, Arabidopsis thaliana
  misc_feature (1)..(1381): Ceres Seq. ID no. 12329619
  misc_feature (1)..(1381): Ortholog of  Ceres SEQ ID NO 13597747 as cited in SEQ ID NO 69071
agttccccacaaagctcgttgtcgtcatcgcgcgagcttgaaccaaaaaaccatgaacagtgataaggaagaggagccattggaagagatcggcgattcgaataatgttctcgatctcactagctatcagctccacagtctcgatacggtcgagttaccgccgaacctgattgagctggaccttacggcgaaccgtttgtcgggattggactcgaggatcgctcagctctccacgcttaagaagctttctctccgccaaaacctaattgatgattccgccgtcgaaccgttgtctcactgggacgccttgtccgatctcgaggagttagttctcagagataacaagctagcaaaagtaccagatgtcagcatattcacgaagcttttggtttacgacatatctttcaatgaaatcacttctttggaaggaatatccaaggcctctagcacactgaaggaactctatgtgtctaaaaatgaagttaacaagattatggagattgaacacttacacaacttgcagattcttgaactggggtctaatagattgcgggtgatggaaaatctggaaaacttcacaaaattagaagaactatggctcggaagaaaccgtataaaagttgttaacctgtgtgggctcaaatgcataaaaaagattagcttgcagagcaatcgattgacctctatgaaaggatttgaggaatgtgttgctcttgaagagttatatttgagccataatggtatctccaaaatggaaggcttgagtgcattggtcaacctacgggtattggacgtgtcgaacaacaagcttacttcagttgatgacattcagaacctcacaaagttggaagatttgtggcttaatgacaaccagatagaatcactggaagcaatcacagaagctgttacaggatctaaagagaagcttaccactatctacctcgaaaataacccttgtgccaagtcttctgattatgttgctgcggtcagacaaatcttcccgaatgtggagcaaattgattctaacatatttgcttagagatggatatattccttgtcgtgctgtttgtatgaatgtctgcttcctcatcccatgggcatgggcatcgaatttaggaaatcaggtacaacacggattcctcaaaatatacatgtgtctgctgtttatcataaagaagtgcaaatgagcaaattaaatcgctctcgtcatggatatttattaaaacgtttttgaaattctagtgttcccttgcaagtaaaccaattcttgtttttggtctgtaattgtatgtggactgtgtctgtaaaagggaatccccgagtctgaagttgtctttgtttcaagtttcaaccgagaacactaacttgaatactttgatcc

SEQ ID NO: 39843 - protein, 345 aa, Arabidopsis thaliana
  peptide (1)..(345): Ceres Seq. ID no. 12329620
VPHKARCRHRASLNQKTMNSDKEEEPLEEIGDSNNVLDLTSYQLHSLDTVELPPNLIELDLTANRLSGLDSRIAQLSTLKKLSLRQNLIDDSAVEPLSHWDALSDLEELVLRDNKLAKVPDVSIFTKLLVYDISFNEITSLEGISKASSTLKELYVSKNEVNKIMEIEHLHNLQILELGSNRLRVMENLENFTKLEELWLGRNRIKVVNLCGLKCIKKISLQSNRLTSMKGFEECVALEELYLSHNGISKMEGLSALVNLRVLDVSNNKLTSVDDIQNLTKLEDLWLNDNQIESLEAITEAVTGSKEKLTTIYLENNPCAKSSDYVAAVRQIFPNVEQIDSNIFA

SEQ ID NO: 39844 - protein, 328 aa, Arabidopsis thaliana
  peptide (1)..(328): Ceres Seq. ID no. 12329621
MNSDKEEEPLEEIGDSNNVLDLTSYQLHSLDTVELPPNLIELDLTANRLSGLDSRIAQLSTLKKLSLRQNLIDDSAVEPLSHWDALSDLEELVLRDNKLAKVPDVSIFTKLLVYDISFNEITSLEGISKASSTLKELYVSKNEVNKIMEIEHLHNLQILELGSNRLRVMENLENFTKLEELWLGRNRIKVVNLCGLKCIKKISLQSNRLTSMKGFEECVALEELYLSHNGISKMEGLSALVNLRVLDVSNNKLTSVDDIQNLTKLEDLWLNDNQIESLEAITEAVTGSKEKLTTIYLENNPCAKSSDYVAAVRQIFPNVEQIDSNIFA

SEQ ID NO: 39845 - protein, 181 aa, Arabidopsis thaliana
  peptide (1)..(181): Ceres Seq. ID no. 12329622
MEIEHLHNLQILELGSNRLRVMENLENFTKLEELWLGRNRIKVVNLCGLKCIKKISLQSNRLTSMKGFEECVALEELYLSHNGISKMEGLSALVNLRVLDVSNNKLTSVDDIQNLTKLEDLWLNDNQIESLEAITEAVTGSKEKLTTIYLENNPCAKSSDYVAAVRQIFPNVEQIDSNIFA

SEQ ID NO: 39846 - DNA, 975 bp, Arabidopsis thaliana
  misc_feature (1)..(975): Ceres Seq. ID no. 12558382
  misc_feature (1)..(975): Ortholog of  Ceres SEQ ID NO 13596338 as cited in SEQ ID NO 68005
  misc_feature (1)..(975): Ortholog of  Ceres SEQ ID NO 15179357 as cited in SEQ ID NO 0
atttttgattagtgtgaataaataaattttaagaacaacaagttacccaatcatttgaaaaaatgatactataattcgctaaacttttttataaaagaaaaattaagagcaattgggaacgagaacgtgttgaatagttggggacgagattacaagcaccaattcatcttcagcatcatctccaaattcttcttaaaattttcttcttcctcctttaccatctccagcaccggacctagtcaaaaagtctttcttctcaaatggatcaaaagcctcttggattgctcacgatccacgtcaagagagggattaatctcgccattcgcgaccatcgtagcagcgatccttacatcgttctcaacgtcgccgatcagacattgaagacacgtgtggtgaaaaaaaattgtaacccagtatggaatgaagaaatgactgttgctatcaaagatcctaatgtcccaatccgcttgacagtgtttgattgggacaagttcacaggagatgacaaaatgggagatgcgaacatagacattcaaccatacttagaggctttgaaaatggggatggagcttttgaggctacctaatgggtgtgctatcaaaagggttcaaccatcaaggcacaattgtttatctgatgagagtagcattgtttggaacaatggtaagatcacacaagacttgatccttagacttaacaatgtcgaatgtggcgagattgagatcatgcttgaatggcatgaaggtgctggttgcagaggtatcacttcctcttccaaaggtggaggctcttcctctacctaaacttattattgttctttctttctttctttttttgttgttgtgtatcaatctgttgttgttgtttccatatgtataagcaactcaagtatgttttcttgatgaccattttcaatggcataatcaagaagaaaagctggaaaatttgagactttcttttgtatgttttcatttg

SEQ ID NO: 39847 - protein, 180 aa, Arabidopsis thaliana
  peptide (1)..(180): Ceres Seq. ID no. 12558383
MDQKPLGLLTIHVKRGINLAIRDHRSSDPYIVLNVADQTLKTRVVKKNCNPVWNEEMTVAIKDPNVPIRLTVFDWDKFTGDDKMGDANIDIQPYLEALKMGMELLRLPNGCAIKRVQPSRHNCLSDESSIVWNNGKITQDLILRLNNVECGEIEIMLEWHEGAGCRGITSSSKGGGSSST

SEQ ID NO: 39848 - protein, 124 aa, Arabidopsis thaliana
  peptide (1)..(124): Ceres Seq. ID no. 12558384
MTVAIKDPNVPIRLTVFDWDKFTGDDKMGDANIDIQPYLEALKMGMELLRLPNGCAIKRVQPSRHNCLSDESSIVWNNGKITQDLILRLNNVECGEIEIMLEWHEGAGCRGITSSSKGGGSSST

SEQ ID NO: 39849 - protein, 97 aa, Arabidopsis thaliana
  peptide (1)..(97): Ceres Seq. ID no. 12558385
MGDANIDIQPYLEALKMGMELLRLPNGCAIKRVQPSRHNCLSDESSIVWNNGKITQDLILRLNNVECGEIEIMLEWHEGAGCRGITSSSKGGGSSST

SEQ ID NO: 39850 - DNA, 1133 bp, Arabidopsis thaliana
  misc_feature (1)..(1133): Ceres Seq. ID no. 12331239
  misc_feature (1)..(1133): Ortholog of  Ceres SEQ ID NO 14314640 as cited in SEQ ID NO 59941
actttctctttgttttctttctaacctctttccacgaaaagtcacgatgggagataccgcagaggatcaggacgaccgagctatgatggaagctgaaggagtaacgagcttctccgaacttcttatgttctctgacggcgttctcagctcctcttccgaccaccaacctgagggtaatgtcggcgatggtggagaagacagtttaggttttgtattctccggcaaaactggctcaagaatgctctgttttagtggaggctatcaaaacgacgacgagtcactcttcctagaaccttctgttccaacctccggagtctctgatcttgacccttcatgcattaagattgattgcaggaactcaaacgacgcgtgtacggtcgataaatctactaaatcatcaaccaagaagagaaccggaacgggtaatgggcaagagtcggatcaaaatcgaaaaccgggcaagaaagggaaacgaaatcaagagaaatcatcagttggaattgcaaaggtcaggaaagaaaggttaggggaaagaattgcagcgttgcagcagttggtttctccatacggcaagacagatgcagcttctgtgttgcatgaagcgatgggttacatcaaattcttacaagatcagattcaagtcctttgctctccttatctaatcaaccattctctcgacggtggagttgtcaccggagatgtaatggcggcgatgaaagcgaaagacttgagaagcagaggattatgtctagtacctgtctcatccaccgtacacgtggaaaattccaacggtgctgatttctggtcacctgctactatgggtcacactacgtcaccgtcgttacctcaaggattttaattaaacggtcgtaggctgatatatattagtagtattttagtagccttttttcttgggttttgtttttggctgaagaactattactagtaaatgttacacccagacatttttttgggattatctgggtggtataaaaaggttggaatcttttgtgtttgtaaaattagattgtctaagttttcttaaagtttctttgatgtcactgtcacagttgcgacgagtagtgatggtacttactgaaaggctaagcttattcacgctcttaaagttttgc

SEQ ID NO: 39851 - protein, 285 aa, Arabidopsis thaliana
  peptide (1)..(285): Ceres Seq. ID no. 12331240
LSLCFLSNLFPRKVTMGDTAEDQDDRAMMEAEGVTSFSELLMFSDGVLSSSSDHQPEGNVGDGGEDSLGFVFSGKTGSRMLCFSGGYQNDDESLFLEPSVPTSGVSDLDPSCIKIDCRNSNDACTVDKSTKSSTKKRTGTGNGQESDQNRKPGKKGKRNQEKSSVGIAKVRKERLGERIAALQQLVSPYGKTDAASVLHEAMGYIKFLQDQIQVLCSPYLINHSLDGGVVTGDVMAAMKAKDLRSRGLCLVPVSSTVHVENSNGADFWSPATMGHTTSPSLPQGF

SEQ ID NO: 39852 - protein, 270 aa, Arabidopsis thaliana
  peptide (1)..(270): Ceres Seq. ID no. 12331241
MGDTAEDQDDRAMMEAEGVTSFSELLMFSDGVLSSSSDHQPEGNVGDGGEDSLGFVFSGKTGSRMLCFSGGYQNDDESLFLEPSVPTSGVSDLDPSCIKIDCRNSNDACTVDKSTKSSTKKRTGTGNGQESDQNRKPGKKGKRNQEKSSVGIAKVRKERLGERIAALQQLVSPYGKTDAASVLHEAMGYIKFLQDQIQVLCSPYLINHSLDGGVVTGDVMAAMKAKDLRSRGLCLVPVSSTVHVENSNGADFWSPATMGHTTSPSLPQGF

SEQ ID NO: 39853 - protein, 258 aa, Arabidopsis thaliana
  peptide (1)..(258): Ceres Seq. ID no. 12331242
MMEAEGVTSFSELLMFSDGVLSSSSDHQPEGNVGDGGEDSLGFVFSGKTGSRMLCFSGGYQNDDESLFLEPSVPTSGVSDLDPSCIKIDCRNSNDACTVDKSTKSSTKKRTGTGNGQESDQNRKPGKKGKRNQEKSSVGIAKVRKERLGERIAALQQLVSPYGKTDAASVLHEAMGYIKFLQDQIQVLCSPYLINHSLDGGVVTGDVMAAMKAKDLRSRGLCLVPVSSTVHVENSNGADFWSPATMGHTTSPSLPQGF

SEQ ID NO: 39854 - DNA, 659 bp, Arabidopsis thaliana
  misc_feature (1)..(659): Ceres Seq. ID no. 12337484
  misc_feature (1)..(659): Ortholog of  Ceres SEQ ID NO 12586366 as cited in SEQ ID NO 68983
tgaacatttctcagtcccacagggtcgcagagctattgagcttgtagcgggtaaagagagtgccatcgctcaagtggttcggactgtcattgggaagacttacgtgctgtcttttgcggttgtagacgccaacaatgcttgcaaaggatcaatggtggttgaggcttttgcaggaaaagatacacttaaggtcccttacgagtcgaaaggcacaggagggtttaaacgagcttctattcgatttgtggcggtttcgacccgatcaagaattatgttctacagcactttctatgccatgaggagcgatgatttctcgtcattgtgtgggcctgtgatcgatgatgtcaagcttataagcgttcgtaaaccatagatgaatcaccaatcctattacaagaaaatgcatcgtgtggtcttcttttattttccttaaactgtctttggtgtgtgttggattttattgaaacgagaaggtgaaaaaaacagagttttatttacgagagttagggttttatataggcagatgggcctttgcttatattgtattttcttgtatgagaaggcaaaagaaacgttgcctatatcttatgtatctaggccttttaatttttatggaagagttacaaaacttacaataaagttgtatgcatattttactt

SEQ ID NO: 39855 - protein, 123 aa, Arabidopsis thaliana
  peptide (1)..(123): Ceres Seq. ID no. 12337485
EHFSVPQGRRAIELVAGKESAIAQVVRTVIGKTYVLSFAVVDANNACKGSMVVEAFAGKDTLKVPYESKGTGGFKRASIRFVAVSTRSRIMFYSTFYAMRSDDFSSLCGPVIDDVKLISVRKP

SEQ ID NO: 39856 - protein, 73 aa, Arabidopsis thaliana
  peptide (1)..(73): Ceres Seq. ID no. 12337486
MVVEAFAGKDTLKVPYESKGTGGFKRASIRFVAVSTRSRIMFYSTFYAMRSDDFSSLCGPVIDDVKLISVRKP

SEQ ID NO: 39857 - DNA, 2108 bp, Arabidopsis thaliana
  misc_feature (1)..(2108): Ceres Seq. ID no. 13592781
  misc_feature (1)..(2108): Ortholog of  Ceres SEQ ID NO 13532807 as cited in SEQ ID NO 53012
  misc_feature (1)..(2108): Ortholog of  Ceres SEQ ID NO 13663060 as cited in SEQ ID NO 60964
  misc_feature (1)..(2108): Ortholog of  Ceres SEQ ID NO 13500573 as cited in SEQ ID NO 67431
  misc_feature (1)..(2108): Ortholog of  Ceres SEQ ID NO 13656501 as cited in SEQ ID NO 69206
ctttctaacctacaacatcctaatcgaaaagttgttgtcctaaaattatggttcttccttgtgaatattgcttgatctaggaaactaatcaggatctggtgagaaatcaataagatgttggagaaagagtttttcacggagtatggtgaagcaagtcaatatcagatccaagaagttgttggcaaaggaagctacggagttgttgcttctgcggaatgtccacacacgggaggcaaagtagccatcaagaagatgacaaatgtgtttgaacatgtctcagatgctattcgtatcctcagagagatcaagcttctcaggcttcttcgacatcctgatatcgtggagatcaagcatatcatgcttcctccttgtcgcaaggaattcaaagatatatatgttgtttttgagttgatggagtctgatcttcaccacgttcttaaggtaaatgacgacctcactcctcagcatcatcaattcttcttgtaccaacttcttcgtggcttaaaattcatgcactcaggtaaggtttctttgttcccttgttgttttctctagctcttacattttcatctgaagatatattgtgtgtttttctttgaatcttgcttcttatcatattttgttcttgtattatagctcatgtgttccatagagatctgaagcctaagaacatcctcgctaatgctgattgcaaaatcaagatctgtgatttaggacttgctcgtgtctcctttactgattccccttctgctgtgttttggactgactacgttgctacaagatggtaccgtgcgccagagctctgtggttccttctattctaactacacgccggcgattgacatgtggagtgttgggtgcatatttgcagagatgctaactggaaaacctttgtttcctggcaaaaacgttgtgcaccagctagaactcgtgactgatctgcttggaactccgtcgccgataactctatccagggtttgttttgtttttatttttcccggaagctaaactaactctcccaatacagaggcttctctctctctatctccgagagatagacttgctttgaatgcaagtgtgtttttattagctttgtgtgtcatgaagttgtttataatgaatctgtgtagattcggaatgagaaggctagaaagtatttgggaaacatgaggcgaaaggatcctgtacctttcacccataaattccccaatatcgatcctgtggcgctgaagttacttcagcgtttgatcgcttttgacccaaaggaccgtccctctgcaaaagaggcattggctgatccgtattttcaaggattggcaaatgtggactatgaaccatcgaggcaacctatctcgaaacttgagtttgagtttgagaggaggaaattgactcgcgatgacgtgagggaactcatgtacagagagattttggagtatcatccacagatgttgcaagagtatctacaaggagaagagaacataaactctcattttctatacccaagcggagttgatcagttcaaacaagagtttgcccgactcgaagaacacaacgacgatgaagaggaacacaactccccaccacatcagagaaagtacacttcactcccytagagaacgggtgtgctcatcagaagacgaaggttctgattcagttcatgctcaatcgtcttcagcttcagtggtgtttacacctccacagactccaaacacagcaactggcttatcatcacagaaggcgtcacaagtagataaagcagcaactccggtaaaacggtctgcatgtctaatgaggagtgatagtatctgtgcttcaagatgtgttggtgtctcctctgcagtgtcatagtcagaaaaaaattgatttctcaagttgtttagcagcaaaccattgattattgtgttctgcctattgtatcatgatgtctctcctgagtgttttcattgttgtaactctcttcttcttcttcttactctctgctcatattggaatctcgtgtgtaatggtttctcttggaacttgaaattcatatatatattcttattaccaaaaaaaaaaaaaaaaaagcttatcakrtaccgtcgacctcgaggggggggccccggtacc

SEQ ID NO: 39858 - protein, 148 aa, Arabidopsis thaliana
  peptide (1)..(148): Ceres Seq. ID no. 15221147
  misc_feature (148)..(148): Xaa is any aa, unknown or other
MRRKDPVPFTHKFPNIDPVALKLLQRLIAFDPKDRPSAKEALADPYFQGLANVDYEPSRQPISKLEFEFERRKLTRDDVRELMYREILEYHPQMLQEYLQGEENINSHFLYPSGVDQFKQEFARLEEHNDDEEEHNSPPHQRKYTSLX

SEQ ID NO: 39859 - protein, 146 aa, Arabidopsis thaliana
  peptide (1)..(146): Ceres Seq. ID no. 15221148
MLEKEFFTEYGEASQYQIQEVVGKGSYGVVASAECPHTGGKVAIKKMTNVFEHVSDAIRILREIKLLRLLRHPDIVEIKHIMLPPCRKEFKDIYVVFELMESDLHHVLKVNDDLTPQHHQFFLYQLLRGLKFMHSGKVSLFPCCFL

SEQ ID NO: 39860 - protein, 100 aa, Arabidopsis thaliana
  peptide (1)..(100): Ceres Seq. ID no. 15221149
MTNVFEHVSDAIRILREIKLLRLLRHPDIVEIKHIMLPPCRKEFKDIYVVFELMESDLHHVLKVNDDLTPQHHQFFLYQLLRGLKFMHSGKVSLFPCCFL

SEQ ID NO: 39861 - DNA, 945 bp, Arabidopsis thaliana
  misc_feature (1)..(945): Ceres Seq. ID no. 13646055
  misc_feature (1)..(945): Ortholog of  Ceres SEQ ID NO 15178935 as cited in SEQ ID NO 0
atcttctcaagctttcttcttctacaacacatctagagctttgcaacaatggaggcgagtgcgaatgaaccagctatgaaaagcttgaaatccaatccttcaggaccgataccgaactttttcgtatcgctctcttcggcatttacgcaaacacctcttgtgcgttcgaacaaacccaatttgcttcttctaccaccagttgcagactccgtcaaattgattcaagactttcatcagtctctgatttctgctactgagaaatttaaaggattcctccattcgctcgcctctaagaaccctctctttcaggaagcggttcgcctatcttccgaatttcacattttgtgcgacgagattcgtttgagaaacactacaagggtgaggtttgcgatgtctaatcacggatttgcagcggttctgcctggagattcagttgcaggattggtggttgctaatggtttgatcaatttcctcaacatatataacaccatccttgtcgtccgtctagtactcacctggttcccgagtgctcctcctgccattgttaaccccctcagcactttatgtgatccatacttgaacattttccggggattcataccgcctcttggaggattagatttgtctcccattttggcgttccttgttctcaacgccttcaccagctcggctatggcacttccttgcgaactcccgtcagctgatggagccgtttctccagcttctagtgagacaaagtgggtgagaaggagaaggttgagcagccacaaagaccacagaccgagctcagcttctatgacctgaacctgtctaaaatatctactcttttctgcgcttcaaatgtaaaatctacctttcgagtaattttattactctgtatctttggatttctgagttttgtataaattttctttagaaaatgaataaaagagttgtgttcctgac

SEQ ID NO: 39862 - protein, 251 aa, Arabidopsis thaliana
  peptide (1)..(251): Ceres Seq. ID no. 13646056
MEASANEPAMKSLKSNPSGPIPNFFVSLSSAFTQTPLVRSNKPNLLLLPPVADSVKLIQDFHQSLISATEKFKGFLHSLASKNPLFQEAVRLSSEFHILCDEIRLRNTTRVRFAMSNHGFAAVLPGDSVAGLVVANGLINFLNIYNTILVVRLVLTWFPSAPPAIVNPLSTLCDPYLNIFRGFIPPLGGLDLSPILAFLVLNAFTSSAMALPCELPSADGAVSPASSETKWVRRRRLSSHKDHRPSSASMT

SEQ ID NO: 39863 - protein, 242 aa, Arabidopsis thaliana
  peptide (1)..(242): Ceres Seq. ID no. 13646057
MKSLKSNPSGPIPNFFVSLSSAFTQTPLVRSNKPNLLLLPPVADSVKLIQDFHQSLISATEKFKGFLHSLASKNPLFQEAVRLSSEFHILCDEIRLRNTTRVRFAMSNHGFAAVLPGDSVAGLVVANGLINFLNIYNTILVVRLVLTWFPSAPPAIVNPLSTLCDPYLNIFRGFIPPLGGLDLSPILAFLVLNAFTSSAMALPCELPSADGAVSPASSETKWVRRRRLSSHKDHRPSSASMT

SEQ ID NO: 39864 - protein, 137 aa, Arabidopsis thaliana
  peptide (1)..(137): Ceres Seq. ID no. 13646058
MSNHGFAAVLPGDSVAGLVVANGLINFLNIYNTILVVRLVLTWFPSAPPAIVNPLSTLCDPYLNIFRGFIPPLGGLDLSPILAFLVLNAFTSSAMALPCELPSADGAVSPASSETKWVRRRRLSSHKDHRPSSASMT

SEQ ID NO: 39865 - DNA, 1226 bp, Arabidopsis thaliana
  misc_feature (1)..(1226): Ceres Seq. ID no. 12328962
  misc_feature (1)..(1226): Ortholog of  Ceres SEQ ID NO 14304823 as cited in SEQ ID NO 54902
gttcacatgcacccccaaaaaaaaaaactaattttttttcttttttcttctcctcatcttcagagttttgagatttgtgattgcctccatgcaagagctgaattagccgaatctggatgtcttattctgaaaaaacgacggtggatccacttctgagagatttggatgagaagaaagagagtttccggcgaaacgtggtgtctctggctacggagctgaagcaagtgaggggccgtttggtttctcaagaacaatcttttcttaaagagaccattactagaaaagaagcagagaaaaggggaaagaatatggaaatggagatttgtaaattgcagaagagattggaagaaaggaattgtcagcttgaagcttctgcatctgctgctgataagtttatcaaagagttggaggaatttagattaaagcttgatacaaccaagcaaaccgcagaggcaagtgctgattctgctcaatctacaaagatccaatgctcaatgctaaagcaacaacttgacgacaaaacacgttctctcagagaacaagaagaccgtatgactcagcttggtcatcagcttgatgatctacagagaggtctgagcttgagagagtgctcagaaaagcagcttagagaagaagttaggagaatcgagcgtgaggttactgaggccattgcaaaagcgggaataggtggcatggacagcgagctccagaaacttctagaagatgtgtctccaatgaaatttgagaggatgaataggctagttgaagtaaaagacgaagagattacaaaactgaaagatgagataaggttaatgtcaggtcaatggaaacataagactaaggaactcgaatctcagctggagaaacagagaagaactgatcaagatttgaagaagaaggtattgaagctagagttctgtttacaagaagctcgaagccagacaagaaagctgcaaaggaaaggggaaagaagggacatggagatcaaagagataagagatcttatatcggagaagcaaaaccttaacaatgagtcttgggataaacagaagttctgggacaattcagggttcaagattgttgtatcaatgtctatgttgatgttagtggtagtctccaagagatgatgaattttgtaatgtataaatttagttgcagatagttgatgaggataatctaactcatgtatgtgtcgtcttcaggtctaatataacagccatgtactt

SEQ ID NO: 39866 - protein, 336 aa, Arabidopsis thaliana
  peptide (1)..(336): Ceres Seq. ID no. 12328963
MSYSEKTTVDPLLRDLDEKKESFRRNVVSLATELKQVRGRLVSQEQSFLKETITRKEAEKRGKNMEMEICKLQKRLEERNCQLEASASAADKFIKELEEFRLKLDTTKQTAEASADSAQSTKIQCSMLKQQLDDKTRSLREQEDRMTQLGHQLDDLQRGLSLRECSEKQLREEVRRIEREVTEAIAKAGIGGMDSELQKLLEDVSPMKFERMNRLVEVKDEEITKLKDEIRLMSGQWKHKTKELESQLEKQRRTDQDLKKKVLKLEFCLQEARSQTRKLQRKGERRDMEIKEIRDLISEKQNLNNESWDKQKFWDNSGFKIVVSMSMLMLVVVSKR

SEQ ID NO: 39867 - protein, 272 aa, Arabidopsis thaliana
  peptide (1)..(272): Ceres Seq. ID no. 12328964
MEMEICKLQKRLEERNCQLEASASAADKFIKELEEFRLKLDTTKQTAEASADSAQSTKIQCSMLKQQLDDKTRSLREQEDRMTQLGHQLDDLQRGLSLRECSEKQLREEVRRIEREVTEAIAKAGIGGMDSELQKLLEDVSPMKFERMNRLVEVKDEEITKLKDEIRLMSGQWKHKTKELESQLEKQRRTDQDLKKKVLKLEFCLQEARSQTRKLQRKGERRDMEIKEIRDLISEKQNLNNESWDKQKFWDNSGFKIVVSMSMLMLVVVSKR

SEQ ID NO: 39868 - protein, 270 aa, Arabidopsis thaliana
  peptide (1)..(270): Ceres Seq. ID no. 12328965
MEICKLQKRLEERNCQLEASASAADKFIKELEEFRLKLDTTKQTAEASADSAQSTKIQCSMLKQQLDDKTRSLREQEDRMTQLGHQLDDLQRGLSLRECSEKQLREEVRRIEREVTEAIAKAGIGGMDSELQKLLEDVSPMKFERMNRLVEVKDEEITKLKDEIRLMSGQWKHKTKELESQLEKQRRTDQDLKKKVLKLEFCLQEARSQTRKLQRKGERRDMEIKEIRDLISEKQNLNNESWDKQKFWDNSGFKIVVSMSMLMLVVVSKR

SEQ ID NO: 39869 - DNA, 2397 bp, Arabidopsis thaliana
  misc_feature (1)..(2397): Ceres Seq. ID no. 13580402
  misc_feature (1)..(2397): Ortholog of  Ceres SEQ ID NO 15168900 as cited in SEQ ID NO 217
acaatcacatggccttttcaaaaaatcaatcttttagttctctatcgatgcgtaggcttgaagcatgatgacgacagtcgccgccgatctccaccgttatcttttcctgattaccgtttttcttttcttcctctgcgacaaaacctctcttgctctgaccacagacggtgttcttcttctctctttccgttactcaatcgttgacgatcctctttacgtttttcggagctggagattcgacgacgagactccttgctcttggcgtggtgtcacgtgcgatgcatcttcccggcacgtgactgttctgtcacttccaagctcgaaccttaccggcacactaccttcaaatttgggttcactcaattcacttcaaagacttgatctttccaacaattccatcaatgggtctttcccggtttcgcttctcaacgcgacggagcttcgatttcttgatctgtccgataatcacatctccggtgcactaccggcgagttttggcgcgctttcgaacctccaagtgttgaatctctccgataattccttcgtcggcgaattaccgaacacattaggatggaaccggaacttaacggagatttcacttcagaaaaactatttatccggcgggattccgggaggttttaagtcgacggagtatcttgatctctcgtcaaatttgatcaaaggctcgttgccgtcacatttcagagggaatcgtctacgctatttcaacgcttcgtacaacagaatctccggcgagattccgtcaggtttcgccgacgaaatcccggaagacgccaccgttgatctctcattcaaccaacttacaggtcaaatcccgggttttcgggttctcgataaccaagaatccaactctttctccggtaacccgggtctctgcggatccgaccatgcaaaacacccttgtcgtgacggtgaagcaacctctccacctccatcgccgactccaaattctcctcctgcattagctgctataccaaatactattggcttaaccaatcacccaattagctccaaaaccggtccgaaatcaaaatgggatcataaaccggtgcttatcattggcattgttgtcggtgacttagccggtttagcaatcctcgggattgtgtttttctacatttaccagtcgagaaaacggaagaccgtaacggctacgtcaaaatggtccacgtcatcaacagattccaaggtctcaaaatggtactgtttacgcaaatccgtttacgttgacggtgactgcgaagaagaagaagaggaatctgagacatcggaatccgaatccgacgaagagaacccggtcggaccaaatcgacggtcaggattagacgatcaagaaaaaaagggaacgttagtgaatctcgattcagagaaagagcttgaaatcgaaacgcttctcaaagcatcagcttatattttgggagccaccggttcgagcataatgtataaagcggtgcttcaagacggaacagctgtggcggttcgacgaatagctgaatgcggtttagaccggtttagagatttcgaagctcaggttcgagccatggctaagttaatacatccaaacctggtacgaattcgcggtttctattggggatccgacgagaaacttgtcatttacgattttgtccctaacggcagcctcgctaacgcccgttaccggaaagtgggctcctctccttgtcatttaccttgggacgctcggctcaagatagcaaaaggcatagctcgcgggctaacatacgtacacgacaaaaagtacgtgcatggtaacctcaagcctagcaatatccttttgggcttatggagcctaaagttgcggatttcggtcttgagaagcttttgattggggacatgagttatagaaccggtggatcggctccaatattcggaagcaagagatccacaacgtctcttgagtttgggccgagtccaagcccaagtccaagttcagtcgggttaccctacaatgctccagaatctcttcggagtattaagccgaattcgaaatgggatgtgtactcgttcggagttattctgcttgagctactaacgggaaagatcgtggtggtcgacgagcttggacaggttaatgggcttgtgattgatgacggtgagcgggcaattcggatggcggactctgctatacgggctgagttagaaggcaaagaagaagctgtgttggcatgtttgaaaatgggcctagcttgtgcgtctccaataccacagagaaggcccaatatcaaagaggctttgcaagttctcgagagattccctgttcattctagtcaacagtaatgataataattaagaccaagaaagagttaaataacttgactgtgtgtacttagagttagattgataggcaagtttgatctt

SEQ ID NO: 39870 - protein, 599 aa, Arabidopsis thaliana
  peptide (1)..(599): Ceres Seq. ID no. 13580403
MMTTVAADLHRYLFLITVFLFFLCDKTSLALTTDGVLLLSFRYSIVDDPLYVFRSWRFDDETPCSWRGVTCDASSRHVTVLSLPSSNLTGTLPSNLGSLNSLQRLDLSNNSINGSFPVSLLNATELRFLDLSDNHISGALPASFGALSNLQVLNLSDNSFVGELPNTLGWNRNLTEISLQKNYLSGGIPGGFKSTEYLDLSSNLIKGSLPSHFRGNRLRYFNASYNRISGEIPSGFADEIPEDATVDLSFNQLTGQIPGFRVLDNQESNSFSGNPGLCGSDHAKHPCRDGEATSPPPSPTPNSPPALAAIPNTIGLTNHPISSKTGPKSKWDHKPVLIIGIVVGDLAGLAILGIVFFYIYQSRKRKTVTATSKWSTSSTDSKVSKWYCLRKSVYVDGDCEEEEEESETSESESDEENPVGPNRRSGLDDQEKKGTLVNLDSEKELEIETLLKASAYILGATGSSIMYKAVLQDGTAVAVRRIAECGLDRFRDFEAQVRAMAKLIHPNLVRIRGFYWGSDEKLVIYDFVPNGSLANARYRKVGSSPCHLPWDARLKIAKGIARGLTYVHDKKYVHGNLKPSNILLGLWSLKLRISVLRSF

SEQ ID NO: 39871 - protein, 598 aa, Arabidopsis thaliana
  peptide (1)..(598): Ceres Seq. ID no. 13580404
MTTVAADLHRYLFLITVFLFFLCDKTSLALTTDGVLLLSFRYSIVDDPLYVFRSWRFDDETPCSWRGVTCDASSRHVTVLSLPSSNLTGTLPSNLGSLNSLQRLDLSNNSINGSFPVSLLNATELRFLDLSDNHISGALPASFGALSNLQVLNLSDNSFVGELPNTLGWNRNLTEISLQKNYLSGGIPGGFKSTEYLDLSSNLIKGSLPSHFRGNRLRYFNASYNRISGEIPSGFADEIPEDATVDLSFNQLTGQIPGFRVLDNQESNSFSGNPGLCGSDHAKHPCRDGEATSPPPSPTPNSPPALAAIPNTIGLTNHPISSKTGPKSKWDHKPVLIIGIVVGDLAGLAILGIVFFYIYQSRKRKTVTATSKWSTSSTDSKVSKWYCLRKSVYVDGDCEEEEEESETSESESDEENPVGPNRRSGLDDQEKKGTLVNLDSEKELEIETLLKASAYILGATGSSIMYKAVLQDGTAVAVRRIAECGLDRFRDFEAQVRAMAKLIHPNLVRIRGFYWGSDEKLVIYDFVPNGSLANARYRKVGSSPCHLPWDARLKIAKGIARGLTYVHDKKYVHGNLKPSNILLGLWSLKLRISVLRSF

SEQ ID NO: 39872 - DNA, 1340 bp, Arabidopsis thaliana
  misc_feature (1)..(1340): Ceres Seq. ID no. 13488820
  misc_feature (1)..(1340): Ortholog of  Ceres SEQ ID NO 13597019 as cited in SEQ ID NO 64303
  misc_feature (1)..(1340): Ortholog of  Ceres SEQ ID NO 13654191 as cited in SEQ ID NO 68235
  misc_feature (1)..(1340): Ortholog of  Ceres SEQ ID NO 15179513 as cited in SEQ ID NO 0
tgtatcaattctacaatcatttttgcttccctttctttgaaaacattccattttcctttctatttttttgcttatctctgtactaagaaccaaactaacccacagtagaactaaattacacttctctttcaatcatttgcgtctcaccggctaatctcattcctctgtcatttttacagttcttcgatcgaaaaccggatgtgagaagcctcgaggttcaaggatttgcagaggctcaaagctttgctttcaaagaaaaagaggaagaaggcttacaagatacagttccatttctacagatgctgcaaagtgaagacccctcatcgtttttttcaatcaaagagccaaactttctgacgctactgtctcttcaaaccctcaaggagccttgggaactcgaaagatatctttcacttgaggattcacaatttcattcaccggtccaatctgagaccaaccgcttcatggaaggagccaatcaagctgtgtcaagccaagaaattccctttagccaagcaaacatgacactcccttcttctacctcatcaccactcagtgcacattcaagacgaaagcgcaaaatcaaccacttgctgcctcaagaaatgactagagaaaagagaaagaggaggaaaacaaaaccaagtaaaaacaatgaagagattgagaatcaaagaataaaccacattgctgttgaacgaaacagaagacgtcaaatgaacgaacatatcaactctctccgggcccttctcccaccttcctacatccaacgaggagaccaagcttccatagtaggaggagcaataaactacgtgaaggtcctcgagcaaatcatacaatctctcgaatcgcaaaagagaacgcaacaacaaagtaacagtgaggtagtagaaaacgcacttaatcatctctcaggcatttcgtcgaacgacctgtggacaactcttgaagatcaaacttgtatccccaaaatcgaagctacagtgatacaaaaccatgtcagccttaaagttcaatgtgagaagaaacaaggacaacttctcaaaggaatcatatcacttgaaaagcttaaactcactgttcttcatctcaatatcactacttcgtctcattcctctgtttcttattccttcaacctcaagatggaagatgagtgcgacttagagtcagccgacgagattacggcggctgttcatcggattttcgatattccgacaatttgattaaacacatataattccaaaaatattaacagctgacaaaatggtatcttttttttttttcctacttgtaccaattttttaagaattaagagaataaaaaaatttcgtttttcgttc

SEQ ID NO: 39873 - protein, 307 aa, Arabidopsis thaliana
  peptide (1)..(307): Ceres Seq. ID no. 13488821
MLQSEDPSSFFSIKEPNFLTLLSLQTLKEPWELERYLSLEDSQFHSPVQSETNRFMEGANQAVSSQEIPFSQANMTLPSSTSSPLSAHSRRKRKINHLLPQEMTREKRKRRKTKPSKNNEEIENQRINHIAVERNRRRQMNEHINSLRALLPPSYIQRGDQASIVGGAINYVKVLEQIIQSLESQKRTQQQSNSEVVENALNHLSGISSNDLWTTLEDQTCIPKIEATVIQNHVSLKVQCEKKQGQLLKGIISLEKLKLTVLHLNITTSSHSSVSYSFNLKMEDECDLESADEITAAVHRIFDIPTI

SEQ ID NO: 39874 - protein, 252 aa, Arabidopsis thaliana
  peptide (1)..(252): Ceres Seq. ID no. 13488822
MEGANQAVSSQEIPFSQANMTLPSSTSSPLSAHSRRKRKINHLLPQEMTREKRKRRKTKPSKNNEEIENQRINHIAVERNRRRQMNEHINSLRALLPPSYIQRGDQASIVGGAINYVKVLEQIIQSLESQKRTQQQSNSEVVENALNHLSGISSNDLWTTLEDQTCIPKIEATVIQNHVSLKVQCEKKQGQLLKGIISLEKLKLTVLHLNITTSSHSSVSYSFNLKMEDECDLESADEITAAVHRIFDIPTI

SEQ ID NO: 39875 - protein, 233 aa, Arabidopsis thaliana
  peptide (1)..(233): Ceres Seq. ID no. 13488823
MTLPSSTSSPLSAHSRRKRKINHLLPQEMTREKRKRRKTKPSKNNEEIENQRINHIAVERNRRRQMNEHINSLRALLPPSYIQRGDQASIVGGAINYVKVLEQIIQSLESQKRTQQQSNSEVVENALNHLSGISSNDLWTTLEDQTCIPKIEATVIQNHVSLKVQCEKKQGQLLKGIISLEKLKLTVLHLNITTSSHSSVSYSFNLKMEDECDLESADEITAAVHRIFDIPTI

SEQ ID NO: 39876 - DNA, 2349 bp, Arabidopsis thaliana
  misc_feature (1)..(2349): Ceres Seq. ID no. 12337988
  misc_feature (1)..(2349): Ortholog of  Ceres SEQ ID NO 14310452 as cited in SEQ ID NO 54426
  misc_feature (1)..(2349): Ortholog of  Ceres SEQ ID NO 13656177 as cited in SEQ ID NO 64997
atatttttggcttaaggtcattttgaagattaataacatgtctattttatcgcgttgtgtccgatccagaaggttctctatttttcgtggataagaagataaagttattgtttattgataagttttctgctgggaagttgcaactttttctagatttaggacgttacaaatttcaatcatgagtgcatcatgggcagatgtggctgattcagagaaggccgtttctcagtcaaagcctccttatgttcccccacacctacggaacaggccatcagagcctgttgctgctcctttgccacaaaatgatcatgcagggtatggtggtcaaccagctgggtctcgttgggctcctcctagcagtgggggtggtggtgccagcggcggtggctataggaatgatggagggcgcactggctatggttatggtgctggaggaggaggtggtggtggtggtggctggaacaacagaagtggagggtgggaccgtagggaacgtgaagtaaacccatttggagatgatgctgagttagaaccggtctttacagagcaggagaatactggcattaattttgatgcctatgaagatattccagttgagaccagtgggggagacgtgccccctcctgttaacacatttgctgacatagatcttggggatgcattaaatctgaacatccggaggtgcaagtatgtgaggccaacaccggtacagcgtcatgctattccaatactgcttgcagagagagatttgatggcctgtgcccagactgggtctgggaagactgctgctttttgctttccaataattagtggaatcatgaaagatcagcatgtagaaagaccccgtggttcacgggcggtttacccttttgcagtcatcctctcaccaacaagggaattggcatgccagatacatgatgaagccaaaaaattctcctaccaaactggtgtgaaggttgttgttgcttatggaggaacacccattcaccagcagctcagggaactcgagaggggatgtgatatccttgtggcaactcctggccggttaaatgatttgcttgaaagagctagagtctcaatgcagatgattaggtttttagctctagatgaggcagacaggatgctggacatgggttttgagccacagattagaaagattgttgagcagatggacatgcctccacgtggggtgagacagacaatgctgttcagtgctacatttccaagtcagattcagagacttgcagctgatttcatgtcaaactatatatttttggctgtgggaagagttggttcaagcactgatttaattacccaaagggttgagtttgtccaagagtctgacaagagaagccatctcatggacctgcttcacgcgcaaagagagacccaagacaagcaatcattgacattagtttttgtggagacaaagaggggagctgatactttggaaaattggctgtgcatgaatgagtttccagcaacctccattcatggcgatagaacacaacaggaaagagaagtggcactgaggtccttcaaaactgggaggacacctattttggttgcaacagacgtggcagcacgtggtcttgacattccccacgtggctcatgttgtaaacttcgatctaccaaatgacattgatgactatgtccaccgtatcggacgaacaggacgtgcaggcaaatctggaatagcaactgccttcttcaacgagaacaatgcacaactggctaggtcgcttgctgagctaatgcaagaagccaatcaagaggtccccgagtggctcacacgatatgcttcacgtgcttcatttggtggtggtaagaaacggtctggtggtcggtttggtggccgtgacttcagaagggaaggctcttacagtagaggaggaggcggcggcggcggaggaggcggcagtgattactatggcggaggaggctatggtggtggtggatacggtggtgctccaagcggtgggtatggtgctggagtgaccagtgcttgggattagccaattaggctccccaatttttcctctttttaacctgactatttatttcttctcttctacattcccaagagagcacgtgtatttgcccccacctttgagatctctcattcaagagatggatttaactaatcttgctattaggtggatctctctgttttttcaggctatttttaggatttgtcctaaaagatagacagtagtttttccgattttgatcttgttcttggtttcttctaacaatttcatttgttagtttgaaatccaatttgtctttttgtttccctttgttgttgacaatctttcttggtgaaatacaatctctctttatatct

SEQ ID NO: 39877 - protein, 612 aa, Arabidopsis thaliana; identical to SEQ ID NO: 37449
  peptide (1)..(612): Ceres Seq. ID no. 12337989

SEQ ID NO: 39878 - protein, 421 aa, Arabidopsis thaliana; identical to SEQ ID NO: 37450
  peptide (1)..(421): Ceres Seq. ID no. 12337990

SEQ ID NO: 39879 - protein, 399 aa, Arabidopsis thaliana; identical to SEQ ID NO: 37451
  peptide (1)..(399): Ceres Seq. ID no. 12337991

SEQ ID NO: 39880 - DNA, 2224 bp, Arabidopsis thaliana
  misc_feature (1)..(2224): Ceres Seq. ID no. 12371951
  misc_feature (1)..(2224): Ortholog of  Ceres SEQ ID NO 14307896 as cited in SEQ ID NO 66915
  misc_feature (1)..(2224): Ortholog of  Ceres SEQ ID NO 13657008 as cited in SEQ ID NO 69164
actaaattaaatgaatagttttatttgtatattttaggcaagatggattatatataatgattaaataaattaaggtgtgtattcttcactaaatgtttgagatctatccgtcacactccagaggttaaactcagtcatctgtctttggggaggacaagcaagaacctcaccgacgattccataccaaacaaattcccgatctggaaacaactgacctgtgaaggtgaagtgtatcgctggaaatggcggtggccttccgtggaggccggggaggcgtcggatccggccaatctaccggacttcgtagtttcttctcctaccggatctttatctccgctttgttctcttttctcttcctcgccactttctccgtcgttcttaactcctctcgtcatcagcctcatcaggatcatacattgccgagtatgggcaacgcatatatgcagaggacgtttttggctttgcaatcggatccattgaaaactaggttggatctgatacacaagcaagccattgatcatttgacactggtgaatgcgtatgctgcttacgctaggaagctaaagcttgatgcttctaagcagcttaagctcttcgaagatttggctatcaacttctcggatttgcagtcaaaacctggtttgaaatctgctgtgtctgataatggtaatgctcttgaggaggattcgtttaggcagcttgagaaagaagtgaaggataaggtgaagacagcgaggatgatgatcgttgagtctaaagagagttatgatacacagcttaaaatccagaagttgaaagatacaatctttgctgtccaagaacagttgacaaaggctaagaaaaacggtgcggttgctagcttgatttcagccaagtcggttcctaaaagtcttcattgtttggccatgaggcttgtaggagagaggatctctaatcctgagaagtacaaggatgctccacctgacccagccgcagaggatccaactctttaccactatgcgattttctctgataatgtcattgctgtgtctgttgtggtgagatcggttgtgatgaacgctgaggagccatggaagcatgtcttccatgtggtgacagatcggatgaatctcgcagccatgaaggtgtggtttaagatgcgtcctttggaccgtggtgcccatgttgagattaaatccgtggaggatttcaagttcttaaactcttcctatgcgccggtcttgaggcagcttgagtctgccaagttgcagaagttttactttgagaatcaagctgagaacgcaactaaagattcacataacctcaagttcaagaaccccaagtatctctcgatgttgaaccatctcagattttacttaccagagatgtatccgaagctgaataagattttgttcttggacgatgatgttgtggtgcagaaagacgtgactggtttatggaaaatcaacttggatggcaaggtgaatggagccgttgagacatgttttggttcttttcatcgatatggtcaatacttaaacttctctcatcctttgatcaaagagaactttaaccccagtgcctgtgcttgggcctttggaatgaacatattcgatctcaatgcctggagacgcgagaagtgcaccgatcaataccattactggcagaacctgaatgaagacagaactctctggaaattgggaactctacctccgggattgatcacattctattcaaagacgaaatcattggacaaatcatggcatgtacttgggttaggctataacccgggagtgagcatggacgaaatcagaaatgcaggagtgattcattacaatggaaacatgaaaccgtggctagacattgcgatgaaccaatacaagtctctctggactaaatatgttgataacgaaatggagtttgtgcagatgtgcaattttggtctctaaagagagaacgatgaaaacaaacaaaccggaaagaggaaaaaatagggagaagaggtaacctcggatcgatgtgtttctgtctttctcggcattctttaactgatgatacgtttatctttatatagggttacaaaaaaaaagaagcattttgcttgttatttctgtcatagttttggtctttatttttattttgtaaactcttcacagcaatatgttctcccaagctacaatgtcttgttgtctttatttcatacttgtctgccttaagaatcatatagaagaaactctaaaggttt

SEQ ID NO: 39881 - protein, 561 aa, Arabidopsis thaliana
  peptide (1)..(561): Ceres Seq. ID no. 12371952
MAVAFRGGRGGVGSGQSTGLRSFFSYRIFISALFSFLFLATFSVVLNSSRHQPHQDHTLPSMGNAYMQRTFLALQSDPLKTRLDLIHKQAIDHLTLVNAYAAYARKLKLDASKQLKLFEDLAINFSDLQSKPGLKSAVSDNGNALEEDSFRQLEKEVKDKVKTARMMIVESKESYDTQLKIQKLKDTIFAVQEQLTKAKKNGAVASLISAKSVPKSLHCLAMRLVGERISNPEKYKDAPPDPAAEDPTLYHYAIFSDNVIAVSVVVRSVVMNAEEPWKHVFHVVTDRMNLAAMKVWFKMRPLDRGAHVEIKSVEDFKFLNSSYAPVLRQLESAKLQKFYFENQAENATKDSHNLKFKNPKYLSMLNHLRFYLPEMYPKLNKILFLDDDVVVQKDVTGLWKINLDGKVNGAVETCFGSFHRYGQYLNFSHPLIKENFNPSACAWAFGMNIFDLNAWRREKCTDQYHYWQNLNEDRTLWKLGTLPPGLITFYSKTKSLDKSWHVLGLGYNPGVSMDEIRNAGVIHYNGNMKPWLDIAMNQYKSLWTKYVDNEMEFVQMCNFGL

SEQ ID NO: 39882 - protein, 500 aa, Arabidopsis thaliana
  peptide (1)..(500): Ceres Seq. ID no. 12371953
MGNAYMQRTFLALQSDPLKTRLDLIHKQAIDHLTLVNAYAAYARKLKLDASKQLKLFEDLAINFSDLQSKPGLKSAVSDNGNALEEDSFRQLEKEVKDKVKTARMMIVESKESYDTQLKIQKLKDTIFAVQEQLTKAKKNGAVASLISAKSVPKSLHCLAMRLVGERISNPEKYKDAPPDPAAEDPTLYHYAIFSDNVIAVSVVVRSVVMNAEEPWKHVFHVVTDRMNLAAMKVWFKMRPLDRGAHVEIKSVEDFKFLNSSYAPVLRQLESAKLQKFYFENQAENATKDSHNLKFKNPKYLSMLNHLRFYLPEMYPKLNKILFLDDDVVVQKDVTGLWKINLDGKVNGAVETCFGSFHRYGQYLNFSHPLIKENFNPSACAWAFGMNIFDLNAWRREKCTDQYHYWQNLNEDRTLWKLGTLPPGLITFYSKTKSLDKSWHVLGLGYNPGVSMDEIRNAGVIHYNGNMKPWLDIAMNQYKSLWTKYVDNEMEFVQMCNFGL

SEQ ID NO: 39883 - protein, 495 aa, Arabidopsis thaliana
  peptide (1)..(495): Ceres Seq. ID no. 12371954
MQRTFLALQSDPLKTRLDLIHKQAIDHLTLVNAYAAYARKLKLDASKQLKLFEDLAINFSDLQSKPGLKSAVSDNGNALEEDSFRQLEKEVKDKVKTARMMIVESKESYDTQLKIQKLKDTIFAVQEQLTKAKKNGAVASLISAKSVPKSLHCLAMRLVGERISNPEKYKDAPPDPAAEDPTLYHYAIFSDNVIAVSVVVRSVVMNAEEPWKHVFHVVTDRMNLAAMKVWFKMRPLDRGAHVEIKSVEDFKFLNSSYAPVLRQLESAKLQKFYFENQAENATKDSHNLKFKNPKYLSMLNHLRFYLPEMYPKLNKILFLDDDVVVQKDVTGLWKINLDGKVNGAVETCFGSFHRYGQYLNFSHPLIKENFNPSACAWAFGMNIFDLNAWRREKCTDQYHYWQNLNEDRTLWKLGTLPPGLITFYSKTKSLDKSWHVLGLGYNPGVSMDEIRNAGVIHYNGNMKPWLDIAMNQYKSLWTKYVDNEMEFVQMCNFGL

SEQ ID NO: 39884 - DNA, 2001 bp, Arabidopsis thaliana
  misc_feature (1)..(2001): Ceres Seq. ID no. 12579750
  misc_feature (1)..(2001): Ortholog of  Ceres SEQ ID NO 14310556 as cited in SEQ ID NO 54965
ccaaacaatcttctttgctaccaaatttctggaatctagggttcgattatatctcttttagattatccattatttttgtaattcgttttagtttcgtttttatttccttttttagattaagaagagttcatattttagaataattaaaaaaaatggattctgcaagaagttggtttcacaagtttcaaccacgagataagcctcggaaaaaggatatgttctccggaagcacttacggcggtggcgtgacagaaaccaccgtccccgacggaggaaatgatacagaaacggcaacgaaacttccaccactaggcggtgacggagaagcactctcaaattcaacaaaacagaaagttgctgcagccaaacagtacattgagaatcattataaggaacagatgaagaacctcaacgagaggaaagagagacgaacaacgttagagaagaagctagcggatgcagatgtatgtgaagaagaccaaaccaatcttatgaagtttcttgagaagaaagaaacagagtacatgagactccaaaggcataaaatgggtgctgatgacttcgaactcttaactatgatcggtaaaggtgcttttgggttcgagttgttagagagatcaacacaggtcatgtttttgctatgaagaaactcaagaaatcagaaatgcttcgcagaggccaggtggagcatgtaagagcagagaggaatctattggcagaagtagatagtaactgtatagtgaagctttactgttcttttcaagacaatgagtatctttatctgataatggagtatttgcccggtggcgatatgatgactcttctgatgaggaaagacactttaagtgaagatgaagctaagttctatatcgccgaatctgttctcgctatagaatctatccataaccgcaactatatccacagagacataaagccggataacttgttgcttgatagatatggacatttaaggttatctgattttggactatgtaagccattggattgtagtgttattgacggagaagatttcacggtaggaaatgcgggtagcggaggaggttcagagagcgtatcaaccactcctaaacgctcgcagcaagaacagttggaacattggcagaagaatcgaagaatgcttgcttactcaaccgttggtacaccagactacattgcacctgaagtcttgttaaagaaaggatacggcatggaatgtgactggtggtcactaggagctataatgtacgaaatgctggttgggtatccacccttttacgccgacgacccaatgtctacttgtagaaagatagtgaattggaaaacacatttgaagttccctgaagaatcaaggctatcacgaggggcaagagatcttattggtaagctcttgtgtagcgttaaccaacgactaggctctactggtgcctcccaaattaaggcacatccttggttcgaaggtgtacaatgggaaaagatttaccaaatggaagctgcgttcattcctgaggtcaacgacgatttggatactcaaaactttgagaagttcgatgaggaagataatcaaactcaagcaccttctagaacagggccatggagaaaaatgttatcttcaaaagacataaattttgtcggctacacatacaaaaactttgaaatcgtcaacgattatcaagtccccggtatagccgaactaaaaaagaaagagtcaaaatcaaagagaccatcggttaagtcactattcgagagcgaatcagactcgtcatcttctggttcggagcaacagaccattaaccggagctattctaatccgacgcctcgtggaatggaacccaacctgagacgtctagattctgagtagatatatatctgttatgcctatgtatatgtaaaccaaattaaaccggaaaataatgagcttaaatgtactaaaaacgtaagtaaactgaagataactaactacactcttctttctttaatacaaagaaaaatagattgcaagtc

SEQ ID NO: 39885 - protein, 405 aa, Arabidopsis thaliana
  peptide (1)..(405): Ceres Seq. ID no. 12579751
MKKLKKSEMLRRGQVEHVRAERNLLAEVDSNCIVKLYCSFQDNEYLYLIMEYLPGGDMMTLLMRKDTLSEDEAKFYIAESVLAIESIHNRNYIHRDIKPDNLLLDRYGHLRLSDFGLCKPLDCSVIDGEDFTVGNAGSGGGSESVSTTPKRSQQEQLEHWQKNRRMLAYSTVGTPDYIAPEVLLKKGYGMECDWWSLGAIMYEMLVGYPPFYADDPMSTCRKIVNWKTHLKFPEESRLSRGARDLIGKLLCSVNQRLGSTGASQIKAHPWFEGVQWEKIYQMEAAFIPEVNDDLDTQNFEKFDEEDNQTQAPSRTGPWRKMLSSKDINFVGYTYKNFEIVNDYQVPGIAELKKKESKSKRPSVKSLFESESDSSSSGSEQQTINRSYSNPTPRGMEPNLRRLDSE

SEQ ID NO: 39886 - protein, 397 aa, Arabidopsis thaliana
  peptide (1)..(397): Ceres Seq. ID no. 12579752
MLRRGQVEHVRAERNLLAEVDSNCIVKLYCSFQDNEYLYLIMEYLPGGDMMTLLMRKDTLSEDEAKFYIAESVLAIESIHNRNYIHRDIKPDNLLLDRYGHLRLSDFGLCKPLDCSVIDGEDFTVGNAGSGGGSESVSTTPKRSQQEQLEHWQKNRRMLAYSTVGTPDYIAPEVLLKKGYGMECDWWSLGAIMYEMLVGYPPFYADDPMSTCRKIVNWKTHLKFPEESRLSRGARDLIGKLLCSVNQRLGSTGASQIKAHPWFEGVQWEKIYQMEAAFIPEVNDDLDTQNFEKFDEEDNQTQAPSRTGPWRKMLSSKDINFVGYTYKNFEIVNDYQVPGIAELKKKESKSKRPSVKSLFESESDSSSSGSEQQTINRSYSNPTPRGMEPNLRRLDSE

SEQ ID NO: 39887 - protein, 356 aa, Arabidopsis thaliana
  peptide (1)..(356): Ceres Seq. ID no. 12579753
MEYLPGGDMMTLLMRKDTLSEDEAKFYIAESVLAIESIHNRNYIHRDIKPDNLLLDRYGHLRLSDFGLCKPLDCSVIDGEDFTVGNAGSGGGSESVSTTPKRSQQEQLEHWQKNRRMLAYSTVGTPDYIAPEVLLKKGYGMECDWWSLGAIMYEMLVGYPPFYADDPMSTCRKIVNWKTHLKFPEESRLSRGARDLIGKLLCSVNQRLGSTGASQIKAHPWFEGVQWEKIYQMEAAFIPEVNDDLDTQNFEKFDEEDNQTQAPSRTGPWRKMLSSKDINFVGYTYKNFEIVNDYQVPGIAELKKKESKSKRPSVKSLFESESDSSSSGSEQQTINRSYSNPTPRGMEPNLRRLDSE

SEQ ID NO: 39888 - DNA, 2451 bp, Arabidopsis thaliana
  misc_feature (1)..(2451): Ceres Seq. ID no. 13504744
  misc_feature (1)..(2451): Ortholog of  Ceres SEQ ID NO 13594536 as cited in SEQ ID NO 51382
  misc_feature (1)..(2451): Ortholog of  Ceres SEQ ID NO 15172549 as cited in SEQ ID NO 57185
atgagattactggtatttgttaatccgggccggaccgggccgtatctgaattatgaacactttcctaatgtcatagaatcgttcgtgccgtcgtcgctgcgatctgaccaaaatcaaaagtgttacgattcggtatcatcgtctctctcatttgtgattttgtcaaaccctgctctcttttctccaagtgctctcatggtgcttccgctcttccggcgcgctgcgatcgcccggacttcctcgcttctcagagctcgtcttttcgctcctgcctccgaattccattctcgcttttctaatggactataccacttggacgacaaaattagtagcagtaatggtgtgaggtctgcctctatagacttgattacaagaatggatgatagttctccaaagcccattctgcgatttggcgtgcaaaacttttcatctacaggacccatatcacagacggttcttgcaatgccagccttgtctcctactatgagtcatggaaatgttgtaaaatggatgaagaaagaaggtgacaaggtagaggtgggtgatgtactatgtgagatagagacagacaaagccactgtagaatttgagagtcaagaggaaggatttctggccaagattttagtcactgaaggatcaaaggatatccctgttaatgaaccgattgcaataatggttgaggaggaagacgacattaaaaacgttcctgctaccatagagggtggacgagatggtaaagaggaaacatcagctcatcaagtgatgaaacctgacgaaagcacacaacaaaaaagttccattcagcccgatgcatcagatcttcccccacatgtcgtcttagaaatgccagcactttctcctacaatgaaccaaggtaatattgccaaatggtggaaaaaagagggtgacaagattgaagtgggtgatgtcataggtgagatcgagactgacaaagccactctggaatttgaaagccttgaagaggggtacttagctaagattctaattcctgaaggttccaaggatgtggcggtgggaaagccgattgccctaatagttgaagatgctgaaagtattgaagccatcaagtcttcttccgcaggtagttctgaggttgatacagttaaagaagtccctgacagtgttgtagataaacctacagagaggaaagcaggcttcacaaagatcagtcctgctgcaaagctattgattttagaacatggattggaggcatcatcaattgaggcatcgggtccctatggtacattattgaaatcagacgttgtggccgcaattgcttctggaaaagcttctaaatcatctgcgtctacgaagaagaagcaaccatcaaaggagaccccgtctaaatcctcctccacatcgaagccttctgtgacacagtcagataataattatgaagattttccaaatagtcaaattcgcaagattatagcaaaacgtttattggaatcaaaacagaagataccccatttgtatttacaatcagatgttgtattggatcctcttcttgcatttagaaaagaacttcaagaaaaccatggcgttaaagtgtctgtcaatgacatagttattaaagcagtggcagtcgcactgaggaatgtacgacaagctaatgctttctgggatgctgagaaaggagatatcgttatgtgtgacagtgttgacatatcaattgcagttgcaactgagaagggcttaatgactccaattatcaagaatgcagaccagaaatctatttctgctatttccttagaggttaaggagctggcacaaaaggctcgatctggaaagcttgctcctcatgagtttcaaggagggacattcagcatatcaaatctaggaatgtatcctgtggataatttctgcgcaatcattaacccccctcaggctgggattctagcagttggtagaggaaacaaagtggttgagccagttattggactagatggaattgagaagccttctgttgtgacaaaaatgaatgtaacgttatccgctgatcatcggatctttgatggacaagttggagcttcgtttatgtctgaattgcgttcaaactttgaggatgttcgaagacttcttctgtgagaaagatccaactgtttaccaaatgaatcttggattactacataataaacctcggaccaacccacgtgcacatccagaaccagaactgctggtctacattgttaactctgatcacatgtttcatttttttccatttggttcatatacttaccaaaatttgttttggtctttaacaattcgtcttatagattggtaacttcctgaggtattttttgtctggtctgtcctctgcaaaataaataatttcagctgtcaatccgcaactggtgaaataatttaaaaagtattttaccctcaaaaaaaaaaaaaaaaacccgaattcctgcagcccgggggatccac

SEQ ID NO: 39889 - protein, 702 aa, Arabidopsis thaliana
  peptide (1)..(702): Ceres Seq. ID no. 13504745
MRLLVFVNPGRTGPYLNYEHFPNVIESFVPSSLRSDQNQKCYDSVSSSLSFVILSNPALFSPSALMVLPLFRRAAIARTSSLLRARLFAPASEFHSRFSNGLYHLDDKISSSNGVRSASIDLITRMDDSSPKPILRFGVQNFSSTGPISQTVLAMPALSPTMSHGNVVKWMKKEGDKVEVGDVLCEIETDKATVEFESQEEGFLAKILVTEGSKDIPVNEPIAIMVEEEDDIKNVPATIEGGRDGKEETSAHQVMKPDESTQQKSSIQPDASDLPPHVVLEMPALSPTMNQGNIAKWWKKEGDKIEVGDVIGEIETDKATLEFESLEEGYLAKILIPEGSKDVAVGKPIALIVEDAESIEAIKSSSAGSSEVDTVKEVPDSVVDKPTERKAGFTKISPAAKLLILEHGLEASSIEASGPYGTLLKSDVVAAIASGKASKSSASTKKKQPSKETPSKSSSTSKPSVTQSDNNYEDFPNSQIRKIIAKRLLESKQKIPHLYLQSDVVLDPLLAFRKELQENHGVKVSVNDIVIKAVAVALRNVRQANAFWDAEKGDIVMCDSVDISIAVATEKGLMTPIIKNADQKSISAISLEVKELAQKARSGKLAPHEFQGGTFSISNLGMYPVDNFCAIINPPQAGILAVGRGNKVVEPVIGLDGIEKPSVVTKMNVTLSADHRIFDGQVGASFMSELRSNFEDVRRLLL

SEQ ID NO: 39890 - protein, 637 aa, Arabidopsis thaliana
  peptide (1)..(637): Ceres Seq. ID no. 13504746
MVLPLFRRAAIARTSSLLRARLFAPASEFHSRFSNGLYHLDDKISSSNGVRSASIDLITRMDDSSPKPILRFGVQNFSSTGPISQTVLAMPALSPTMSHGNVVKWMKKEGDKVEVGDVLCEIETDKATVEFESQEEGFLAKILVTEGSKDIPVNEPIAIMVEEEDDIKNVPATIEGGRDGKEETSAHQVMKPDESTQQKSSIQPDASDLPPHVVLEMPALSPTMNQGNIAKWWKKEGDKIEVGDVIGEIETDKATLEFESLEEGYLAKILIPEGSKDVAVGKPIALIVEDAESIEAIKSSSAGSSEVDTVKEVPDSVVDKPTERKAGFTKISPAAKLLILEHGLEASSIEASGPYGTLLKSDVVAAIASGKASKSSASTKKKQPSKETPSKSSSTSKPSVTQSDNNYEDFPNSQIRKIIAKRLLESKQKIPHLYLQSDVVLDPLLAFRKELQENHGVKVSVNDIVIKAVAVALRNVRQANAFWDAEKGDIVMCDSVDISIAVATEKGLMTPIIKNADQKSISAISLEVKELAQKARSGKLAPHEFQGGTFSISNLGMYPVDNFCAIINPPQAGILAVGRGNKVVEPVIGLDGIEKPSVVTKMNVTLSADHRIFDGQVGASFMSELRSNFEDVRRLLL

SEQ ID NO: 39891 - protein, 577 aa, Arabidopsis thaliana
  peptide (1)..(577): Ceres Seq. ID no. 13504747
MDDSSPKPILRFGVQNFSSTGPISQTVLAMPALSPTMSHGNVVKWMKKEGDKVEVGDVLCEIETDKATVEFESQEEGFLAKILVTEGSKDIPVNEPIAIMVEEEDDIKNVPATIEGGRDGKEETSAHQVMKPDESTQQKSSIQPDASDLPPHVVLEMPALSPTMNQGNIAKWWKKEGDKIEVGDVIGEIETDKATLEFESLEEGYLAKILIPEGSKDVAVGKPIALIVEDAESIEAIKSSSAGSSEVDTVKEVPDSVVDKPTERKAGFTKISPAAKLLILEHGLEASSIEASGPYGTLLKSDVVAAIASGKASKSSASTKKKQPSKETPSKSSSTSKPSVTQSDNNYEDFPNSQIRKIIAKRLLESKQKIPHLYLQSDVVLDPLLAFRKELQENHGVKVSVNDIVIKAVAVALRNVRQANAFWDAEKGDIVMCDSVDISIAVATEKGLMTPIIKNADQKSISAISLEVKELAQKARSGKLAPHEFQGGTFSISNLGMYPVDNFCAIINPPQAGILAVGRGNKVVEPVIGLDGIEKPSVVTKMNVTLSADHRIFDGQVGASFMSELRSNFEDVRRLLL

SEQ ID NO: 39892 - DNA, 1126 bp, Arabidopsis thaliana
  misc_feature (1)..(1126): Ceres Seq. ID no. 12348411
  misc_feature (1)..(1126): Ortholog of  Ceres SEQ ID NO 14314252 as cited in SEQ ID NO 57492
  misc_feature (1)..(1126): Ortholog of  Ceres SEQ ID NO 12608276 as cited in SEQ ID NO 57871
  misc_feature (1)..(1126): Ortholog of  Ceres SEQ ID NO 13598492 as cited in SEQ ID NO 63882
  misc_feature (1)..(1126): Ortholog of  Ceres SEQ ID NO 13657914 as cited in SEQ ID NO 66230
  misc_feature (1)..(1126): Ortholog of  Ceres SEQ ID NO 13595877 as cited in SEQ ID NO 67702
  misc_feature (1)..(1126): Ortholog of  Ceres SEQ ID NO 13622667 as cited in SEQ ID NO 0
ctgccaaacatatacatcaaagcttgactctctttttctctcccatggaatcgacaaagaagcaagtctcgctggagctacttccatggttagttgtccacaccgatggaacggtagagagactagcgggaaccgaggtttgtcctcccggtttggatccaataaccggggttttctctaaagatatcattatcgaaccgaaaaccggtttatctgcccgaatctatcgacccttctcgattcaacccggtcagaagattcctctcatgctctattttcatggcggtgcatttctcatctcctccacttccttcccctcttaccacaccagtcttaacaaaattgtcaatcaggctaacgtcatagccgtctctgtcaattacagactagcaccagaacatccacttcctacagcgtacgaagactcatggactgcgctaaatactatccaagccataaacgagccgtggatcaacgactacgccgacttggacagtatattcctagtgggagatagcgccggagctaatatctcgcaccacctcgcatttcgagccaaacaatctgaccaaaccgtgaaaataaaaggcattggaatgatccacccatatttttggggaacacaacctatcggagcagagatcaaagacgaagcgatgaaacaaatggtggacggatggtgggaatttgtgtgcccctccaagaaaggatctgatgacccgtggattaatccgtttgcggacgggtcaccggatcttggagggttagggtgtgagagagtgatgattactgtggcggagaaagatatattgaatgagagagggaagatgtattttgaaagattggtgaagagtgagtggaaaggaaaggttgagattatggagacgaaagagaaagatcatgtttttcatatttttgagcccgattgtgatgaagctatggagatggtacgatgcttggctctctttataaaccaagttgaagcttgatattatttgttttgcctaaatttgatggcttttttaatgtttgtataatttttacatgtttgttaatgttgttgttattgtcttttcttttaaatttgtgtattacatttatatgtggttaaatttgtgttttttcc

SEQ ID NO: 39893 - protein, 328 aa, Arabidopsis thaliana
  peptide (1)..(328): Ceres Seq. ID no. 12348412
AKHIHQSLTLFFSPMESTKKQVSLELLPWLVVHTDGTVERLAGTEVCPPGLDPITGVFSKDIIIEPKTGLSARIYRPFSIQPGQKIPLMLYFHGGAFLISSTSFPSYHTSLNKIVNQANVIAVSVNYRLAPEHPLPTAYEDSWTALNTIQAINEPWINDYADLDSIFLVGDSAGANISHHLAFRAKQSDQTVKIKGIGMIHPYFWGTQPIGAEIKDEAMKQMVDGWWEFVCPSKKGSDDPWINPFADGSPDLGGLGCERVMITVAEKDILNERGKMYFERLVKSEWKGKVEIMETKEKDHVFHIFEPDCDEAMEMVRCLALFINQVEA

SEQ ID NO: 39894 - protein, 314 aa, Arabidopsis thaliana
  peptide (1)..(314): Ceres Seq. ID no. 12348413
MESTKKQVSLELLPWLVVHTDGTVERLAGTEVCPPGLDPITGVFSKDIIIEPKTGLSARIYRPFSIQPGQKIPLMLYFHGGAFLISSTSFPSYHTSLNKIVNQANVIAVSVNYRLAPEHPLPTAYEDSWTALNTIQAINEPWINDYADLDSIFLVGDSAGANISHHLAFRAKQSDQTVKIKGIGMIHPYFWGTQPIGAEIKDEAMKQMVDGWWEFVCPSKKGSDDPWINPFADGSPDLGGLGCERVMITVAEKDILNERGKMYFERLVKSEWKGKVEIMETKEKDHVFHIFEPDCDEAMEMVRCLALFINQVEA

SEQ ID NO: 39895 - protein, 240 aa, Arabidopsis thaliana
  peptide (1)..(240): Ceres Seq. ID no. 12348414
MLYFHGGAFLISSTSFPSYHTSLNKIVNQANVIAVSVNYRLAPEHPLPTAYEDSWTALNTIQAINEPWINDYADLDSIFLVGDSAGANISHHLAFRAKQSDQTVKIKGIGMIHPYFWGTQPIGAEIKDEAMKQMVDGWWEFVCPSKKGSDDPWINPFADGSPDLGGLGCERVMITVAEKDILNERGKMYFERLVKSEWKGKVEIMETKEKDHVFHIFEPDCDEAMEMVRCLALFINQVEA

SEQ ID NO: 39896 - DNA, 1194 bp, Arabidopsis thaliana
  misc_feature (1)..(1194): Ceres Seq. ID no. 12330308
  misc_feature (1)..(1194): Ortholog of  Ceres SEQ ID NO 15171279 as cited in SEQ ID NO 51378
  misc_feature (1)..(1194): Ortholog of  Ceres SEQ ID NO 13596816 as cited in SEQ ID NO 62287
gtcataacagtaaatgatttccacctcgctcttaattgtctacaaatcatctctttcttcacctaacgacgatggatctccgattcttggcgtccttgacccttcttctcggtctattcttcgtcaatacaaatccaacagttggacaagtcggcgtttgctatggaagaaacggcaacaacctcccttcaccggcagaaaccattgcgctcttcaaacagaaaaacatccaacgagttaggctatacagtccggaccacgacgttctagccgccctacgtggctccaacatcgaggtaacgctgggtcttcccaactcttacctacagagcgtggcctcgagccaatcacaagctaacgcgtgggtacaaacctacgtcatgaactacgcgaatggcgtcaggttccgttacatatctgttgggaatgaagttaaaatctccgactcttacgcacagttcctagtccctgccatggaaaacattgaccgggcggttttagcagccggactcggtggtcgtatcaaggtatccacatcggtagatatgggagtgcttggagagtcttatccaccatcgaaaggttcgtttaggggagacgttatggtggtaatggaaccaatcatacgtttcttggtaagcaagaactctcctttactcttaaacctctacacttacttcagctacgcgggcaatataggccaaatccggctcgattacgctctcttcacggctccttcaggaatcgtttcggaccctcctagatcttatcaaaacctatttgatgcgatgctcgatgcgatgtactcagccctagagaaattcggtggcgcatcattggaaatagttgtggcggagactggatggccaacgggaggaggagtcgatacaaatatagagaatgcgagaatctataacaataatttgattaagcatgtgaagaatgggacaccgaagagaccagggaaagaaatcgagacatatttatttgccatttatgacgagaatcaaaagccgactcctccttatgttgagaagttttggggattgttctatcccaacaagcagcctaagtatgatattaacttttattgagccgaaccaatattctatcaagggaatggtatatttatatttgaaaactaatatagatattggtactatcattcattatacaataaataaagtttgaggc

SEQ ID NO: 39897 - protein, 340 aa, Arabidopsis thaliana
  peptide (1)..(340): Ceres Seq. ID no. 12330309
MDLRFLASLTLLLGLFFVNTNPTVGQVGVCYGRNGNNLPSPAETIALFKQKNIQRVRLYSPDHDVLAALRGSNIEVTLGLPNSYLQSVASSQSQANAWVQTYVMNYANGVRFRYISVGNEVKISDSYAQFLVPAMENIDRAVLAAGLGGRIKVSTSVDMGVLGESYPPSKGSFRGDVMVVMEPIIRFLVSKNSPLLLNLYTYFSYAGNIGQIRLDYALFTAPSGIVSDPPRSYQNLFDAMLDAMYSALEKFGGASLEIVVAETGWPTGGGVDTNIENARIYNNNLIKHVKNGTPKRPGKEIETYLFAIYDENQKPTPPYVEKFWGLFYPNKQPKYDINFY

SEQ ID NO: 39898 - protein, 237 aa, Arabidopsis thaliana
  peptide (1)..(237): Ceres Seq. ID no. 12330310
MNYANGVRFRYISVGNEVKISDSYAQFLVPAMENIDRAVLAAGLGGRIKVSTSVDMGVLGESYPPSKGSFRGDVMVVMEPIIRFLVSKNSPLLLNLYTYFSYAGNIGQIRLDYALFTAPSGIVSDPPRSYQNLFDAMLDAMYSALEKFGGASLEIVVAETGWPTGGGVDTNIENARIYNNNLIKHVKNGTPKRPGKEIETYLFAIYDENQKPTPPYVEKFWGLFYPNKQPKYDINFY

SEQ ID NO: 39899 - protein, 206 aa, Arabidopsis thaliana
  peptide (1)..(206): Ceres Seq. ID no. 12330311
MENIDRAVLAAGLGGRIKVSTSVDMGVLGESYPPSKGSFRGDVMVVMEPIIRFLVSKNSPLLLNLYTYFSYAGNIGQIRLDYALFTAPSGIVSDPPRSYQNLFDAMLDAMYSALEKFGGASLEIVVAETGWPTGGGVDTNIENARIYNNNLIKHVKNGTPKRPGKEIETYLFAIYDENQKPTPPYVEKFWGLFYPNKQPKYDINFY

SEQ ID NO: 39900 - DNA, 1564 bp, Arabidopsis thaliana
  misc_feature (1)..(1564): Ceres Seq. ID no. 12329690
  misc_feature (1)..(1564): Ortholog of  Ceres SEQ ID NO 15176246 as cited in SEQ ID NO 55282
  misc_feature (1)..(1564): Ortholog of  Ceres SEQ ID NO 14301514 as cited in SEQ ID NO 65663
  misc_feature (1)..(1564): Ortholog of  Ceres SEQ ID NO 13596315 as cited in SEQ ID NO 67929
  misc_feature (1)..(1564): Ortholog of  Ceres SEQ ID NO 13596167 as cited in SEQ ID NO 68704
  misc_feature (1)..(1564): Ortholog of  Ceres SEQ ID NO 13655131 as cited in SEQ ID NO 68906
attccctttcgatacatatatatttgagtctcttcctccaaatctgaaccgtttatacctctgattccaccgcttgttgcttattcatcggaatttctgttccttttgtgccaaatgctcaagaaatcgaaaagtattgtgtaattttcgttgttgattttgaaagtttcaatcttttgtagggtgagaattgagttttatcgaacaagatggatttcgtgaacaatcttgataccgacacgtcgctatcaattctctcttgtctagatgatccatcagatattgtccgtgccagtgctgtctcacgctcctggcgacaatttgtggttaagtatagtctctccaagaatctatgcttgaagttgttccatcagctatctaatgtggatcatataattgaaacaagtaatgatagaaatggagagtcatctgaagctgggtcaagcagtctcatggatacaaggctacttgaaaaagagcaccgggcttttgccttgttggctagagggtgcatgtcttcacctattgaaagctgtatagctgatgccattagagcttccagtactgataattacccagtagaaagcatcttaaacacactcgagaagagagatcggattggtcgaaccccttcttattggtcgagtactgggcaacacaaaactacggtgcccgaatcacttctttacaagttgattggtgatttgtgtctcattactgaagtcagcatccatcctttccaagcttattttcagcgcggtcatccgatatactcttcacattatgttcgtttccggttgggtcacgaaaaggacaattcacctcactacaacaattcacaggataaaaaaggtgagccaggaaagagttcaattgaaagcaactatgtatggacttacacttcacaagagttttcgatggctcaggaaaatcgattgcagagctttcagcttccagaacctgttctttgcattggtgggtatctgctagtcgagtttctaggtcgagttcagacacaagaaatggatggccaatactatatatgcgtgtcacatgtcaaagtggagggaagatctctagcaaaatcatttcgagttgagaatgtggatgacaatggaaagtttggattgaaggtgttgagttacaatgatccgaaaaaaatggaggagatggatgcagaggccgggcaggacatggatgcagaggcgggccaaagtcagctgagaaaccttgaacagctcttgaatttgttgcacaggcatcctctcgatgttgtcgactatgtttggcctgatgagtcagacgacgagtatgctgaatcagaagatgaggctgagccttagtcactgaattactactattcccagttatttcttctttttggttttaattttaaagaatctttaggtgttttttgtcatcttttgtgagcgtttttaaaagcttgtactccagccatcgttgttaaacattgtgtgtgttacagaccttaacagaaagttaacagccattttgggctctctcttatctgtcggtgattccagagaatcaaagcagtctttcg

SEQ ID NO: 39901 - protein, 377 aa, Arabidopsis thaliana
  peptide (1)..(377): Ceres Seq. ID no. 12329691
MDFVNNLDTDTSLSILSCLDDPSDIVRASAVSRSWRQFVVKYSLSKNLCLKLFHQLSNVDHIIETSNDRNGESSEAGSSSLMDTRLLEKEHRAFALLARGCMSSPIESCIADAIRASSTDNYPVESILNTLEKRDRIGRTPSYWSSTGQHKTTVPESLLYKLIGDLCLITEVSIHPFQAYFQRGHPIYSSHYVRFRLGHEKDNSPHYNNSQDKKGEPGKSSIESNYVWTYTSQEFSMAQENRLQSFQLPEPVLCIGGYLLVEFLGRVQTQEMDGQYYICVSHVKVEGRSLAKSFRVENVDDNGKFGLKVLSYNDPKKMEEMDAEAGQDMDAEAGQSQLRNLEQLLNLLHRHPLDVVDYVWPDESDDEYAESEDEAEP

SEQ ID NO: 39902 - protein, 296 aa, Arabidopsis thaliana; identical to SEQ ID NO: 26676
  peptide (1)..(296): Ceres Seq. ID no. 12329692

SEQ ID NO: 39903 - protein, 276 aa, Arabidopsis thaliana; identical to SEQ ID NO: 26677
  peptide (1)..(276): Ceres Seq. ID no. 12329693

SEQ ID NO: 39904 - DNA, 2142 bp, Arabidopsis thaliana
  misc_feature (1)..(2142): Ceres Seq. ID no. 13489235
  misc_feature (1)..(2142): Ortholog of  Ceres SEQ ID NO 12613725 as cited in SEQ ID NO 68196
atctctcttcacatgcccatttgaatcgtatctcctctcatttcttcttttgttttgttggagttagataaaatcaaaggtctaataaaagtgtcaaaacccttatcgctataacctccactaccatcttaaacttctccttataactcacgcttctctgctttcttctctcagagtctaactgctcaaataagaaaatggttcatgtgtcatcatctcatggagccaaagatggctctgaagaagcctatgattacagaggaaacccaccagataagtctaaaaccggtggatggttaggcgccggtttaattttagggagcgagctatcagagagaatatgcgtgatgggcatatcaatgaatctagtgacgtaccttgttggagatttacacatctcatcagctaaatcagcgaccatagtcaccaacttcatgggaactcttaaccttctagggcttctcggtggttttttggctgacgctaaactcggtcgctacaagatggttgcaatctcagcttctgtcacagctctgggagtgttgcttttgacggtggctacaactatctcaagcatgagaccaccaatatgtgacgatttcaggagacttcatcatcagtgcatagaagcaaacggacaccagttggctcttctctatgttgctctctataccatagctctaggcggaggaggaatcaaatccaacgtctctggttttgggtctgaccagttcgatactagtgatcctaaagaagagaaacagatgattttcttcttcaacagattctatttctccatcagcgttggctctctcttcgccgtgattgctcttgtttacgttcaggacaacgtcgggagaggctggggttacgggatctctgccgcgactatggtggttgcagccattgttttactctgcggaacgaaacggtaccgtttcaagaaacctaaaggaagcccttttacaacaatatggagggttggtttcttggcttggaagaaaagaaaggagagttaccctgcgcatccaagtcttttgaacggttatgacaacaccacggttccacacacagagatgcttaagtgtttagacaaagccgcaatttccaagaacgagagctctcctagctcgaaggacttcgaagagaaggatccgtggatcgtttcgactgttacacaagtcgaagaagtgaaactcgtgatgaaattggtaccgatttgggcaacgaacattcttttctggacgatttactcccaaatgacgactttcacggtcgaacaagcgacgtttatggaccgaaaactcggatctttcactgttcctgcaggctcttactctgctttcctcatactcacaattctcctcttcacttcccttaacgagagagtctttgttcctttaacaagaaggctcacaaaaaagcctcaaggaatcacaagcctacagagaatcggagtagggctagtattctcaatggctgcaatggctgtagccgcggttatagagaacgctagacgcgaggcagcggttaacaacgataagaaaataagcgcgttttggttggttccacaatatttcttagtcggtgcgggtgaggcctttgcttacgttggacagcttgagttctttataagagaagcaccagagaggatgaaatcgatgagcaccggattgtttctaagcacgatatcgatgggattcttcgtgagtagcttgcttgtttcgcttgttgatagggttacagacaaaagctggcttagaagtaaccttaacaaagcgagattgaactacttctactggttacttgttgtcttgggagcattgaacttcttgatttttattgtgtttgccatgaaacatcagtataaagctgatgtgattactgttgttgtgactgatgatgattcagtggagaaggaagtgacgaagaaagagagctctgaatttgagcttaaggacattccttgaaaccagatttagaagaagaaaaaaaacctctggttttgttatttgctttgaagatttcattttgtctttgtatttttagtatattgtgtgtatgaaatagaaagattactatatggtttggattgtatttttttttgtaagatttttaaaaatttagttactatagtttttg

SEQ ID NO: 39905 - protein, 590 aa, Arabidopsis thaliana
  peptide (1)..(590): Ceres Seq. ID no. 13489236
MVHVSSSHGAKDGSEEAYDYRGNPPDKSKTGGWLGAGLILGSELSERICVMGISMNLVTYLVGDLHISSAKSATIVTNFMGTLNLLGLLGGFLADAKLGRYKMVAISASVTALGVLLLTVATTISSMRPPICDDFRRLHHQCIEANGHQLALLYVALYTIALGGGGIKSNVSGFGSDQFDTSDPKEEKQMIFFFNRFYFSISVGSLFAVIALVYVQDNVGRGWGYGISAATMVVAAIVLLCGTKRYRFKKPKGSPFTTIWRVGFLAWKKRKESYPAHPSLLNGYDNTTVPHTEMLKCLDKAAISKNESSPSSKDFEEKDPWIVSTVTQVEEVKLVMKLVPIWATNILFWTIYSQMTTFTVEQATFMDRKLGSFTVPAGSYSAFLILTILLFTSLNERVFVPLTRRLTKKPQGITSLQRIGVGLVFSMAAMAVAAVIENARREAAVNNDKKISAFWLVPQYFLVGAGEAFAYVGQLEFFIREAPERMKSMSTGLFLSTISMGFFVSSLLVSLVDRVTDKSWLRSNLNKARLNYFYWLLVVLGALNFLIFIVFAMKHQYKADVITVVVTDDDSVEKEVTKKESSEFELKDIP

SEQ ID NO: 39906 - protein, 540 aa, Arabidopsis thaliana
  peptide (1)..(540): Ceres Seq. ID no. 13489237
MGISMNLVTYLVGDLHISSAKSATIVTNFMGTLNLLGLLGGFLADAKLGRYKMVAISASVTALGVLLLTVATTISSMRPPICDDFRRLHHQCIEANGHQLALLYVALYTIALGGGGIKSNVSGFGSDQFDTSDPKEEKQMIFFFNRFYFSISVGSLFAVIALVYVQDNVGRGWGYGISAATMVVAAIVLLCGTKRYRFKKPKGSPFTTIWRVGFLAWKKRKESYPAHPSLLNGYDNTTVPHTEMLKCLDKAAISKNESSPSSKDFEEKDPWIVSTVTQVEEVKLVMKLVPIWATNILFWTIYSQMTTFTVEQATFMDRKLGSFTVPAGSYSAFLILTILLFTSLNERVFVPLTRRLTKKPQGITSLQRIGVGLVFSMAAMAVAAVIENARREAAVNNDKKISAFWLVPQYFLVGAGEAFAYVGQLEFFIREAPERMKSMSTGLFLSTISMGFFVSSLLVSLVDRVTDKSWLRSNLNKARLNYFYWLLVVLGALNFLIFIVFAMKHQYKADVITVVVTDDDSVEKEVTKKESSEFELKDIP

SEQ ID NO: 39907 - protein, 536 aa, Arabidopsis thaliana
  peptide (1)..(536): Ceres Seq. ID no. 13489238
MNLVTYLVGDLHISSAKSATIVTNFMGTLNLLGLLGGFLADAKLGRYKMVAISASVTALGVLLLTVATTISSMRPPICDDFRRLHHQCIEANGHQLALLYVALYTIALGGGGIKSNVSGFGSDQFDTSDPKEEKQMIFFFNRFYFSISVGSLFAVIALVYVQDNVGRGWGYGISAATMVVAAIVLLCGTKRYRFKKPKGSPFTTIWRVGFLAWKKRKESYPAHPSLLNGYDNTTVPHTEMLKCLDKAAISKNESSPSSKDFEEKDPWIVSTVTQVEEVKLVMKLVPIWATNILFWTIYSQMTTFTVEQATFMDRKLGSFTVPAGSYSAFLILTILLFTSLNERVFVPLTRRLTKKPQGITSLQRIGVGLVFSMAAMAVAAVIENARREAAVNNDKKISAFWLVPQYFLVGAGEAFAYVGQLEFFIREAPERMKSMSTGLFLSTISMGFFVSSLLVSLVDRVTDKSWLRSNLNKARLNYFYWLLVVLGALNFLIFIVFAMKHQYKADVITVVVTDDDSVEKEVTKKESSEFELKDIP

SEQ ID NO: 39908 - DNA, 1307 bp, Arabidopsis thaliana
  misc_feature (1)..(1307): Ceres Seq. ID no. 13487221
  misc_feature (1)..(1307): Ortholog of  Ceres SEQ ID NO 13598488 as cited in SEQ ID NO 63862
  misc_feature (1)..(1307): Ortholog of  Ceres SEQ ID NO 13659640 as cited in SEQ ID NO 67101
gtcgacccacgcgtccgctcaccatcaaacaactacaacatctgcggttagtatgttgaaagtagagagtaactgggcacaagcctgtgatacatgccgatcagccgcctgcaccgtgtactgccgggctgattctgcctacttgtgctccagttgtgatgctcaagttcatgctgccaatcgtcttgcttcccgccatgaacgtgttcgagtctgtcaatcatgtgagcgagccccggctgcctttttctgcaaggcagatgctgcatctctatgcacaacctgtgattcagagattcattccgcaaacccacttgctagacgccatcaacgagttccaattctgcccatttctgagtactcttacagttccacggccactaaccattcatgtgagacaacagtgacagatccagagaacagacttgtgcttggtcaagaagaagaggatgaagatgaagcagaggcggcttcatggttgttgcctaattcagggaaaaacagtggtaacaacaatggcttctcgattggggatgagtttctgaaccttgttgattatagttcgagtgataagcaattcacagatcaatccaatcagtatcaactagactgcaacgtacctcagaggagctatggggaagatggagttgttccacttcaaattgaagtatcaaagggcatgtaccaagagcaacagaactttcagctgagtatcaactgtggctcctggggagctcttcgaagctccaatggttccctcagtcatatggtgaatgtttcatctatggacctgggagttgtgccggagtcaacaacgagtgacgcaacagtatcaaacccaagatcgcccaaagcggtaacagaccaaccaccttaccctccagctcagatgctcagtccaagggacagagaagctagagtcctgagatacagagagaagaagaagatgaggaaatttgagaagacgataagatatgcttcaaggaaagcgtatgcagagaaaagaccacggatcaagggccggtttgcaaagaagaaagatgtcgatgaagaggcaaaccaagctttctccacaatgataacatttgacaccggatatggaattgttccatcattctgatgctgctatggcaaaactagactgcatgcttgtaaattacttctggtttgaaattcctgcaagttattaccacggttttatgcatatagggtctgtagtttactagttttgcctaactagtacgagttaattagatatacactcatacttagctgctgtaagttaatacaaattttgcccacttggt

SEQ ID NO: 39909 - protein, 372 aa, Arabidopsis thaliana
  peptide (1)..(372): Ceres Seq. ID no. 13487222
STHASAHHQTTTTSAVSMLKVESNWAQACDTCRSAACTVYCRADSAYLCSSCDAQVHAANRLASRHERVRVCQSCERAPAAFFCKADAASLCTTCDSEIHSANPLARRHQRVPILPISEYSYSSTATNHSCETTVTDPENRLVLGQEEEDEDEAEAASWLLPNSGKNSGNNNGFSIGDEFLNLVDYSSSDKQFTDQSNQYQLDCNVPQRSYGEDGVVPLQIEVSKGMYQEQQNFQLSINCGSWGALRSSNGSLSHMVNVSSMDLGVVPESTTSDATVSNPRSPKAVTDQPPYPPAQMLSPRDREARVLRYREKKKMRKFEKTIRYASRKAYAEKRPRIKGRFAKKKDVDEEANQAFSTMITFDTGYGIVPSF

SEQ ID NO: 39910 - protein, 355 aa, Arabidopsis thaliana
  peptide (1)..(355): Ceres Seq. ID no. 13487223
MLKVESNWAQACDTCRSAACTVYCRADSAYLCSSCDAQVHAANRLASRHERVRVCQSCERAPAAFFCKADAASLCTTCDSEIHSANPLARRHQRVPILPISEYSYSSTATNHSCETTVTDPENRLVLGQEEEDEDEAEAASWLLPNSGKNSGNNNGFSIGDEFLNLVDYSSSDKQFTDQSNQYQLDCNVPQRSYGEDGVVPLQIEVSKGMYQEQQNFQLSINCGSWGALRSSNGSLSHMVNVSSMDLGVVPESTTSDATVSNPRSPKAVTDQPPYPPAQMLSPRDREARVLRYREKKKMRKFEKTIRYASRKAYAEKRPRIKGRFAKKKDVDEEANQAFSTMITFDTGYGIVPSF

SEQ ID NO: 39911 - DNA, 1969 bp, Arabidopsis thaliana
  misc_feature (1)..(1969): Ceres Seq. ID no. 13497298
  misc_feature (1)..(1969): Ortholog of  Ceres SEQ ID NO 15176499 as cited in SEQ ID NO 52857
agagaaagacttttttagtgtttctttgtcattttcgttcctcaaaaaaaccttttcgaatttgacccttattgttatcctgattcttctgctcggttctcgccggagagaagacacggagaagagggttttcgaaaaggaggatgagaggttccaataacaccgatctatttgaccctaagacggagatggattccaatttctctcgccatggttcttcctccgaaggtgattttggtttcgctttcaatgacagtaacttctccgatcgtttgctccggatcgagatcttgggtgggccttcggattctaggtctgatgctgaaggatgtacgagtattgccgattgggctcgtcatcgcaagaggagaagagaggacaacaagaaggacaatggtgttgcgatttcagacattgtggcatgtgctgaagaacagattttaaccgataacaaccaacctgatatggatgatgctcctggtggtgataatcttgacgatgaaggagaggcaatggttgaagaggctttatcaggtgatgatgatgcatctagtgagccaaactggggtattgattgttctactgttgttagagttaaagaactgcatattagttctcctatcttggccgcaaaaagcccctttttctacaagctgttttctaatggaatgagggaatcagaacaaagacatgtaacccttagaattagtgcacaagaggaaggtgctttgatggagcttttaaactttatgtatagcaactctctaagtgtcacaacagcacccgctttattagatgttcttatggctgctgacaagtttgaggttgcttcctgtatgaggtattgtagtagactactgcgaaatatgcccatgacccctgattctgctttgctctatcttgagctgccctctagtgttttaatggctgaagcagtgcaacctctaaccgatgcagcaaagcagttccttgcctcgcgctacaaggatattaccaagtttcatgatgaggttatggccttaccattggctggaatagaggcgatactatcgagcgatgatctccaaattgcttctgaggatgctgtttatgattttgtcttgaaatgggcaaggggacagtatagttcattggaagatcgtagagagattctgggttcacgccttgcactctacatccgcttcccatacatgacgtgtcgaaagctgaaaaaggtactaacgtgcagtgattttgagcatgaagtagcatcaaagcaagtattagaagcgctcttcttcaaagcagaagccccacacaggcaacgcatcctcgcagctgaaggatcggactccatgaaccgccgtttcatagagagggcttacaaatacagacccgtaaaagtggtggagtttgagcttcctcgcccgcaatgtgtagtgtacctggacttgaagcgagaggaatgcgcaggactattcccttcaggaagagtctattctcaggctttccacttaggaggtcaaggtttcttcctctcagcacactgcaacatggaccagcaaagctcgttccactgctttgggctattcctcggaatgcaagagaaaggggctgtgagttttggtgtggactacgaatttgcggcaagagataaaagtacaaaggaagaatacgtaagcaaatacaaaggaaactacacattcacaggggggaaagcggttggttacagaaaccttttcgggattccatggacttcgttcatagccgaggacagtcaacatttcatcaatggcattctccatctcagagccgagctcaccattaaacgttcctcagacctgcactgactgttttcttctctctctctctctatgtcgtcacatttaagttgtataatctcgttatgtagcagctctaaccacgagtgtcctttgtacaataattgcctaaggagcaaaagtatggcttaaagagtacctcattctgt

SEQ ID NO: 39912 - protein, 561 aa, Arabidopsis thaliana
  peptide (1)..(561): Ceres Seq. ID no. 13497299
MRGSNNTDLFDPKTEMDSNFSRHGSSSEGDFGFAFNDSNFSDRLLRIEILGGPSDSRSDAEGCTSIADWARHRKRRREDNKKDNGVAISDIVACAEEQILTDNNQPDMDDAPGGDNLDDEGEAMVEEALSGDDDASSEPNWGIDCSTVVRVKELHISSPILAAKSPFFYKLFSNGMRESEQRHVTLRISAQEEGALMELLNFMYSNSLSVTTAPALLDVLMAADKFEVASCMRYCSRLLRNMPMTPDSALLYLELPSSVLMAEAVQPLTDAAKQFLASRYKDITKFHDEVMALPLAGIEAILSSDDLQIASEDAVYDFVLKWARGQYSSLEDRREILGSRLALYIRFPYMTCRKLKKVLTCSDFEHEVASKQVLEALFFKAEAPHRQRILAAEGSDSMNRRFIERAYKYRPVKVVEFELPRPQCVVYLDLKREECAGLFPSGRVYSQAFHLGGQGFFLSAHCNMDQQSSFHCFGLFLGMQEKGAVSFGVDYEFAARDKSTKEEYVSKYKGNYTFTGGKAVGYRNLFGIPWTSFIAEDSQHFINGILHLRAELTIKRSSDLH

SEQ ID NO: 39913 - protein, 546 aa, Arabidopsis thaliana
  peptide (1)..(546): Ceres Seq. ID no. 13497300
MDSNFSRHGSSSEGDFGFAFNDSNFSDRLLRIEILGGPSDSRSDAEGCTSIADWARHRKRRREDNKKDNGVAISDIVACAEEQILTDNNQPDMDDAPGGDNLDDEGEAMVEEALSGDDDASSEPNWGIDCSTVVRVKELHISSPILAAKSPFFYKLFSNGMRESEQRHVTLRISAQEEGALMELLNFMYSNSLSVTTAPALLDVLMAADKFEVASCMRYCSRLLRNMPMTPDSALLYLELPSSVLMAEAVQPLTDAAKQFLASRYKDITKFHDEVMALPLAGIEAILSSDDLQIASEDAVYDFVLKWARGQYSSLEDRREILGSRLALYIRFPYMTCRKLKKVLTCSDFEHEVASKQVLEALFFKAEAPHRQRILAAEGSDSMNRRFIERAYKYRPVKVVEFELPRPQCVVYLDLKREECAGLFPSGRVYSQAFHLGGQGFFLSAHCNMDQQSSFHCFGLFLGMQEKGAVSFGVDYEFAARDKSTKEEYVSKYKGNYTFTGGKAVGYRNLFGIPWTSFIAEDSQHFINGILHLRAELTIKRSSDLH

SEQ ID NO: 39914 - protein, 454 aa, Arabidopsis thaliana
  peptide (1)..(454): Ceres Seq. ID no. 13497301
MDDAPGGDNLDDEGEAMVEEALSGDDDASSEPNWGIDCSTVVRVKELHISSPILAAKSPFFYKLFSNGMRESEQRHVTLRISAQEEGALMELLNFMYSNSLSVTTAPALLDVLMAADKFEVASCMRYCSRLLRNMPMTPDSALLYLELPSSVLMAEAVQPLTDAAKQFLASRYKDITKFHDEVMALPLAGIEAILSSDDLQIASEDAVYDFVLKWARGQYSSLEDRREILGSRLALYIRFPYMTCRKLKKVLTCSDFEHEVASKQVLEALFFKAEAPHRQRILAAEGSDSMNRRFIERAYKYRPVKVVEFELPRPQCVVYLDLKREECAGLFPSGRVYSQAFHLGGQGFFLSAHCNMDQQSSFHCFGLFLGMQEKGAVSFGVDYEFAARDKSTKEEYVSKYKGNYTFTGGKAVGYRNLFGIPWTSFIAEDSQHFINGILHLRAELTIKRSSDLH

SEQ ID NO: 39915 - DNA, 1046 bp, Arabidopsis thaliana
  misc_feature (1)..(1046): Ceres Seq. ID no. 13494184
  misc_feature (1)..(1046): Ortholog of  Ceres SEQ ID NO 12578688 as cited in SEQ ID NO 27
gttaaaataaaatagaataaaaataaaggaagaagaagaagaagaagaagaagaaaggattcgtcttccttcttccacaccctttctgacacctcatctcccctcccaccttctccgtcccgttccgtttctccatcagatcctcgattccgatccaacagttcgaattcagtttccgattctgatctgatcgaaccaatactcactgagatttgatcggcgattatggagtctatatctccggtatcgaatcagcttcttcagccgacgacgacgagctctaattccgatcgctctcgtcgtaagcgtaagaagaaatcatcgccatcatcggttgagaaatctccatctccgtcaatatcgttggagaaatggagatcggagaagcagcaacagatctactcaacgaagctagttcatgctttaagagagctacgaatcagccaacaaccatcttcatcatcatcttcttcgattccacgtggaggtagagccgtacgtgaagtcgccgatagagctttagcagttgcggcgagaggtaaaacgttatggagtcgagcgatactttcaaaagctgtaaaactcaaattcaggaaacacaaacgccagagaatctctaatccgacgacgacgacgttaaccaccgggagtatcaggtcaaagaaacagagagcgacggttttgaggcttaaggctaaaggtttgccagctgtacagaggaaagtgaaagtactgagccggttagttcccggttgccgtaaacaatcattaccggtggttttagaagaaaccactgattatatagctgccatggagatgcagattcgtactatgactgcgattctctccgccgttagttcttctcctccgccgccaacgccaggtcacgaagggggacaaacacacatgcttggttagttggccaaactgtccttttatttttttccaattttaaaaaccaaaaaaaaaactgttttttttatcatattattattcttctcactgtattgtttgttgtttgaatattttactattcaactttattt

SEQ ID NO: 39916 - protein, 230 aa, Arabidopsis thaliana
  peptide (1)..(230): Ceres Seq. ID no. 13494185
MESISPVSNQLLQPTTTSSNSDRSRRKRKKKSSPSSVEKSPSPSISLEKWRSEKQQQIYSTKLVHALRELRISQQPSSSSSSSIPRGGRAVREVADRALAVAARGKTLWSRAILSKAVKLKFRKHKRQRISNPTTTTLTTGSIRSKKQRATVLRLKAKGLPAVQRKVKVLSRLVPGCRKQSLPVVLEETTDYIAAMEMQIRTMTAILSAVSSSPPPPTPGHEGGQTHMLG

SEQ ID NO: 39917 - DNA, 1149 bp, Arabidopsis thaliana
  misc_feature (1)..(1149): Ceres Seq. ID no. 12327856
  misc_feature (1)..(1149): Ortholog of  Ceres SEQ ID NO 14313796 as cited in SEQ ID NO 54544
gtttattctttttttccggcggaagcgaattgttggttgctgtagagagaattgattggccggagagaatggtgaaagtaatcgattcccattacctagccatcaccgccattgtcaccgtgggttatcaattcatattcttcgtaatcacagctcttttcaaatttgatcaagttactgactttgccggaagtacaaatttcgtgatacttgctgtattgactctgcttctcaaagggacatggcattatcgtcagatagtcttgactgtgctagtagtcgtatggggacttcgtctgggactgttcctccttatgaggatcttgcaatggggtgaagatcgacgctttgatgacatgcgtgaaaatattgggaaactagtagtcttttggatttttcaggccgtgtgggtttggactgttagtttacctgttacctttgttaatgcaagcaacggtggaagattgtttcagcccgcagatgttatcggttggacaatgtgggttgcagggttcttgattgaagctacagctgatcaacaaaagctttcgttcaagaagtgtccagaaaacaaaggaaaatggtgtgatgttggtgtatggaagtattcacgccatccaaactactttggtgagatgttactctggtggggcttatatgtggcttcattgcctgtgcttaaaggtctcgagtaccttgtcataattggaccagtctttctcactttgctacttctcttcgttagcggcataccattactcgaggaatctgcggacaaaaagtatggtaacttgggagcttatcgacactacaagaagacaactagtcctctgattctcttaccgcgaggagtgtatgggtacttaccaatatggtgcaaatcagtctttctctttgagtttccattgtacagccgtaatcttcctcaagagactacagcttgggatagacgaaactcgaagaagagccagagaagcattgactgagagagagaaagagagtagattgtcactgattttgcaaacccgtctcctagttcttccttaatattcaaactctctttttgtatagattcttgtttgtctttgggtacttgttaaagataattgctacattgattgagaatacaataagattcaaaccaagctt

SEQ ID NO: 39918 - protein, 327 aa, Arabidopsis thaliana
  peptide (1)..(327): Ceres Seq. ID no. 12327857
LFFFSGGSELLVAVERIDWPERMVKVIDSHYLAITAIVTVGYQFIFFVITALFKFDQVTDFAGSTNFVILAVLTLLLKGTWHYRQIVLTVLVVVWGLRLGLFLLMRILQWGEDRRFDDMRENIGKLVVFWIFQAVWVWTVSLPVTFVNASNGGRLFQPADVIGWTMWVAGFLIEATADQQKLSFKKCPENKGKWCDVGVWKYSRHPNYFGEMLLWWGLYVASLPVLKGLEYLVIIGPVFLTLLLLFVSGIPLLEESADKKYGNLGAYRHYKKTTSPLILLPRGVYGYLPIWCKSVFLFEFPLYSRNLPQETTAWDRRNSKKSQRSID

SEQ ID NO: 39919 - protein, 305 aa, Arabidopsis thaliana
  peptide (1)..(305): Ceres Seq. ID no. 12327858
MVKVIDSHYLAITAIVTVGYQFIFFVITALFKFDQVTDFAGSTNFVILAVLTLLLKGTWHYRQIVLTVLVVVWGLRLGLFLLMRILQWGEDRRFDDMRENIGKLVVFWIFQAVWVWTVSLPVTFVNASNGGRLFQPADVIGWTMWVAGFLIEATADQQKLSFKKCPENKGKWCDVGVWKYSRHPNYFGEMLLWWGLYVASLPVLKGLEYLVIIGPVFLTLLLLFVSGIPLLEESADKKYGNLGAYRHYKKTTSPLILLPRGVYGYLPIWCKSVFLFEFPLYSRNLPQETTAWDRRNSKKSQRSID

SEQ ID NO: 39920 - protein, 223 aa, Arabidopsis thaliana
  peptide (1)..(223): Ceres Seq. ID no. 12327859
MRILQWGEDRRFDDMRENIGKLVVFWIFQAVWVWTVSLPVTFVNASNGGRLFQPADVIGWTMWVAGFLIEATADQQKLSFKKCPENKGKWCDVGVWKYSRHPNYFGEMLLWWGLYVASLPVLKGLEYLVIIGPVFLTLLLLFVSGIPLLEESADKKYGNLGAYRHYKKTTSPLILLPRGVYGYLPIWCKSVFLFEFPLYSRNLPQETTAWDRRNSKKSQRSID

SEQ ID NO: 39921 - DNA, 1214 bp, Arabidopsis thaliana
  misc_feature (1)..(1214): Ceres Seq. ID no. 12439731
  misc_feature (1)..(1214): Ortholog of  Ceres SEQ ID NO 15169749 as cited in SEQ ID NO 55675
agcttcatatttcttgcacgtaaagtttactctgtctcaccgattttgtttttttctttgttttttttttgattttttaatatcgaaaccctaaagcctcgaaggttctctcgccggagaagaaattatgcagggtttggcggcgaccaccaccaaccgtggctctctcaccttcctcgctccgaggaaccatagtccaatttcaaagaaatttgtgaatccaagagtgttctttcccaacgttgattcatccgcaaaattaagattatcagctagctcaatttcacggagatgtccacgagagattgctcctctttcagcaactgcatctgtggactttgcagcagcagcaacatcatccaaccagctctttgctaatggcttgccaccattagctcctggtttgagaagacaccggagaccgatagagcctgcaagagtggctaaagatgacttctttaaaatcaaactgcctaaaatcgcagagagacctgaatggtggtggaggacgttagcttgtgttccttatttgatatccctccaaatatctgatgttggtttctatgtccaaccttttctcgaaaagcacgacgctattggggacatgatatatttcatcccgggagcgataaacagatggccgacatggttcttcatggtgtactgctacttgggttatatgtgggtggtgaagaacaaagagctgcctcattacttgaggtttcacatgatgatgggtatgcttcttgaaacagctcttcaggtcatatggtgcactagcaatttcttcccgctgattcatttcaaaggacggttcggaatgtattattggatggccatcggattcacctacatatgtctgcttctcgaatgcatacggtgcgctcttgctggagtctatgctcagattcctttcatgacagatgctgcttccattcacaccctcttcaacttgggaggttttcagagaccactcaggtgaaaggtgaaaaactggccctttcgggtgttacatactttggaataggaacaagtctcttatcgagtctacacttatatgaatttagtctttttagtgtcagtgtcttatctcatgtgtaacacagaactctctatgagagtagcttataccaatgattttaaagctgaataatccggtcggatttgtccatgatttgaaagtacgcagatcaattcagctctatattgaacgt

SEQ ID NO: 39922 - protein, 284 aa, Arabidopsis thaliana
  peptide (1)..(284): Ceres Seq. ID no. 12439732
MQGLAATTTNRGSLTFLAPRNHSPISKKFVNPRVFFPNVDSSAKLRLSASSISRRCPREIAPLSATASVDFAAAATSSNQLFANGLPPLAPGLRRHRRPIEPARVAKDDFFKIKLPKIAERPEWWWRTLACVPYLISLQISDVGFYVQPFLEKHDAIGDMIYFIPGAINRWPTWFFMVYCYLGYMWVVKNKELPHYLRFHMMMGMLLETALQVIWCTSNFFPLIHFKGRFGMYYWMAIGFTYICLLLECIRCALAGVYAQIPFMTDAASIHTLFNLGGFQRPLR

SEQ ID NO: 39923 - DNA, 1566 bp, Arabidopsis thaliana
  misc_feature (1)..(1566): Ceres Seq. ID no. 12327860
  misc_feature (1)..(1566): Ortholog of  Ceres SEQ ID NO 13655244 as cited in SEQ ID NO 62716
gaaaaactgagaaactttcacttcttcttcgtctccgtagtttcagtttcgatctgtaaagtttcaaacttgtggtcgaatttttaaatgggaagtggaagagatagagacgaccctttatccttcaccagcaatccatctacggcgtcgtctccagtcactgtatctgactatctcgacaactttctcggcgaacccacttctcgctccggtagttttcaaagcgagagcttactcggtggaggcggtggagaaagcatcaacgacgctgattttggattcgctcgtcctgatttccgatcggaacaactagctggaaccgtacagttttacgagaggcatgtcttcttgtgctacaaaaagccatctgtttggcccgcaaggatcgaggctgctgagttcgatcgattgcctaggctactctctgctgctgtatcggccagaaagggtagcatgaagaaggagactcgactcacaatatgtgaggggcatgatggaacagagacatccaatggtgatgtacttatttttcctgatatgatcagatacaggagattgactcactttgatgtggagacctttgtggaagaggtgcttgtgaaggatggtgaatggctgcctggaaatcctgaattgctgaaaggctcatatgtctttgtatgttcccatggatcccgagaccggcgatgtggggtttgtgggccgtcgctagttagtagattcagagaagaacttgagttccatggtcttcaaggtaaagtgtcaattagcccatgttctcacataggtggtcacaaatacgctgggaatgttatcatctaccgatcaaacatcaacagggaagtcacaggacactggtatgggtatgtgaccccagaagatgtacctattcttttggagcagcacatcaacaaaggcgagattgtagaccggctatggaggggtgaaatgggtctatcagaagaagatcagaagaaaactcaagaagggcgatttcagctaaatggtacagtccattccgtaaagatcaatgggaaagtgagtcaagaatcatcggttcacaacgccgatgtttcctgttgccagtcacgagctgcagaacctaatggttgttgccaacaaaatgggaacagctcttcatgttgtcaagacgacactactctgatgttgtcactgggaacatcagaagataatcaacttgaaagtgaaaacaacactgagaagctgacaccaggaagaaaaattgcagaaaagactttctttagaattaatagtgacaaaggatcttcgacacgtaaggtttgcggaataccaacatggttagagagctgggagcgagaagatacttatgctgctcttgctgttgtctgtgctgctgcttccgtggctgttgcctatacttgctacaaacagttgtaacgaagaaatttgtagccctaagatgattgtgtattgtgttcttataagacattgtgattttgtttctgctttcaaactacattttcctttcgatttaaaggagggttcttgtcagaactgtttgatgatatgtatcctgttaactct

SEQ ID NO: 39924 - protein, 443 aa, Arabidopsis thaliana
  peptide (1)..(443): Ceres Seq. ID no. 12327861
MGSGRDRDDPLSFTSNPSTASSPVTVSDYLDNFLGEPTSRSGSFQSESLLGGGGGESINDADFGFARPDFRSEQLAGTVQFYERHVFLCYKKPSVWPARIEAAEFDRLPRLLSAAVSARKGSMKKETRLTICEGHDGTETSNGDVLIFPDMIRYRRLTHFDVETFVEEVLVKDGEWLPGNPELLKGSYVFVCSHGSRDRRCGVCGPSLVSRFREELEFHGLQGKVSISPCSHIGGHKYAGNVIIYRSNINREVTGHWYGYVTPEDVPILLEQHINKGEIVDRLWRGEMGLSEEDQKKTQEGRFQLNGTVHSVKINGKVSQESSVHNADVSCCQSRAAEPNGCCQQNGNSSSCCQDDTTLMLSLGTSEDNQLESENNTEKLTPGRKIAEKTFFRINSDKGSSTRKVCGIPTWLESWEREDTYAALAVVCAAASVAVAYTCYKQL

SEQ ID NO: 39925 - protein, 321 aa, Arabidopsis thaliana
  peptide (1)..(321): Ceres Seq. ID no. 12327862
MKKETRLTICEGHDGTETSNGDVLIFPDMIRYRRLTHFDVETFVEEVLVKDGEWLPGNPELLKGSYVFVCSHGSRDRRCGVCGPSLVSRFREELEFHGLQGKVSISPCSHIGGHKYAGNVIIYRSNINREVTGHWYGYVTPEDVPILLEQHINKGEIVDRLWRGEMGLSEEDQKKTQEGRFQLNGTVHSVKINGKVSQESSVHNADVSCCQSRAAEPNGCCQQNGNSSSCCQDDTTLMLSLGTSEDNQLESENNTEKLTPGRKIAEKTFFRINSDKGSSTRKVCGIPTWLESWEREDTYAALAVVCAAASVAVAYTCYKQL

SEQ ID NO: 39926 - protein, 293 aa, Arabidopsis thaliana
  peptide (1)..(293): Ceres Seq. ID no. 12327863
MIRYRRLTHFDVETFVEEVLVKDGEWLPGNPELLKGSYVFVCSHGSRDRRCGVCGPSLVSRFREELEFHGLQGKVSISPCSHIGGHKYAGNVIIYRSNINREVTGHWYGYVTPEDVPILLEQHINKGEIVDRLWRGEMGLSEEDQKKTQEGRFQLNGTVHSVKINGKVSQESSVHNADVSCCQSRAAEPNGCCQQNGNSSSCCQDDTTLMLSLGTSEDNQLESENNTEKLTPGRKIAEKTFFRINSDKGSSTRKVCGIPTWLESWEREDTYAALAVVCAAASVAVAYTCYKQL

SEQ ID NO: 39927 - DNA, 1451 bp, Arabidopsis thaliana
  misc_feature (1)..(1451): Ceres Seq. ID no. 12370299
  misc_feature (1)..(1451): Ortholog of  Ceres SEQ ID NO 15177298 as cited in SEQ ID NO 52711
accagaagaagagccacacactcacaaattaaaaagagagagagagagagagagacagagagagagagagattctgcggaggagcttcttcttcgtagggtgttcatcgttattaacgttatcgcccctacgtcagctccatctccagaaacatgggtgcaggtggaagaatgccggttcctacttcttccaagaaatcggaaaccgacaccacaaagcgtgtgccgtgcgagaaaccgcctttctcggtgggagatctgaagaaagcaatcccgccgcattgtttcaaacgctcaatccctcgctctttctcctaccttatcagtgacatcattatagcctcatgcttctactacgtcgccaccaattacttctctctcctccctcagcctctctcttacttggcttggccactctattgggcctgtcaaggctgtgtcctaactggtatctgggtcatagcccacgaatgcggtcaccacgcattcagcgactaccaatggctggatgacacagttggtcttatcttccattccttcctcctcgtcccttacttctcctggaagtatagtcatcgccgtcaccattccaacactggatccctcgaaagagatgaagtatttgtcccaaagcagaaatcagcaatcaagtggtacgggaaatacctcaacaaccctcttggacgcatcatgatgttaaccgtccagtttgtcctcgggtggcccttgtacttagcctttaacgtctctggcagaccgtatgacgggttcgcttgccatttcttccccaacgctcccatctacaatgaccgagaacgcctccagatatacctctctgatgcgggtattctagccgtctgttttggtctttaccgttacgctgctgcacaagggatggcctcgatgatctgcctctacggagtaccgcttctgatagtgaatgcgttcctcgtcttgatcacttacttgcagcacactcatccctcgttgcctcactacgattcatcagagtgggactggctcaggggagctttggctaccgtagacagagactacggaatcttgaacaaggtgttccacaacattacagacacacacgtggctcatcacctgttctcgacaatgccgcattataacgcaatggaagctacaaaggcgataaagccaattctgggagactattaccagttcgatggaacaccgtggtatgtagcgatgtatagggaggcaaaggagtgtatctatgtagaaccggacagggaaggtgacaagaaaggtgtgtactggtacaacaataagttatgaggatgatggtgaagaaattgtcgacctttctcttgtctgtttgtcttttgttaaagaagctatgcttcgttttaataatcttattgtccattttgttgtgttatgacattttggctgctcattatgttatgtgggaagttagtgttc

SEQ ID NO: 39928 - protein, 383 aa, Arabidopsis thaliana
  peptide (1)..(383): Ceres Seq. ID no. 12370300
MGAGGRMPVPTSSKKSETDTTKRVPCEKPPFSVGDLKKAIPPHCFKRSIPRSFSYLISDIIIASCFYYVATNYFSLLPQPLSYLAWPLYWACQGCVLTGIWVIAHECGHHAFSDYQWLDDTVGLIFHSFLLVPYFSWKYSHRRHHSNTGSLERDEVFVPKQKSAIKWYGKYLNNPLGRIMMLTVQFVLGWPLYLAFNVSGRPYDGFACHFFPNAPIYNDRERLQIYLSDAGILAVCFGLYRYAAAQGMASMICLYGVPLLIVNAFLVLITYLQHTHPSLPHYDSSEWDWLRGALATVDRDYGILNKVFHNITDTHVAHHLFSTMPHYNAMEATKAIKPILGDYYQFDGTPWYVAMYREAKECIYVEPDREGDKKGVYWYNNKL

SEQ ID NO: 39929 - protein, 377 aa, Arabidopsis thaliana
  peptide (1)..(377): Ceres Seq. ID no. 12370301
MPVPTSSKKSETDTTKRVPCEKPPFSVGDLKKAIPPHCFKRSIPRSFSYLISDIIIASCFYYVATNYFSLLPQPLSYLAWPLYWACQGCVLTGIWVIAHECGHHAFSDYQWLDDTVGLIFHSFLLVPYFSWKYSHRRHHSNTGSLERDEVFVPKQKSAIKWYGKYLNNPLGRIMMLTVQFVLGWPLYLAFNVSGRPYDGFACHFFPNAPIYNDRERLQIYLSDAGILAVCFGLYRYAAAQGMASMICLYGVPLLIVNAFLVLITYLQHTHPSLPHYDSSEWDWLRGALATVDRDYGILNKVFHNITDTHVAHHLFSTMPHYNAMEATKAIKPILGDYYQFDGTPWYVAMYREAKECIYVEPDREGDKKGVYWYNNKL

SEQ ID NO: 39930 - protein, 204 aa, Arabidopsis thaliana
  peptide (1)..(204): Ceres Seq. ID no. 12370302
MMLTVQFVLGWPLYLAFNVSGRPYDGFACHFFPNAPIYNDRERLQIYLSDAGILAVCFGLYRYAAAQGMASMICLYGVPLLIVNAFLVLITYLQHTHPSLPHYDSSEWDWLRGALATVDRDYGILNKVFHNITDTHVAHHLFSTMPHYNAMEATKAIKPILGDYYQFDGTPWYVAMYREAKECIYVEPDREGDKKGVYWYNNKL

SEQ ID NO: 39931 - DNA, 1905 bp, Arabidopsis thaliana
  misc_feature (1)..(1905): Ceres Seq. ID no. 13580417
  misc_feature (1)..(1905): Ortholog of  Ceres SEQ ID NO 13594037 as cited in SEQ ID NO 55666
  misc_feature (1)..(1905): Ortholog of  Ceres SEQ ID NO 13657707 as cited in SEQ ID NO 66407
aaaccaaaacacaattaagctaaaaaaaaaaccaaaggatgtctcagaaactcatgttcttgttcacccttgcctgcctctcctcgttaccatctccttttatctccgcccaaataccggccattggaaatgccacttcaccgtcaaatatatgtagattcgcgccggatccatcttattgtagatcggttcttccaaaccagcccggagatatatattcctacggacgtttgtctctacgaagatccctctccagcccgccggttcatttcgatgatcgacgctgaacttgaccggaaaggcaaagtggctgctaaatccacagtaggggctctcgaagactgcaaattcctagccagcctgactatggactacctccttagtagctcacagacggctgattccaccaaaacactgtcgttatctagggccgaggatgttcatacatttctgagtgctgccatcaccaatgagcagacttgtcttgaaggacttaaatcaacggcgtccgaaaatggtctttccggtgatcttttcaacgatacaaaactctatggggtgtctcttgcccttttctccaaaggttgggtgccaagaaggcaaagatcgagaccgatttggcaaccacaagccaggttcaaaaagttttttggtttccgtaacggtaaattaccgttaaagatgacggaaagggcacgtgccgtttacaacaccgtgactagaagaaagcttctccaatcggatgcagacgccgttcaggtgagcgacattgtgacggtgatccagaacgggacgggaaacttcacgaccataaacgccgccattgcagctgcaccaaataaaactgacggtagtaacggttacttcttgatctacgtaacggcgggattgtacgaggaatacgtggaagttcccaagaacaagagatatgtgatgatgatcggtgacggcatcaaccagaccgttatcaccggaaacaggagtgtcgttgatggatggacaactttcaattcagccacatttattctatcaggtcccaactttattggtgtaaacataacaatccgcaatacggcaggaccaaccaaaggccaagctgtggcattgaggagtggtggggacttgtctgttttctacagttgtagttttgaagcctatcaagacacgttatacacacattctctcagacagttttatcgtgaatgtgatgtctatggtactgttgattttatatttggtaacgctgcagtggtattacaaaactgtaatttgtatccacgtcaacctcgcaaaggtcaatcgaacgaggttacggctcaaggtcgtactgatccgaaccaaaacactgggacggcaattcatggttgtactataagaccggcagatgatttggctacgagcaactatacagtgaagacttatcttggtcgaccatggaaggaatattctagaaccgttgtcatgcaaacttacatagacgggtttctagaaccgagtggttggaatgcatggtctggtgattttgcattgagcacactttactacgcggaatataataataccggacctggttctgacacgacaaaccgagtcacttggcctggttatcacgtcatcaacgcaactgatgcttccaatttcacggtcaccaatttccttgttggtgaaggttggattggacaaaccggagtgcctttcgtgggtggactgatcgcataatcaaccaaccttatactatatatgatatgttaattagttaaattatttaatcattcatgtgttgtttttttaatcaaataattatttagtggtgcctgattcaatacgatttgtaataactttaacttactattgtacaaccgaatggttttcttcgaaatctaataataatgaacgggtaatcag

SEQ ID NO: 39932 - protein, 529 aa, Arabidopsis thaliana
  peptide (1)..(529): Ceres Seq. ID no. 13580418
MPLHRQIYVDSRRIHLIVDRFFQTSPEIYIPTDVCLYEDPSPARRFISMIDAELDRKGKVAAKSTVGALEDCKFLASLTMDYLLSSSQTADSTKTLSLSRAEDVHTFLSAAITNEQTCLEGLKSTASENGLSGDLFNDTKLYGVSLALFSKGWVPRRQRSRPIWQPQARFKKFFGFRNGKLPLKMTERARAVYNTVTRRKLLQSDADAVQVSDIVTVIQNGTGNFTTINAAIAAAPNKTDGSNGYFLIYVTAGLYEEYVEVPKNKRYVMMIGDGINQTVITGNRSVVDGWTTFNSATFILSGPNFIGVNITIRNTAGPTKGQAVALRSGGDLSVFYSCSFEAYQDTLYTHSLRQFYRECDVYGTVDFIFGNAAVVLQNCNLYPRQPRKGQSNEVTAQGRTDPNQNTGTAIHGCTIRPADDLATSNYTVKTYLGRPWKEYSRTVVMQTYIDGFLEPSGWNAWSGDFALSTLYYAEYNNTGPGSDTTNRVTWPGYHVINATDASNFTVTNFLVGEGWIGQTGVPFVGGLIA

SEQ ID NO: 39933 - protein, 481 aa, Arabidopsis thaliana
  peptide (1)..(481): Ceres Seq. ID no. 13580419
MIDAELDRKGKVAAKSTVGALEDCKFLASLTMDYLLSSSQTADSTKTLSLSRAEDVHTFLSAAITNEQTCLEGLKSTASENGLSGDLFNDTKLYGVSLALFSKGWVPRRQRSRPIWQPQARFKKFFGFRNGKLPLKMTERARAVYNTVTRRKLLQSDADAVQVSDIVTVIQNGTGNFTTINAAIAAAPNKTDGSNGYFLIYVTAGLYEEYVEVPKNKRYVMMIGDGINQTVITGNRSVVDGWTTFNSATFILSGPNFIGVNITIRNTAGPTKGQAVALRSGGDLSVFYSCSFEAYQDTLYTHSLRQFYRECDVYGTVDFIFGNAAVVLQNCNLYPRQPRKGQSNEVTAQGRTDPNQNTGTAIHGCTIRPADDLATSNYTVKTYLGRPWKEYSRTVVMQTYIDGFLEPSGWNAWSGDFALSTLYYAEYNNTGPGSDTTNRVTWPGYHVINATDASNFTVTNFLVGEGWIGQTGVPFVGGLIA

SEQ ID NO: 39934 - protein, 450 aa, Arabidopsis thaliana
  peptide (1)..(450): Ceres Seq. ID no. 13580420
MDYLLSSSQTADSTKTLSLSRAEDVHTFLSAAITNEQTCLEGLKSTASENGLSGDLFNDTKLYGVSLALFSKGWVPRRQRSRPIWQPQARFKKFFGFRNGKLPLKMTERARAVYNTVTRRKLLQSDADAVQVSDIVTVIQNGTGNFTTINAAIAAAPNKTDGSNGYFLIYVTAGLYEEYVEVPKNKRYVMMIGDGINQTVITGNRSVVDGWTTFNSATFILSGPNFIGVNITIRNTAGPTKGQAVALRSGGDLSVFYSCSFEAYQDTLYTHSLRQFYRECDVYGTVDFIFGNAAVVLQNCNLYPRQPRKGQSNEVTAQGRTDPNQNTGTAIHGCTIRPADDLATSNYTVKTYLGRPWKEYSRTVVMQTYIDGFLEPSGWNAWSGDFALSTLYYAEYNNTGPGSDTTNRVTWPGYHVINATDASNFTVTNFLVGEGWIGQTGVPFVGGLIA

SEQ ID NO: 39935 - DNA, 1236 bp, Arabidopsis thaliana
  misc_feature (1)..(1236): Ceres Seq. ID no. 12328274
  misc_feature (1)..(1236): Ortholog of  Ceres SEQ ID NO 12364737 as cited in SEQ ID NO 51089
  misc_feature (1)..(1236): Ortholog of  Ceres SEQ ID NO 14316263 as cited in SEQ ID NO 55294
  misc_feature (1)..(1236): Ortholog of  Ceres SEQ ID NO 15176751 as cited in SEQ ID NO 59719
  misc_feature (1)..(1236): Ortholog of  Ceres SEQ ID NO 13597380 as cited in SEQ ID NO 64054
  misc_feature (1)..(1236): Ortholog of  Ceres SEQ ID NO 12625474 as cited in SEQ ID NO 64169
  misc_feature (1)..(1236): Ortholog of  Ceres SEQ ID NO 13597502 as cited in SEQ ID NO 64681
aattgtaatttttgtcacagtcattaaacaaaacgcttttatgacgatatcaacggttatagcattcatgtccatgttcctagtatttgttatgtctggtccgatagtggtggagggacgtgcttttttcgtgttcggtgactcgctcgtcgacagtggcaacaacaactatctggtgacaactgcacgtgccgactctccaccgtatggaatcgattttccaactcggagaccaaccggccggttttccaacggtcttaacattccagatcttatcagtgaggcaatcggtaacgaagagccaccgttaccttaccttagtccagagctaaggggccggagtcttcttaacggtgctaatttcgcctccgctggtatcggaattctcaatgataccggatttcaattcatcaacattataagaatgtaccaacagctcgattacttccaacaataccaacaacgtgtgagtcgcttgattgggaaaccgcaaactcagcggctcgtgagtcaagcgcttgtattaatcacggtcggtggaaatgattttgtgaacaactatttcttgtttccatattccgctagatcacgccaattcactctaccggattacgtccgactcctaatttctgaatacaaaaaaatactattgaggttaaattcacttggagtgggtcgagttctagtgacaggagctggaccactatgatgtgcaccggccgaactggcgagatcaggcacgtcgaatggaagatgctcggccgagctacaacgagctgcatctctatatgatcctcagctacttcaaatgataaatgaacttaacaaaaaaattgggagaaatgtgtttattgctgctaacactaaccaaatgcaagaggattttctaagcactccacgaagatatggatttgtaacatcgaaggttgcttgttgcggacaagggccgtacaatgggatgggtttgtgtacggttctatcaaacttgtgtccgaaccgtgagttatacgtcttttgggatgcgtttcatccgactgagaaagcatccgcatgatagtccgacatatcttgaccggtaccaccaagtatatgaaccccatgaaccttagctctgctcttgccctatgagccacacacgttgaagtgggaaactcggttttgtttatttcactcgcaagatatatgtatcgactaccgagtacaagagtatgaaataagataactcagtctcaattt

SEQ ID NO: 39936 - protein, 235 aa, Arabidopsis thaliana
  peptide (1)..(235): Ceres Seq. ID no. 12328275
IVIFVTVIKQNAFMTISTVIAFMSMFLVFVMSGPIVVEGRAFFVFGDSLVDSGNNNYLVTTARADSPPYGIDFPTRRPTGRFSNGLNIPDLISEAIGNEEPPLPYLSPELRGRSLLNGANFASAGIGILNDTGFQFINIIRMYQQLDYFQQYQQRVSRLIGKPQTQRLVSQALVLITVGGNDFVNNYFLFPYSARSRQFTLPDYVRLLISEYKKILLRLNSLGVGRVLVTGAGPL

SEQ ID NO: 39937 - protein, 222 aa, Arabidopsis thaliana
  peptide (1)..(222): Ceres Seq. ID no. 12328276
MTISTVIAFMSMFLVFVMSGPIVVEGRAFFVFGDSLVDSGNNNYLVTTARADSPPYGIDFPTRRPTGRFSNGLNIPDLISEAIGNEEPPLPYLSPELRGRSLLNGANFASAGIGILNDTGFQFINIIRMYQQLDYFQQYQQRVSRLIGKPQTQRLVSQALVLITVGGNDFVNNYFLFPYSARSRQFTLPDYVRLLISEYKKILLRLNSLGVGRVLVTGAGPL

SEQ ID NO: 39938 - protein, 213 aa, Arabidopsis thaliana
  peptide (1)..(213): Ceres Seq. ID no. 12328277
MSMFLVFVMSGPIVVEGRAFFVFGDSLVDSGNNNYLVTTARADSPPYGIDFPTRRPTGRFSNGLNIPDLISEAIGNEEPPLPYLSPELRGRSLLNGANFASAGIGILNDTGFQFINIIRMYQQLDYFQQYQQRVSRLIGKPQTQRLVSQALVLITVGGNDFVNNYFLFPYSARSRQFTLPDYVRLLISEYKKILLRLNSLGVGRVLVTGAGPL

SEQ ID NO: 39939 - DNA, 2758 bp, Arabidopsis thaliana; identical to SEQ ID NO: 36164
  misc_feature (1)..(2758): Ceres Seq. ID no. 13497291
  misc_feature (1)..(2758): Ortholog of  Ceres SEQ ID NO 13662721 as cited in SEQ ID NO 64602
  misc_feature (1)..(2758): Ortholog of  Ceres SEQ ID NO 13654557 as cited in SEQ ID NO 68444

SEQ ID NO: 39940 - protein, 421 aa, Arabidopsis thaliana; identical to SEQ ID NO: 36165
  peptide (1)..(421): Ceres Seq. ID no. 13497292

SEQ ID NO: 39941 - protein, 407 aa, Arabidopsis thaliana; identical to SEQ ID NO: 36166
  peptide (1)..(407): Ceres Seq. ID no. 13497293

SEQ ID NO: 39942 - protein, 388 aa, Arabidopsis thaliana; identical to SEQ ID NO: 36167
  peptide (1)..(388): Ceres Seq. ID no. 13497294

SEQ ID NO: 39943 - DNA, 1257 bp, Arabidopsis thaliana
  misc_feature (1)..(1257): Ceres Seq. ID no. 12337370
  misc_feature (1)..(1257): Ortholog of  Ceres SEQ ID NO 14316128 as cited in SEQ ID NO 52380
acaatcacttgtctgattctctcatataatagagttttctttctattctcctctgcttaatttcccagaaattactctttctgtgcttatcggattcaatagattcttagtaaatcgtaatggagacaccatcatcgacaagaagagtcacgagatctcagacccgctgtgctatcaataatctcttatcctcaaagaaagcggatgattggtcagataaatgtcaatcgaagtcggtacaaagaaacggtgcaaaagacaggtctgcgttgtttgacataaccaacgactcaccgatcgtaggtctggcgatgcagacaccgtcctcaggagttgttgggaagaggaacatgagcagaatcaataacactcctggatctggtgaggctctcttgagaggccaagtcaagactctcttgcagaaggttgaggaagaagcagatctcaccaagatttcgttggaatctcgtcctttcatccatctcgttacttctcccatgggtcttctcgccccaactccggccaacaccccccaagttcttggtttctcagacgaagtgcaggttgtgatcacttctccggtagttgcaggacaattcagagcaccgtctcaggtggtggaaagcaacatgtttgatgagaaagaagaaagcttggagttagagaagagcccgagcattactcggtcattgcttctggactttagtgataaatcagaattatgggagagctcagactgctcatctgtggtgactcaaaacccagaggatgataactcgtcggtgtggtcgatgcaggccaatgcaagtgccaaagacgaagagtatgatgatgaagaggaagaagcctattcttacggtgaggaatatgatgaggaatactacgacgaggaagaggaggaagaagagggagggattgtggatgggttgtgtgagggaattaggaagatgagcgtagagactgactttgcagggaaacacactagatttgtgtatgacagtgaagatgaagagattgtggaggccaaagatcaatctccaggagtgttgcgtttgaaaggctttcctacaccgacaggaaaacatgtcagatttgccggtgatgaatgagttcagtttgaatctttcttcttggagttgtgacaaaaagcctcatatgtctcgacttttttttttttttttcttgttgttgaagattcacaaatctgattcttgttattaccttgttgttatttttcaataactaaaagtgtaatcg

SEQ ID NO: 39944 - protein, 329 aa, Arabidopsis thaliana; identical to SEQ ID NO: 39350
  peptide (1)..(329): Ceres Seq. ID no. 12337371

SEQ ID NO: 39945 - protein, 265 aa, Arabidopsis thaliana; identical to SEQ ID NO: 39351
  peptide (1)..(265): Ceres Seq. ID no. 12337372

SEQ ID NO: 39946 - protein, 252 aa, Arabidopsis thaliana; identical to SEQ ID NO: 39352
  peptide (1)..(252): Ceres Seq. ID no. 12337373

SEQ ID NO: 39947 - DNA, 1387 bp, Arabidopsis thaliana
  misc_feature (1)..(1387): Ceres Seq. ID no. 13575410
  misc_feature (1)..(1387): Ortholog of  Ceres SEQ ID NO 14310896 as cited in SEQ ID NO 53480
  misc_feature (1)..(1387): Ortholog of  Ceres SEQ ID NO 13660685 as cited in SEQ ID NO 67678
ggaggagacgaaaccgagagaaacaatgggagacgctgcgatccgtaccgtcgtcgaagccattcactcatctccgacgcaggccgtcgtctatctttgcggcggtgcctctctggctttaggttggttgatgtcggttcctggagcgtcgaacacgcttctcgagtccgtggttccttattcgagagtatctatggttcaattactcggcagggttccgagccaacactgtagccaagcattggccaaggagatggccttgttagcctacaatcgggcgcttaagctctctaaaccaggatatccggttctcggtgtcgggtttacgggatcattggtaacttctcgtcctaagcgtggagatcacaggttctttttgtctatgagagcatccgaccggattttggaatcttcagtcactctaactaagaacttacggagccgagaagaagaagataaggtgtcaagctgtgcactgatccaggctatggccaaggcatgccaagtttctgggacacttgactctggcttgaccgagtctgaggtgccttatgagtctgaaacccactttactgaagaacaagaactagagcagcttataaatgggcacttgtgctgtaagatttatccattttctggggaagcacacgggtctgatgaagacagaaagattatactacctggctcttttaacccattacatgaaggtcatctcaagctgttagaagttgctatgagtgtttgtgggggcggctacccatgttttgaaatatccgcaataaatgccgacaaaccaccgcttacaattgcacagattaaagatcgtgtcaagcaatttgaagtagttggaaagacgataatagtttcaaatcagccatacttctacaagaaagctgaactcttcccaggaagcagttttgtaattggcgctgacactgcagcgaggcttgtcaatccaaagtactatgaaggaagcatcaaaaggatgttggagatacttggtgattgcaaacggacaggttgcactttccttgttggtggccgcaatgtagatggtgtatttaaggttcttgaagatgttgatattccagaggaaataatcgacatgtttatttcaattccagcagatatattccggatggatatatcctctacagagataagaaaaaaacaagggggtggtacgaactaatgacttctcaacccgcttgaaagtcttggctcgcaagacaatttatttagtgcagttactttttgatttgatatgtattgtgttgcattctgttcttattatggaatccggatcaatggtatgagcatttgcacatgacatcgaaagagcattgcagagttgcatgggaaacgtttaaagagtgcgaatatttgc

SEQ ID NO: 39948 - protein, 396 aa, Arabidopsis thaliana
  peptide (1)..(396): Ceres Seq. ID no. 13575411
EETKPRETMGDAAIRTVVEAIHSSPTQAVVYLCGGASLALGWLMSVPGASNTLLESVVPYSRVSMVQLLGRVPSQHCSQALAKEMALLAYNRALKLSKPGYPVLGVGFTGSLVTSRPKRGDHRFFLSMRASDRILESSVTLTKNLRSREEEDKVSSCALIQAMAKACQVSGTLDSGLTESEVPYESETHFTEEQELEQLINGHLCCKIYPFSGEAHGSDEDRKIILPGSFNPLHEGHLKLLEVAMSVCGGGYPCFEISAINADKPPLTIAQIKDRVKQFEVVGKTIIVSNQPYFYKKAELFPGSSFVIGADTAARLVNPKYYEGSIKRMLEILGDCKRTGCTFLVGGRNVDGVFKVLEDVDIPEEIIDMFISIPADIFRMDISSTEIRKKQGGGTN

SEQ ID NO: 39949 - protein, 388 aa, Arabidopsis thaliana
  peptide (1)..(388): Ceres Seq. ID no. 13575412
MGDAAIRTVVEAIHSSPTQAVVYLCGGASLALGWLMSVPGASNTLLESVVPYSRVSMVQLLGRVPSQHCSQALAKEMALLAYNRALKLSKPGYPVLGVGFTGSLVTSRPKRGDHRFFLSMRASDRILESSVTLTKNLRSREEEDKVSSCALIQAMAKACQVSGTLDSGLTESEVPYESETHFTEEQELEQLINGHLCCKIYPFSGEAHGSDEDRKIILPGSFNPLHEGHLKLLEVAMSVCGGGYPCFEISAINADKPPLTIAQIKDRVKQFEVVGKTIIVSNQPYFYKKAELFPGSSFVIGADTAARLVNPKYYEGSIKRMLEILGDCKRTGCTFLVGGRNVDGVFKVLEDVDIPEEIIDMFISIPADIFRMDISSTEIRKKQGGGTN

SEQ ID NO: 39950 - protein, 353 aa, Arabidopsis thaliana
  peptide (1)..(353): Ceres Seq. ID no. 13575413
MSVPGASNTLLESVVPYSRVSMVQLLGRVPSQHCSQALAKEMALLAYNRALKLSKPGYPVLGVGFTGSLVTSRPKRGDHRFFLSMRASDRILESSVTLTKNLRSREEEDKVSSCALIQAMAKACQVSGTLDSGLTESEVPYESETHFTEEQELEQLINGHLCCKIYPFSGEAHGSDEDRKIILPGSFNPLHEGHLKLLEVAMSVCGGGYPCFEISAINADKPPLTIAQIKDRVKQFEVVGKTIIVSNQPYFYKKAELFPGSSFVIGADTAARLVNPKYYEGSIKRMLEILGDCKRTGCTFLVGGRNVDGVFKVLEDVDIPEEIIDMFISIPADIFRMDISSTEIRKKQGGGTN

SEQ ID NO: 39951 - DNA, 1145 bp, Arabidopsis thaliana
  misc_feature (1)..(1145): Ceres Seq. ID no. 12345029
  misc_feature (1)..(1145): Ortholog of  Ceres SEQ ID NO 12612330 as cited in SEQ ID NO 56418
  misc_feature (1)..(1145): Ortholog of  Ceres SEQ ID NO 13664295 as cited in SEQ ID NO 61486
  misc_feature (1)..(1145): Ortholog of  Ceres SEQ ID NO 15179147 as cited in SEQ ID NO 0
ggggttctctaacaatgtctataaaatcagtacaggtctattcttgttcactagcttcgaaattttagtcgaagaaacaaaaaaaaatggcgacggtacaattgtccacccaatttagctgccaaaccagagtttcaatctcaccgaactctaaatctatctccaagcctccgtttctggtaccggtgacctcaattattcaccgcctgatgatctccaccggaggaatcgctgtttccccccgtagagttttcaaagtccgagccacagatacgggagagataggatcagctctattggcggcggaggaagcaattgaagacgtggaagagacggagcggctaaagagatcgctcgtggattcgttgtacggaacagatcgaggtttaagcgcatcgagcgaaaccagagctgaaatcggagatctaatcacacagctcgagtctaagaaccctactccagctccgacggaagctcttttccttctcaacggcaaatggatcctcgcctacacatcgttcgtgaatttgttcccgttgctatcacgaggaatcgtaccgttaataaaagtcgatgagatctctcaaaccattgattcagataacttcaccgtccagaactctgttcgtttcgctggtcctttaggtacaaactcgattagcaccaacgctaaattcgaaatccgaagccctaaacgcgtccagattaagtttgagcaaggcgtaattgggacgcctcagctaacggattctattgagataccggaatatgtagaggttcttggtcaaaagattgatcttaacccgatcagagggttacttacctcggtgcaagacacagcctcgtctgtggctagaaccatatcaagccaaccaccgttgaaattctttttgccggcggacaatgcgcagtcttggctactcacgacttatctagacaaagacattcggatctctagaggagacggtggaagtgtctttgtgcttatcaaagaaggaagccctctcttgaatccttgaacttggtcaaaatatatgtctctctcttgtcgttgtgttaagtgagacaaatatatagtgtggttgtaggtttacttcttaatcgttgttattaactcgatgataaggaatataatgtttttaacc

SEQ ID NO: 39952 - protein, 310 aa, Arabidopsis thaliana
  peptide (1)..(310): Ceres Seq. ID no. 12345030
MATVQLSTQFSCQTRVSISPNSKSISKPPFLVPVTSIIHRLMISTGGIAVSPRRVFKVRATDTGEIGSALLAAEEAIEDVEETERLKRSLVDSLYGTDRGLSASSETRAEIGDLITQLESKNPTPAPTEALFLLNGKWILAYTSFVNLFPLLSRGIVPLIKVDEISQTIDSDNFTVQNSVRFAGPLGTNSISTNAKFEIRSPKRVQIKFEQGVIGTPQLTDSIEIPEYVEVLGQKIDLNPIRGLLTSVQDTASSVARTISSQPPLKFFLPADNAQSWLLTTYLDKDIRISRGDGGSVFVLIKEGSPLLNP

SEQ ID NO: 39953 - protein, 269 aa, Arabidopsis thaliana
  peptide (1)..(269): Ceres Seq. ID no. 12345031
MISTGGIAVSPRRVFKVRATDTGEIGSALLAAEEAIEDVEETERLKRSLVDSLYGTDRGLSASSETRAEIGDLITQLESKNPTPAPTEALFLLNGKWILAYTSFVNLFPLLSRGIVPLIKVDEISQTIDSDNFTVQNSVRFAGPLGTNSISTNAKFEIRSPKRVQIKFEQGVIGTPQLTDSIEIPEYVEVLGQKIDLNPIRGLLTSVQDTASSVARTISSQPPLKFFLPADNAQSWLLTTYLDKDIRISRGDGGSVFVLIKEGSPLLNP

SEQ ID NO: 39954 - DNA, 1078 bp, Arabidopsis thaliana
  misc_feature (1)..(1078): Ceres Seq. ID no. 12653446
  misc_feature (1)..(1078): Ortholog of  Ceres SEQ ID NO 15170458 as cited in SEQ ID NO 52842
  misc_feature (1)..(1078): Ortholog of  Ceres SEQ ID NO 14304224 as cited in SEQ ID NO 56350
  misc_feature (1)..(1078): Ortholog of  Ceres SEQ ID NO 13597679 as cited in SEQ ID NO 65073
actcacacatccacaaaaagagagttagagattccaaggaggagagtgcgtgagcgtgacaatggaaactgacaaaagatggtctctcgccgggaaaacagctctggtaaccggcgggactcgtggaatcgggagagcagttgtagaggaactagcaaaatttggtgcaaaagttcatacttgttcaaggaaccaggaagagctaaatgcatgcttgaatgattggaaagcgaatggtttagtcgtgtctggttcggtttgtgatgcttcggttagggatcagagggagaagttgattcaggaagcttcttctgccttcagtggcaagctcaacatccttataaacaatgttggaactaatgtcaggaaaccaacagttgaatactcaagcgaggaatatgccaaaatcatgtcgaccaacttagaatccgctttccatttatctcaaattgctcatcctcttctaaaagcatctggtgtcggaagcattgtgttcatctcctctgtagctggcctggtgcatcttagcagtggatctatctatggtgcaactaaaggagcacttaatcagcttacaagaaatctagcttgcgagtgggcaagcgacaacatcagaaccaattgcgtggcgccatggtacatcaagacctcacttgtggaaacgctacttgagaagaaagaatttgtggaggctgtagtttcaaggaccccacttgggcgcgttggagaaccagaggaagtctcatcgttggttgcctttctctgccttcccgcatcatcttatattaccggacaggtcatatccgtcgatggaggattcactgtcaacggttttagctatgctatgaagccttaatctcgaatcgcaacattactaataaagcaagaatcctcgtgatgtgttggtcttgtttgtctttgtttagtttttgtgacttctttaaacatatagtaatatcaaaacgtttgaatttctaatgtagccgttaaataaatcaaggcacagttgtgcaccagtttatgtagacctacaacatttgtcattgatttaggtatatggatgagagtattttgatcg

SEQ ID NO: 39955 - protein, 264 aa, Arabidopsis thaliana
  peptide (1)..(264): Ceres Seq. ID no. 12653447
METDKRWSLAGKTALVTGGTRGIGRAVVEELAKFGAKVHTCSRNQEELNACLNDWKANGLVVSGSVCDASVRDQREKLIQEASSAFSGKLNILINNVGTNVRKPTVEYSSEEYAKIMSTNLESAFHLSQIAHPLLKASGVGSIVFISSVAGLVHLSSGSIYGATKGALNQLTRNLACEWASDNIRTNCVAPWYIKTSLVETLLEKKEFVEAVVSRTPLGRVGEPEEVSSLVAFLCLPASSYITGQVISVDGGFTVNGFSYAMKP

SEQ ID NO: 39956 - protein, 148 aa, Arabidopsis thaliana
  peptide (1)..(148): Ceres Seq. ID no. 12653448
MSTNLESAFHLSQIAHPLLKASGVGSIVFISSVAGLVHLSSGSIYGATKGALNQLTRNLACEWASDNIRTNCVAPWYIKTSLVETLLEKKEFVEAVVSRTPLGRVGEPEEVSSLVAFLCLPASSYITGQVISVDGGFTVNGFSYAMKP

SEQ ID NO: 39957 - DNA, 781 bp, Arabidopsis thaliana
  misc_feature (1)..(781): Ceres Seq. ID no. 12395884
  misc_feature (1)..(781): Ortholog of  Ceres SEQ ID NO 15178866 as cited in SEQ ID NO 1133
ctttttcattctcttcttacaccttttctccagagttccgacaatggcttcagcatcagcgacagctactcttctcaaacccaatcttccgccgcataaaccgaccatcatcgcctcctccgtatctccgcctcttcctcctccacgtcgcaaccacctcctccgccgcgatttcctctccctggcggcaacatccacgcttctaacacaatcgattcagtttctagctccggcgccggtctccgccgctgaagatgaagagtatatcaaagatacgtcggcagtgatcagtaaagtaaggagtacgctttcgatgcagaagacagatccgaatgtggctgatgcggtggcggagctgagagaagcgtcgaattcttgggttgccaagtaccggaaagagaaagctcttctcggaaaagcttctttccgggatatatactcggcgttgaatgctgtttcaggtcattatgtgagttttggtccgacggctccgattccggcgaagaggaaggcgaggattcttgaagagatggaaactgctgagaaagctctcacaagaggaagatgaaaaaactgcagtcaggccttcttctccattttcttgttgatgaaaattttattttcctaaaaatgccaatcgaattatatgagaagagaaacttgaattggctcgcctgcttttttttttcattcctgtaaaatacttaatgttctgcatgataattgcttaattatcattatcagagatacttatataacttatatcgaattccattttccc

SEQ ID NO: 39958 - protein, 188 aa, Arabidopsis thaliana
  peptide (1)..(188): Ceres Seq. ID no. 12395885
FFILFLHLFSRVPTMASASATATLLKPNLPPHKPTIIASSVSPPLPPPRRNHLLRRDFLSLAATSTLLTQSIQFLAPAPVSAAEDEEYIKDTSAVISKVRSTLSMQKTDPNVADAVAELREASNSWVAKYRKEKALLGKASFRDIYSALNAVSGHYVSFGPTAPIPAKRKARILEEMETAEKALTRGR

SEQ ID NO: 39959 - protein, 174 aa, Arabidopsis thaliana
  peptide (1)..(174): Ceres Seq. ID no. 12395886
MASASATATLLKPNLPPHKPTIIASSVSPPLPPPRRNHLLRRDFLSLAATSTLLTQSIQFLAPAPVSAAEDEEYIKDTSAVISKVRSTLSMQKTDPNVADAVAELREASNSWVAKYRKEKALLGKASFRDIYSALNAVSGHYVSFGPTAPIPAKRKARILEEMETAEKALTRGR

SEQ ID NO: 39960 - DNA, 1227 bp, Arabidopsis thaliana
  misc_feature (1)..(1227): Ceres Seq. ID no. 12328278
  misc_feature (1)..(1227): Ortholog of  Ceres SEQ ID NO 14309287 as cited in SEQ ID NO 0
atctctctctctctctaccctttggatctttcttctcgatcaattatccattttgcccagattttttccagaagctcatcgaattcatcaaatcacaatgtttgaaatttggtttcactgttgctgagtgtgtttggaggagaagcttgattggttcggtgtttcactgtttgaagattataagagttatggagaatggtggtcagtatgataatgcgcggttcaagcccgattacttcaaaggtgcacaatctatgtggaatatgattccccagcatcagattaaggaacaacataatgcgttggtgatgaataagaagatcatgtccatccttgctgagagagacgctgctgtacatgaaagaaatcaagctgtctctgctaaaaaggaagctgtcgctgctcgggacgaagcgcttcagcaacgtgacaaagctctttctgagagagataaagctttgatagagagagataatgcttatgctgctcttcaacaccatgaaaatagtctcaactttgctttgtctggtgggaagtgtgttgatggagatgattgttttggtattggggaaccccacaaacttgaagtcttccctttgtcaactattccgcctgaggttacaaacacgaaggtggtgaacaaaaggaagaaagagaacaagcagggactatcaaaggtgaaaaaagtgggtgaagatctgaaccgtcgagttcctgctcctggaaagaaatctagaacagattgggacagtcaagatgtcggtttgaacttagtcaccttcgatgagacgacaatgcctgtacccatgtgttcgtgcacaggctctacgcgtcagtgttacaaatggggaaatggcggctggcaatcgtcttgctgcacaaccaccttatcccagtatccattaccgcagatgccaaacaagaggcattctcggatgggcggtaggaaaatgagcggaaacgttttctcgagattactcagccgtttatcagcagaaggatatgatctctcgtgtcctgttgatcttaaagactattgggctaggcacgggacaaaccgctacatcactatcaagtagcctctgttgtttacacagtccaagtatgtttctctcgtcttcttaagattaggtgttgtctttgtctttattgtccatagtttgttctttgttgtgtatggtaaaaccattgttatgtgtatcttttggatgggcaaaaatggtttgc

SEQ ID NO: 39961 - protein, 358 aa, Arabidopsis thaliana
  peptide (1)..(358): Ceres Seq. ID no. 12328279
LSLSLPFGSFFSINYPFCPDFFQKLIEFIKSQCLKFGFTVAECVWRRSLIGSVFHCLKIIRVMENGGQYDNARFKPDYFKGAQSMWNMIPQHQIKEQHNALVMNKKIMSILAERDAAVHERNQAVSAKKEAVAARDEALQQRDKALSERDKALIERDNAYAALQHHENSLNFALSGGKCVDGDDCFGIGEPHKLEVFPLSTIPPEVTNTKVVNKRKKENKQGLSKVKKVGEDLNRRVPAPGKKSRTDWDSQDVGLNLVTFDETTMPVPMCSCTGSTRQCYKWGNGGWQSSCCTTTLSQYPLPQMPNKRHSRMGGRKMSGNVFSRLLSRLSAEGYDLSCPVDLKDYWARHGTNRYITIK

SEQ ID NO: 39962 - protein, 296 aa, Arabidopsis thaliana
  peptide (1)..(296): Ceres Seq. ID no. 12328280
MENGGQYDNARFKPDYFKGAQSMWNMIPQHQIKEQHNALVMNKKIMSILAERDAAVHERNQAVSAKKEAVAARDEALQQRDKALSERDKALIERDNAYAALQHHENSLNFALSGGKCVDGDDCFGIGEPHKLEVFPLSTIPPEVTNTKVVNKRKKENKQGLSKVKKVGEDLNRRVPAPGKKSRTDWDSQDVGLNLVTFDETTMPVPMCSCTGSTRQCYKWGNGGWQSSCCTTTLSQYPLPQMPNKRHSRMGGRKMSGNVFSRLLSRLSAEGYDLSCPVDLKDYWARHGTNRYITIK

SEQ ID NO: 39963 - protein, 274 aa, Arabidopsis thaliana
  peptide (1)..(274): Ceres Seq. ID no. 12328281
MWNMIPQHQIKEQHNALVMNKKIMSILAERDAAVHERNQAVSAKKEAVAARDEALQQRDKALSERDKALIERDNAYAALQHHENSLNFALSGGKCVDGDDCFGIGEPHKLEVFPLSTIPPEVTNTKVVNKRKKENKQGLSKVKKVGEDLNRRVPAPGKKSRTDWDSQDVGLNLVTFDETTMPVPMCSCTGSTRQCYKWGNGGWQSSCCTTTLSQYPLPQMPNKRHSRMGGRKMSGNVFSRLLSRLSAEGYDLSCPVDLKDYWARHGTNRYITIK

SEQ ID NO: 39964 - DNA, 1763 bp, Arabidopsis thaliana
  misc_feature (1)..(1763): Ceres Seq. ID no. 13488927
  misc_feature (1)..(1763): Ortholog of  Ceres SEQ ID NO 13639120 as cited in SEQ ID NO 56708
aaaatttaaatcttcattgaatgctttttctgaagctttatctaataaatctcttcgttgatccttcctttccattaacgaggtagaaattccaaaacgcgtaataatcttgtcgtcattacaaattacaataaaaagaagacatttttatttagatttccctctgatcctctcttttagatttcgaatcgagaccagatctgcgtgaagatgatagagaagtgtataggagcgcatcggtttcggagattacagagattcatgcgtcaagggaaagtgacgattctttgtctcgttctcaccgtcatcgtcttacgtggcacaatcggagccggtaagtttggtacgccggagaaagatatcgaggagatccgtgagcatttcttctacacgcgtaaacgcggcgagcctcaccgtgtcctcgtcgaggtctcttccaaaacgacgtcgtccgaagacggaggaaatggtggtaacagctacgagaccttcgatatcaacaagctattcgttgatgaaggagacgaagagaaatctcgagaccggactaataaaccttattctcttggtcccaagatctctgattgggatgagcagagacgtgattggctcaaacaaaaccctagcttccctaatttcgtggcgccaaacaagcctagggttcttcttgtcacaggttcagctcctaaaccgtgtgagaatcctgtaggagaccattacctcttgaaatcgattaagaacaaaatcgattactgtagaatacacggaatcgagatcttctacaacatggcgttgctcgatgctgagatggctggattctgggctaagcttccgttgattaggaagttactcttgtcacatcctgagattgagtttctatggtggatggatagtgatgccatgttcacggacatggtgttcgagcttccatgggagaggtacaaagattacaacttggtgatgcatggttggaacgagatggtttatgaccagaagaattggattggtctcaacacgggaagtttcttgctcaggaactcacagtggtcgcttgatcttcttgacgcttgggctcctatgggcccaaaagggaagatccgagaagaagcgggtaaagtcttgacccgggaacttaaagaccgacccgctttcgaagctgacgatcaatcggcgatggtttatctgctggcgacggagagagagaaatggggaggcaaagtttatctagagagtggttattacttgcacggttattgggggattttggtagaccggtacgaggagatgattgagaatcataaaccgggttttggagaccatcggtggccattggttacgcatttcgtcgggtgtaaaccgtgcgggaaatttggagattatccggtggaacggtgtctacggcagatggatagagcgtttaatttcggagacaatcagatccttcaaatgtatggtttcacgcataaatcgcttgggagccggcgcgtgaaacccacgcgcaatcagacggataggccgctcgatgccaaggacgagtttgggctgcttcatccgccgttcaaagcggccaagcttagtacgacgacgacgtgagtgagtgagaggatatattgttttgtatcttttaattttgcgtttaggggacacacgtttatttgttttattcaattttatttgtttgtagtttacttaattgttttgatctcccattcatggtggagtcgtgtatggagtatttaatgatttattgtagacgttatttc

SEQ ID NO: 39965 - protein, 460 aa, Arabidopsis thaliana
  peptide (1)..(460): Ceres Seq. ID no. 13488928
MIEKCIGAHRFRRLQRFMRQGKVTILCLVLTVIVLRGTIGAGKFGTPEKDIEEIREHFFYTRKRGEPHRVLVEVSSKTTSSEDGGNGGNSYETFDINKLFVDEGDEEKSRDRTNKPYSLGPKISDWDEQRRDWLKQNPSFPNFVAPNKPRVLLVTGSAPKPCENPVGDHYLLKSIKNKIDYCRIHGIEIFYNMALLDAEMAGFWAKLPLIRKLLLSHPEIEFLWWMDSDAMFTDMVFELPWERYKDYNLVMHGWNEMVYDQKNWIGLNTGSFLLRNSQWSLDLLDAWAPMGPKGKIREEAGKVLTRELKDRPAFEADDQSAMVYLLATEREKWGGKVYLESGYYLHGYWGILVDRYEEMIENHKPGFGDHRWPLVTHFVGCKPCGKFGDYPVERCLRQMDRAFNFGDNQILQMYGFTHKSLGSRRVKPTRNQTDRPLDAKDEFGLLHPPFKAAKLSTTTT

SEQ ID NO: 39966 - protein, 443 aa, Arabidopsis thaliana
  peptide (1)..(443): Ceres Seq. ID no. 13488929
MRQGKVTILCLVLTVIVLRGTIGAGKFGTPEKDIEEIREHFFYTRKRGEPHRVLVEVSSKTTSSEDGGNGGNSYETFDINKLFVDEGDEEKSRDRTNKPYSLGPKISDWDEQRRDWLKQNPSFPNFVAPNKPRVLLVTGSAPKPCENPVGDHYLLKSIKNKIDYCRIHGIEIFYNMALLDAEMAGFWAKLPLIRKLLLSHPEIEFLWWMDSDAMFTDMVFELPWERYKDYNLVMHGWNEMVYDQKNWIGLNTGSFLLRNSQWSLDLLDAWAPMGPKGKIREEAGKVLTRELKDRPAFEADDQSAMVYLLATEREKWGGKVYLESGYYLHGYWGILVDRYEEMIENHKPGFGDHRWPLVTHFVGCKPCGKFGDYPVERCLRQMDRAFNFGDNQILQMYGFTHKSLGSRRVKPTRNQTDRPLDAKDEFGLLHPPFKAAKLSTTTT

SEQ ID NO: 39967 - protein, 268 aa, Arabidopsis thaliana
  peptide (1)..(268): Ceres Seq. ID no. 13488930
MALLDAEMAGFWAKLPLIRKLLLSHPEIEFLWWMDSDAMFTDMVFELPWERYKDYNLVMHGWNEMVYDQKNWIGLNTGSFLLRNSQWSLDLLDAWAPMGPKGKIREEAGKVLTRELKDRPAFEADDQSAMVYLLATEREKWGGKVYLESGYYLHGYWGILVDRYEEMIENHKPGFGDHRWPLVTHFVGCKPCGKFGDYPVERCLRQMDRAFNFGDNQILQMYGFTHKSLGSRRVKPTRNQTDRPLDAKDEFGLLHPPFKAAKLSTTTT

SEQ ID NO: 39968 - DNA, 1290 bp, Arabidopsis thaliana
  misc_feature (1)..(1290): Ceres Seq. ID no. 12328789
  misc_feature (1)..(1290): Ortholog of  Ceres SEQ ID NO 13495628 as cited in SEQ ID NO 60727
cctcacccatcaagtcccaattcccaacactgtcactcaaaaagaatcttcaaacaatgaatctcaacgtcgtcgttttactcctactccttctaatctcatccgccacgtgttgtccgccgtcagaccgccgtgcacttctagctttccgatcagctcttcacgagccttacctcggcattttcaactcatggacaggccaagactgttgccacaactggtacggtattagctgcgactcgctcactcaccgagtcgccgacataaatctccgcggcgagtcagaagatccaatcttcgaacgagctcaccgaaccggttacatgaccggacacatctccgcctcgatatgtgagctcactcgtctctccgccattacaatcgccgattggaaaggtatctccggcgaaatccctaaatgtatcactcgtcttccttttctccgtacactcgacttaatcggaaaccaaatctccggtgggattccatacgacatcggaagattaaaccggttagctgttttaaacgtagccgataaccgaatctccggttcaattccaaaatcattaaccaatctctctagcttaatgcatttagatctccgtaacaacttaatctccggtgtaatcccgtcggacgtcggaagattaaaaatgctcagccgtgcgttattatccggtaaccgaataaccggtcggatcccagaatcattaaccaatatctaccggttagctgacgtggatctctccggtaaccaactctacggtacaatcccaccgtctctaggacgtatgtcggtactagccacacttaacctcgacggaaacaaaatctccggcgagatacctcaaactctgatgacgtcgtcggtgatgaatctgaatttgagccggaacttgctacaagggaagatacctgaagggtttggaccaaggtcttacttcacagttcttgatttgtcgtataataatctgaaaggaccaataccgagatcgatctcaggtgcgtcgtttattggtcatttggatcttagccataaccatctctgtgggaggattccggtaggttcaccgtttgatcatcttgaagcggcgtcgtttatgtttaacgactgtctttgtggtaaacctttaagagcttgcttgaaaaattgatttttatatgtaatttgagttttttcattagagacattattatatttatggttatgcattttataaaaaaaagatttaaaattgtatgctacgtttagttgaattatgggatgattaacaaaatatataaacttcc

SEQ ID NO: 39969 - protein, 383 aa, Arabidopsis thaliana
  peptide (1)..(383): Ceres Seq. ID no. 12328790
SPIKSQFPTLSLKKNLQTMNLNVVVLLLLLLISSATCCPPSDRRALLAFRSALHEPYLGIFNSWTGQDCCHNWYGISCDSLTHRVADINLRGESEDPIFERAHRTGYMTGHISASICELTRLSAITIADWKGISGEIPKCITRLPFLRTLDLIGNQISGGIPYDIGRLNRLAVLNVADNRISGSIPKSLTNLSSLMHLDLRNNLISGVIPSDVGRLKMLSRALLSGNRITGRIPESLTNIYRLADVDLSGNQLYGTIPPSLGRMSVLATLNLDGNKISGEIPQTLMTSSVMNLNLSRNLLQGKIPEGFGPRSYFTVLDLSYNNLKGPIPRSISGASFIGHLDLSHNHLCGRIPVGSPFDHLEAASFMFNDCLCGKPLRACLKN

SEQ ID NO: 39970 - protein, 365 aa, Arabidopsis thaliana
  peptide (1)..(365): Ceres Seq. ID no. 12328791
MNLNVVVLLLLLLISSATCCPPSDRRALLAFRSALHEPYLGIFNSWTGQDCCHNWYGISCDSLTHRVADINLRGESEDPIFERAHRTGYMTGHISASICELTRLSAITIADWKGISGEIPKCITRLPFLRTLDLIGNQISGGIPYDIGRLNRLAVLNVADNRISGSIPKSLTNLSSLMHLDLRNNLISGVIPSDVGRLKMLSRALLSGNRITGRIPESLTNIYRLADVDLSGNQLYGTIPPSLGRMSVLATLNLDGNKISGEIPQTLMTSSVMNLNLSRNLLQGKIPEGFGPRSYFTVLDLSYNNLKGPIPRSISGASFIGHLDLSHNHLCGRIPVGSPFDHLEAASFMFNDCLCGKPLRACLKN

SEQ ID NO: 39971 - protein, 276 aa, Arabidopsis thaliana
  peptide (1)..(276): Ceres Seq. ID no. 12328792
MTGHISASICELTRLSAITIADWKGISGEIPKCITRLPFLRTLDLIGNQISGGIPYDIGRLNRLAVLNVADNRISGSIPKSLTNLSSLMHLDLRNNLISGVIPSDVGRLKMLSRALLSGNRITGRIPESLTNIYRLADVDLSGNQLYGTIPPSLGRMSVLATLNLDGNKISGEIPQTLMTSSVMNLNLSRNLLQGKIPEGFGPRSYFTVLDLSYNNLKGPIPRSISGASFIGHLDLSHNHLCGRIPVGSPFDHLEAASFMFNDCLCGKPLRACLKN

SEQ ID NO: 39972 - DNA, 1036 bp, Arabidopsis thaliana
  misc_feature (1)..(1036): Ceres Seq. ID no. 12329101
  misc_feature (1)..(1036): Ortholog of  Ceres SEQ ID NO 13600601 as cited in SEQ ID NO 497
  misc_feature (1)..(1036): Ortholog of  Ceres SEQ ID NO 13664283 as cited in SEQ ID NO 61283
  misc_feature (1)..(1036): Ortholog of  Ceres SEQ ID NO 12635513 as cited in SEQ ID NO 0
  misc_feature (1)..(1036): Ortholog of  Ceres SEQ ID NO 15179333 as cited in SEQ ID NO 0
aactaaaccatcatcatcatcatcatctcttggtgacagaagaaaagagttgaggaacagagaaaatggcagcacaagcacttgtgtcttcttcacttacctcctctgttcagacagctagacagatatttggctcaaaaccagttgcgtctgcctcacagaagaagagttcctttgttgttaaagctgctgcaactccacctgtcaagcaaggagcaaacagaccattgtggtttgcatcatcgcagagtctctcttacttggatggcagcttacctggtgactatggattcgaccctcttggcctttcagacccagaaggtactggaggattcattgagccaagatggctagcatacggagagatcatcaacggacggttcgccatcagctggagctattgctcctgagattctaggaaaggctggtctgattccagcagagactgctcttccttggttccaaaccggtgtgattccaccagcagggacatacacttactgggcagacaattacacactctttgttctcgagatggctctgatgggattcgctgagcaccggaggttacaggactggtacaacccaggatctatgggaaaacagtacttcttggggttagagaagggtttggccggttcaggtaacccggcttaccccggtggacctttcttcaaccctcttgggtttgggaaagatgagaagtcactgaaggagttgaaactcaaggaggtcaagaacggtagactggctatgctcgccatcctcggttactttatccaaggactagtgaccggtgtgggaccttaccagaacctgcttgatcacttggctgatcccgtcaacaacaacgtcttgaccagcctcaagttccactgaggtgatcatcatctcatgtgtttttatgtctcttgtatcgtacaatatttccatctttcgctaccattggcttcttcgtattgtaacaccctgtgtaaacatattcgtgttttgtaagaaatgacaatgtcaatggccaaacgaaaaaacttttagg

SEQ ID NO: 39973 - protein, 114 aa, Arabidopsis thaliana
  peptide (1)..(114): Ceres Seq. ID no. 12329102
MAAQALVSSSLTSSVQTARQIFGSKPVASASQKKSSFVVKAAATPPVKQGANRPLWFASSQSLSYLDGSLPGDYGFDPLGLSDPEGTGGFIEPRWLAYGEIINGRFAISWSYCS

SEQ ID NO: 39974 - protein, 114 aa, Arabidopsis thaliana
  peptide (1)..(114): Ceres Seq. ID no. 12329103
MALMGFAEHRRLQDWYNPGSMGKQYFLGLEKGLAGSGNPAYPGGPFFNPLGFGKDEKSLKELKLKEVKNGRLAMLAILGYFIQGLVTGVGPYQNLLDHLADPVNNNVLTSLKFH

SEQ ID NO: 39975 - protein, 111 aa, Arabidopsis thaliana
  peptide (1)..(111): Ceres Seq. ID no. 12329104
MGFAEHRRLQDWYNPGSMGKQYFLGLEKGLAGSGNPAYPGGPFFNPLGFGKDEKSLKELKLKEVKNGRLAMLAILGYFIQGLVTGVGPYQNLLDHLADPVNNNVLTSLKFH

SEQ ID NO: 39976 - DNA, 1355 bp, Arabidopsis thaliana
  misc_feature (1)..(1355): Ceres Seq. ID no. 13575049
  misc_feature (1)..(1355): Ortholog of  Ceres SEQ ID NO 13584646 as cited in SEQ ID NO 60715
atcatttccctttctcttcccattttagtcttcctataacttcttctcaatcctctctcatatcttttttcttagtttaaatttcaataaaatagaaaaaaacatatacaaatctacagagaagagaagctttattttaatcttatgtgtgtgtgtgtgttttatataatttttattttttttcaaattaaaatctcttctttgcttttgatgtgggcatggctggtcttgatctaggcacagcttttcgttacgttaatcaccagctccatcgtcccgatctccaccttcaccacaattcctcctccgatgacgtcactcccggagccgggatgggtcatttcaccgtcgacgacgaagacaacaacaacaaccatcaaggtcttgacttagcctctggtggaggatcaggaagctctggaggaggaggaggtcacggcgggggaggagacgtcgttggtcgtcgtccacgtggcagaccaccgggatccaagaacaaaccgaaacctccggtaattatcacgcgcgagagcgcaaacactctaagagctcacattcttgaagtaacaaacggctgcgatgttttcgactgcgttgcgacttatgctcgtcggagacagcgagggatctgcgttctgagcggtagcggaacggtcacgaacgtcagcatacgtcagccatctgcggctggagcggttgtgacgctacaaggaacgttcgagattctttctctctccggatcgtttcttcctcctccggcacctcccggagcaacgagtttgacaattttcttagccggaggacaaggtcaggtggttggaggaagcgttgtgggtgagcttacggcggctggaccggtgattgtgattgcagcttcgtttactaatgttgcttatgagagacttcctttagaagaagatgagcagcagcaacagcttggaggaggatctaacggcggaggtaatttgtttccggaggtggcagctggaggaggaggaggacttccgttctttaatttaccgatgaatatgcaaccaaatgtgcaacttccggtggaaggttggccggggaattccggtggaagaggtcctttctgatgtgtatatattgataatcattatatatataccggcggagaagcttttccggcgaagaatttgcgagagtgaagaaaggttagaaaagcttttaatggactaatgaatttcaaattatcatcgtgatttcggacattgtcttgttcatcatgttaagcttaggtttattttttgtcgtttgtagaattttatgtttgaatccttttttttttctgtgaaactctattgtgttcgtctgcgaaggaaaaaaaaattctc

SEQ ID NO: 39977 - protein, 292 aa, Arabidopsis thaliana
  peptide (1)..(292): Ceres Seq. ID no. 13575050
MAGLDLGTAFRYVNHQLHRPDLHLHHNSSSDDVTPGAGMGHFTVDDEDNNNNHQGLDLASGGGSGSSGGGGGHGGGGDVVGRRPRGRPPGSKNKPKPPVIITRESANTLRAHILEVTNGCDVFDCVATYARRRQRGICVLSGSGTVTNVSIRQPSAAGAVVTLQGTFEILSLSGSFLPPPAPPGATSLTIFLAGGQGQVVGGSVVGELTAAGPVIVIAASFTNVAYERLPLEEDEQQQQLGGGSNGGGNLFPEVAAGGGGGLPFFNLPMNMQPNVQLPVEGWPGNSGGRGPF

SEQ ID NO: 39978 - protein, 254 aa, Arabidopsis thaliana
  peptide (1)..(254): Ceres Seq. ID no. 13575051
MGHFTVDDEDNNNNHQGLDLASGGGSGSSGGGGGHGGGGDVVGRRPRGRPPGSKNKPKPPVIITRESANTLRAHILEVTNGCDVFDCVATYARRRQRGICVLSGSGTVTNVSIRQPSAAGAVVTLQGTFEILSLSGSFLPPPAPPGATSLTIFLAGGQGQVVGGSVVGELTAAGPVIVIAASFTNVAYERLPLEEDEQQQQLGGGSNGGGNLFPEVAAGGGGGLPFFNLPMNMQPNVQLPVEGWPGNSGGRGPF

SEQ ID NO: 39979 - DNA, 1356 bp, Arabidopsis thaliana
  misc_feature (1)..(1356): Ceres Seq. ID no. 12329865
  misc_feature (1)..(1356): Ortholog of  Ceres SEQ ID NO 12784228 as cited in SEQ ID NO 66111
actagtgatcagtgataatctattaatcatctaggtggcaaaagcagcatcgttgagaacgaagaagcttgaaaaagttgcgagctcagagaatctggaagtagcaaaatttggcggctttaactcagcaatttgttctgtacatgaagagagcattcagctcacagttacgctctgcctatccagcttctaaatctactcactttggtcgagtcatggcttcttctggatctgaggcaaaagctaattacgcacccatatctaccaatgaacctgttgtgtctgttgattggctccactctaatcttggagatgctgatataaaggttttggatgcctcatggtacatggcacatgagcaaagaaatccaatccaagagtatcaagttgctcatattccaggtgctctcttctttgatttgaatggaatagcagatcgaaaaacaaatttacgacacatgctaccatctgaggaagcttttgctgctggttgttctgctcttggaatcgagaacaacgatggagtggttgtgtatgatggaatggggctctttagtgcagctcgtgtatggtggatgtttagagtctttggacatgacaaagtatgggtacttgatggaggcttgccgaaatggcgtgcttcaggctatgacgttgaatccagtgtttcaaatgatgccattttgaaagccagtgcagcaactgaggctatagagaagatctatcaaggacaaacaattagcccaataacttttcagacgaagttccggccacatcttgtattggcacttgatcaggtgaaggaaaacatcgaggataagacttatcagcacatcgatgcgcgttcaaaggctagatttgacggtattgctccagaaccttggaagggtttaccgagtggtcatatacccggtagcaagtgtgtcccttttcccctaatgtttgattcctctcaaacactgttaccagcagaggagctgaagaagcagtttgaacaggaagacatatctctggacagtccgattgcggcctcatgtggaaccggtgtaacagcttgtattttggcattgggactttatcgtctgggaaaaactaatgtggcaatctatgatgggtcttggactgaatgggcaactgcaccaaacttgcccatagtgggttcttcttcataagaaagtccaagaaaaagctacaagatcacaagccagtggatatatatttataagcttagcttggttcaatccatttctgtgttaaactttaacaaatttgctgggagggttgtattagtattatacatcagtattcaggattcttgagtttggtctcatctttgtggagattgattaaaagtcc

SEQ ID NO: 39980 - protein, 342 aa, Arabidopsis thaliana
  peptide (1)..(342): Ceres Seq. ID no. 12329866
MKRAFSSQLRSAYPASKSTHFGRVMASSGSEAKANYAPISTNEPVVSVDWLHSNLGDADIKVLDASWYMAHEQRNPIQEYQVAHIPGALFFDLNGIADRKTNLRHMLPSEEAFAAGCSALGIENNDGVVVYDGMGLFSAARVWWMFRVFGHDKVWVLDGGLPKWRASGYDVESSVSNDAILKASAATEAIEKIYQGQTISPITFQTKFRPHLVLALDQVKENIEDKTYQHIDARSKARFDGIAPEPWKGLPSGHIPGSKCVPFPLMFDSSQTLLPAEELKKQFEQEDISLDSPIAASCGTGVTACILALGLYRLGKTNVAIYDGSWTEWATAPNLPIVGSSS

SEQ ID NO: 39981 - protein, 318 aa, Arabidopsis thaliana; identical to SEQ ID NO: 24974
  peptide (1)..(318): Ceres Seq. ID no. 12329867

SEQ ID NO: 39982 - protein, 274 aa, Arabidopsis thaliana; identical to SEQ ID NO: 24975
  peptide (1)..(274): Ceres Seq. ID no. 12329868

SEQ ID NO: 39983 - DNA, 2458 bp, Arabidopsis thaliana
  misc_feature (1)..(2458): Ceres Seq. ID no. 13488149
  misc_feature (1)..(2458): Ortholog of  Ceres SEQ ID NO 13600595 as cited in SEQ ID NO 629
tctcaaatctcaaatctcaaattttttattaaacgcctacatatattactcacacttgttttcagatcataaagttttttcttggatttatatataatgcactaatacatacacacccacatgcttacacacatgttcgacctgtaatcagtaaaagaaacatcagagaggaagagaaggagaagaaaagatggagatgggtcgtctggtcttcgggttgtgtttgattcttattgtgggtacgtttcttgaattctccggcggtgctacggcggcgaagggagtaacgtacgacggacggtctttgataatcgatggacagaggaagcttctcttctccggttccatccactatcctcgcagcacacccgagatgtggccgtctctgataaaaaagacaaaggaaggaggcatcgatgtgatccaaacgtacgttttctggaacctccatgagcctaagcttggacagtatgattttagtggaagaaacgatttagtgaagtttattaaagaaattagatcacaaggtctctatgtctgtctacgtattggacccttcatcgaagccgagtggaattacgggggattgccattttggttacgggatgtacccggtatggtataccgaaccgacaatgagcccttcaagttccacatgcaaaaattcaccgctaagatcgtagatttgatgaaatctgagggcttatatgcttctcaaggaggtccaattattctttctcagatcgagaacgagtatgcaaacgtggagggggctttccatgagaaaggagcatcgtacatcaagtgggcaggtcaaatggcggtcgggcttaagaccggagtgccatggatcatgtgcaagtcgcccgacgctcctgatcccgtgatcaatacctgcaacgggatgaaatgcggcgagacttttcctggaccaaactcacccaataagccgaaaatgtggactgaggattggacttcattctttcaggtttatggaaaagagccttatattagatctgctgaggatattgctttccatgccgctcttttcgttgcaaaaaatggaagttacatcaactattacatgtaccatggtggaacaaactttggaaggacttcatcttcgtatttcattacaggatactatgatcaagctcctctcgacgaatacggtcttttaagacagcctaagtacggtcatttgaaggagcttcacgctgcgataaaatcctctgcaaatcctctgcttcaaggaaagcaaacgattctctccttgggaccaatgcaacaagcttatgtctttgaagacgcgaacaatggatgcgttgcgtttctggtaaacaatgacgctaaagccagtcaaatacaattcagaaacaatgcgtatagcttgagtcccaagtcaattggtattcttcagaactgcaaaaacctaatttatgaaactgcaaaagtgaatgtgaagatgaatacgagagttacaacgccggttcaagtgttcaacgttcccgataactggaatttgtttagagaaacaatccctgcattcccaggcacatctttgaagacaaatgctttgttggaacacactaatttgacaaaggacaaaactgattatctttggtacacttcaagctttaagctggattcaccctgcacgaacccgtctatctacacagaatcatcaggacatgttgtccacgtgttcgtcaacaatgcactagcaggatctggacatggaagcagagacataagggtagttaaactacaagctccggttagcttaatcaatggacaaaacaatatatcgatcctcagcggcatggttggtctaccggactctggagcttacatggagaggagatcttatggactaaccaaagtacaaattagctgtggcgggacaaaacccatcgatttgagtagatctcaatggggttactcggtgggtttgcttggagagaaagttaggttatatcaatggaagaatttaaatagagtgaagtggagtatgaataaagctggactaattaagaaccgccccctcgcttggtacaagacaacgtttgatgggccgaatggagatgggcccgtgggcctacacatgtcgagtatgggtaaaggagaaatttgggtgaatggtgaaagcattggtcgttattgggtctcgtttctcacccctgctggacaaccttctcaatctatatatcatattcctcgggcgttcttaaaaccatctggaaatttattggtggtatttgaagaggaaggtggtgatcctcttgggatatctttgaatacaatatcggttgttggttcgagtcaagctcaatctcaattctcctgaagattattttttaaaaaatggtttttgggtaattgggggtgttttataaaccaaacaatacattatattgaaatgatacaatacacaaattgaatgaaatatacaggtttc

SEQ ID NO: 39984 - protein, 718 aa, Arabidopsis thaliana
  peptide (1)..(718): Ceres Seq. ID no. 13488150
MEMGRLVFGLCLILIVGTFLEFSGGATAAKGVTYDGRSLIIDGQRKLLFSGSIHYPRSTPEMWPSLIKKTKEGGIDVIQTYVFWNLHEPKLGQYDFSGRNDLVKFIKEIRSQGLYVCLRIGPFIEAEWNYGGLPFWLRDVPGMVYRTDNEPFKFHMQKFTAKIVDLMKSEGLYASQGGPIILSQIENEYANVEGAFHEKGASYIKWAGQMAVGLKTGVPWIMCKSPDAPDPVINTCNGMKCGETFPGPNSPNKPKMWTEDWTSFFQVYGKEPYIRSAEDIAFHAALFVAKNGSYINYYMYHGGTNFGRTSSSYFITGYYDQAPLDEYGLLRQPKYGHLKELHAAIKSSANPLLQGKQTILSLGPMQQAYVFEDANNGCVAFLVNNDAKASQIQFRNNAYSLSPKSIGILQNCKNLIYETAKVNVKMNTRVTTPVQVFNVPDNWNLFRETIPAFPGTSLKTNALLEHTNLTKDKTDYLWYTSSFKLDSPCTNPSIYTESSGHVVHVFVNNALAGSGHGSRDIRVVKLQAPVSLINGQNNISILSGMVGLPDSGAYMERRSYGLTKVQISCGGTKPIDLSRSQWGYSVGLLGEKVRLYQWKNLNRVKWSMNKAGLIKNRPLAWYKTTFDGPNGDGPVGLHMSSMGKGEIWVNGESIGRYWVSFLTPAGQPSQSIYHIPRAFLKPSGNLLVVFEEEGGDPLGISLNTISVVGSSQAQSQFS

SEQ ID NO: 39985 - protein, 716 aa, Arabidopsis thaliana
  peptide (1)..(716): Ceres Seq. ID no. 13488151
MGRLVFGLCLILIVGTFLEFSGGATAAKGVTYDGRSLIIDGQRKLLFSGSIHYPRSTPEMWPSLIKKTKEGGIDVIQTYVFWNLHEPKLGQYDFSGRNDLVKFIKEIRSQGLYVCLRIGPFIEAEWNYGGLPFWLRDVPGMVYRTDNEPFKFHMQKFTAKIVDLMKSEGLYASQGGPIILSQIENEYANVEGAFHEKGASYIKWAGQMAVGLKTGVPWIMCKSPDAPDPVINTCNGMKCGETFPGPNSPNKPKMWTEDWTSFFQVYGKEPYIRSAEDIAFHAALFVAKNGSYINYYMYHGGTNFGRTSSSYFITGYYDQAPLDEYGLLRQPKYGHLKELHAAIKSSANPLLQGKQTILSLGPMQQAYVFEDANNGCVAFLVNNDAKASQIQFRNNAYSLSPKSIGILQNCKNLIYETAKVNVKMNTRVTTPVQVFNVPDNWNLFRETIPAFPGTSLKTNALLEHTNLTKDKTDYLWYTSSFKLDSPCTNPSIYTESSGHVVHVFVNNALAGSGHGSRDIRVVKLQAPVSLINGQNNISILSGMVGLPDSGAYMERRSYGLTKVQISCGGTKPIDLSRSQWGYSVGLLGEKVRLYQWKNLNRVKWSMNKAGLIKNRPLAWYKTTFDGPNGDGPVGLHMSSMGKGEIWVNGESIGRYWVSFLTPAGQPSQSIYHIPRAFLKPSGNLLVVFEEEGGDPLGISLNTISVVGSSQAQSQFS

SEQ ID NO: 39986 - protein, 657 aa, Arabidopsis thaliana
  peptide (1)..(657): Ceres Seq. ID no. 13488152
MWPSLIKKTKEGGIDVIQTYVFWNLHEPKLGQYDFSGRNDLVKFIKEIRSQGLYVCLRIGPFIEAEWNYGGLPFWLRDVPGMVYRTDNEPFKFHMQKFTAKIVDLMKSEGLYASQGGPIILSQIENEYANVEGAFHEKGASYIKWAGQMAVGLKTGVPWIMCKSPDAPDPVINTCNGMKCGETFPGPNSPNKPKMWTEDWTSFFQVYGKEPYIRSAEDIAFHAALFVAKNGSYINYYMYHGGTNFGRTSSSYFITGYYDQAPLDEYGLLRQPKYGHLKELHAAIKSSANPLLQGKQTILSLGPMQQAYVFEDANNGCVAFLVNNDAKASQIQFRNNAYSLSPKSIGILQNCKNLIYETAKVNVKMNTRVTTPVQVFNVPDNWNLFRETIPAFPGTSLKTNALLEHTNLTKDKTDYLWYTSSFKLDSPCTNPSIYTESSGHVVHVFVNNALAGSGHGSRDIRVVKLQAPVSLINGQNNISILSGMVGLPDSGAYMERRSYGLTKVQISCGGTKPIDLSRSQWGYSVGLLGEKVRLYQWKNLNRVKWSMNKAGLIKNRPLAWYKTTFDGPNGDGPVGLHMSSMGKGEIWVNGESIGRYWVSFLTPAGQPSQSIYHIPRAFLKPSGNLLVVFEEEGGDPLGISLNTISVVGSSQAQSQFS

SEQ ID NO: 39987 - DNA, 1437 bp, Arabidopsis thaliana
  misc_feature (1)..(1437): Ceres Seq. ID no. 12371961
  misc_feature (1)..(1437): Ortholog of  Ceres SEQ ID NO 12590542 as cited in SEQ ID NO 621
  misc_feature (1)..(1437): Ortholog of  Ceres SEQ ID NO 12421854 as cited in SEQ ID NO 20723
  misc_feature (1)..(1437): Ortholog of  Ceres SEQ ID NO 13597847 as cited in SEQ ID NO 64858
atcaaattaaaaccctccagcctccaacaacaaaatttaccaacactctctctttctctttctctctgaaaacttaaaacgatggctataaccgccactcaaaacgacggcgtttcactaaacgccaataagatttcgtatgatcttgtggaaactgatgttgagatcatcacctccggtcgtcgtagtattccggcacactccggcatcctcgcttcggtctcaccggtactgacgaacatcatcgagaagccgaggaagattcacggcggatcatcgaagaaagttattaagattctcggtgttccatgcgacgccgtttcagtcttcgtcagattcctctattctccgagtgtcacggagaatgagatggaaaaatacggaatccatctactggctttatcacacgtgtatatggtgactcagttaaagcaacggtgcactaaaggcgtcggtgagagagtaaccgccgaaaacgttgtcgatattctccagctggctcgtctctgcgacgcacctgacctctgtctcaagtgtatgcgattcattcactacaagttcaagaccgttgaacagacagaaggatggaagtttcttcaagaacacgatccttttcttgaacttgacattctccaattcatcgacgatgcagaatcgaggaagaaaagaagaaggagacacagacgagaacagaatctgtatttgcagctgagtgaagccatggaatgtatagaacacatatgcaccgaaggttgcacactggtcggaccatcgtctaacttagacaacaagtcaacatgtcaagcaaaacccggtccatgcagtgcgttttcgacttgttaaggacttcaacttcttatacgtcactttgcagtatgcaagaaaagagtcgatggcaaaggttgtgtccgatgcaagagaatgattcaactccttagactccattcttcgatttgtgaccaatctgaatcttgccgtgtccctctttgcaggcaatataagaatagaggtgaaaaggacaagaaaatggttgaggacacgaagtggaaggttctggtgagaagagtagcgtctgctaaagccatgtcttcgttgtctcaatcaaagaagaaaaaaagtgaagtgttatttaaagaagaagcagaagatttgatcagaatccggaacaagttaatgtgaatatacaatatatgtgtttttattagattatatagtgagcgattgttagaagccattaattacttgagtcggaaggtttatttgtttgttatttgtctctcggactggttgattgggttaaacttgtcaatgagtaaccctttgaatctgtcgttttgtttggtcggtcgaattatatagaaatgtattattggttataaaatggtattagggtttttggagactttgtggcaaaaagtatacagattgatccggttt

SEQ ID NO: 39988 - protein, 253 aa, Arabidopsis thaliana
  peptide (1)..(253): Ceres Seq. ID no. 12371962
MAITATQNDGVSLNANKISYDLVETDVEIITSGRRSIPAHSGILASVSPVLTNIIEKPRKIHGGSSKKVIKILGVPCDAVSVFVRFLYSPSVTENEMEKYGIHLLALSHVYMVTQLKQRCTKGVGERVTAENVVDILQLARLCDAPDLCLKCMRFIHYKFKTVEQTEGWKFLQEHDPFLELDILQFIDDAESRKKRRRRHRREQNLYLQLSEAMECIEHICTEGCTLVGPSSNLDNKSTCQAKPGPCSAFSTC

SEQ ID NO: 39989 - protein, 157 aa, Arabidopsis thaliana
  peptide (1)..(157): Ceres Seq. ID no. 12371963
MEKYGIHLLALSHVYMVTQLKQRCTKGVGERVTAENVVDILQLARLCDAPDLCLKCMRFIHYKFKTVEQTEGWKFLQEHDPFLELDILQFIDDAESRKKRRRRHRREQNLYLQLSEAMECIEHICTEGCTLVGPSSNLDNKSTCQAKPGPCSAFSTC

SEQ ID NO: 39990 - protein, 142 aa, Arabidopsis thaliana
  peptide (1)..(142): Ceres Seq. ID no. 12371964
MVTQLKQRCTKGVGERVTAENVVDILQLARLCDAPDLCLKCMRFIHYKFKTVEQTEGWKFLQEHDPFLELDILQFIDDAESRKKRRRRHRREQNLYLQLSEAMECIEHICTEGCTLVGPSSNLDNKSTCQAKPGPCSAFSTC

SEQ ID NO: 39991 - DNA, 2412 bp, Arabidopsis thaliana
  misc_feature (1)..(2412): Ceres Seq. ID no. 13494097
  misc_feature (1)..(2412): Ortholog of  Ceres SEQ ID NO 15177678 as cited in SEQ ID NO 0
aaaaaaagcgtcgttgagaggttagagacgaaggaaggaggcagaggatagagagatagcgaggctaatggatcagtgactcactgagtcagattttaccgattcattgcctccattgaagcctcttttctcagattctacgcttcactgtctcttctccatgtgcgtctcctcctcctccgtttcttcagatcttgctttccggtgacggttttaatcttcttctctctggtaacacgtataaagcatggcttacctgatgtagacatgtagtgttaggctaaagactcctcttttcacttctgtcttgttgagtttgtgttggtttaaggctttaagccaaaggcgttgttggtctgacaagatggcaatggcggtgtttaaggctcctctaaaaggggaatttcatggggctagaaagatggaagggaagcaatataagcaccatctgcttcagcaacagtctacagggagaagacgtgtgttcgtgcaaaccgatactggctgtgtgttgggagttgagttggatcgtaatgacaatgttcatactgtgaagaaaaggcttcagattgcgtttaactttcctactgaggaaagctctttgacctttggggatatggtgttgaagaatgacttgagtgctgtgaggaatgattctccgcttctcttaaagcgtaacttaatgcacagaagctcttctactccgtgtctttcacctactgggaatgatctgcagaggaaagatcgaagtggtcctattgagatacttagtcactcgccctgttttctgtctttgaagcaaacagcgaatgacattgttaaggcgatgaagatgggtgttgaaccaatccctgttaatggtgggcttggaggggcatactattttagggatgaaaagggtcaaagtgttgctattgtcaagcctacggatgaagagccgtttgcccctaacaatcctaaaggcttcgtagggaaagcgcttgggcagcctggtttaaagccttctgtgcgggttggggaaaccgggtttagagaagttgctgcataccttcttgattatgatcactttgctaatgttcctcctacggctcttgtgaagataacacactctgttttcaatgtcaatgatggaatggatgggaacaaatctcgtgagaagaagaagctggtcagcagcaagattgcttcgttccagaagtttgtacctcatgattttgatgccagtgatcacgggacttcaagcttccctgtcgcttctgtgcaccgcattgggattttggacataaggattctcaacacagaccggcatggtggaaatcttttggtgaagaagcttgatgatggtggtgttgggaggtttggtcaagtggagcttattccaatagatcatggtctttgcttaccagaaacactcgaagatccttacttcgaatggattcattggcctcaggcttcaatacctttctctgaagaagaacttgactacatacaaagtcttgatccagtgaaagattgtgaaatgcttcgaagagagcttccgatgattcgagaggcttgtctcagggttctagttctctgtaccgttttccttaaagaagctgctgtttttggactttgtcttgcagagatcggtgagatgatgactcgagaatttcgtgcaggagaagaggaaccaagtgaactagaaatgttgtgtatcgaagccaagagattaaccactgaacaagacgttttgtctcccaagtcagatggagaaggagagacagagtttcagtttgatatagactacaatgagctagactcggtttatggctctgagacagaaaccgatgagttcttcgccaagaacccattttcaaacggacgttcttcacttggagagctcaaagagagcattgctgaagaagaagaagatgacgaagaggaggcaaaacttactctatctctctcaaagctttccacatcaatgaagaacaatctaagcaacaccatgggatccggatacctgaaacctccgaaagacaaccaaaccgacaaagcattggtaagtcacaagagcgcgaacgtgcagctcccgcttagcgtaaactttgtgaagttagccgacatgaaagaagttgaatgggttgtgttcttggagaggtttcaggagttgctttactcggcttttgcagaacgcaagaccatgacgttgaggaacacacagagacttggtacatcgtgcaagttttgagatcatacgagttcacataagagaagaccaaagatttcacttttacgagttttgaagcaattacttgttagctacgttaagattagtttacttttgtagcgaccacgagcacttgcaatgtgaagaaatgtttattttgcctgtaaatattctttaccatttttttttccctaacttcc

SEQ ID NO: 39992 - protein, 622 aa, Arabidopsis thaliana
  peptide (1)..(622): Ceres Seq. ID no. 13494098
MAMAVFKAPLKGEFHGARKMEGKQYKHHLLQQQSTGRRRVFVQTDTGCVLGVELDRNDNVHTVKKRLQIAFNFPTEESSLTFGDMVLKNDLSAVRNDSPLLLKRNLMHRSSSTPCLSPTGNDLQRKDRSGPIEILSHSPCFLSLKQTANDIVKAMKMGVEPIPVNGGLGGAYYFRDEKGQSVAIVKPTDEEPFAPNNPKGFVGKALGQPGLKPSVRVGETGFREVAAYLLDYDHFANVPPTALVKITHSVFNVNDGMDGNKSREKKKLVSSKIASFQKFVPHDFDASDHGTSSFPVASVHRIGILDIRILNTDRHGGNLLVKKLDDGGVGRFGQVELIPIDHGLCLPETLEDPYFEWIHWPQASIPFSEEELDYIQSLDPVKDCEMLRRELPMIREACLRVLVLCTVFLKEAAVFGLCLAEIGEMMTREFRAGEEEPSELEMLCIEAKRLTTEQDVLSPKSDGEGETEFQFDIDYNELDSVYGSETETDEFFAKNPFSNGRSSLGELKESIAEEEEDDEEEAKLTLSLSKLSTSMKNNLSNTMGSGYLKPPKDNQTDKALVSHKSANVQLPLSVNFVKLADMKEVEWVVFLERFQELLYSAFAERKTMTLRNTQRLGTSCKF

SEQ ID NO: 39993 - protein, 620 aa, Arabidopsis thaliana
  peptide (1)..(620): Ceres Seq. ID no. 13494099
MAVFKAPLKGEFHGARKMEGKQYKHHLLQQQSTGRRRVFVQTDTGCVLGVELDRNDNVHTVKKRLQIAFNFPTEESSLTFGDMVLKNDLSAVRNDSPLLLKRNLMHRSSSTPCLSPTGNDLQRKDRSGPIEILSHSPCFLSLKQTANDIVKAMKMGVEPIPVNGGLGGAYYFRDEKGQSVAIVKPTDEEPFAPNNPKGFVGKALGQPGLKPSVRVGETGFREVAAYLLDYDHFANVPPTALVKITHSVFNVNDGMDGNKSREKKKLVSSKIASFQKFVPHDFDASDHGTSSFPVASVHRIGILDIRILNTDRHGGNLLVKKLDDGGVGRFGQVELIPIDHGLCLPETLEDPYFEWIHWPQASIPFSEEELDYIQSLDPVKDCEMLRRELPMIREACLRVLVLCTVFLKEAAVFGLCLAEIGEMMTREFRAGEEEPSELEMLCIEAKRLTTEQDVLSPKSDGEGETEFQFDIDYNELDSVYGSETETDEFFAKNPFSNGRSSLGELKESIAEEEEDDEEEAKLTLSLSKLSTSMKNNLSNTMGSGYLKPPKDNQTDKALVSHKSANVQLPLSVNFVKLADMKEVEWVVFLERFQELLYSAFAERKTMTLRNTQRLGTSCKF

SEQ ID NO: 39994 - protein, 603 aa, Arabidopsis thaliana
  peptide (1)..(603): Ceres Seq. ID no. 13494100
MEGKQYKHHLLQQQSTGRRRVFVQTDTGCVLGVELDRNDNVHTVKKRLQIAFNFPTEESSLTFGDMVLKNDLSAVRNDSPLLLKRNLMHRSSSTPCLSPTGNDLQRKDRSGPIEILSHSPCFLSLKQTANDIVKAMKMGVEPIPVNGGLGGAYYFRDEKGQSVAIVKPTDEEPFAPNNPKGFVGKALGQPGLKPSVRVGETGFREVAAYLLDYDHFANVPPTALVKITHSVFNVNDGMDGNKSREKKKLVSSKIASFQKFVPHDFDASDHGTSSFPVASVHRIGILDIRILNTDRHGGNLLVKKLDDGGVGRFGQVELIPIDHGLCLPETLEDPYFEWIHWPQASIPFSEEELDYIQSLDPVKDCEMLRRELPMIREACLRVLVLCTVFLKEAAVFGLCLAEIGEMMTREFRAGEEEPSELEMLCIEAKRLTTEQDVLSPKSDGEGETEFQFDIDYNELDSVYGSETETDEFFAKNPFSNGRSSLGELKESIAEEEEDDEEEAKLTLSLSKLSTSMKNNLSNTMGSGYLKPPKDNQTDKALVSHKSANVQLPLSVNFVKLADMKEVEWVVFLERFQELLYSAFAERKTMTLRNTQRLGTSCKF

SEQ ID NO: 39995 - DNA, 2117 bp, Arabidopsis thaliana
  misc_feature (1)..(2117): Ceres Seq. ID no. 13575052
  misc_feature (1)..(2117): Ortholog of  Ceres SEQ ID NO 15170788 as cited in SEQ ID NO 52635
  misc_feature (1)..(2117): Ortholog of  Ceres SEQ ID NO 13638058 as cited in SEQ ID NO 55054
  misc_feature (1)..(2117): Ortholog of  Ceres SEQ ID NO 15170362 as cited in SEQ ID NO 57883
  misc_feature (1)..(2117): Ortholog of  Ceres SEQ ID NO 14303297 as cited in SEQ ID NO 67765
accgttgttttgcgtctataattaagtatcttccactaatctcatatttcaaactgtactttttcctcgagctctctccaatttcctcatagctctattgttcgaaaattctgaaacgaacgttaccactatggacactaagatcggatctatcgacgcgtgtaacccgaccaaccacgatatcggcggtcctccaaacggcggagtctccaccgttcaaaacacaagtccacttcactccaccaccgtcagcccctgcgacgcgactcttggccgttacctagcaagacggttagtcgaaatcggcgtcaccgatgtcttctccgttcctggtgatttcaacctgacgcttctcgatcacctaatcgccgaaccaaacctcaagctgatcggttgctgcaacgagcttaacgccggatacgctgctgacggttacgctagatctcgcggtgttggtgcgtgcgtcgttacgttcaccgtcggtggattgagtgttctgaatgcgatcgccggtgcttacagtgagaatctgcctctgatttgcatcgtcggtggtccaaactccaacgattacggtaccaataggattcttcatcatacaattggtttacctgatttcactcaagagcttaggtgttttcaagctgttacttgttttcaagctgtgattaataacttagaagaggctcatgaacttatcgatactgcgatttcaactgctttgaaagaaagcaaacctgtttatatcagtatcagctgtaatttaccggcgattcctcttccgacgtttagtcgtcatcctgttccgttcatgcttccgatgaaggttagcaatcagattggtttagatgcggcggtggaggcagctgctgagttcttgaacaaagctgtgaagccagttcttgttggtgggccgaaaatgcgggttgcgaaagccgcggatgcttttgttgagcttgctgatgcttctggctatggtcttgctgtgatgccttctgctaaaggacaagtacctgagcatcacaagcattttatagggacgtattggggagctgtgagtacagctttttgtgctgaaatcgttgaatctgcggatgcttatctgtttgcaggtccgattttcaacgattacagttctgttgggtattctctgcttctcaagaaggagaaggcaatcatcgttcagcctgatcgggttactatcggtaacggacctgcgtttggatgtgttcttatgaaggattttctaagcgagttggctaaacgaattaagcacaacaacacttcttatgagaattatcacaggatctatgtcccagaaggaaagcctttgagagataacccgaatgagtctttgagggttaatgtactgttccaacacattcagaatatgctctcttctgagtctgctgtgcttgctgagacaggagattcctggttcaactgtcagaagctgaagctccctgaaggatgcggttacgaattccaaatgcagtacggatcaattggctggtcagtgggtgctactctaggctatgctcaagccatgccaaacaggcgtgtcattgcttgtattggagatggtagtttccaggtaaccgcacaggatgtatctacgatgatacggtgtgggcaaaagaccataatcttcctcatcaacaacggaggctacaccattgaggtggaaattcacgatggtccttacaatgtcataaagaactggaactacacagcttttgttgaggccatacacaatggagaaggaaaatgctggactgccaaggtgagatgcgaggaggagttagtgaaagcaatcaacacggcaaccaatgaggaaaaagagagcttttgtttcattgaagtgatagtgcacaaagacgatacaagcaaggaacttttggagtggggctctagagtctctgctgctaatagtcgtcccccaaatccgcagtagagtatataaatgcactcaacttatatatatttcagatttggtagtgtcttcaccgttctatgtaaagtagtgtggatccttttacacccatctggatgggaaaaaaatgtgtgtccccttgaggatataaactgtttgagtgcctaaataagaacttgtttcc

SEQ ID NO: 39996 - protein, 607 aa, Arabidopsis thaliana
  peptide (1)..(607): Ceres Seq. ID no. 13575053
MDTKIGSIDACNPTNHDIGGPPNGGVSTVQNTSPLHSTTVSPCDATLGRYLARRLVEIGVTDVFSVPGDFNLTLLDHLIAEPNLKLIGCCNELNAGYAADGYARSRGVGACVVTFTVGGLSVLNAIAGAYSENLPLICIVGGPNSNDYGTNRILHHTIGLPDFTQELRCFQAVTCFQAVINNLEEAHELIDTAISTALKESKPVYISISCNLPAIPLPTFSRHPVPFMLPMKVSNQIGLDAAVEAAAEFLNKAVKPVLVGGPKMRVAKAADAFVELADASGYGLAVMPSAKGQVPEHHKHFIGTYWGAVSTAFCAEIVESADAYLFAGPIFNDYSSVGYSLLLKKEKAIIVQPDRVTIGNGPAFGCVLMKDFLSELAKRIKHNNTSYENYHRIYVPEGKPLRDNPNESLRVNVLFQHIQNMLSSESAVLAETGDSWFNCQKLKLPEGCGYEFQMQYGSIGWSVGATLGYAQAMPNRRVIACIGDGSFQVTAQDVSTMIRCGQKTIIFLINNGGYTIEVEIHDGPYNVIKNWNYTAFVEAIHNGEGKCWTAKVRCEEELVKAINTATNEEKESFCFIEVIVHKDDTSKELLEWGSRVSAANSRPPNPQ

SEQ ID NO: 39997 - protein, 380 aa, Arabidopsis thaliana
  peptide (1)..(380): Ceres Seq. ID no. 13575054
MLPMKVSNQIGLDAAVEAAAEFLNKAVKPVLVGGPKMRVAKAADAFVELADASGYGLAVMPSAKGQVPEHHKHFIGTYWGAVSTAFCAEIVESADAYLFAGPIFNDYSSVGYSLLLKKEKAIIVQPDRVTIGNGPAFGCVLMKDFLSELAKRIKHNNTSYENYHRIYVPEGKPLRDNPNESLRVNVLFQHIQNMLSSESAVLAETGDSWFNCQKLKLPEGCGYEFQMQYGSIGWSVGATLGYAQAMPNRRVIACIGDGSFQVTAQDVSTMIRCGQKTIIFLINNGGYTIEVEIHDGPYNVIKNWNYTAFVEAIHNGEGKCWTAKVRCEEELVKAINTATNEEKESFCFIEVIVHKDDTSKELLEWGSRVSAANSRPPNPQ

SEQ ID NO: 39998 - protein, 377 aa, Arabidopsis thaliana
  peptide (1)..(377): Ceres Seq. ID no. 13575055
MKVSNQIGLDAAVEAAAEFLNKAVKPVLVGGPKMRVAKAADAFVELADASGYGLAVMPSAKGQVPEHHKHFIGTYWGAVSTAFCAEIVESADAYLFAGPIFNDYSSVGYSLLLKKEKAIIVQPDRVTIGNGPAFGCVLMKDFLSELAKRIKHNNTSYENYHRIYVPEGKPLRDNPNESLRVNVLFQHIQNMLSSESAVLAETGDSWFNCQKLKLPEGCGYEFQMQYGSIGWSVGATLGYAQAMPNRRVIACIGDGSFQVTAQDVSTMIRCGQKTIIFLINNGGYTIEVEIHDGPYNVIKNWNYTAFVEAIHNGEGKCWTAKVRCEEELVKAINTATNEEKESFCFIEVIVHKDDTSKELLEWGSRVSAANSRPPNPQ

SEQ ID NO: 39999 - DNA, 1563 bp, Arabidopsis thaliana
  misc_feature (1)..(1563): Ceres Seq. ID no. 13576556
  misc_feature (1)..(1563): Ortholog of  Ceres SEQ ID NO 13600220 as cited in SEQ ID NO 0
aacaaaactaagattgaataatcataaagaagaaaactgagaatgagaggtaattatctttctttgctagtagtgctcattgtcttggcctccaatgatgttcttgccaacaacaactcttcaacacctaaattaagaagaagtgattttcctgaagatttcatttttggatctgcaacatctgcttaccaggtcgaaggaggtgctcatgaagatggtagaggacctagtatctgggataccttctctgagaaatatccagagaagataaaggatggtagcaatgggtctgttgcagataactcttaccatctttacaaggaagatgtggcgttattgcatcaaattgggtttaatgcatacagattctcaatctcatggtcgaggatcttgcctcgtgggaatctaaaaggaggaatcaaccaggctggtattgactattacaacaacttgatcaatgaacttttgtccaaaggaattaagccttttgcaaccatgttccattgggacacaccacaagcccttgaagatgcttatggtggattccgtggtgccgagattgtgaacgatttccgcgattatgcggatatttgcttcaagaattttggagatagagtgaagcattggatgacattgaacgagccattgacagtggtgcaacaagggtatgttgcaggtgtaatggctccaggaagatgctccaaattcacaaaccctaattgcacagatggaaatggagccaccgagccttatatcgttggtcacaacctcatcctttctcacggagccgccgtccaagtctacagagaaaaatacaaggcttctcaacaaggtcaagttggtattgctttgaacgcgggttggaacttgccatatacagaatcaccgaaggatagattagctgcggcacgagccatggccttcacatttgactactttatggagccgcttgtgacgggtaaatacccggttgatatggtcaacaacgtaaaaggccgcttacctatattcactgcacaacaatctaagatgttgaaaggctcatatgatttcattggcatcaactattactcttctacttatgcaaaggatgttccctgctccaccaaagatgttactatgttctctgatccttgtgccagtgtcacaggtgaaagagatggagttcccattggtccaaaggctgcatcagattggcttttaatatatccaaagggaattcgtgatcttgtgctctatgcaaaatacaagtttaaggaccctgtcatgtacataactgaaaacgggagagatgaatttagtaccaataaaatcttccttaaagacggtgacaggatcgattactacgctcgacatctcgaaatggttcaagacgctatctctgttggagccaatgtgaagggatttttcgcatggtcgttgctagacaatttcgaatgggcaatgggatacacggtccggtttggactggtttatgtggatttcaaagacggatgtaagagatatcccaagaaatcagctgaatggttcagaaagttattgaatgaaaagaaaaacgattga

SEQ ID NO: 40000 - protein, 506 aa, Arabidopsis thaliana
  peptide (1)..(506): Ceres Seq. ID no. 13576557
MRGNYLSLLVVLIVLASNDVLANNNSSTPKLRRSDFPEDFIFGSATSAYQVEGGAHEDGRGPSIWDTFSEKYPEKIKDGSNGSVADNSYHLYKEDVALLHQIGFNAYRFSISWSRILPRGNLKGGINQAGIDYYNNLINELLSKGIKPFATMFHWDTPQALEDAYGGFRGAEIVNDFRDYADICFKNFGDRVKHWMTLNEPLTVVQQGYVAGVMAPGRCSKFTNPNCTDGNGATEPYIVGHNLILSHGAAVQVYREKYKASQQGQVGIALNAGWNLPYTESPKDRLAAARAMAFTFDYFMEPLVTGKYPVDMVNNVKGRLPIFTAQQSKMLKGSYDFIGINYYSSTYAKDVPCSTKDVTMFSDPCASVTGERDGVPIGPKAASDWLLIYPKGIRDLVLYAKYKFKDPVMYITENGRDEFSTNKIFLKDGDRIDYYARHLEMVQDAISVGANVKGFFAWSLLDNFEWAMGYTVRFGLVYVDFKDGCKRYPKKSAEWFRKLLNEKKND

SEQ ID NO: 40001 - protein, 355 aa, Arabidopsis thaliana
  peptide (1)..(355): Ceres Seq. ID no. 13576558
MFHWDTPQALEDAYGGFRGAEIVNDFRDYADICFKNFGDRVKHWMTLNEPLTVVQQGYVAGVMAPGRCSKFTNPNCTDGNGATEPYIVGHNLILSHGAAVQVYREKYKASQQGQVGIALNAGWNLPYTESPKDRLAAARAMAFTFDYFMEPLVTGKYPVDMVNNVKGRLPIFTAQQSKMLKGSYDFIGINYYSSTYAKDVPCSTKDVTMFSDPCASVTGERDGVPIGPKAASDWLLIYPKGIRDLVLYAKYKFKDPVMYITENGRDEFSTNKIFLKDGDRIDYYARHLEMVQDAISVGANVKGFFAWSLLDNFEWAMGYTVRFGLVYVDFKDGCKRYPKKSAEWFRKLLNEKKND

SEQ ID NO: 40002 - protein, 311 aa, Arabidopsis thaliana
  peptide (1)..(311): Ceres Seq. ID no. 13576559
MTLNEPLTVVQQGYVAGVMAPGRCSKFTNPNCTDGNGATEPYIVGHNLILSHGAAVQVYREKYKASQQGQVGIALNAGWNLPYTESPKDRLAAARAMAFTFDYFMEPLVTGKYPVDMVNNVKGRLPIFTAQQSKMLKGSYDFIGINYYSSTYAKDVPCSTKDVTMFSDPCASVTGERDGVPIGPKAASDWLLIYPKGIRDLVLYAKYKFKDPVMYITENGRDEFSTNKIFLKDGDRIDYYARHLEMVQDAISVGANVKGFFAWSLLDNFEWAMGYTVRFGLVYVDFKDGCKRYPKKSAEWFRKLLNEKKND

SEQ ID NO: 40003 - DNA, 1006 bp, Arabidopsis thaliana
  misc_feature (1)..(1006): Ceres Seq. ID no. 12371342
  misc_feature (1)..(1006): Ortholog of  Ceres SEQ ID NO 13503500 as cited in SEQ ID NO 68001
  misc_feature (1)..(1006): Ortholog of  Ceres SEQ ID NO 15174327 as cited in SEQ ID NO 0
aagattccacaaaaactctgtattgtctctttctctctcactatctctctctcttttgtgagctcagatctgaccagagagaaagaaacaaccggagaagaagaagatgactgaccgagtcttcccagcttccaaaccaccaaccgccactaatggagctccaccagttggttccataccacctcctccagctccggcgactgtaaccagcaacggaacaacaaacggaatggctaatcagaaacctcaagtctacattccagctaaccgtccggtttaccgtccacagccttacagtcgccgtcatcaccaccaatctcgaccaagctgccgacgaatttgctgttgttgctgtttctggtcgattctgataattctgatcttagctctcatgactgcaatcgccgccaccgcgatgtacgtgatctaccaccctcgtccgccgtcgttctccgtcccgtcaataagaatcagccgcgtgaacctaacaacctcctctaattcctccgtctctcatctctcttccttcttcaacttcactctaatctcagagaatccaaaccaacacctctctttctcttacgatcctttcaccgtcatcgttaaattcagctaaatccggtacgatgctcggtaacggaactgttcctgctttcttcagcgataacggtaacaaaacttcgtttcacggcgtgatcgctacgtctacagcggcgcgtgagttagatccggatgaagctaagcatctgagatcagatctgacgcgcgcgcgtgtaggatatgagatcgagatgagaactaaagtgaagatgataatggggaagctgaagagtgaaggagtagagatcaaagtgacatgtgaaggatttgaaggaactataccaaaaggtaaaactccaattgtagctacttctaaaaaaactaagtgtaagtctgatcttagtgtcaaggtctggaaatggagtttctagagggaattttgataatttcacaattgaaattttct

SEQ ID NO: 40004 - protein, 169 aa, Arabidopsis thaliana
  peptide (1)..(169): Ceres Seq. ID no. 12371343
MTDRVFPASKPPTATNGAPPVGSIPPPPAPATVTSNGTTNGMANQKPQVYIPANRPVYRPQPYSRRHHHQSRPSCRRICCCCCFWSILIILILALMTAIAATAMYVIYHPRPPSFSVPSIRISRVNLTTSSNSSVSHLSSFFNFTLISENPNQHLSFSYDPFTVIVKFS

SEQ ID NO: 40005 - protein, 128 aa, Arabidopsis thaliana
  peptide (1)..(128): Ceres Seq. ID no. 12371344
MANQKPQVYIPANRPVYRPQPYSRRHHHQSRPSCRRICCCCCFWSILIILILALMTAIAATAMYVIYHPRPPSFSVPSIRISRVNLTTSSNSSVSHLSSFFNFTLISENPNQHLSFSYDPFTVIVKFS

SEQ ID NO: 40006 - protein, 114 aa, Arabidopsis thaliana
  peptide (1)..(114): Ceres Seq. ID no. 12371345
MLGNGTVPAFFSDNGNKTSFHGVIATSTAARELDPDEAKHLRSDLTRARVGYEIEMRTKVKMIMGKLKSEGVEIKVTCEGFEGTIPKGKTPIVATSKKTKCKSDLSVKVWKWSF

SEQ ID NO: 40007 - DNA, 3323 bp, Arabidopsis thaliana; identical to SEQ ID NO: 36082
  misc_feature (1)..(3323): Ceres Seq. ID no. 13488061
  misc_feature (1)..(3323): Ortholog of  Ceres SEQ ID NO 12593464 as cited in SEQ ID NO 69039
  misc_feature (1)..(3323): Ortholog of  Ceres SEQ ID NO 13596244 as cited in SEQ ID NO 69307

SEQ ID NO: 40008 - protein, 440 aa, Arabidopsis thaliana; identical to SEQ ID NO: 36083
  peptide (1)..(440): Ceres Seq. ID no. 13488062

SEQ ID NO: 40009 - protein, 406 aa, Arabidopsis thaliana; identical to SEQ ID NO: 36084
  peptide (1)..(406): Ceres Seq. ID no. 13488063

SEQ ID NO: 40010 - protein, 403 aa, Arabidopsis thaliana; identical to SEQ ID NO: 36085
  peptide (1)..(403): Ceres Seq. ID no. 13488064

SEQ ID NO: 40011 - DNA, 1457 bp, Arabidopsis thaliana
  misc_feature (1)..(1457): Ceres Seq. ID no. 13575056
  misc_feature (1)..(1457): Ortholog of  Ceres SEQ ID NO 13595525 as cited in SEQ ID NO 56679
  misc_feature (1)..(1457): Ortholog of  Ceres SEQ ID NO 15226984 as cited in SEQ ID NO 62173
  misc_feature (1)..(1457): Ortholog of  Ceres SEQ ID NO 14302236 as cited in SEQ ID NO 68793
ggcattgagctcgagagacagacacggaggatggcgaatcagagtacagagacgaatcaaccgtcgaatatgcagacttacggtgtaccgatttacgccgccgactggattccggaggtagatgtcagatccaaaatcataatggatccggagaaatctgaagatgatgatgagtcgtcttcttcttcttcttcttcccggagctgcatcgttttgtccggcggaggcggagagggacgaagtggaatctctaatgtcatattaatatgccgtgttgatctaaacaccaattctctctcggaacaacctctgggtaggcttgtggttggctctgatctgccttatcggatggctgttcatcctcgggaaggtggtcttatttgcgcgttgcctaacagttgcaaactgtttcattgggaagacattatgagccgagaggataatcaggctggtgagtcggaggaagtgattaaagagttaagagatgttggacaacagttggctctggcgtttaatccggaggggtctgttcttgctgctggtgcggaggatgggactttgagggtttttaaatggcctagcatgaatactttacttaatgagtcccaggctcattcttcagttaaatgccttactttcagcgaaagtggtcaatttcttgtatctcttggcggtccagtttgtcgagtttgggacgtgaatgcttctgctgctgttgccagtctatcaaaagagaaggacgagatgtttgcctcctgtagattctctgtagacagtgcaggcaatgaagttctttacattgctgcaaacactgaacgtggtgggagtattataacatgtgatacaaaattatggaaaagaaaatggtcgaagcctataaaaaagaactctatatcagcttttaatgtctcagctgatgggaagcttcttgcaataggaacccttgaaggagatgttttaatacttgaatcgacaagaatgcaaactatccaagtcgtcaagaaagcgcatcttggtttggtcacagcactgactttctctcctgattcaaggggattagtgtcggtatcttttgactcaagggcaaggctgaccatgattgaacaaaagggggacaaacctggagtaaggtggtggctactggttttattgatagtgttgctatacgtggttgcatactattatatgaaggcaaagggtatcataccttagaaaggcctttaagtgaccacacaggacgatacagcggaatggcttgtaaccaacatatcatacgattacgctttgagttagctttttatgtttgacatctaccagaaacttgcttgctttatatcaataaaacatgtaaactaacactaaaacagcaaaagttacaatttgtttcctctttttttttttgtagacatagtaaactagaaaactattatcatatgatggatcagtaagactctttc

SEQ ID NO: 40012 - protein, 403 aa, Arabidopsis thaliana
  peptide (1)..(403): Ceres Seq. ID no. 13575057
GIELERQTRRMANQSTETNQPSNMQTYGVPIYAADWIPEVDVRSKIIMDPEKSEDDDESSSSSSSSRSCIVLSGGGGEGRSGISNVILICRVDLNTNSLSEQPLGRLVVGSDLPYRMAVHPREGGLICALPNSCKLFHWEDIMSREDNQAGESEEVIKELRDVGQQLALAFNPEGSVLAAGAEDGTLRVFKWPSMNTLLNESQAHSSVKCLTFSESGQFLVSLGGPVCRVWDVNASAAVASLSKEKDEMFASCRFSVDSAGNEVLYIAANTERGGSIITCDTKLWKRKWSKPIKKNSISAFNVSADGKLLAIGTLEGDVLILESTRMQTIQVVKKAHLGLVTALTFSPDSRGLVSVSFDSRARLTMIEQKGDKPGVRWWLLVLLIVLLYVVAYYYMKAKGIIP

SEQ ID NO: 40013 - protein, 393 aa, Arabidopsis thaliana
  peptide (1)..(393): Ceres Seq. ID no. 13575058
MANQSTETNQPSNMQTYGVPIYAADWIPEVDVRSKIIMDPEKSEDDDESSSSSSSSRSCIVLSGGGGEGRSGISNVILICRVDLNTNSLSEQPLGRLVVGSDLPYRMAVHPREGGLICALPNSCKLFHWEDIMSREDNQAGESEEVIKELRDVGQQLALAFNPEGSVLAAGAEDGTLRVFKWPSMNTLLNESQAHSSVKCLTFSESGQFLVSLGGPVCRVWDVNASAAVASLSKEKDEMFASCRFSVDSAGNEVLYIAANTERGGSIITCDTKLWKRKWSKPIKKNSISAFNVSADGKLLAIGTLEGDVLILESTRMQTIQVVKKAHLGLVTALTFSPDSRGLVSVSFDSRARLTMIEQKGDKPGVRWWLLVLLIVLLYVVAYYYMKAKGIIP

SEQ ID NO: 40014 - protein, 380 aa, Arabidopsis thaliana
  peptide (1)..(380): Ceres Seq. ID no. 13575059
MQTYGVPIYAADWIPEVDVRSKIIMDPEKSEDDDESSSSSSSSRSCIVLSGGGGEGRSGISNVILICRVDLNTNSLSEQPLGRLVVGSDLPYRMAVHPREGGLICALPNSCKLFHWEDIMSREDNQAGESEEVIKELRDVGQQLALAFNPEGSVLAAGAEDGTLRVFKWPSMNTLLNESQAHSSVKCLTFSESGQFLVSLGGPVCRVWDVNASAAVASLSKEKDEMFASCRFSVDSAGNEVLYIAANTERGGSIITCDTKLWKRKWSKPIKKNSISAFNVSADGKLLAIGTLEGDVLILESTRMQTIQVVKKAHLGLVTALTFSPDSRGLVSVSFDSRARLTMIEQKGDKPGVRWWLLVLLIVLLYVVAYYYMKAKGIIP

SEQ ID NO: 40015 - DNA, 1597 bp, Arabidopsis thaliana
  misc_feature (1)..(1597): Ceres Seq. ID no. 12328282
  misc_feature (1)..(1597): Ortholog of  Ceres SEQ ID NO 13657677 as cited in SEQ ID NO 66119
aaaattctcgattttttttttcttctaaattctggagttttcttttccatatgtggcaaaatccgtgatcctcacgtttcaaaattacctaaaacccctaacaattctacaattcttcttctatgtcgattctatttagtaatctcgaagaatggttcgtggattgatgaaattcccaggaatctcaacgaagttattaaacataagcgttaattctctctgcaaatttcgaaacttggagagagcagaaacattactcatagacggaatcagattaggtgttcttcctgatgtgatcacttacaacactctaatcaaagggtacactcgtttcattggaatcgacgaagcttatgctgtaacacgtcgtatgagagaagctgggatcgaaccagatgttactacttacaattcattgatctcaggagctgctaaaaacttgatgttgaatcgtgtactccaactgttcgacgaaatgcttcactcaggtttgtctcctgatatgtggagttataatactttaatgtcttgttacttcaaattagggagacatggagaagcgtttaagattcttcatgaggatattcatttagctgggttggttcctgggattgatacttataacattctgcttgatgcgctttgtaaaagcggtcatacggataatgcgattgagttgtttaagcatctgaagagtcgggttaaacccgagcttatgacgtataatattctcatcaatggtctttgtaaatcgagaagggttggttctgtggattggatgatgagagagcttaagaaatcgggctatactccgaatgcggttacgtatacaacgatgcttaaaatgtattttaagactaagaggattgagaaaggtcttcagttgtttttgaagatgaagaaagaagggtatacgtttgacgggtttgcgaattgtgcggttgttagtgcgttgattaaaaccggaagagcagaggaggcgtatgagtgtatgcacgagcttgtgagaagtggtacaaggagtcaagacattgtttcgtacaatacattgttgaatttgtattttaaagatgggaacttggatgcagtagatgatctattggaggagattgagatgaaggggttgaaacctgatgactatactcatacgattatagtcaatggtttgttaaatataggcaatacgggaggagccgagaagcatttggcatgtatcggagagatggggatgcagccgagtgttgtcacttgtaactgtttgattgatgggttgtgcaaagcaggtcatgtagatcgtgcaatgaggttgtttgcgtcaatggaagttagagatgagttcacttacacttctgttgtgcataatctatgcaaagacggacggcttgtttgtgcttcgaagctgctcttgtcgtgttacaataaaggaatgaagattccgtcatcggctagacgagcagtgttgtccggcatacgggagacggtatcttaccaagcagcaaggaagacacatatcaaaatcaaagcagctattgagtgtaatacactaatgtacccttaagacattgaaaagtatctaatagaaaaattattgaattgc

SEQ ID NO: 40016 - protein, 468 aa, Arabidopsis thaliana
  peptide (1)..(468): Ceres Seq. ID no. 12328283
MVRGLMKFPGISTKLLNISVNSLCKFRNLERAETLLIDGIRLGVLPDVITYNTLIKGYTRFIGIDEAYAVTRRMREAGIEPDVTTYNSLISGAAKNLMLNRVLQLFDEMLHSGLSPDMWSYNTLMSCYFKLGRHGEAFKILHEDIHLAGLVPGIDTYNILLDALCKSGHTDNAIELFKHLKSRVKPELMTYNILINGLCKSRRVGSVDWMMRELKKSGYTPNAVTYTTMLKMYFKTKRIEKGLQLFLKMKKEGYTFDGFANCAVVSALIKTGRAEEAYECMHELVRSGTRSQDIVSYNTLLNLYFKDGNLDAVDDLLEEIEMKGLKPDDYTHTIIVNGLLNIGNTGGAEKHLACIGEMGMQPSVVTCNCLIDGLCKAGHVDRAMRLFASMEVRDEFTYTSVVHNLCKDGRLVCASKLLLSCYNKGMKIPSSARRAVLSGIRETVSYQAARKTHIKIKAAIECNTLMYP

SEQ ID NO: 40017 - protein, 463 aa, Arabidopsis thaliana
  peptide (1)..(463): Ceres Seq. ID no. 12328284
MKFPGISTKLLNISVNSLCKFRNLERAETLLIDGIRLGVLPDVITYNTLIKGYTRFIGIDEAYAVTRRMREAGIEPDVTTYNSLISGAAKNLMLNRVLQLFDEMLHSGLSPDMWSYNTLMSCYFKLGRHGEAFKILHEDIHLAGLVPGIDTYNILLDALCKSGHTDNAIELFKHLKSRVKPELMTYNILINGLCKSRRVGSVDWMMRELKKSGYTPNAVTYTTMLKMYFKTKRIEKGLQLFLKMKKEGYTFDGFANCAVVSALIKTGRAEEAYECMHELVRSGTRSQDIVSYNTLLNLYFKDGNLDAVDDLLEEIEMKGLKPDDYTHTIIVNGLLNIGNTGGAEKHLACIGEMGMQPSVVTCNCLIDGLCKAGHVDRAMRLFASMEVRDEFTYTSVVHNLCKDGRLVCASKLLLSCYNKGMKIPSSARRAVLSGIRETVSYQAARKTHIKIKAAIECNTLMYP

SEQ ID NO: 40018 - protein, 395 aa, Arabidopsis thaliana
  peptide (1)..(395): Ceres Seq. ID no. 12328285
MREAGIEPDVTTYNSLISGAAKNLMLNRVLQLFDEMLHSGLSPDMWSYNTLMSCYFKLGRHGEAFKILHEDIHLAGLVPGIDTYNILLDALCKSGHTDNAIELFKHLKSRVKPELMTYNILINGLCKSRRVGSVDWMMRELKKSGYTPNAVTYTTMLKMYFKTKRIEKGLQLFLKMKKEGYTFDGFANCAVVSALIKTGRAEEAYECMHELVRSGTRSQDIVSYNTLLNLYFKDGNLDAVDDLLEEIEMKGLKPDDYTHTIIVNGLLNIGNTGGAEKHLACIGEMGMQPSVVTCNCLIDGLCKAGHVDRAMRLFASMEVRDEFTYTSVVHNLCKDGRLVCASKLLLSCYNKGMKIPSSARRAVLSGIRETVSYQAARKTHIKIKAAIECNTLMYP

SEQ ID NO: 40019 - DNA, 1910 bp, Arabidopsis thaliana; identical to SEQ ID NO: 30306
  misc_feature (1)..(1910): Ceres Seq. ID no. 13509014
  misc_feature (1)..(1910): Ortholog of  Ceres SEQ ID NO 15177320 as cited in SEQ ID NO 52645
  misc_feature (1)..(1910): Ortholog of  Ceres SEQ ID NO 15171359 as cited in SEQ ID NO 57279
  misc_feature (1)..(1910): Ortholog of  Ceres SEQ ID NO 15168502 as cited in SEQ ID NO 60095
  misc_feature (1)..(1910): Ortholog of  Ceres SEQ ID NO 14314084 as cited in SEQ ID NO 63256
  misc_feature (1)..(1910): Ortholog of  Ceres SEQ ID NO 15169466 as cited in SEQ ID NO 66135
  misc_feature (1)..(1910): Ortholog of  Ceres SEQ ID NO 14303091 as cited in SEQ ID NO 66369

SEQ ID NO: 40020 - protein, 510 aa, Arabidopsis thaliana; identical to SEQ ID NO: 30307
  peptide (1)..(510): Ceres Seq. ID no. 13509015

SEQ ID NO: 40021 - protein, 500 aa, Arabidopsis thaliana [sequence omitted]

SEQ ID NO: 40022 - protein, 326 aa, Arabidopsis thaliana; identical to SEQ ID NO: 30309
  peptide (1)..(326): Ceres Seq. ID no. 13509017

SEQ ID NO: 40023 - DNA, 1117 bp, Arabidopsis thaliana
  misc_feature (1)..(1117): Ceres Seq. ID no. 13489076
  misc_feature (1)..(1117): Ortholog of  Ceres SEQ ID NO 12635167 as cited in SEQ ID NO 0
aaaactaatctgtatgatcgatcttgtgctgaagatatcgaaaagatgtcatctttgggtaggattttgtctgtttcctacccaccggatccgtacacttggcggttttcacagtataagctgtcttcttcactagggcgaaatcggagactcagatggcgattcacggcgttggatcctgaatcttcctcactcgactctgaatcctccgccgataaattcgcttccgggttttgtataatagaagggcctgaaacagtacaggactttgccaaaatgcaattacaagagattcaagataacattcgaagccgacgaaacaagatcttcttgcacatggaagaggtgcggaggctaagaatacaacaacggattaaaaacacagaacttggtatcattaacgaagaacaagaacatgaattacctaatttcccatcttttatcccattcttacctccattgactgctgccaatttgaaagtctattacgcaacttgtttctcactcatcgcggggattatcctattcggtggtctactagctcctactctagagctgaagttaggtataggaggtacatcgtatgcagatttcattcaaagccttcatctacctatgcaattgagtcaagtggacccgatagtagcgtcgttttctggaggagcggttggtgtgatttcggctttgatggtagtagaagttaacaacgtaaagcagcaagagcacaagagatgcaaatactgtctaggaactgggtatctagcatgtgctcgttgctctagcacaggtgctcttgttttaactgaaccagtctcagctattgctggtgggaatcattctctatcaccgcccaaaaccgaaagatgttcaaactgttcaggtgccggaaaggtgatgtgcccgacatgtctgtgcacaggaatggctatggccagtgagcatgatcctcgtatcgaccctttcgattgaattttgcaacacattctacttccttagaatctcattctgtcagtgtaactaaaaatggtatgtactgattaaataattagaaccgcatactttgatctgtatatacacacaattaaagttataatacaatgttagacatgtcttctcc

SEQ ID NO: 40024 - protein, 322 aa, Arabidopsis thaliana
  peptide (1)..(322): Ceres Seq. ID no. 13489077
KTNLYDRSCAEDIEKMSSLGRILSVSYPPDPYTWRFSQYKLSSSLGRNRRLRWRFTALDPESSSLDSESSADKFASGFCIIEGPETVQDFAKMQLQEIQDNIRSRRNKIFLHMEEVRRLRIQQRIKNTELGIINEEQEHELPNFPSFIPFLPPLTAANLKVYYATCFSLIAGIILFGGLLAPTLELKLGIGGTSYADFIQSLHLPMQLSQVDPIVASFSGGAVGVISALMVVEVNNVKQQEHKRCKYCLGTGYLACARCSSTGALVLTEPVSAIAGGNHSLSPPKTERCSNCSGAGKVMCPTCLCTGMAMASEHDPRIDPFD

SEQ ID NO: 40025 - protein, 307 aa, Arabidopsis thaliana
  peptide (1)..(307): Ceres Seq. ID no. 13489078
MSSLGRILSVSYPPDPYTWRFSQYKLSSSLGRNRRLRWRFTALDPESSSLDSESSADKFASGFCIIEGPETVQDFAKMQLQEIQDNIRSRRNKIFLHMEEVRRLRIQQRIKNTELGIINEEQEHELPNFPSFIPFLPPLTAANLKVYYATCFSLIAGIILFGGLLAPTLELKLGIGGTSYADFIQSLHLPMQLSQVDPIVASFSGGAVGVISALMVVEVNNVKQQEHKRCKYCLGTGYLACARCSSTGALVLTEPVSAIAGGNHSLSPPKTERCSNCSGAGKVMCPTCLCTGMAMASEHDPRIDPFD

SEQ ID NO: 40026 - protein, 230 aa, Arabidopsis thaliana
  peptide (1)..(230): Ceres Seq. ID no. 13489079
MQLQEIQDNIRSRRNKIFLHMEEVRRLRIQQRIKNTELGIINEEQEHELPNFPSFIPFLPPLTAANLKVYYATCFSLIAGIILFGGLLAPTLELKLGIGGTSYADFIQSLHLPMQLSQVDPIVASFSGGAVGVISALMVVEVNNVKQQEHKRCKYCLGTGYLACARCSSTGALVLTEPVSAIAGGNHSLSPPKTERCSNCSGAGKVMCPTCLCTGMAMASEHDPRIDPFD

SEQ ID NO: 40027 - DNA, 1165 bp, Arabidopsis thaliana
  misc_feature (1)..(1165): Ceres Seq. ID no. 13496307
  misc_feature (1)..(1165): Ortholog of  Ceres SEQ ID NO 13654728 as cited in SEQ ID NO 62302
  misc_feature (1)..(1165): Ortholog of  Ceres SEQ ID NO 13597134 as cited in SEQ ID NO 64501
  misc_feature (1)..(1165): Ortholog of  Ceres SEQ ID NO 15174333 as cited in SEQ ID NO 0
  misc_feature (1)..(1165): Ortholog of  Ceres SEQ ID NO 15179047 as cited in SEQ ID NO 0
atgacccatattctcttgactcgtgaggttaaatgtaaatcactttaaaatataaaaacgtaccttgtcagttttgagactcaaaaggacttgaaatattgaaatccctattctttacgcgtactcgagatttttcgctcttgagagaatcacttcgacaatgtcggtaacggctgctttcattgattcggatcaaactcagcacaacattcttatggattcccaatcaactgtctccggtgtgaaaactgtcaagattagcaatgtttcactaattgtttctaagaaagatgtcaaagagttcttttctttctctggtgacattcaatacgtcgagatgcgaagtgagacacaagagagtcaggtcgcatatgttacttttaaggattcacaaggagctgaaactgcaatgctcttaacgggagctgtcattgcagatcttcgtgttagtataactcctgctgttaactatcagctaccaccagaagcccttgcacttgactcggaacattcgtttaatggtttttctgtcaagaaagctgaagatgtggtgaacatcatggtgggaagaggttatgctcttggaaaagacgccatggagaaagccaaagcatttgatgacagacacaacttgatctcaaacgcttctgcaaccattgcatcgcttgacgataagatgggtctgagcgaaaagctaagcataggaacaactgtggttaatgagaagttgagagatatcgatgagcgatatcaggtgagggagataacgaaatctgctttagcagctgctgaagagacagcaatcagtgcaagaacggctttaatggcaaacccttatgtatcaagtggagcttcgtggttttcaaacgcgtttggcgcagtgacaaaggcggttaaagagaaagttgagaatggaggagaaggaagaaaggagatcatcacacttgatccctcttcacccaaagttcctgctgtagttcctgttaagctcggttgatgcagatctcatcaaaccaatcggatctcgactaaattctttgataggtttgttgttcatatatatgctttcgtatgctaaagagaagataaaaagacataaaccatgaaaggtgttgttacattcaaccagcatttgttcctctcttgaaagagattattaagattc

SEQ ID NO: 40028 - protein, 278 aa, Arabidopsis thaliana; identical to SEQ ID NO: 23413
  peptide (1)..(278): Ceres Seq. ID no. 13496308

SEQ ID NO: 40029 - protein, 260 aa, Arabidopsis thaliana; identical to SEQ ID NO: 23414
  peptide (1)..(260): Ceres Seq. ID no. 13496309

SEQ ID NO: 40030 - protein, 219 aa, Arabidopsis thaliana; identical to SEQ ID NO: 23415
  peptide (1)..(219): Ceres Seq. ID no. 13496310

SEQ ID NO: 40031 - DNA, 1616 bp, Arabidopsis thaliana
  misc_feature (1)..(1616): Ceres Seq. ID no. 13489064
  misc_feature (1)..(1616): Ortholog of  Ceres SEQ ID NO 14313897 as cited in SEQ ID NO 59695
  misc_feature (1)..(1616): Ortholog of  Ceres SEQ ID NO 13660049 as cited in SEQ ID NO 67010
aaggagaatcattttcgtcttctacttagttttcttcaactcgatttctctgctccatcttcttcctcgtcttctcattctctctcgctctggcacagtagaaactgagctcacgaaagcaggtagtcagtgtttttgtttcgaactcttccaacatgcagaaggaaattgctggtgatgctccatcagcaccaaccactcgtgttcggcatcggaagcgaaacagcgatgttggtgcaggggcaggcaaaccaaatggaaaccatttacttgtcaatgacagcaaaaaatacaaatcgtttctcattcgagcatactccactttctggatgataggtggttttgctcttatagtttacctgggtcatctctacattacagccatggtggttgttattcagatattcatggcacgagaactttttaatttgctgagaaaaactcatgaagataaacagctccctggttttagattactgaattggcacttcttttttacagcaatgctctttgtatatggtcgaatacttagtcaacggctagtcaacactgtgactccagacaaagtcctatatcgactggtcacaagcctcatcaaataccacatggcaatctgttactccttgtatatttctggctttgtttggtttattctcacgctgaaaaagaagatgtacaaatatcagtttagccaatatgcatggacacatatgatattaattgtggtgtttactcagtcctcattcactgtcgccaacatctttgaaggaatcttctggtttcttcttcctgcatcacttatcgtcatcaatgacatatttgcatatatctgtggtttcttctttggaagaacaccgttgatcaagttatcaccaaagaaaacatgggagggtttcattggagcttctattaccacagtgatttctgcattcctgcttgcaaatataatgggtcgtttcctgtggctgacatgtcccagagaggatctatcgacaggctggctcctctgtgaccctggtccactgttcaagcaagagacacatgctttaccaggatggatttctgattggctcccttggaaggaaatttcgattctaccagtccagtggcatgctctatgtcttggattgttcgcctctataatagctccttttggtggcttctttgccagtggtttcaaaagagcattcaaaatcaaggactttggtgatagtattcccggacatggcggaattacagatagaatggattgtcagatggtgatggctgtttttgcctatatatatcatcaatcgtttgttgtacctgaagtcctctctgtggataagctcttagaccagataatcacaagcctgacattggaagaacaacaagcgctactcgtgaagcttggccaaatgttgcaggaaaaggttattggatcttagatcatcacaacccgtcattgtataccatattactctgcttccgtgttacgtctgaaaattattcaaaagaaagagaaaagaaaaaaaaaagtagatttataagtttttttgtttttctcattgtggaattcctctgtatagtactggtacatgctttatgaaagaaaagaagctcactacaattctctt

SEQ ID NO: 40032 - protein, 423 aa, Arabidopsis thaliana
  peptide (1)..(423): Ceres Seq. ID no. 13489065
MQKEIAGDAPSAPTTRVRHRKRNSDVGAGAGKPNGNHLLVNDSKKYKSFLIRAYSTFWMIGGFALIVYLGHLYITAMVVVIQIFMARELFNLLRKTHEDKQLPGFRLLNWHFFFTAMLFVYGRILSQRLVNTVTPDKVLYRLVTSLIKYHMAICYSLYISGFVWFILTLKKKMYKYQFSQYAWTHMILIVVFTQSSFTVANIFEGIFWFLLPASLIVINDIFAYICGFFFGRTPLIKLSPKKTWEGFIGASITTVISAFLLANIMGRFLWLTCPREDLSTGWLLCDPGPLFKQETHALPGWISDWLPWKEISILPVQWHALCLGLFASIIAPFGGFFASGFKRAFKIKDFGDSIPGHGGITDRMDCQMVMAVFAYIYHQSFVVPEVLSVDKLLDQIITSLTLEEQQALLVKLGQMLQEKVIGS

SEQ ID NO: 40033 - protein, 365 aa, Arabidopsis thaliana
  peptide (1)..(365): Ceres Seq. ID no. 13489066
MIGGFALIVYLGHLYITAMVVVIQIFMARELFNLLRKTHEDKQLPGFRLLNWHFFFTAMLFVYGRILSQRLVNTVTPDKVLYRLVTSLIKYHMAICYSLYISGFVWFILTLKKKMYKYQFSQYAWTHMILIVVFTQSSFTVANIFEGIFWFLLPASLIVINDIFAYICGFFFGRTPLIKLSPKKTWEGFIGASITTVISAFLLANIMGRFLWLTCPREDLSTGWLLCDPGPLFKQETHALPGWISDWLPWKEISILPVQWHALCLGLFASIIAPFGGFFASGFKRAFKIKDFGDSIPGHGGITDRMDCQMVMAVFAYIYHQSFVVPEVLSVDKLLDQIITSLTLEEQQALLVKLGQMLQEKVIGS

SEQ ID NO: 40034 - protein, 347 aa, Arabidopsis thaliana
  peptide (1)..(347): Ceres Seq. ID no. 13489067
MVVVIQIFMARELFNLLRKTHEDKQLPGFRLLNWHFFFTAMLFVYGRILSQRLVNTVTPDKVLYRLVTSLIKYHMAICYSLYISGFVWFILTLKKKMYKYQFSQYAWTHMILIVVFTQSSFTVANIFEGIFWFLLPASLIVINDIFAYICGFFFGRTPLIKLSPKKTWEGFIGASITTVISAFLLANIMGRFLWLTCPREDLSTGWLLCDPGPLFKQETHALPGWISDWLPWKEISILPVQWHALCLGLFASIIAPFGGFFASGFKRAFKIKDFGDSIPGHGGITDRMDCQMVMAVFAYIYHQSFVVPEVLSVDKLLDQIITSLTLEEQQALLVKLGQMLQEKVIGS

SEQ ID NO: 40035 - DNA, 1265 bp, Arabidopsis thaliana
  misc_feature (1)..(1265): Ceres Seq. ID no. 13488746
  misc_feature (1)..(1265): Ortholog of  Ceres SEQ ID NO 14316532 as cited in SEQ ID NO 57093
  misc_feature (1)..(1265): Ortholog of  Ceres SEQ ID NO 14301482 as cited in SEQ ID NO 63355
attttaagataagaataaaactaaataaggaaaaagaaggataattaggtcatcttcaccttcctcgttgtctcctcacactgtaaaagacttgaagctcatataaaatctcaagcttctatctatttcttctttcatcatcatcatcatcactctctcttcttcttctctctattccatggctttagtacgtgaacgtcgtcagctaaatctccgtcttcctcttcctccaatctccgaccgccgcttctccacctcttcctcctcagccaccaccaccaccgtcgctggctgtaacggaatctccgcttgtgatctcgagaaactcaacgttctcggatgcggaaacggcgggattgtttacaaagtccgtcataaaaccacatcggagatctacgctttgaaaacagttaacggcgacatggatccgattttcacaagacagttgatgcgagagatggagattctccgccgtacagattcaccgtacgtcgttaagtgtcacggaatcttcgagaaacctgtcgtcggtgaagtatcgattctaatggagtatatggacggcggaaccctagaatcactacgcggcggtgtaacggagcaaaaactcgccggattcgctaaacagatcttaaaaggattaagctatttacacgctcttaagatcgttcatcgtgatatcaaaccggcgaatcttcttctcaattcgaaaaacgaagttaaaatcgctgatttcggagttagtaagatcttagtccgatcattagattcgtgtaattcgtatgttggtacttgtgcttatatgagtccggagaggtttgattcggaatcttccggtggaagctctgatatctacgccggagatatctggagtttcggattgatgatgcttgagcttctcgttggtcattttcctttgcttccgccgggacagagacctgattgggcgacgttgatgtgcgcggtgtgttttggagaaccgccgcgagcgccggaggggtgttctgaagagtttaggagcttcgttgagtgttgtctccgtaaagattcgagtaagcgatggacggcgccgcagcttcttgctcatccttttctccgggaagatctttgattcgattccttttgtaacagaatctggaatcttaaaagttggaatattagatttgaaattattttaatttttgtagagttttctggagatatttatgatcgtgatttttgtacatataatatactccagaatgttaggggaaaatcgttcttgt

SEQ ID NO: 40036 - protein, 310 aa, Arabidopsis thaliana; identical to SEQ ID NO: 27837
  peptide (1)..(310): Ceres Seq. ID no. 13488747

SEQ ID NO: 40037 - protein, 229 aa, Arabidopsis thaliana; identical to SEQ ID NO: 27838
  peptide (1)..(229): Ceres Seq. ID no. 13488748

SEQ ID NO: 40038 - protein, 220 aa, Arabidopsis thaliana
  peptide (1)..(220): Ceres Seq. ID no. 13488749
MREMEILRRTDSPYVVKCHGIFEKPVVGEVSILMEYMDGGTLESLRGGVTEQKLAGFAKQILKGLSYLHALKIVHRDIKPANLLLNSKNEVKIADFGVSKILVRSLDSCNSYVGTCAYMSPERFDSESSGGSSDIYAGDIWSFGLMMLELLVGHFPLLPPGQRPDWATLMCAVCFGEPPRAPEGCSEEFRSFVECCLRKDSSKRWTAPQLLAHPFLREDL

SEQ ID NO: 40039 - DNA, 1521 bp, Arabidopsis thaliana
  misc_feature (1)..(1521): Ceres Seq. ID no. 13580369
  misc_feature (1)..(1521): Ortholog of  Ceres SEQ ID NO 13654468 as cited in SEQ ID NO 68094
ccaaacaacaaaagcatcataagaagaagaagaaactaatcatttttctgattctcccacgaagatgaaccacctcgttcgtaaaagctccgtcggttactccgccttgaggtccgtttcgtacctccgtcaatctgccgttacctctccacctccgattttctccgccgccgcttcaaccgttcgccagttcacttccgccggctatccttccaacagttttcaattgacgccgccgacgaattggggaatccggatagttccggagaggaaggcgtttgtgattgagcgattcggtaaatacgctacgacgttgccgtcggggattcatttcctcattccgttcgtggatcgtattgcttatgttcattctctcaaggaagaagctatcccgattccgaatcagactgcgattactaaagacaacgttagtatccacatcgatggtgttctctacgttaagattgtggatcctaagttagcttcttatggcgttgagagtcctatctatgctgttgtacagctggctcagaccacaatgcgtagtgagcttggtaagatcactcttgataagacctttgaggaacgagacactctcaacgagaagatagtggaagccatcaatgttgctgcaaaagactggggtcttcagtgccttcgttatgagataagggatattatgccccctcatggagtgcgagctgctatggaaatgcaagctgaagctgagcgtaaaaagagagcccagattcttgagtctgaaggagaaaggcaatcccatatcaacattgctgatggtaagaaaagttctgtaatcttggcatctgaagcagcaaagatggaccaggtgaatcgagcacaaggtgaggcagaagcaatactagctagagcacaagcaactgcgaaaggcctggtcttgttatctcagtccctcaaggaaactgggggagtagaggcggcgagtttgagagttgcagagcaatacattacagccttcggtaacattgccaaggagggtacgataatgttgcttccaagtggtgcttcaaatcctgctagcatgattgctcaagctttaacaatgtacaaaagccttgtcatcaatggtccaagcaaagatcaccaagaaacacaagcacttgatgaaacagatttggaagagttggaagacatgggtgagaaacatatatcagaaggctctaataaccgatcaggctcaatatcatttgacacagagaaaccaggtcacaccggtgaaccacgattttctcttcagaaccgcaacaaggatccgcagtaggcagccgaaccggggatgagataaattctttgggcttgagaaaactggaaaccatttttcatctttcaaatatgaggcagtaaccatcttttccgtttgaatagctagaatatcatcactttgcatatagaaacgaatctgaacatctgttctccgataagaattttcctactggatttgttatgaacatggtccttgtgttcttattcacctttattccc

SEQ ID NO: 40040 - protein, 411 aa, Arabidopsis thaliana; identical to SEQ ID NO: 34823
  peptide (1)..(411): Ceres Seq. ID no. 13580370

SEQ ID NO: 40041 - protein, 253 aa, Arabidopsis thaliana; identical to SEQ ID NO: 34824
  peptide (1)..(253): Ceres Seq. ID no. 13580371

SEQ ID NO: 40042 - protein, 206 aa, Arabidopsis thaliana; identical to SEQ ID NO: 34825
  peptide (1)..(206): Ceres Seq. ID no. 13580372

SEQ ID NO: 40043 - DNA, 1285 bp, Arabidopsis thaliana
  misc_feature (1)..(1285): Ceres Seq. ID no. 12328796
  misc_feature (1)..(1285): Ortholog of  Ceres SEQ ID NO 14306675 as cited in SEQ ID NO 52939
  misc_feature (1)..(1285): Ortholog of  Ceres SEQ ID NO 12608114 as cited in SEQ ID NO 57218
aaaatcaaagaagttgacaacaacaacaaaaaatccaaagagaaaacgtatgagttgcttaaaccataaacctcaagctcaaaattttatcaaccttataaagtttcgttttctcgagattttgaatcttttcagctaaaaaagatcacagctttttgcgttttctggatgagtttgagataagagaagatgaagattcagtgtaacgtttgtgaggcggcggaagcgacggttctatgttgcgccgacgaggctgctctttgttgggcttgcgatgagaaaattcacgccgctaataaactcgccggaaaacatcagagagtccctctctctgcctctgcctcttccatacccaaatgtgacatttgtcaggaagcatctggattcttcttttgtctgcaagatagagctttgctatgtaggaaatgtgatgttgcaatccacactgtgaatcctcatgtttcagctcaccagagatttcttctcactggaatcaaagttggtcttgaatctatagacactggtccttctactaaatcctcacctaccaatgatgataaaaccatggagaccaaaccttttgttcaatctatacctgagcctcaaaagatggccttcgatcatcatcatcaccagcagcagcaggaacagcaggaaggagttataccgggaactaaagtcaatgatcagacatcgacaaagcttcctctcgtaagtagcggatcaactactggaagcattcctcagtggcaaatagaggagattttcgggctaaccgactttgatcagagctatgaatacatggagaataatggatcatctaaggcggatactagtagacgaggagattcagacagttcttcgatgatgagatctgcagaagaagatggagaagataacaataactgcttgggaggtgagacatcatgggcggttccacagattcagtctccacctacagcgtctggtctaaactggcctaagcattttcaccaccactctgtgtttgttccggacataacttcttcaactccttataccggttcatccccgaatcaaagggttgggaaacggcggcgacggttctagcatttgtaattatcttttagccgcttgagaaaagagattggcagctttctcagtagatgtaagatcacataaatgatttggaaacttgtaatgtagtgatctgtgagagtcggtgttctttgttagctgaaaaaacaaaaagatgtttatttggttgaagattataaggggttaaattactaagttatcaatttgg

SEQ ID NO: 40044 - protein, 299 aa, Arabidopsis thaliana
  peptide (1)..(299): Ceres Seq. ID no. 12328797
MKIQCNVCEAAEATVLCCADEAALCWACDEKIHAANKLAGKHQRVPLSASASSIPKCDICQEASGFFFCLQDRALLCRKCDVAIHTVNPHVSAHQRFLLTGIKVGLESIDTGPSTKSSPTNDDKTMETKPFVQSIPEPQKMAFDHHHHQQQQEQQEGVIPGTKVNDQTSTKLPLVSSGSTTGSIPQWQIEEIFGLTDFDQSYEYMENNGSSKADTSRRGDSDSSSMMRSAEEDGEDNNNCLGGETSWAVPQIQSPPTASGLNWPKHFHHHSVFVPDITSSTPYTGSSPNQRVGKRRRRF

SEQ ID NO: 40045 - protein, 174 aa, Arabidopsis thaliana; identical to SEQ ID NO: 22889
  peptide (1)..(174): Ceres Seq. ID no. 12328798

SEQ ID NO: 40046 - protein, 159 aa, Arabidopsis thaliana; identical to SEQ ID NO: 22890
  peptide (1)..(159): Ceres Seq. ID no. 12328799

SEQ ID NO: 40047 - DNA, 1801 bp, Arabidopsis thaliana
  misc_feature (1)..(1801): Ceres Seq. ID no. 12579671
  misc_feature (1)..(1801): Ortholog of  Ceres SEQ ID NO 12605517 as cited in SEQ ID NO 20422
aaagctggattctaaggaaagttatcaaaagttttgagagctttggatagtgaagctcaaagaactaaacaatgggcttcagagtttgtgttattgtcgtcttcttgggttgtcttcttctagtccctgagaaaacaatggctcaagaaatgaaacgtgcatcgatcgttatccaaggagctcgacgagtttgtgagaccgatgagaactttgtctgtgcgacattggactggtggcctcatgacaagtgcaactatgaccaatgtccttggggttactcttcagttatcaatatggatttaacgcgtccccttcttactaaagctattaaagctttcaagccgttgaggataagaattggtggttcgctgcaagatcaagttatttacgacgtaggaaatctcaaaactccttgccgtccattccaaaaaatgaacagcggtttgtttggattctctaaaggatgcttgcacatgaaacgatgggacgagctcaacagtttcctaaccgcaaccggagcggtagtgacattcggtttaaacgctttgcgtgggagacacaaactccgcggaaaggcgtggggtggtgcatgggatcacataaacactcaagatttcttaaactacacagtctcgaagggttacgttattgattcttgggaattcggaaacgagctgagtggaagcggagttggtgcgagcgtgagcgcagagctttacgggaaagacttgattgtacttaaagatgtaatcaacaaagtttataaaaattcttggttacacaagcctatacttggctcctggagggttctatgaacaacaatggtacaccaaacttcttgaaatttccggtcctagtgttgtcgacgttgtgactcatcatatatacaatcttggttcaggaaatgatcccgcgctggtgaagaagataatggatccgagttatttaagccaggtatcaaaaacattcaaggacgtgaaccagacgattcaagaacatggaccgtgggcttctccttgggttggagaatctggtggagcttacaatagtggtggccgtcatgtttctgacacattcatagatagcttctggtatctagatcagcttggaatgtcagcgagacacaacactaaagtttactgcagacagactttggttggagggttttacggcttgctcgaaaagggaacgtttgttccaaatcctgattactatagcgcgctgctttggcatcgtttaatgggaaaaggggttcttgcggtgcagacagatggaccgccacagctacgggtttacgcacattgttcaaaaggaagagccggtgtgacattgctactgataaatctaagcaatcaatcggattttacggttagtgtcagcaatggcataaacgtggttttgaatgcggaatcaaggaagaagaagtcattgttggatactttaaaaagaccattttcttggattggaagcaaagcttctgatggatatttgaatagagaagagtatcatctgacaccagaaaacggtgtgttgcgcagcaaaacaatgttcttgaatggtaaatcgttaaaaccgacggcaacaggagatatcccgagccttgaaccggtcctccgtagtgtgaactctccgcttaatgtcttgccattgtcgatgtcgttcattgtgttacctaattttgatgcttctgcttgttcatgatgttaatggggtctctctttgcttattgggaaaaaataaataaaaataaagaatagttgtaatttttttggtaattgtatctaatgctggtgataaatgt

SEQ ID NO: 40048 - protein, 256 aa, Arabidopsis thaliana
  peptide (1)..(256): Ceres Seq. ID no. 12579672
MDPSYLSQVSKTFKDVNQTIQEHGPWASPWVGESGGAYNSGGRHVSDTFIDSFWYLDQLGMSARHNTKVYCRQTLVGGFYGLLEKGTFVPNPDYYSALLWHRLMGKGVLAVQTDGPPQLRVYAHCSKGRAGVTLLLINLSNQSDFTVSVSNGINVVLNAESRKKKSLLDTLKRPFSWIGSKASDGYLNREEYHLTPENGVLRSKTMFLNGKSLKPTATGDIPSLEPVLRSVNSPLNVLPLSMSFIVLPNFDASACS

SEQ ID NO: 40049 - protein, 247 aa, Arabidopsis thaliana
  peptide (1)..(247): Ceres Seq. ID no. 12579673
MGFRVCVIVVFLGCLLLVPEKTMAQEMKRASIVIQGARRVCETDENFVCATLDWWPHDKCNYDQCPWGYSSVINMDLTRPLLTKAIKAFKPLRIRIGGSLQDQVIYDVGNLKTPCRPFQKMNSGLFGFSKGCLHMKRWDELNSFLTATGAVVTFGLNALRGRHKLRGKAWGGAWDHINTQDFLNYTVSKGYVIDSWEFGNELSGSGVGASVSAELYGKDLIVLKDVINKVYKNSWLHKPILGSWRVL

SEQ ID NO: 40050 - protein, 225 aa, Arabidopsis thaliana
  peptide (1)..(225): Ceres Seq. ID no. 12579674
MAQEMKRASIVIQGARRVCETDENFVCATLDWWPHDKCNYDQCPWGYSSVINMDLTRPLLTKAIKAFKPLRIRIGGSLQDQVIYDVGNLKTPCRPFQKMNSGLFGFSKGCLHMKRWDELNSFLTATGAVVTFGLNALRGRHKLRGKAWGGAWDHINTQDFLNYTVSKGYVIDSWEFGNELSGSGVGASVSAELYGKDLIVLKDVINKVYKNSWLHKPILGSWRVL

SEQ ID NO: 40051 - DNA, 1253 bp, Arabidopsis thaliana
  misc_feature (1)..(1253): Ceres Seq. ID no. 12395394
  misc_feature (1)..(1253): Ortholog of  Ceres SEQ ID NO 15169195 as cited in SEQ ID NO 55200
  misc_feature (1)..(1253): Ortholog of  Ceres SEQ ID NO 13581611 as cited in SEQ ID NO 59028
  misc_feature (1)..(1253): Ortholog of  Ceres SEQ ID NO 14301693 as cited in SEQ ID NO 69246
attatcactacccacatctgtcttaccttctccgatctctctctctatttgtccacctcacacacaaccctataaacaagacaagacctcgcaaagctcaaaccttttccttctttttttctatcaagttcctcacttctcggatccgggtcctaaatctgggtcaaccctttttacgatcatcggaaatggaccctccactagtgaacgattcctccttctctgcagctaatccttcttcttacactctctccgagatttggcctttccctgtaaacgacgccgttcgctctggtctccgtttagctgttaactccggtcgagtctttactcgctctgaacattccggcaataaagacgtctccgcggctgaggaatctacagtcaccgatctaactgctggctggggaagtagaaagactagagatttgaactctgaggatgattcttcaaagatggtttcttccagcagcagtggtaatgaattgaaagaatcaggggataagaaaagaaaactgtgtggatctgaaagtggaaatggagatggttcgatgagacctgaaggcgaaacaagttcgggtggtggtggaagcaaagcaacggaacagaagaacaaacctgagccaccaaaggattatattcatgtgagagcaagaagaggacaagctactgaccggcatagtttagcagagcgagctagaagagaaaagatcagtgagaagatgacagctcttcaagatataattccaggatgtaataagataatcggaaaagcccttgtgctcgatgagattatcaattatattcagtcattgcagcggcaagttgagtttctatcaatgaagctagaagttgttaactcgggtgcaagtactggtccgacaataggagtttttccttccggtgatctcgggactttaccgattgacgttcatcgaacaatatacgagcaacaagaagctaatgaaacccgagtatctcaaccggagtggctccatatgcaggttgatgggaactttaaccgaaccacataaaaaagagtctttctctgattgatggatgtgttttgtaggcagtaaaaatgaatgcaaccctttattttttatcctatgcgtgtgtatcattttgctgttatatcataagatagaatatgagagtgaccagagagattaacactttataaaacattgttgtattgtcctattatataacttgtaacaattgattcagtaacatatgttggtcttaaatcc

SEQ ID NO: 40052 - protein, 343 aa, Arabidopsis thaliana
  peptide (1)..(343): Ceres Seq. ID no. 12395395
YHYPHLSYLLRSLSLFVHLTHNPINKTRPRKAQTFSFFFSIKFLTSRIRVLNLGQPFLRSSEMDPPLVNDSSFSAANPSSYTLSEIWPFPVNDAVRSGLRLAVNSGRVFTRSEHSGNKDVSAAEESTVTDLTAGWGSRKTRDLNSEDDSSKMVSSSSSGNELKESGDKKRKLCGSESGNGDGSMRPEGETSSGGGGSKATEQKNKPEPPKDYIHVRARRGQATDRHSLAERARREKISEKMTALQDIIPGCNKIIGKALVLDEIINYIQSLQRQVEFLSMKLEVVNSGASTGPTIGVFPSGDLGTLPIDVHRTIYEQQEANETRVSQPEWLHMQVDGNFNRTT

SEQ ID NO: 40053 - protein, 281 aa, Arabidopsis thaliana
  peptide (1)..(281): Ceres Seq. ID no. 12395396
MDPPLVNDSSFSAANPSSYTLSEIWPFPVNDAVRSGLRLAVNSGRVFTRSEHSGNKDVSAAEESTVTDLTAGWGSRKTRDLNSEDDSSKMVSSSSSGNELKESGDKKRKLCGSESGNGDGSMRPEGETSSGGGGSKATEQKNKPEPPKDYIHVRARRGQATDRHSLAERARREKISEKMTALQDIIPGCNKIIGKALVLDEIINYIQSLQRQVEFLSMKLEVVNSGASTGPTIGVFPSGDLGTLPIDVHRTIYEQQEANETRVSQPEWLHMQVDGNFNRTT

SEQ ID NO: 40054 - protein, 192 aa, Arabidopsis thaliana
  peptide (1)..(192): Ceres Seq. ID no. 12395397
MVSSSSSGNELKESGDKKRKLCGSESGNGDGSMRPEGETSSGGGGSKATEQKNKPEPPKDYIHVRARRGQATDRHSLAERARREKISEKMTALQDIIPGCNKIIGKALVLDEIINYIQSLQRQVEFLSMKLEVVNSGASTGPTIGVFPSGDLGTLPIDVHRTIYEQQEANETRVSQPEWLHMQVDGNFNRTT

SEQ ID NO: 40055 - DNA, 1209 bp, Arabidopsis thaliana; identical to SEQ ID NO: 23864
  misc_feature (1)..(1209): Ceres Seq. ID no. 12324683
  misc_feature (1)..(1209): Ortholog of  Ceres SEQ ID NO 13596440 as cited in SEQ ID NO 68769

SEQ ID NO: 40056 - protein, 308 aa, Arabidopsis thaliana; identical to SEQ ID NO: 23865
  peptide (1)..(308): Ceres Seq. ID no. 12324684

SEQ ID NO: 40057 - protein, 304 aa, Arabidopsis thaliana; identical to SEQ ID NO: 23866
  peptide (1)..(304): Ceres Seq. ID no. 12324685

SEQ ID NO: 40058 - protein, 256 aa, Arabidopsis thaliana; identical to SEQ ID NO: 23867
  peptide (1)..(256): Ceres Seq. ID no. 12324686

SEQ ID NO: 40059 - DNA, 1617 bp, Arabidopsis thaliana
  misc_feature (1)..(1617): Ceres Seq. ID no. 13494093
  misc_feature (1)..(1617): Ortholog of  Ceres SEQ ID NO 13599231 as cited in SEQ ID NO 984
ctagagttagaagtcgaaaaatctcgcttttagattcgttcaggcatttcgtcgagcaccttctctgcattactctcccctacttctctctattcattctttcaatgataagtcctaactaaactccgagagaacactaaaccctaaacccattttgcactctcaattacagatcatccacatttcgcgctttcgtcaaatctctttagatgttcgtcaaatcacaaagctttctcttttcggtgagtaagctgtttcaccagcatcaacaatggcgaggaatgggtgcaatgacaaaggtgagactgaagtgggtgaagaacaagaacctggatcacgtcattgatactgagaccgatctcaaagcagcttgtatcctcaaagacgccataaagcgatctcccactggtttcctcaccgcaaaatccgtcgccgattggcaaaaactccttggtctcaccgtccctgttctccgcttcttgcgcaggtatccgactctgtttcacgaatttcctcatgctcgttacgcaagcttaccatgtttcaagctaacggacacagcactaatgcttgactcacaagaagagattattcatcaaagccacgaggctgatacagtggagagactctgtagagttctgatgatgatgagatcaaaaactgtctctcttagatcactacattctctcaaattcgatctcggtttacccgataactacgaaaagacgctagtcatgaaataccctgatcatttctgcttcgtcaaggcttctaatggtaacccgtgtttaaagcttgtaaaatggcgtgatgagttcgcattctcggcgctgcagaagcgaaacgaggacaatgatgtttccggggaggagtctagataccgcgagttcaagagaggtcagtctacgttgacttttcctatgagtttccctagaggatatggagcacagaagaaggtcaaagcatggatggatgagtttcaaaaacttccctacatatctccttacgatgacccgagtaacattgatccggaaagcgatctcatggagaaacgagctgtggctgttttgcacgagctcttgagcttgactatccacaagaaaaccaagaggaactacttgagaagcatgagagcggagctcaacattccgcacaagttcactcgtctattcacgcgataccccggcattttctacctctcattgaagtgtaagacaacaactgtgatcctcaaagaagggtatcgccgaggaaaactagtggatccgcatcctctcactcgtcttcgagataagttttatcatgtgatgagaacagggtttctttatcgggcgagagggctaggcatggtctctaaagaggaacttttgcttgataggccagaggatgaccttgaggaagaaggctctgaagaagaagagattgtggaaggaagtgagcttgaagaagattctgaagctgaatagcaatagttgttgaatctaattgttgtatgttaattcacacagagcaacaatttatgtacctgcattttatctttttgaagtaacggaacggagtttaaacaatgtaagcacaaagtccttaaaatgatataaagagagattgtatttcacc

SEQ ID NO: 40060 - protein, 418 aa, Arabidopsis thaliana
  peptide (1)..(418): Ceres Seq. ID no. 13494094
MFVKSQSFLFSVSKLFHQHQQWRGMGAMTKVRLKWVKNKNLDHVIDTETDLKAACILKDAIKRSPTGFLTAKSVADWQKLLGLTVPVLRFLRRYPTLFHEFPHARYASLPCFKLTDTALMLDSQEEIIHQSHEADTVERLCRVLMMMRSKTVSLRSLHSLKFDLGLPDNYEKTLVMKYPDHFCFVKASNGNPCLKLVKWRDEFAFSALQKRNEDNDVSGEESRYREFKRGQSTLTFPMSFPRGYGAQKKVKAWMDEFQKLPYISPYDDPSNIDPESDLMEKRAVAVLHELLSLTIHKKTKRNYLRSMRAELNIPHKFTRLFTRYPGIFYLSLKCKTTTVILKEGYRRGKLVDPHPLTRLRDKFYHVMRTGFLYRARGLGMVSKEELLLDRPEDDLEEEGSEEEEIVEGSELEEDSEAE

SEQ ID NO: 40061 - protein, 394 aa, Arabidopsis thaliana
  peptide (1)..(394): Ceres Seq. ID no. 13494095
MGAMTKVRLKWVKNKNLDHVIDTETDLKAACILKDAIKRSPTGFLTAKSVADWQKLLGLTVPVLRFLRRYPTLFHEFPHARYASLPCFKLTDTALMLDSQEEIIHQSHEADTVERLCRVLMMMRSKTVSLRSLHSLKFDLGLPDNYEKTLVMKYPDHFCFVKASNGNPCLKLVKWRDEFAFSALQKRNEDNDVSGEESRYREFKRGQSTLTFPMSFPRGYGAQKKVKAWMDEFQKLPYISPYDDPSNIDPESDLMEKRAVAVLHELLSLTIHKKTKRNYLRSMRAELNIPHKFTRLFTRYPGIFYLSLKCKTTTVILKEGYRRGKLVDPHPLTRLRDKFYHVMRTGFLYRARGLGMVSKEELLLDRPEDDLEEEGSEEEEIVEGSELEEDSEAE

SEQ ID NO: 40062 - protein, 391 aa, Arabidopsis thaliana
  peptide (1)..(391): Ceres Seq. ID no. 13494096
MTKVRLKWVKNKNLDHVIDTETDLKAACILKDAIKRSPTGFLTAKSVADWQKLLGLTVPVLRFLRRYPTLFHEFPHARYASLPCFKLTDTALMLDSQEEIIHQSHEADTVERLCRVLMMMRSKTVSLRSLHSLKFDLGLPDNYEKTLVMKYPDHFCFVKASNGNPCLKLVKWRDEFAFSALQKRNEDNDVSGEESRYREFKRGQSTLTFPMSFPRGYGAQKKVKAWMDEFQKLPYISPYDDPSNIDPESDLMEKRAVAVLHELLSLTIHKKTKRNYLRSMRAELNIPHKFTRLFTRYPGIFYLSLKCKTTTVILKEGYRRGKLVDPHPLTRLRDKFYHVMRTGFLYRARGLGMVSKEELLLDRPEDDLEEEGSEEEEIVEGSELEEDSEAE

SEQ ID NO: 40063 - DNA, 2211 bp, Arabidopsis thaliana
  misc_feature (1)..(2211): Ceres Seq. ID no. 12348668
  misc_feature (1)..(2211): Ortholog of  Ceres SEQ ID NO 13594037 as cited in SEQ ID NO 55666
  misc_feature (1)..(2211): Ortholog of  Ceres SEQ ID NO 13657707 as cited in SEQ ID NO 66407
accagccccattaataaaccaccgggctctgtttcaataaaaaaaatcccctccctctcatatttacctcccgaataaaaccggagggagagaaaaaacataaaaagcaaaaaaaaaggtaaaatcaaaaagggaaaaaatatataacaacaaaaaaaaaaagttagaaaaaatggcagtaggaaaggttgtggtatctgtggcatcactcctcctagtggtgggtgttgccataggagttatcacgttcgttaataaaggaggcggcgccaatggcgacagtaatggtcccataaactctcatcagaaagcggttcagacaatttgccagtcaaccacagaccaaggttcgtgcgcgaaaacactcgacccagtcaaaagtgatgatccaagcaagcttgtcaaagccttcctgatggctactaaagacgcgatcacaaaatcctcaaacttcacggcttcgaccgaaggaggtatgggtactaacatgaacgcgaccagcaaagccgttcttgattactgcaagagagtattgatgtacgctcttgaggatcttgagaccattgttgaagagatgggtgaggatcttcagcagagtggaactaagcttgaccagctcaaacaatggttaactggagttttcaactaccaaaccgattgtcttgacgacatcgaggaagttgagctaaagaagatcatgggtgaaggaatctctaactccaaggttttgaccagtaacgctatcgatatcttccattccgttgttaccgcgatggcccaaatgggtgtcaaagtcgacgatatgaagaacataaccatgggagccggagccggtggagctgcacgtcgccttcttgaagacaacgactctaagggactccccaaatggttttctggtaaagacaggaagcttatggctaaggccggacgtggcgctccagctggcggtgatgatggtatcggtgaaggcggtggtggtggcggtaagatcaaggcgactcatgtagtggctaaggatggaagtggacagtttaagaccatttctgaggcggttatggcttgcccggataaaaaccctggaaggtgcattatccatatcaaggctggtatctacaatgaacaagtcagaatccctaagaagaagaacaacattttcatgttcggtgatggtgctacacaaaccatcattacctttgacagaagtgttaaacttagcccaggaaccactacttcactcagtggcaccgttcaggtcgaatctgagggattcatggcgaaatggattgggtttaagaacactgctggtccattgggacaccaagcggtcgcactccgtgtgaacggagaccgtgcggtcatattcaactgtagattcgacggttaccaagacacactctacgtcaacaacggacgtcaattctacaggaacattgttgtatccggtacagtggatttcatcttcggaaaatccgcaactgtgatccaaaactctctcatcctcgtccgaaagggaagccccggacaatccaactacgttacggctgacggtaatgaaaagggtgcagcgatgaagatcggtatcgtcctccataactgccgtatcataccggacaaggagctcgaagctgacaagctaaccatcaaatcgtacctaggaaggccgtggaagaagtttgccacgactgtgattattggaactgagattggtgatttgattaaaccagaaggatggaccgaatggcaaggagaacaaaaccacaagactgctaaatacattgagttcaataaccgtggaccgggagctgccactactcagaggcctccttgggttaaggtggctaagtctgcggctgaggttgaaacttacaccgtggctaactgggttggtccagctaactggatccaagaagccaacgtgcccgtccaactaggattgtaagaggacaacacaaaaaagttaagaataaaacagtatgtgataatgttaaggtaacgatacgacgtcgtctctggggatcagaactcttttttggatactatatacaaagatagggttctagacgtgttgagatgatgtttgtataagattgctttcgtttcacgtgcaaaagaggaaaaaaaattgttttgttattttttttgtagtacaaataattaatttttttttatcacatgttgtatccttaagaaaattgatacacaaaatatttt

SEQ ID NO: 40064 - protein, 588 aa, Arabidopsis thaliana
  peptide (1)..(588): Ceres Seq. ID no. 12348669
MAVGKVVVSVASLLLVVGVAIGVITFVNKGGGANGDSNGPINSHQKAVQTICQSTTDQGSCAKTLDPVKSDDPSKLVKAFLMATKDAITKSSNFTASTEGGMGTNMNATSKAVLDYCKRVLMYALEDLETIVEEMGEDLQQSGTKLDQLKQWLTGVFNYQTDCLDDIEEVELKKIMGEGISNSKVLTSNAIDIFHSVVTAMAQMGVKVDDMKNITMGAGAGGAARRLLEDNDSKGLPKWFSGKDRKLMAKAGRGAPAGGDDGIGEGGGGGGKIKATHVVAKDGSGQFKTISEAVMACPDKNPGRCIIHIKAGIYNEQVRIPKKKNNIFMFGDGATQTIITFDRSVKLSPGTTTSLSGTVQVESEGFMAKWIGFKNTAGPLGHQAVALRVNGDRAVIFNCRFDGYQDTLYVNNGRQFYRNIVVSGTVDFIFGKSATVIQNSLILVRKGSPGQSNYVTADGNEKGAAMKIGIVLHNCRIIPDKELEADKLTIKSYLGRPWKKFATTVIIGTEIGDLIKPEGWTEWQGEQNHKTAKYIEFNNRGPGAATTQRPPWVKVAKSAAEVETYTVANWVGPANWIQEANVPVQLGL

SEQ ID NO: 40065 - protein, 507 aa, Arabidopsis thaliana
  peptide (1)..(507): Ceres Seq. ID no. 12348670
MATKDAITKSSNFTASTEGGMGTNMNATSKAVLDYCKRVLMYALEDLETIVEEMGEDLQQSGTKLDQLKQWLTGVFNYQTDCLDDIEEVELKKIMGEGISNSKVLTSNAIDIFHSVVTAMAQMGVKVDDMKNITMGAGAGGAARRLLEDNDSKGLPKWFSGKDRKLMAKAGRGAPAGGDDGIGEGGGGGGKIKATHVVAKDGSGQFKTISEAVMACPDKNPGRCIIHIKAGIYNEQVRIPKKKNNIFMFGDGATQTIITFDRSVKLSPGTTTSLSGTVQVESEGFMAKWIGFKNTAGPLGHQAVALRVNGDRAVIFNCRFDGYQDTLYVNNGRQFYRNIVVSGTVDFIFGKSATVIQNSLILVRKGSPGQSNYVTADGNEKGAAMKIGIVLHNCRIIPDKELEADKLTIKSYLGRPWKKFATTVIIGTEIGDLIKPEGWTEWQGEQNHKTAKYIEFNNRGPGAATTQRPPWVKVAKSAAEVETYTVANWVGPANWIQEANVPVQLGL

SEQ ID NO: 40066 - protein, 487 aa, Arabidopsis thaliana
  peptide (1)..(487): Ceres Seq. ID no. 12348671
MGTNMNATSKAVLDYCKRVLMYALEDLETIVEEMGEDLQQSGTKLDQLKQWLTGVFNYQTDCLDDIEEVELKKIMGEGISNSKVLTSNAIDIFHSVVTAMAQMGVKVDDMKNITMGAGAGGAARRLLEDNDSKGLPKWFSGKDRKLMAKAGRGAPAGGDDGIGEGGGGGGKIKATHVVAKDGSGQFKTISEAVMACPDKNPGRCIIHIKAGIYNEQVRIPKKKNNIFMFGDGATQTIITFDRSVKLSPGTTTSLSGTVQVESEGFMAKWIGFKNTAGPLGHQAVALRVNGDRAVIFNCRFDGYQDTLYVNNGRQFYRNIVVSGTVDFIFGKSATVIQNSLILVRKGSPGQSNYVTADGNEKGAAMKIGIVLHNCRIIPDKELEADKLTIKSYLGRPWKKFATTVIIGTEIGDLIKPEGWTEWQGEQNHKTAKYIEFNNRGPGAATTQRPPWVKVAKSAAEVETYTVANWVGPANWIQEANVPVQLGL

SEQ ID NO: 40067 - DNA, 1891 bp, Arabidopsis thaliana
  misc_feature (1)..(1891): Ceres Seq. ID no. 13491514
  misc_feature (1)..(1891): Ortholog of  Ceres SEQ ID NO 14308413 as cited in SEQ ID NO 55196
aaaaaaaagcttccattgatttcgcatcagatcttgctctctcttctatctctgcgattcttctggatcttctcaaatccatgaaggaatcagatctaaccaccgaaccaatcgcacaaaatctaatcaagctaataagcaatgtctgtttctcagtcttcgttttcacagttctcatcttcacagtaatcgcagtaacttaccaaccaccagatccatggcttgaatctgctccagcactcaccaaactcctaaccgaaaccgaaaacgcaactttcaaaatcgacggttcgattctcaaaaccggcgaagatctcgcttcatctccgtcatcatcacctccgtcgaactccacagagcaagtcacggaggcgacgattgagaaatccgaggcgaaaatcggtaatatgactgtgaagaactctatagattgtgatgaggatttgaagattgtgaattgttctgatccgagagttttagttgctgttgagaggtttaatttgaaggtttttaaatctattgtgttcttagagtacgaaactccggttaacggatcgaaactagacgaatgcgatgtttcttggaggtttaggaataagaaggagaagtcatggaggagatacagagatttcaggaggtttaggtttggatttggtgagaattgtacttataaagtgtttcatactagtggttggcattctggtgttaatgctcgtaggcctaggattagtagaccgagctcgagtcgaggagctcgcggtggtgattcggagattaatgatacgattccgactcttggttcgcagacgagtttccggagagggaagtatttgtattattcgcggggtggtgattattgtaagggtatgaatcagtatatgtggagtttcttgtgtggtttaggtgaagcaatgtatttgaataggacttttgtgatggatttgagtttgtgtttgtcttcgagttatagttctaaggggaaagatgaggaaggtaaggattttcggtattattttgatttcgagcatcttaaggagacggcttcgattgttgaagagggtgagttcttgagagattggaagaaatggaatcggttgcataaacggaaagttcctgttaggaaggttaagacgcatagagtgtcgcctttgcagcttagtaaagataagagtacgattatatggaggcagtttgatactcctgagcctgaaaactattggtatagagtttgtgaagggcaagcatcgaagtatgttgagaggccgtggcatgcgttgtggaagtcgaagaggttgatgaatattgtctctgagattagtgggaaaatggactgggattttgatgctgttcatgtggttagaggcgagaaagcgaagaacaagaagctatggccacatttggatgcagacacatggcctgatgcgatattgaccaaacttaaaggattggttcaggtgtggaggaatttgtacgttgcaactaatgaaccgttttataattactttgacaagttgaggtctcagtacaaggttcacttgcttgatgactatagctacttgtggggaaataagagtgaatggtacaatgagactagtctcttgaacaatgggaaaccagttgagtttgatgggtacatgagagtagctgttgatacagaggtgttttatagaggaaagactcgcgtcgagacgttctataaccttaccacggactgcaaagacgggatcaatacatgctaaattgatcattcaggttgtgatatgttttcattgttttatttgtttgtgtatcaaattcagttatgcttgtgttgtttaccttgtgttctactagctattgaagagtgtacgtaacgtttacattttttgattcatatccttaattctgtaag

SEQ ID NO: 40068 - protein, 578 aa, Arabidopsis thaliana
  peptide (1)..(578): Ceres Seq. ID no. 13491515
KKASIDFASDLALSSISAILLDLLKSMKESDLTTEPIAQNLIKLISNVCFSVFVFTVLIFTVIAVTYQPPDPWLESAPALTKLLTETENATFKIDGSILKTGEDLASSPSSSPPSNSTEQVTEATIEKSEAKIGNMTVKNSIDCDEDLKIVNCSDPRVLVAVERFNLKVFKSIVFLEYETPVNGSKLDECDVSWRFRNKKEKSWRRYRDFRRFRFGFGENCTYKVFHTSGWHSGVNARRPRISRPSSSRGARGGDSEINDTIPTLGSQTSFRRGKYLYYSRGGDYCKGMNQYMWSFLCGLGEAMYLNRTFVMDLSLCLSSSYSSKGKDEEGKDFRYYFDFEHLKETASIVEEGEFLRDWKKWNRLHKRKVPVRKVKTHRVSPLQLSKDKSTIIWRQFDTPEPENYWYRVCEGQASKYVERPWHALWKSKRLMNIVSEISGKMDWDFDAVHVVRGEKAKNKKLWPHLDADTWPDAILTKLKGLVQVWRNLYVATNEPFYNYFDKLRSQYKVHLLDDYSYLWGNKSEWYNETSLLNNGKPVEFDGYMRVAVDTEVFYRGKTRVETFYNLTTDCKDGINTC

SEQ ID NO: 40069 - protein, 552 aa, Arabidopsis thaliana; identical to SEQ ID NO: 23115
  peptide (1)..(552): Ceres Seq. ID no. 13491516

SEQ ID NO: 40070 - protein, 443 aa, Arabidopsis thaliana; identical to SEQ ID NO: 23116
  peptide (1)..(443): Ceres Seq. ID no. 13491517

SEQ ID NO: 40071 - DNA, 1325 bp, Arabidopsis thaliana
  misc_feature (1)..(1325): Ceres Seq. ID no. 12330843
  misc_feature (1)..(1325): Ortholog of  Ceres SEQ ID NO 14306769 as cited in SEQ ID NO 52984
ttttctcttcttcctcgactgctctgctctgctctattctctggattgagaatttggactgagaacgacgacaaatggggaaacgagagaaaaaacctaatcgacgtcgccacaaaggtgaatattcgaatgatgctgaagatttctacgatcaacacccgccggctgttgcctccgtcgacgaagaagatgaagaaaactctgacgaagaagaagaagaaaatgatggaaacgaatcatcggatttgccttcaaagtttctcctttaccaacaatccgttcagtcaccaaaaggagacataagttacttgcagaagttctttttaatgtatgttggtggaagacaacctttccatttccaagaagatttctgcggcactgctcttttaagtgcggagtggctgaagactgacactagacggactgctatagggcttgattttgatcttgaggcgttagaatggtgtatggataacaacattagtaaacttggttctgacgtgtattcaagaatgtcgcttttccatgggaatgttttaactcctcttgaggctaagcaagtgaaatctaaatcccatgagctgatacaaaatatcagcttggatgatggtgatgataatgaagatttggctgatccgagtgttgtcgaatctttagagaaagatggacctgattcgttgccaaagagggatattgtgtgtgcttttaattttagttgttgttgtctccacaaacgctcggagttggtttcttacttcaagaatgcacgtgacgctttgtctaagaaaggtggtatcttcgtgatggatttatatggaggtgcttctgctgagggacagttgaagcttcaacggaaattccctaatttcacgtatacatgggagcaggctgagtttgatattttaagccgcaagacaaggatcagtctgcactatcaccttcagaagcagaacagaaagattcgccatgctttttcatatagctggagactgtggtcattgccggagataaaggattgtatggaggaagctgggtttagctcagtccatttctggctcagagaaatgccggacgcttctgaaatgcgtagaacagatgggtttggtgctggacgtgatatcaagtacgaacaagtcaagagctttcaacagtgtgattcttggaatgcttacattgttgcggtcagcctctagttatgctttctatcttttgatcaaaagacactagccctttaactcagatcctttgtcgattttacatctagtatttatttctgacacgcactggtttagtttcatgatttcaatattatttttttgtcgtcc

SEQ ID NO: 40072 - protein, 372 aa, Arabidopsis thaliana
  peptide (1)..(372): Ceres Seq. ID no. 12330844
MGKREKKPNRRRHKGEYSNDAEDFYDQHPPAVASVDEEDEENSDEEEEENDGNESSDLPSKFLLYQQSVQSPKGDISYLQKFFLMYVGGRQPFHFQEDFCGTALLSAEWLKTDTRRTAIGLDFDLEALEWCMDNNISKLGSDVYSRMSLFHGNVLTPLEAKQVKSKSHELIQNISLDDGDDNEDLADPSVVESLEKDGPDSLPKRDIVCAFNFSCCCLHKRSELVSYFKNARDALSKKGGIFVMDLYGGASAEGQLKLQRKFPNFTYTWEQAEFDILSRKTRISLHYHLQKQNRKIRHAFSYSWRLWSLPEIKDCMEEAGFSSVHFWLREMPDASEMRRTDGFGAGRDIKYEQVKSFQQCDSWNAYIVAVSL

SEQ ID NO: 40073 - protein, 288 aa, Arabidopsis thaliana
  peptide (1)..(288): Ceres Seq. ID no. 12330845
MYVGGRQPFHFQEDFCGTALLSAEWLKTDTRRTAIGLDFDLEALEWCMDNNISKLGSDVYSRMSLFHGNVLTPLEAKQVKSKSHELIQNISLDDGDDNEDLADPSVVESLEKDGPDSLPKRDIVCAFNFSCCCLHKRSELVSYFKNARDALSKKGGIFVMDLYGGASAEGQLKLQRKFPNFTYTWEQAEFDILSRKTRISLHYHLQKQNRKIRHAFSYSWRLWSLPEIKDCMEEAGFSSVHFWLREMPDASEMRRTDGFGAGRDIKYEQVKSFQQCDSWNAYIVAVSL

SEQ ID NO: 40074 - protein, 241 aa, Arabidopsis thaliana
  peptide (1)..(241): Ceres Seq. ID no. 12330846
MDNNISKLGSDVYSRMSLFHGNVLTPLEAKQVKSKSHELIQNISLDDGDDNEDLADPSVVESLEKDGPDSLPKRDIVCAFNFSCCCLHKRSELVSYFKNARDALSKKGGIFVMDLYGGASAEGQLKLQRKFPNFTYTWEQAEFDILSRKTRISLHYHLQKQNRKIRHAFSYSWRLWSLPEIKDCMEEAGFSSVHFWLREMPDASEMRRTDGFGAGRDIKYEQVKSFQQCDSWNAYIVAVSL

SEQ ID NO: 40075 - DNA, 730 bp, Arabidopsis thaliana
  misc_feature (1)..(730): Ceres Seq. ID no. 12325691
  misc_feature (1)..(730): Ortholog of  Ceres SEQ ID NO 15171239 as cited in SEQ ID NO 52298
aaacttcgaagattttgatattgtaacgatccgccatggaagagaagaagacagaatccgcgactaagaacgttaaaaaggttaacttgttagaccacatcgcaatcaaacacctccttgatgaatccgtctccgatatcgttacgagcagagggtacaaggaggatgtgagattaagcaacgtcaaatttctgttaggagggattataatcgtggttgctcttgttgctcaattctacaacaagaagtttcctgagaacagagactttttgatctgctgcatcggattgtatgtggtgttgactgcggtaatgcagctgattctgtacattaaggagaagaacgctatcttgttcacctatcctcttgagggatcattcaccagcactggtttggtggtatcttccaagttacctagattctctgatcagtacactctaaccatcgacagtgctgatccgcaatcaatctcagctgggaagtcggttcagttcaccaaaagtgtcactcaatggctcacaaaagatggagttcttgtcgagggtttattctggaaagatgttgaagccctagtcaaagagtacacagaagcaggagaaccaaagaagaagagatgatcatctataatgggaaaagtatgttggtccttattagttctaaatgttacattttttttatgactaaaatcgatggtgacttggtttaaaagacgacagagtttttgcctccc

SEQ ID NO: 40076 - protein, 193 aa, Arabidopsis thaliana
  peptide (1)..(193): Ceres Seq. ID no. 12325692
MEEKKTESATKNVKKVNLLDHIAIKHLLDESVSDIVTSRGYKEDVRLSNVKFLLGGIIIVVALVAQFYNKKFPENRDFLICCIGLYVVLTAVMQLILYIKEKNAILFTYPLEGSFTSTGLVVSSKLPRFSDQYTLTIDSADPQSISAGKSVQFTKSVTQWLTKDGVLVEGLFWKDVEALVKEYTEAGEPKKKR

SEQ ID NO: 40077 - protein, 101 aa, Arabidopsis thaliana
  peptide (1)..(101): Ceres Seq. ID no. 12325693
MQLILYIKEKNAILFTYPLEGSFTSTGLVVSSKLPRFSDQYTLTIDSADPQSISAGKSVQFTKSVTQWLTKDGVLVEGLFWKDVEALVKEYTEAGEPKKKR

SEQ ID NO: 40078 - DNA, 6117 bp, Arabidopsis thaliana
  misc_feature (1)..(6117): Ceres Seq. ID no. 12639310
  misc_feature (1)..(6117): Ortholog of  Ceres SEQ ID NO 15174712 as cited in SEQ ID NO 52965
  misc_feature (1)..(6117): Ortholog of  Ceres SEQ ID NO 15175476 as cited in SEQ ID NO 53735
cattcacgaaacagtgttctacggccaatttctctcgctcgctccacactcccaaaacaatattcttcttcttcgatttctcactctctgtttgtcgctaccgatcttatttcccgctatttttgttccggcgccgttctccttaaagtcgctattgtcttcgttgaaggtgatgagtatagttcaaaagcaagaagagatgaatggatgtggtctcaatgttgacaaagtagaagcctttacagtgtcacctcaggaaaaaggaaggaaaaacaagagaaagttagctgatccttctcaaccaaatgcttcttccctcactgaattccctccatatgagttaccttcgttgaaacctcagaaccatttgagcggaaatggatcggttggggaagtttctaatcagctgcaagttgaagtgtctgaatctgtcgaatgggatgacccatttgcctgtcatcttgaagaattgttgtcgtcaaatttgctcacgctcttccttgatacaatgaagcagcttattgatttaggctacaccgatgacgaagttctgaaagctgtatcacgctgtaggctgtactgtggaggcaataatcttttgtcaaacattgtcaataacaccttgagtgctctcaagactggagacgaaggtgctggttcaggagactatgtgtttgaggatttacaacagcttgtttcctatacgttggtagaaatgataagtcttattaaggaggtcaggccgtccctatcaacagttgaagctatgtggaggcttttgatgtgcgacttgaatgtcttgcaagcctttgaagctgaaggcgatggattggtgagttcaagtaaattatctgattcggaatctcttggtgctgaatctaatcctccaaaatctagtgacccagataacccaaagcctccccaatccgatcctcaaagcaatcggaatgagccactcaaatttggaaacttcccaaatacaccgaactccaaaaaaactcagtctagtggaacaacaccaggaaaagaagtatgctcgggtagcactgtttcttgtcaaggcatgagaagtacatcatttactctagtctctgatgaaaaattggtatcttgtcgaaaaggccgtactaaaaaagagatagcaatgcttcggcaaaaatcatgtgtggaaaaaattaggacttacagcaaaggcagtggctataaggcggcaaagtttgcatcagttggcagcttccttttagagaaaagagtcaaatcatcttctgaatttgtgccaagaaattcttcatcaaagataacagcagagattggagtgaaagtttcattagctgaggatagcggctgttttgtaagaaagaacagtaagttggattcacctgtggtagtggtagatgcaaagggctatataactgccttacctgctaggtcggtaaaatctgcttcaaaaaaaaagactggttctgagtctgtaactctgataccatcagcttcagaaaagaagtctgattcttcgataccatcaacttcagaaaagaagtctggttctgagtctgaagagaaggcatctgtgtctgcaaagctagcaccagattactatgctgggatcccatatgatgcagctctgggtatatatgttccccgggataagaaagatgaattgattctaaagcttgttcctcgagtgaatgatctgcagaatgaactgcaggtctggactgactgggctaatcagaaagtaaaagaggcaactggtagactacttaaggaccaaccagagcttaaggcactaaggaaagagagggaagaggcagaacagtataaaaaagagaagcagttattggaagaaaacactaggaaaaggctatctgagatggattttgcgttgaaaaatgcgaccagccagttggaaaaagcattcaatactgctcacaggctcgagctggaacaatctatactgaagaaagagatggaagctgctaagataaaagccgtcgagtctgctgagagctttagagaagcaaaagagagaggggaaagatcactgaaggatattcactcgtgggaagggcaaaaaattatgttgcaggaagagctcaagggtcaaagggaaaaggtgacagtgctacagaaagaagttaccaaagcaaaaaatcgccagaatcaaatcgaggctgctttgaagcaagaaagaacagccaaagggaaactcagtgctcaggcttcattgataaggaaagaaacaaaggaacttgaagcgcttggaaaagtggaagaagagcggatcaaagggaaagcagaaaccgacgtgaaatattacatagataacatcaagagacttgaaagagagatctcagagctgaaacttaaatcagactactcgagaatcattgcactgaagaaaggcagcagtgagtcaaaggcaacaaaaagagagagtcttgggatgccgaaagtgaaaagagaaagagaatgtgtgatgtgtttatctgaagagatgagtgtgattttcttgccttgtgctcaccaagttctttgctttaaatgcaatcagcttcacgagaaagaaggaatgatggattgtccgtcttgtcgtggaacaatccataggaggattcaagctcgtttcgctcgctccggcgtcggcgagatgaagcttcaggtccgagtcgtggaagcgaggaatctaccggctatggatctcaatgggtttagcgacccttacgttagattgcagctgggaaagcaaaggtcacggaccaaagtagtgaagaagaacttgaaccccaaatggactgaagatttcagttttggcgtcgacgatttgaacgacgaactcgtcgtctctgttcttgatgaagataaatacttcaacgatgacttcgttgggcaggttagagtttctgtttcccttgttttcgatgcagagaatcaatctcttggcactgtttggtatcctcttaatccaaagaagaaaggttccaaaaaggattgtggtgagatacttttgaagatatgtttcagtcagaagaactcggttcttgatttgacttctagtggggatcaaacctctgcttcgaggagtcctgacttgagactagaatcacctattgatccctctacttgtgcctctccttctagatcagatgatgcttcatctatcccccagacaacctttgcgggtcgattcactcagatttttcagaagaatgctatcaccgctacacctacacaatccagtagtaggagcattgatgcatctgacctatctgagatctccaaacctgtcttttcccttgagctgtctgaagatgaatcatcttctacttcctttgaggaattattgaaggcaatggagtcgaaagatcagggtagtgaacctcctagtaatctatcaggaggtgtcgttgtggaccagttatttatgatttccccatcagatcttaacattgtgcttttcgcatcggattcaagtttctatgcatcattgactgaactgcaagggaccacggaagttcaaattggaccatggaaagcagaaaatgatggcgagagtgttaagcgtgttgtaagttacctcaaggctgcaaccaaacttattaaggctgtcaaaggcacagaggagcagacatatctcaaagcggacggagaggtttacgcagttttagcaagtgttgccactccagatgtcccattcggaggtaccttcaaagttgaagtgctttactgcatctctcctgggcctgagctgccatctggtgagcagtgttcacgtttggtagtttcatggagattgaattttcttcagagcaccatgatgagaggtttgatagagaatggagctcgacaaggtctaaaagacaacttcgaacagtatgccaatttgttggctcaaagtgtaaagcctgtagattctaaggatattgggctgaacaaggagcaagctctctcttccttgcaagctgagcctcaatcagactggaaattggctgtacagtattttgccaatttcaccgtgttatccactttcttgattggtatttatgtatttgtccacattgtgtttgccatacccagtgcaatccaagggcttgagtttaatggccttgatttaccggattcaattggggagtttgttgttagtggggttctcgttcttcaatgtgaaagagtattgcaactgatttcccgtttcatgcaggcaagaaaacagaaaggcagtgatcatggcatcaaagcgcatggagatggttggttgctaactgttgctctaattgagggggtcgatctagcagctgtagatccaagcgggcattgtgatccgtatattgtatttacttccaatgggaagacaagaaccagctccatcaagttccagaaatctaatcctcagtggaacgaaatatttgaattcgatgcaatggctgatcctccttctgtactgaatgttgaagtttttgatttcgatggaccttttgacgaggctgtttcattggggcatgctgaagtcaactttgtgagatctaatatatctgatttagcggatgtttgggttccacttcaagggaaactagctcaggcttgtcaatccaaacttcacttgaggattttcttggatcatacaggaggtggagatgttgtcagagactatttaaataagatggagaaagaggtgggcaagaagtgttgttgcgcgttcttatctgctgaatggaaatttcagattaatgtgcggtctcctcaaacaaattcagcttttcagaagctctttggtctcccacaagaagaatttctaatcaatgactttacatgtcacttaaagcggaaaatgcctttgcagggtcgtcttttcctgtctgcaagaattgttggcttttatgcaagcatttttggtaacaaaacaaaattctttttcctgtgggaagatatagaggaaattcaagtgcttcctcccactcttgcctcaatggggagtcccattgtcgtcatgactctcagaccaaatagaggactggacgcgaggataggtgcaaagacacatgatgaggaaggcaggcttaagttccatttccactcatttgtgtctttcaatgtggcacaaaagacaataatggctctgtggaaagcaaaatctttgactccagagcagaaagtgcaagctgttgaagaggaatcagagcagaaactccaaagtgaagagagtggtctgttcttgggtgttgatgatgtgcgattctctgaggttttctctttgactctccctgtcccggtaagtttctttatggagttgtttggtggaggtgaagtggatcgtaaggctatggagagagcgggttgccagagctattcatgcagtccatgggagtcagagaaggatgatgtgtatgagaggcagacatactacagagataagcggatatcacgttacagaggagaagtaacaagtacacagcaaaagtccctagtgccagagaagaatgggtggcttgtcgaagaggtcatgaccctccatggagttccactgggtgactattttaatctccatctaagataccaaatggaagaatcaacttcaaaaccaaagacgacatatgtgcgagtatactttgggattgaatggctaaagagcactagacatcagaaaagggtgacgaaaaacatcctagtaaatctgcaagatcgtctgaagatgacatttggattcttggaaaaggaatatagcagcagacaacagcaacaacaagtaacataatatacatacatacatagcctttggtctaaaaatggagggctcgaagcaactcgttccagcttgaaaaacggaggtttgctcttgtatggatgcacacaagtagtcatgtgaagacgagagagtgtgaatggaggtttgctctgctagagcaactttgttgattctttatttttatctgcattcactgcttctttattgcatgatttgtctgtagtgaaaggagcagagttttgtgattatgataatatgctctgctactgcctaaaactcttatagaaactgatgatgctctctagcattcttataaaattgctagatgagagacattggttttgttgatgaaagaaactacttgttttagattt

SEQ ID NO: 40079 - protein, 1916 aa, Arabidopsis thaliana
  peptide (1)..(1916): Ceres Seq. ID no. 12639311
IHETVFYGQFLSLAPHSQNNILLLRFLTLCLSLPILFPAIFVPAPFSLKSLLSSLKVMSIVQKQEEMNGCGLNVDKVEAFTVSPQEKGRKNKRKLADPSQPNASSLTEFPPYELPSLKPQNHLSGNGSVGEVSNQLQVEVSESVEWDDPFACHLEELLSSNLLTLFLDTMKQLIDLGYTDDEVLKAVSRCRLYCGGNNLLSNIVNNTLSALKTGDEGAGSGDYVFEDLQQLVSYTLVEMISLIKEVRPSLSTVEAMWRLLMCDLNVLQAFEAEGDGLVSSSKLSDSESLGAESNPPKSSDPDNPKPPQSDPQSNRNEPLKFGNFPNTPNSKKTQSSGTTPGKEVCSGSTVSCQGMRSTSFTLVSDEKLVSCRKGRTKKEIAMLRQKSCVEKIRTYSKGSGYKAAKFASVGSFLLEKRVKSSSEFVPRNSSSKITAEIGVKVSLAEDSGCFVRKNSKLDSPVVVVDAKGYITALPARSVKSASKKKTGSESVTLIPSASEKKSDSSIPSTSEKKSGSESEEKASVSAKLAPDYYAGIPYDAALGIYVPRDKKDELILKLVPRVNDLQNELQVWTDWANQKVKEATGRLLKDQPELKALRKEREEAEQYKKEKQLLEENTRKRLSEMDFALKNATSQLEKAFNTAHRLELEQSILKKEMEAAKIKAVESAESFREAKERGERSLKDIHSWEGQKIMLQEELKGQREKVTVLQKEVTKAKNRQNQIEAALKQERTAKGKLSAQASLIRKETKELEALGKVEEERIKGKAETDVKYYIDNIKRLEREISELKLKSDYSRIIALKKGSSESKATKRESLGMPKVKRERECVMCLSEEMSVIFLPCAHQVLCFKCNQLHEKEGMMDCPSCRGTIHRRIQARFARSGVGEMKLQVRVVEARNLPAMDLNGFSDPYVRLQLGKQRSRTKVVKKNLNPKWTEDFSFGVDDLNDELVVSVLDEDKYFNDDFVGQVRVSVSLVFDAENQSLGTVWYPLNPKKKGSKKDCGEILLKICFSQKNSVLDLTSSGDQTSASRSPDLRLESPIDPSTCASPSRSDDASSIPQTTFAGRFTQIFQKNAITATPTQSSSRSIDASDLSEISKPVFSLELSEDESSSTSFEELLKAMESKDQGSEPPSNLSGGVVVDQLFMISPSDLNIVLFASDSSFYASLTELQGTTEVQIGPWKAENDGESVKRVVSYLKAATKLIKAVKGTEEQTYLKADGEVYAVLASVATPDVPFGGTFKVEVLYCISPGPELPSGEQCSRLVVSWRLNFLQSTMMRGLIENGARQGLKDNFEQYANLLAQSVKPVDSKDIGLNKEQALSSLQAEPQSDWKLAVQYFANFTVLSTFLIGIYVFVHIVFAIPSAIQGLEFNGLDLPDSIGEFVVSGVLVLQCERVLQLISRFMQARKQKGSDHGIKAHGDGWLLTVALIEGVDLAAVDPSGHCDPYIVFTSNGKTRTSSIKFQKSNPQWNEIFEFDAMADPPSVLNVEVFDFDGPFDEAVSLGHAEVNFVRSNISDLADVWVPLQGKLAQACQSKLHLRIFLDHTGGGDVVRDYLNKMEKEVGKKCCCAFLSAEWKFQINVRSPQTNSAFQKLFGLPQEEFLINDFTCHLKRKMPLQGRLFLSARIVGFYASIFGNKTKFFFLWEDIEEIQVLPPTLASMGSPIVVMTLRPNRGLDARIGAKTHDEEGRLKFHFHSFVSFNVAQKTIMALWKAKSLTPEQKVQAVEEESEQKLQSEESGLFLGVDDVRFSEVFSLTLPVPVSFFMELFGGGEVDRKAMERAGCQSYSCSPWESEKDDVYERQTYYRDKRISRYRGEVTSTQQKSLVPEKNGWLVEEVMTLHGVPLGDYFNLHLRYQMEESTSKPKTTYVRVYFGIEWLKSTRHQKRVTKNILVNLQDRLKMTFGFLEKEYSSRQQQQQVT

SEQ ID NO: 40080 - protein, 1859 aa, Arabidopsis thaliana
  peptide (1)..(1859): Ceres Seq. ID no. 12639312
MSIVQKQEEMNGCGLNVDKVEAFTVSPQEKGRKNKRKLADPSQPNASSLTEFPPYELPSLKPQNHLSGNGSVGEVSNQLQVEVSESVEWDDPFACHLEELLSSNLLTLFLDTMKQLIDLGYTDDEVLKAVSRCRLYCGGNNLLSNIVNNTLSALKTGDEGAGSGDYVFEDLQQLVSYTLVEMISLIKEVRPSLSTVEAMWRLLMCDLNVLQAFEAEGDGLVSSSKLSDSESLGAESNPPKSSDPDNPKPPQSDPQSNRNEPLKFGNFPNTPNSKKTQSSGTTPGKEVCSGSTVSCQGMRSTSFTLVSDEKLVSCRKGRTKKEIAMLRQKSCVEKIRTYSKGSGYKAAKFASVGSFLLEKRVKSSSEFVPRNSSSKITAEIGVKVSLAEDSGCFVRKNSKLDSPVVVVDAKGYITALPARSVKSASKKKTGSESVTLIPSASEKKSDSSIPSTSEKKSGSESEEKASVSAKLAPDYYAGIPYDAALGIYVPRDKKDELILKLVPRVNDLQNELQVWTDWANQKVKEATGRLLKDQPELKALRKEREEAEQYKKEKQLLEENTRKRLSEMDFALKNATSQLEKAFNTAHRLELEQSILKKEMEAAKIKAVESAESFREAKERGERSLKDIHSWEGQKIMLQEELKGQREKVTVLQKEVTKAKNRQNQIEAALKQERTAKGKLSAQASLIRKETKELEALGKVEEERIKGKAETDVKYYIDNIKRLEREISELKLKSDYSRIIALKKGSSESKATKRESLGMPKVKRERECVMCLSEEMSVIFLPCAHQVLCFKCNQLHEKEGMMDCPSCRGTIHRRIQARFARSGVGEMKLQVRVVEARNLPAMDLNGFSDPYVRLQLGKQRSRTKVVKKNLNPKWTEDFSFGVDDLNDELVVSVLDEDKYFNDDFVGQVRVSVSLVFDAENQSLGTVWYPLNPKKKGSKKDCGEILLKICFSQKNSVLDLTSSGDQTSASRSPDLRLESPIDPSTCASPSRSDDASSIPQTTFAGRFTQIFQKNAITATPTQSSSRSIDASDLSEISKPVFSLELSEDESSSTSFEELLKAMESKDQGSEPPSNLSGGVVVDQLFMISPSDLNIVLFASDSSFYASLTELQGTTEVQIGPWKAENDGESVKRVVSYLKAATKLIKAVKGTEEQTYLKADGEVYAVLASVATPDVPFGGTFKVEVLYCISPGPELPSGEQCSRLVVSWRLNFLQSTMMRGLIENGARQGLKDNFEQYANLLAQSVKPVDSKDIGLNKEQALSSLQAEPQSDWKLAVQYFANFTVLSTFLIGIYVFVHIVFAIPSAIQGLEFNGLDLPDSIGEFVVSGVLVLQCERVLQLISRFMQARKQKGSDHGIKAHGDGWLLTVALIEGVDLAAVDPSGHCDPYIVFTSNGKTRTSSIKFQKSNPQWNEIFEFDAMADPPSVLNVEVFDFDGPFDEAVSLGHAEVNFVRSNISDLADVWVPLQGKLAQACQSKLHLRIFLDHTGGGDVVRDYLNKMEKEVGKKCCCAFLSAEWKFQINVRSPQTNSAFQKLFGLPQEEFLINDFTCHLKRKMPLQGRLFLSARIVGFYASIFGNKTKFFFLWEDIEEIQVLPPTLASMGSPIVVMTLRPNRGLDARIGAKTHDEEGRLKFHFHSFVSFNVAQKTIMALWKAKSLTPEQKVQAVEEESEQKLQSEESGLFLGVDDVRFSEVFSLTLPVPVSFFMELFGGGEVDRKAMERAGCQSYSCSPWESEKDDVYERQTYYRDKRISRYRGEVTSTQQKSLVPEKNGWLVEEVMTLHGVPLGDYFNLHLRYQMEESTSKPKTTYVRVYFGIEWLKSTRHQKRVTKNILVNLQDRLKMTFGFLEKEYSSRQQQQQVT

SEQ ID NO: 40081 - protein, 1850 aa, Arabidopsis thaliana
  peptide (1)..(1850): Ceres Seq. ID no. 12639313
MNGCGLNVDKVEAFTVSPQEKGRKNKRKLADPSQPNASSLTEFPPYELPSLKPQNHLSGNGSVGEVSNQLQVEVSESVEWDDPFACHLEELLSSNLLTLFLDTMKQLIDLGYTDDEVLKAVSRCRLYCGGNNLLSNIVNNTLSALKTGDEGAGSGDYVFEDLQQLVSYTLVEMISLIKEVRPSLSTVEAMWRLLMCDLNVLQAFEAEGDGLVSSSKLSDSESLGAESNPPKSSDPDNPKPPQSDPQSNRNEPLKFGNFPNTPNSKKTQSSGTTPGKEVCSGSTVSCQGMRSTSFTLVSDEKLVSCRKGRTKKEIAMLRQKSCVEKIRTYSKGSGYKAAKFASVGSFLLEKRVKSSSEFVPRNSSSKITAEIGVKVSLAEDSGCFVRKNSKLDSPVVVVDAKGYITALPARSVKSASKKKTGSESVTLIPSASEKKSDSSIPSTSEKKSGSESEEKASVSAKLAPDYYAGIPYDAALGIYVPRDKKDELILKLVPRVNDLQNELQVWTDWANQKVKEATGRLLKDQPELKALRKEREEAEQYKKEKQLLEENTRKRLSEMDFALKNATSQLEKAFNTAHRLELEQSILKKEMEAAKIKAVESAESFREAKERGERSLKDIHSWEGQKIMLQEELKGQREKVTVLQKEVTKAKNRQNQIEAALKQERTAKGKLSAQASLIRKETKELEALGKVEEERIKGKAETDVKYYIDNIKRLEREISELKLKSDYSRIIALKKGSSESKATKRESLGMPKVKRERECVMCLSEEMSVIFLPCAHQVLCFKCNQLHEKEGMMDCPSCRGTIHRRIQARFARSGVGEMKLQVRVVEARNLPAMDLNGFSDPYVRLQLGKQRSRTKVVKKNLNPKWTEDFSFGVDDLNDELVVSVLDEDKYFNDDFVGQVRVSVSLVFDAENQSLGTVWYPLNPKKKGSKKDCGEILLKICFSQKNSVLDLTSSGDQTSASRSPDLRLESPIDPSTCASPSRSDDASSIPQTTFAGRFTQIFQKNAITATPTQSSSRSIDASDLSEISKPVFSLELSEDESSSTSFEELLKAMESKDQGSEPPSNLSGGVVVDQLFMISPSDLNIVLFASDSSFYASLTELQGTTEVQIGPWKAENDGESVKRVVSYLKAATKLIKAVKGTEEQTYLKADGEVYAVLASVATPDVPFGGTFKVEVLYCISPGPELPSGEQCSRLVVSWRLNFLQSTMMRGLIENGARQGLKDNFEQYANLLAQSVKPVDSKDIGLNKEQALSSLQAEPQSDWKLAVQYFANFTVLSTFLIGIYVFVHIVFAIPSAIQGLEFNGLDLPDSIGEFVVSGVLVLQCERVLQLISRFMQARKQKGSDHGIKAHGDGWLLTVALIEGVDLAAVDPSGHCDPYIVFTSNGKTRTSSIKFQKSNPQWNEIFEFDAMADPPSVLNVEVFDFDGPFDEAVSLGHAEVNFVRSNISDLADVWVPLQGKLAQACQSKLHLRIFLDHTGGGDVVRDYLNKMEKEVGKKCCCAFLSAEWKFQINVRSPQTNSAFQKLFGLPQEEFLINDFTCHLKRKMPLQGRLFLSARIVGFYASIFGNKTKFFFLWEDIEEIQVLPPTLASMGSPIVVMTLRPNRGLDARIGAKTHDEEGRLKFHFHSFVSFNVAQKTIMALWKAKSLTPEQKVQAVEEESEQKLQSEESGLFLGVDDVRFSEVFSLTLPVPVSFFMELFGGGEVDRKAMERAGCQSYSCSPWESEKDDVYERQTYYRDKRISRYRGEVTSTQQKSLVPEKNGWLVEEVMTLHGVPLGDYFNLHLRYQMEESTSKPKTTYVRVYFGIEWLKSTRHQKRVTKNILVNLQDRLKMTFGFLEKEYSSRQQQQQVT

SEQ ID NO: 40082 - DNA, 1329 bp, Arabidopsis thaliana
  misc_feature (1)..(1329): Ceres Seq. ID no. 12579722
  misc_feature (1)..(1329): Ortholog of  Ceres SEQ ID NO 15168378 as cited in SEQ ID NO 59129
  misc_feature (1)..(1329): Ortholog of  Ceres SEQ ID NO 13584744 as cited in SEQ ID NO 69137
caaaataatccttttgctaaatgggatacaagtaagagtagtattgatgctccgcagctaatgggagcaaaagcgtttacttttgaggagctgaagaaatgcactgacaacttttcagaggcaaatgatgttggcggtggaggttacggcaaggtttatagagggattcttcctaatgggcaactcatagcaatcaaaagggctcaacaaggatctttgcaaggagggttggagttcaaaactgagattgagcttctctcaagggtccatcataagaatgttgtcagactcttgggcttctgctttgaccggaatgaacaaatgctcgtatatgagtacatttcaaacgggtctcttaaagacagtctgtcagggaagagtgggattcgattggattggaccagaaggcttaaaatagcacttggttcaggcaagggcttggcttatcttcatgaacttgctgatcctccaattatacatagagacatcaaatcaaataacatattacttgatgaaaatctaaccgcaaaggttgccgacttcggtctctccaaacttgtgggagaccctgagaaaactcatgtcacaacacaagtcaaaggaaccatgggctacttggatccagagtactacatgacgaatcaattaacggagaagagcgatgtgtatgggtttggtgtggttttactcgagctattaaccggtagaagtccgatagagagaggcaaatatgtggtgagagaggtgaagacaaagatgaataaatctcggagtttgtatgacctgcaggagttgttggacacaacgatcatagcaagcagtgggaatctaaaagggttcgagaagtatgtagacttggctttgagatgtgtggaggaggaaggagttaataggccatcaatgggtgaggttgtgaaagagattgagaacataatgcagcttgcgggattaaatcctaactcagattcagcaacgagttcaagaacgtatgaggacgcaatcaaaggatctggtgatccttatggcagtgaatcgtttcagtacagtgggaattttccagcttcaaagcttgagccccaatgattgattatgtttctttttgttattttgttatttcgtaagtgacttcatacttgaaatgccttgtgaatgtggagtagcatgattctgtttgatatgtggtcgctgattataaagcagatgaatgaagagccaaacgcagaatcaaaaaccaccagatctttggcaatgtcgacaccagttttcaaacataagaaaagtaatcaagctcaatgtatgatgaataattgaatatattaattcttgttg

SEQ ID NO: 40083 - protein, 360 aa, Arabidopsis thaliana
  peptide (1)..(360): Ceres Seq. ID no. 12579723
QNNPFAKWDTSKSSIDAPQLMGAKAFTFEELKKCTDNFSEANDVGGGGYGKVYRGILPNGQLIAIKRAQQGSLQGGLEFKTEIELLSRVHHKNVVRLLGFCFDRNEQMLVYEYISNGSLKDSLSGKSGIRLDWTRRLKIALGSGKGLAYLHELADPPIIHRDIKSNNILLDENLTAKVADFGLSKLVGDPEKTHVTTQVKGTMGYLDPEYYMTNQLTEKSDVYGFGVVLLELLTGRSPIERGKYVVREVKTKMNKSRSLYDLQELLDTTIIASSGNLKGFEKYVDLALRCVEEEGVNRPSMGEVVKEIENIMQLAGLNPNSDSATSSRTYEDAIKGSGDPYGSESFQYSGNFPASKLEPQ

SEQ ID NO: 40084 - protein, 340 aa, Arabidopsis thaliana
  peptide (1)..(340): Ceres Seq. ID no. 12579724
MGAKAFTFEELKKCTDNFSEANDVGGGGYGKVYRGILPNGQLIAIKRAQQGSLQGGLEFKTEIELLSRVHHKNVVRLLGFCFDRNEQMLVYEYISNGSLKDSLSGKSGIRLDWTRRLKIALGSGKGLAYLHELADPPIIHRDIKSNNILLDENLTAKVADFGLSKLVGDPEKTHVTTQVKGTMGYLDPEYYMTNQLTEKSDVYGFGVVLLELLTGRSPIERGKYVVREVKTKMNKSRSLYDLQELLDTTIIASSGNLKGFEKYVDLALRCVEEEGVNRPSMGEVVKEIENIMQLAGLNPNSDSATSSRTYEDAIKGSGDPYGSESFQYSGNFPASKLEPQ

SEQ ID NO: 40085 - protein, 253 aa, Arabidopsis thaliana
  peptide (1)..(253): Ceres Seq. ID no. 12579725
MLVYEYISNGSLKDSLSGKSGIRLDWTRRLKIALGSGKGLAYLHELADPPIIHRDIKSNNILLDENLTAKVADFGLSKLVGDPEKTHVTTQVKGTMGYLDPEYYMTNQLTEKSDVYGFGVVLLELLTGRSPIERGKYVVREVKTKMNKSRSLYDLQELLDTTIIASSGNLKGFEKYVDLALRCVEEEGVNRPSMGEVVKEIENIMQLAGLNPNSDSATSSRTYEDAIKGSGDPYGSESFQYSGNFPASKLEPQ

SEQ ID NO: 40086 - DNA, 1711 bp, Arabidopsis thaliana
  misc_feature (1)..(1711): Ceres Seq. ID no. 13575064
  misc_feature (1)..(1711): Ortholog of  Ceres SEQ ID NO 13600071 as cited in SEQ ID NO 0
aacaaatttgacgtttttgttcttcgaaattcaaattcacccagaaaaaatctcaatccgcgatggttgaagaatcagcttctgcgtcggaagcttcggtgatacaaaccctaaccgagccggcgacggagattgcgcaaaccctagaacctaacctagcctcaatcgaagccaccgtcgaatcggttgttcagggaggcactgaatcgacttgtaacaacgacgctaataacaacaacgccgctgacagtgctgctactgaggtttgtgatgaggagcgtgagaagacgcttgagttcgctgaggaattgacggagaaaggctctgtgtttttgaaagagaacgatttcgctgaagccgtcgattgcttcagccgtgctctcgaaatcagggttgcacattatggtgaacttgatgctgagtgtataaacgcatactatcgatatggattagctctcctggcaaaggctcaagctgaagctgatccacttgggaacatgcctaagaaagaaggtgaagttcagcaagagtccagcaatggtgaatcgctggctccttctgttgtttcaggtgacccagagagacaagggagttcaagtgggcaagaaggttctggtggtaaagaccaaggagaggatggtgaagattgtcaagatgatgacctatctgatgctgatggtgatgctgatgaagatgagtctgatttggatatggcctggaaaatgctggacattgctagggttattactgacaaacagtctactgagacaatggaaaaagtggatatactctgttcgcttgctgaagtgtccttggaaagagaggacattgagtcttccctgtctgactacaagaatgcattatccatcttagagagactggttgagcccgacagtcgacgcacagctgaattaaacttccgcatctgcatttgtcttgagactggatgtcagcctaaggaagcaataccatattgtcaaaaagctttgttaatatgcaaagctcggatggagaggctcagtaatgaaatcaaaggtgcatctggttcagcaacttcctcaaccgtctctgaaatagatgaaggcatccaacaatcatccaatgttccttacattgataaatctgcttcagacaaagaagttgagatcggagacttagctggtctcgctgaagatctagaaaagaagcttgaggatttaaaacaacaagcagagaacccaaagcaggttcttgctgagctaatgggcatggtatcagctaagccaaatgccagtgacaaggttgttcctgctgctgctgaaatgagctcttctaggatgggaactgtgaacaccaatttcgggaaagatttagagtcgcctacagtctcaaccgctcataccggtgcagcaggaggaggagcagcatcaggtgttactcacttgggtgttgttggaagaggagtgaagagagttttgatgaatacaacctcgattgaatcaagtgcatcaaagaaaccagctctagagttttcagacaaagcagatggcaactcctcttgaaaccggaaaaaggtataaaaattcctgttactagtgaagtatctaacctaagaaaactgagaaaaacatttggtatcttcctcatgaatcttccaagactagattttcaggttcatgttttgtaatggagtccgtacttgctacttttttaaatcgctgagatatttttt

SEQ ID NO: 40087 - protein, 492 aa, Arabidopsis thaliana
  peptide (1)..(492): Ceres Seq. ID no. 13575065
MVEESASASEASVIQTLTEPATEIAQTLEPNLASIEATVESVVQGGTESTCNNDANNNNAADSAATEVCDEEREKTLEFAEELTEKGSVFLKENDFAEAVDCFSRALEIRVAHYGELDAECINAYYRYGLALLAKAQAEADPLGNMPKKEGEVQQESSNGESLAPSVVSGDPERQGSSSGQEGSGGKDQGEDGEDCQDDDLSDADGDADEDESDLDMAWKMLDIARVITDKQSTETMEKVDILCSLAEVSLEREDIESSLSDYKNALSILERLVEPDSRRTAELNFRICICLETGCQPKEAIPYCQKALLICKARMERLSNEIKGASGSATSSTVSEIDEGIQQSSNVPYIDKSASDKEVEIGDLAGLAEDLEKKLEDLKQQAENPKQVLAELMGMVSAKPNASDKVVPAAAEMSSSRMGTVNTNFGKDLESPTVSTAHTGAAGGGAASGVTHLGVVGRGVKRVLMNTTSIESSASKKPALEFSDKADGNSS

SEQ ID NO: 40088 - protein, 347 aa, Arabidopsis thaliana
  peptide (1)..(347): Ceres Seq. ID no. 13575066
MPKKEGEVQQESSNGESLAPSVVSGDPERQGSSSGQEGSGGKDQGEDGEDCQDDDLSDADGDADEDESDLDMAWKMLDIARVITDKQSTETMEKVDILCSLAEVSLEREDIESSLSDYKNALSILERLVEPDSRRTAELNFRICICLETGCQPKEAIPYCQKALLICKARMERLSNEIKGASGSATSSTVSEIDEGIQQSSNVPYIDKSASDKEVEIGDLAGLAEDLEKKLEDLKQQAENPKQVLAELMGMVSAKPNASDKVVPAAAEMSSSRMGTVNTNFGKDLESPTVSTAHTGAAGGGAASGVTHLGVVGRGVKRVLMNTTSIESSASKKPALEFSDKADGNSS

SEQ ID NO: 40089 - protein, 276 aa, Arabidopsis thaliana
  peptide (1)..(276): Ceres Seq. ID no. 13575067
MAWKMLDIARVITDKQSTETMEKVDILCSLAEVSLEREDIESSLSDYKNALSILERLVEPDSRRTAELNFRICICLETGCQPKEAIPYCQKALLICKARMERLSNEIKGASGSATSSTVSEIDEGIQQSSNVPYIDKSASDKEVEIGDLAGLAEDLEKKLEDLKQQAENPKQVLAELMGMVSAKPNASDKVVPAAAEMSSSRMGTVNTNFGKDLESPTVSTAHTGAAGGGAASGVTHLGVVGRGVKRVLMNTTSIESSASKKPALEFSDKADGNSS

SEQ ID NO: 40090 - DNA, 1369 bp, Arabidopsis thaliana; identical to SEQ ID NO: 37557
  misc_feature (1)..(1369): Ceres Seq. ID no. 12489536
  misc_feature (1)..(1369): Ortholog of  Ceres SEQ ID NO 13598582 as cited in SEQ ID NO 65294
  misc_feature (1)..(1369): Ortholog of  Ceres SEQ ID NO 15176114 as cited in SEQ ID NO 67627

SEQ ID NO: 40091 - protein, 383 aa, Arabidopsis thaliana; identical to SEQ ID NO: 37558
  peptide (1)..(383): Ceres Seq. ID no. 12489537

SEQ ID NO: 40092 - protein, 360 aa, Arabidopsis thaliana; identical to SEQ ID NO: 37559
  peptide (1)..(360): Ceres Seq. ID no. 12489538

SEQ ID NO: 40093 - protein, 268 aa, Arabidopsis thaliana; identical to SEQ ID NO: 37560
  peptide (1)..(268): Ceres Seq. ID no. 12489539

SEQ ID NO: 40094 - DNA, 1881 bp, Arabidopsis thaliana
  misc_feature (1)..(1881): Ceres Seq. ID no. 12330774
  misc_feature (1)..(1881): Ortholog of  Ceres SEQ ID NO 13532807 as cited in SEQ ID NO 53012
  misc_feature (1)..(1881): Ortholog of  Ceres SEQ ID NO 13663060 as cited in SEQ ID NO 60964
  misc_feature (1)..(1881): Ortholog of  Ceres SEQ ID NO 13500573 as cited in SEQ ID NO 67431
  misc_feature (1)..(1881): Ortholog of  Ceres SEQ ID NO 13656501 as cited in SEQ ID NO 69206
aactgcattagggtttctagaaggaattatattctcatggatcctcataaaaaggttgcactggagactgagttctttacagaatacggtgaagctagccgataccaaatccaagaagttatagggaaaggaagttacggtgttgtggcatctgcaatcgacacacattcaggcgaaaaggttgccattaagaaaatcaatgatgtgtttgagcacgtctctgatgcaacgcggattctaagagagatcaagcttctcaggttgctccgccatcctgatatagtggagataaagcatgtaatgcttcctccttcacgccgtgagttcagagacatttatgttgttttcgagttgatggaatcagatcttcaccaagttatcaaggcgaacgatgatcttacacctgagcactaccagtttttcctctaccagcttcttcgtggtctgaagttcatacacacagctaatgtgtttcatcgtgatttgaagcctaaaaatattctagccaactctgattgcaagttgaagatttgcgactttgggcttgctcgagtgtcctttaatgatgcaccttcggctatattctggactgactatgttgctacaagatggtaccgtgcgccagaactttgtggctctttcttctccaaatatactcctgccattgatatatggagcataggatgcatatttgcagaaatgctcactgggaagccattgtttcctgggaagaatggtgcaccaattggatattatgactgatttgcttggtactcctcctcccgaagctattgcaaggattcgtaatgaaaaggcgaggagatatctcggcaatatgaggagaaaaccgccagttccattcactcacaaatttcctcatgtagacccattggcccttcgcttactgcaccgtcttcttgcatttgatcccaaagaccgtccctcagctgaagaggcactggcagatccttacttctatggtctggcaaacgttgatcgggaaccatctactcaaccgattccgaaactcgagtttgagtttgaaagaaggaagataacaaaagaagatgtgagagaattgatctacagagagatattagagtatcatcctcagatgctgcaagaatatcttcgaggtggagaacagactagcttcatgtacccaagtggtgttgatcgctttaagagacaatttgctcatcttgaggaaaattacggtaagggtgagaaaggctcacctcttcaacgccaacacgcttccttgcctagagagcgagtccctgctcctaagaaagagaatggatcacataatcacgatatcgagaacagatccatagcgtctttagtcacgaccctcgaaagccctccaacgtcacaacacgaggggtcagactacaggaatgggacgagccagacgggttacagcgctcgcagcttgctgaaaagtgccagcatcagtgcatctaaatgcattggcatgaaaccaagaaacaagtccgagtacggggaatcaaacaatgatacggttgatgctctgtctcaaaaggtcgcggctctccacacttgacttgtttcagagattgaggattgaaacttgttgctaacagtagacggctgattctacaagtcttgtacacatctctcagagaagacgaagaagaagtctgatcttgatagagatattgagagacatgactcatgagctatgaacaaaacaacttaaccttcattggtcttcaatttgtccatcaagtcgagttgtattaaaaatggatggagaatataattaaagaagaattgtgttaacccctggatttatgcctgacaagtatttgactttatcagacattataaattatagttaaagtgtgtgttttctcc

SEQ ID NO: 40095 - protein, 277 aa, Arabidopsis thaliana
  peptide (1)..(277): Ceres Seq. ID no. 12330775
MVHQLDIMTDLLGTPPPEAIARIRNEKARRYLGNMRRKPPVPFTHKFPHVDPLALRLLHRLLAFDPKDRPSAEEALADPYFYGLANVDREPSTQPIPKLEFEFERRKITKEDVRELIYREILEYHPQMLQEYLRGGEQTSFMYPSGVDRFKRQFAHLEENYGKGEKGSPLQRQHASLPRERVPAPKKENGSHNHDIENRSIASLVTTLESPPTSQHEGSDYRNGTSQTGYSARSLLKSASISASKCIGMKPRNKSEYGESNNDTVDALSQKVAALHT

SEQ ID NO: 40096 - protein, 270 aa, Arabidopsis thaliana
  peptide (1)..(270): Ceres Seq. ID no. 12330776
MTDLLGTPPPEAIARIRNEKARRYLGNMRRKPPVPFTHKFPHVDPLALRLLHRLLAFDPKDRPSAEEALADPYFYGLANVDREPSTQPIPKLEFEFERRKITKEDVRELIYREILEYHPQMLQEYLRGGEQTSFMYPSGVDRFKRQFAHLEENYGKGEKGSPLQRQHASLPRERVPAPKKENGSHNHDIENRSIASLVTTLESPPTSQHEGSDYRNGTSQTGYSARSLLKSASISASKCIGMKPRNKSEYGESNNDTVDALSQKVAALHT

SEQ ID NO: 40097 - protein, 253 aa, Arabidopsis thaliana
  peptide (1)..(253): Ceres Seq. ID no. 12330777
NCIRVSRRNYILMDPHKKVALETEFFTEYGEASRYQIQEVIGKGSYGVVASAIDTHSGEKVAIKKINDVFEHVSDATRILREIKLLRLLRHPDIVEIKHVMLPPSRREFRDIYVVFELMESDLHQVIKANDDLTPEHYQFFLYQLLRGLKFIHTANVFHRDLKPKNILANSDCKLKICDFGLARVSFNDAPSAIFWTDYVATRWYRAPELCGSFFSKYTPAIDIWSIGCIFAEMLTGKPLFPGKNGAPIGYYD

SEQ ID NO: 40098 - DNA, 1489 bp, Arabidopsis thaliana
  misc_feature (1)..(1489): Ceres Seq. ID no. 13494078
  misc_feature (1)..(1489): Ortholog of  Ceres SEQ ID NO 15171366 as cited in SEQ ID NO 51578
  misc_feature (1)..(1489): Ortholog of  Ceres SEQ ID NO 14306949 as cited in SEQ ID NO 54919
  misc_feature (1)..(1489): Ortholog of  Ceres SEQ ID NO 14308536 as cited in SEQ ID NO 55469
  misc_feature (1)..(1489): Ortholog of  Ceres SEQ ID NO 14314909 as cited in SEQ ID NO 58002
ccccctttttcactctcttcatttattcttcccctcatcatcatcatcatcttcttctttaaccaaaaacacaacttacaagaaaactgttgaatctttgtatttatttacatctcctttgacctttaataagaatctgagtggttggtctctgatttgatgagatgactgttgagctgatgatgagcagctacagcggcggcggaggaggaggtgatggttttcctgcaatcgccgcggcggcgaaaatggaagataccgctttgagagaagctgcttctgcagggattcacggtgtggaggagtttcttaaactgatcggtcaaagtcaacaaccaacggagaagagtcagacggagataaccgcggtgactgacgtcgccgttaacagcttcaagaaggtcatttctctactcggtagatctagaaccggacacgctagattcagacgagctcccgcgtcaacgcaaacgccgtttaagcaaacgccggtggttgaggaggaggtggaggtggaggagaagaagccagaaacaagctccgtgttaacaaaacagaaaacagagcaatatcacggtggtggatctgcgtttagagtttattgtccaacaccaattcatcgtcgtcctcctctatcacacaataacaacaacaatcagaatcaaacaaagaacggttcgtcttcttcatctcctccgatgctcgcaaacggagcaccgtcaacgataaactttgcgccgtcaccaccagtctcagcgacgaactcattcatgtcttctcatagatgtgacaccgatagtactcacatgtcatcaggattcgagttcactaacccatctcagctctctggttcgagaggtaaacctcctttatcatcagcttcgttgaagagaagatgtaattcatctccctcaagccgttgccattgctccaagaaaaggaaatcaagagtaaaaagagtgattagagttccagcagtaagtagcaaaatggctgatataccatcagatgagttttcatggagaaaatatggtcaaaaaccaatcaaaggctctcctcatcctcggggatattacaagtgcagcagtgtaagaggttgtccggcgcgtaagcatgtggagcgtgcactagatgatgcgatgatgctaatcgtgacgtacgaaggagaccacaaccatgctttggttctcgagacgacgacgatgaatcatgacaaaactctttagtttctcgagtttgaggggaactgtctgtgtgtgaccactatccagattagtcaacgacagagtgggcccgcactgcacttttttattcttttctttttgaaaagcttttgctttatctttctttttgattggaggaaatagagggaggggagataaagacgagagaggaacgttgtggatcttgatggaagttgaatcatgtgaatgtccttttctgtttatttatttctaggatattatatatttagtgcactatttttgtc

SEQ ID NO: 40099 - protein, 353 aa, Arabidopsis thaliana
  peptide (1)..(353): Ceres Seq. ID no. 13494079
MTVELMMSSYSGGGGGGDGFPAIAAAAKMEDTALREAASAGIHGVEEFLKLIGQSQQPTEKSQTEITAVTDVAVNSFKKVISLLGRSRTGHARFRRAPASTQTPFKQTPVVEEEVEVEEKKPETSSVLTKQKTEQYHGGGSAFRVYCPTPIHRRPPLSHNNNNNQNQTKNGSSSSSPPMLANGAPSTINFAPSPPVSATNSFMSSHRCDTDSTHMSSGFEFTNPSQLSGSRGKPPLSSASLKRRCNSSPSSRCHCSKKRKSRVKRVIRVPAVSSKMADIPSDEFSWRKYGQKPIKGSPHPRGYYKCSSVRGCPARKHVERALDDAMMLIVTYEGDHNHALVLETTTMNHDKTL

SEQ ID NO: 40100 - protein, 348 aa, Arabidopsis thaliana
  peptide (1)..(348): Ceres Seq. ID no. 13494080
MMSSYSGGGGGGDGFPAIAAAAKMEDTALREAASAGIHGVEEFLKLIGQSQQPTEKSQTEITAVTDVAVNSFKKVISLLGRSRTGHARFRRAPASTQTPFKQTPVVEEEVEVEEKKPETSSVLTKQKTEQYHGGGSAFRVYCPTPIHRRPPLSHNNNNNQNQTKNGSSSSSPPMLANGAPSTINFAPSPPVSATNSFMSSHRCDTDSTHMSSGFEFTNPSQLSGSRGKPPLSSASLKRRCNSSPSSRCHCSKKRKSRVKRVIRVPAVSSKMADIPSDEFSWRKYGQKPIKGSPHPRGYYKCSSVRGCPARKHVERALDDAMMLIVTYEGDHNHALVLETTTMNHDKTL

SEQ ID NO: 40101 - protein, 347 aa, Arabidopsis thaliana
  peptide (1)..(347): Ceres Seq. ID no. 13494081
MSSYSGGGGGGDGFPAIAAAAKMEDTALREAASAGIHGVEEFLKLIGQSQQPTEKSQTEITAVTDVAVNSFKKVISLLGRSRTGHARFRRAPASTQTPFKQTPVVEEEVEVEEKKPETSSVLTKQKTEQYHGGGSAFRVYCPTPIHRRPPLSHNNNNNQNQTKNGSSSSSPPMLANGAPSTINFAPSPPVSATNSFMSSHRCDTDSTHMSSGFEFTNPSQLSGSRGKPPLSSASLKRRCNSSPSSRCHCSKKRKSRVKRVIRVPAVSSKMADIPSDEFSWRKYGQKPIKGSPHPRGYYKCSSVRGCPARKHVERALDDAMMLIVTYEGDHNHALVLETTTMNHDKTL

SEQ ID NO: 40102 - DNA, 1428 bp, Arabidopsis thaliana
  misc_feature (1)..(1428): Ceres Seq. ID no. 13575068
  misc_feature (1)..(1428): Ortholog of  Ceres SEQ ID NO 13596585 as cited in SEQ ID NO 62424
  misc_feature (1)..(1428): Ortholog of  Ceres SEQ ID NO 15225240 as cited in SEQ ID NO 66495
ctaaattgctcaattctctcggccacaggtaagcttcttcgacttcactctttgacccaatactactttcctcaccccctgtggtttcctttgttaaacccttcaaatctctttctcaatttgataaaccctagttctgctatagacctagacaaggatggtgactaaagcagaaaaacaattcgccaaaaatttcaacatagacgatctccctgacgtccctgccggacttcctccacatctcaaagcccagcaaactcgtgtcgtctctaaaaacaacgctcctgctcatactgcgagtgccatttactcgggtacctatgtttcttctacggaagaggacgacaatgtgaagctaggaaacttctatgataacttcaaagttgatgtggttagtctcacaaagacagatatggaatttgatatgattggtattgatgcagcgtttgccaatgcattccgaaggatccttatagctgaggttccttcaatggctattgaaaaagtgttgatagcgtacaacacatcggttattatagacgaagttcttgctcacaggatgggtcttattccaattgccgcagatccaagactttttgaatatttatccgaacatgatcaggcgaatgaaaagaacaccattgtattcaaactccatgtgaaatgtccgaaaaatagaccacgtcttaaagttttaacgagtgatttaaaatggttaccaaatggaagtgagcttctgagagaatcggaaaataaaacctcaaagccaaaaacttacacttcattcagttgcagccaagattcattacctgaatttgctaataatcctatcactccatgcgacctcgatatcttgatagcaaaactcgcccctggtcaggaaatcgagctcgaagctcatgcggttaagggcattggtaaaacacatgcaaagtggtctccagtagggactgcttggtatagaatgcatcctgaggtggttctacgtggggaagttgaggatgaacttgctgaacgacttgtaaacgtctgcccacagaatgttttcgacattgaagacatgggaaaaggtaagaaaagggcaacagtagcgcagccacgtaagtgcacattgtgtaaggaatgcgtaagagacgatgatttggtagaccatgtggatcttggcagtgttaagaaccattttatatttaacattgagtccaccggatcactgcctccagaggttctcttcactgaagctgtgaagatattggaagctaaatgtgaagctataaccgacttttgagttctggtttagttcaattttgaattgtctgtctatcaatgtttctcctcctattgataaattaccaacaaacaacattgacatatttatttatacggttgttgttcaatttggattttcattagccttctgagttctgattc

SEQ ID NO: 40103 - protein, 375 aa, Arabidopsis thaliana
  peptide (1)..(375): Ceres Seq. ID no. 13575069
MVTKAEKQFAKNFNIDDLPDVPAGLPPHLKAQQTRVVSKNNAPAHTASAIYSGTYVSSTEEDDNVKLGNFYDNFKVDVVSLTKTDMEFDMIGIDAAFANAFRRILIAEVPSMAIEKVLIAYNTSVIIDEVLAHRMGLIPIAADPRLFEYLSEHDQANEKNTIVFKLHVKCPKNRPRLKVLTSDLKWLPNGSELLRESENKTSKPKTYTSFSCSQDSLPEFANNPITPCDLDILIAKLAPGQEIELEAHAVKGIGKTHAKWSPVGTAWYRMHPEVVLRGEVEDELAERLVNVCPQNVFDIEDMGKGKKRATVAQPRKCTLCKECVRDDDLVDHVDLGSVKNHFIFNIESTGSLPPEVLFTEAVKILEAKCEAITDF

SEQ ID NO: 40104 - protein, 290 aa, Arabidopsis thaliana
  peptide (1)..(290): Ceres Seq. ID no. 13575070
MEFDMIGIDAAFANAFRRILIAEVPSMAIEKVLIAYNTSVIIDEVLAHRMGLIPIAADPRLFEYLSEHDQANEKNTIVFKLHVKCPKNRPRLKVLTSDLKWLPNGSELLRESENKTSKPKTYTSFSCSQDSLPEFANNPITPCDLDILIAKLAPGQEIELEAHAVKGIGKTHAKWSPVGTAWYRMHPEVVLRGEVEDELAERLVNVCPQNVFDIEDMGKGKKRATVAQPRKCTLCKECVRDDDLVDHVDLGSVKNHFIFNIESTGSLPPEVLFTEAVKILEAKCEAITDF

SEQ ID NO: 40105 - protein, 286 aa, Arabidopsis thaliana
  peptide (1)..(286): Ceres Seq. ID no. 13575071
MIGIDAAFANAFRRILIAEVPSMAIEKVLIAYNTSVIIDEVLAHRMGLIPIAADPRLFEYLSEHDQANEKNTIVFKLHVKCPKNRPRLKVLTSDLKWLPNGSELLRESENKTSKPKTYTSFSCSQDSLPEFANNPITPCDLDILIAKLAPGQEIELEAHAVKGIGKTHAKWSPVGTAWYRMHPEVVLRGEVEDELAERLVNVCPQNVFDIEDMGKGKKRATVAQPRKCTLCKECVRDDDLVDHVDLGSVKNHFIFNIESTGSLPPEVLFTEAVKILEAKCEAITDF

SEQ ID NO: 40106 - DNA, 2054 bp, Arabidopsis thaliana
  misc_feature (1)..(2054): Ceres Seq. ID no. 13509092
  misc_feature (1)..(2054): Ortholog of  Ceres SEQ ID NO 13587235 as cited in SEQ ID NO 0
tggttcctctcctctctctctctcttcccgttttcacttttgttcgttctctggcggccgatcccgtcgctcgctaccttttaagatattttttttatctaatgaacctgaaattgtaattaggcatataattggggattatttgctgaaattctcatttctagatcgaaaaaagcgaataattcgttttcatttgattcttgcctaatcttagggtgtctttatttatctaccaaaagaatgtctaattatcgaggagatgatgctgagtacatggaagacgtagatgatgagatggaagatgttgaagatgatatggatgaggagtttcgtggtgatgatcttggtgcttcagattctgacgttgaagaatttgactattcgaacaataaagtagctgataccacggctgagcaagctcggaaagggaaagatatccaggggattccgtgggacagacttaatatttctagagagaaatacagacaaactagattagaacagtataagaattatgaaaatgtccctaattctggagaatcatcagaaaaggtttgcaaggtcacacagaaaggaggactattttatgacttctggcggaattcacgatctattaagtctactatactacatttccagctgagaaatttggtatgggcaacttctaagcacgacgtgtatcttatgtcaaattttctggttacacattattcttctctaacgtctggaaagcatgaagttctcaatgtccgtggtcatgttgcgccatctgagaaacatcctggaagtttacttgaaggatttacgcagactcaagtaagtacacttgcagtaaaagatgactttctggttgctggcgggtttcaaggagaacttatttgcaagcatcttgatagaccgggtgtcagcttttgctctcgtatgacttatgatgataatgctataaccaatgctattgagatctacaacaaacccagtggtgcacttcattttactgcgtcaaataatgactgtggagttagagactttgacatggagagataccagcttgttaagcatttccgttttccttggccagtgaatcacgcatctttgagtcctgatggtaaattactggctattgttggagacaacccggagggccttattgtagaccccaacacaggaaagacgttggaaacactatcaggacacttggacttttcctttgcctctgcgtggcatccggatggagtcactttctctacaggaaaccaagataagacttgtcgtgtatgggacatccgtaacctatctcagtctgttactgtcttgaagggtaacctgggagcaatccggtcaatccgctacacatcagatggaaaatacatggccatggctgaaccggctgactttgtccatgtctatgatgtctcaaacgggtatgaaacagagcaggaaatcgacttctttggggaaatctctggaatatctttcagccctgacacagaggcgctatttattggggtatgggaccgcacttatggtagcctccttgagtttggtcggcgcaggaactattcctaccttgactcgtatctttaagctagaagagaagtatacacaaccctgtccaatgaagaaaagagagctcattcagcaaccagtgaacatgacagaagcaaagcatagatatatggatatctcaaagatgtaaatgatgtgttgtgcaaatgctagttagttagtgtcttttgtttccttctccggctggtgtgttattttccttatgtctggttatgtctggtctcaaaaggttcaagatgtgtacagaaagggctggttcagtggtggcacagactggattaggacttgagggtggctccgcagcgggttctggattcaaagtcgggaggatcattgttgttgtgtttggtggcttgtgatcttttctttttgttccttgtacttgtggttgttgtaggaactcgagtgtttagatcctgttctgagtttagaatttggagatacttaactaaattaaaataaattaataatagtcctttgttcgttat

SEQ ID NO: 40107 - protein, 447 aa, Arabidopsis thaliana
  peptide (1)..(447): Ceres Seq. ID no. 13509093
MSNYRGDDAEYMEDVDDEMEDVEDDMDEEFRGDDLGASDSDVEEFDYSNNKVADTTAEQARKGKDIQGIPWDRLNISREKYRQTRLEQYKNYENVPNSGESSEKVCKVTQKGGLFYDFWRNSRSIKSTILHFQLRNLVWATSKHDVYLMSNFLVTHYSSLTSGKHEVLNVRGHVAPSEKHPGSLLEGFTQTQVSTLAVKDDFLVAGGFQGELICKHLDRPGVSFCSRMTYDDNAITNAIEIYNKPSGALHFTASNNDCGVRDFDMERYQLVKHFRFPWPVNHASLSPDGKLLAIVGDNPEGLIVDPNTGKTLETLSGHLDFSFASAWHPDGVTFSTGNQDKTCRVWDIRNLSQSVTVLKGNLGAIRSIRYTSDGKYMAMAEPADFVHVYDVSNGYETEQEIDFFGEISGISFSPDTEALFIGVWDRTYGSLLEFGRRRNYSYLDSYL

SEQ ID NO: 40108 - protein, 436 aa, Arabidopsis thaliana
  peptide (1)..(436): Ceres Seq. ID no. 13509094
MEDVDDEMEDVEDDMDEEFRGDDLGASDSDVEEFDYSNNKVADTTAEQARKGKDIQGIPWDRLNISREKYRQTRLEQYKNYENVPNSGESSEKVCKVTQKGGLFYDFWRNSRSIKSTILHFQLRNLVWATSKHDVYLMSNFLVTHYSSLTSGKHEVLNVRGHVAPSEKHPGSLLEGFTQTQVSTLAVKDDFLVAGGFQGELICKHLDRPGVSFCSRMTYDDNAITNAIEIYNKPSGALHFTASNNDCGVRDFDMERYQLVKHFRFPWPVNHASLSPDGKLLAIVGDNPEGLIVDPNTGKTLETLSGHLDFSFASAWHPDGVTFSTGNQDKTCRVWDIRNLSQSVTVLKGNLGAIRSIRYTSDGKYMAMAEPADFVHVYDVSNGYETEQEIDFFGEISGISFSPDTEALFIGVWDRTYGSLLEFGRRRNYSYLDSYL

SEQ ID NO: 40109 - protein, 429 aa, Arabidopsis thaliana
  peptide (1)..(429): Ceres Seq. ID no. 13509095
MEDVEDDMDEEFRGDDLGASDSDVEEFDYSNNKVADTTAEQARKGKDIQGIPWDRLNISREKYRQTRLEQYKNYENVPNSGESSEKVCKVTQKGGLFYDFWRNSRSIKSTILHFQLRNLVWATSKHDVYLMSNFLVTHYSSLTSGKHEVLNVRGHVAPSEKHPGSLLEGFTQTQVSTLAVKDDFLVAGGFQGELICKHLDRPGVSFCSRMTYDDNAITNAIEIYNKPSGALHFTASNNDCGVRDFDMERYQLVKHFRFPWPVNHASLSPDGKLLAIVGDNPEGLIVDPNTGKTLETLSGHLDFSFASAWHPDGVTFSTGNQDKTCRVWDIRNLSQSVTVLKGNLGAIRSIRYTSDGKYMAMAEPADFVHVYDVSNGYETEQEIDFFGEISGISFSPDTEALFIGVWDRTYGSLLEFGRRRNYSYLDSYL

SEQ ID NO: 40110 - DNA, 1200 bp, Arabidopsis thaliana
  misc_feature (1)..(1200): Ceres Seq. ID no. 13488977
  misc_feature (1)..(1200): Ortholog of  Ceres SEQ ID NO 14307639 as cited in SEQ ID NO 54779
aagaagaggagccaagtaccaaactttttccttcagggttttcctctcaaaatcccaacttggcctctgtttttgctttcttttatgttctcttcttctctaaaaaccatctcatacttccaagaatttctctcacaaagaccaagaactcaaaatgtatcaagattctggattaatgctccgttacatgcaaaactgtcccccagatattcaacaattcgaagacctcttcaaatcatacaaactctccgatgaaatgaacaacacttttgttgagtcatcaaacatatctgagtatgatattggagaagaaagtgatctttttagagctcctgatccaattcttgaagaaccaatcttaaccgttgatccactctctgctgctttgactatgatctcttgtggtgaagacacttcacaaggtctttgtgagcttcctgatcttggttcattgcagagtggtcaacagcttcttgacaaagctttttatgaatgtgagcaagatcttatgatgaaatcagctatggagtctccattctctgatgttttagacatcaagaacatctctgttgtgacgacaatcaatgagaaccaggatatgcaaaagagtgttagctcggggaatttgagctctatggattggtcacatgcacaacaagagactgtaatgattcagaattttcctgatttcgattttggttatggaatgcgaagagcctttagtgaaggcgacatacagaaacttggggcaggtcttgttcaatctccactagataggattattgtgagctgcacttcagaagatcgccgtgagaagctttctcgatacaagaacaagaagagcaggcgaaatttcgggcgtaagattaagtatgcttgcaggaaagctcttgcagatagccaaccgagagtccgaggaaggtttgcgaaaacagaggagaggaaatagaatggttcaagaaaagggctcaaaggaaggagactaagcaaaaggaagaaacatgaagaataaggagataaagcccatctcattagaaactagttttgttttatatatctatgtataaactttaaaatcttataagcatccaattagttttttgtatataaagggtttctctaaataagctttaagtaaagaaattgtagctaaagaaagtttgtattattgtagtttaaagaagtaatgtatcagtgggt

SEQ ID NO: 40111 - protein, 264 aa, Arabidopsis thaliana
  peptide (1)..(264): Ceres Seq. ID no. 13488978
MYQDSGLMLRYMQNCPPDIQQFEDLFKSYKLSDEMNNTFVESSNISEYDIGEESDLFRAPDPILEEPILTVDPLSAALTMISCGEDTSQGLCELPDLGSLQSGQQLLDKAFYECEQDLMMKSAMESPFSDVLDIKNISVVTTINENQDMQKSVSSGNLSSMDWSHAQQETVMIQNFPDFDFGYGMRRAFSEGDIQKLGAGLVQSPLDRIIVSCTSEDRREKLSRYKNKKSRRNFGRKIKYACRKALADSQPRVRGRFAKTEERK

SEQ ID NO: 40112 - protein, 257 aa, Arabidopsis thaliana
  peptide (1)..(257): Ceres Seq. ID no. 13488979
MLRYMQNCPPDIQQFEDLFKSYKLSDEMNNTFVESSNISEYDIGEESDLFRAPDPILEEPILTVDPLSAALTMISCGEDTSQGLCELPDLGSLQSGQQLLDKAFYECEQDLMMKSAMESPFSDVLDIKNISVVTTINENQDMQKSVSSGNLSSMDWSHAQQETVMIQNFPDFDFGYGMRRAFSEGDIQKLGAGLVQSPLDRIIVSCTSEDRREKLSRYKNKKSRRNFGRKIKYACRKALADSQPRVRGRFAKTEERK

SEQ ID NO: 40113 - protein, 253 aa, Arabidopsis thaliana
  peptide (1)..(253): Ceres Seq. ID no. 13488980
MQNCPPDIQQFEDLFKSYKLSDEMNNTFVESSNISEYDIGEESDLFRAPDPILEEPILTVDPLSAALTMISCGEDTSQGLCELPDLGSLQSGQQLLDKAFYECEQDLMMKSAMESPFSDVLDIKNISVVTTINENQDMQKSVSSGNLSSMDWSHAQQETVMIQNFPDFDFGYGMRRAFSEGDIQKLGAGLVQSPLDRIIVSCTSEDRREKLSRYKNKKSRRNFGRKIKYACRKALADSQPRVRGRFAKTEERK

SEQ ID NO: 40114 - DNA, 1248 bp, Arabidopsis thaliana
  misc_feature (1)..(1248): Ceres Seq. ID no. 13575740
  misc_feature (1)..(1248): Ortholog of  Ceres SEQ ID NO 15169372 as cited in SEQ ID NO 58778
accatccatccaacttgtaactctctttctctatttcttctccattctgtttgctctgcaacatcttttagggtttattattgttggtttcttcattttctttctctaaaatatttgcagaggaagagagagagagagagagagatcatgggaatatatggagtgatgacagggaaaaaaggaaagagtgggtttggatctgcttctactgctgaagatgttactcaagccattgatgccagtcatctcactgccatcatcacaggtggaacaagtgggattggattggaggcagctagagtgttagcaatgagaggagctcatgtcatcattgccgcaagaaacccaaaagctgctaatgagtctaaagagatgattcttcagatgaaccctaatgctcgcgtcgactatctccagatcgatgtctcttccatcaaatcagtcagatccttcgttgatcagtttcttgcccttaatgttcctctcaacattctcataaacaatgcaggtgttatgttttgtcctttcaagctcaccgaagatgggattgaatcacaattcgcaacaaaccacattggtcattttctgttgacgaatctgcttctggacaaaatgaaaagtaccgcaaggagaaagtggagtccaaggaaggattgtgaatctgtcatctattgctcatacttatacttactctgaaggtatcaagttccaaggcatcaatgaccctgctggatattcggagagaagggcttatggacagtccaaactctcaaacttggttgcactccaatgcactctctcgtagactacaggaagaaggtgtgaacatcactataaattcggtgcaccctggtcttgtcaccactaatctctttcgctactccggttttagcatgaaggtcttcagggctatgactttcctcttttggaaaaatatacctcagggagcagcaacaacatgctacgttgcacttcatccagatctcgaaggcgtcaccggaaagtatttcggcgactgtaacatcgttgctccgagcaaatttgctaccaacaattctctcgccgataaactttgggatttcagtgtctttctcatcgattctatctctaaataatctatcatcatcaagacaaattcttagacattcaaaatttatttatccttcttgatattgttacattaatgccatatctttttcaccaccacatatttctttatggaataccataatttagaaatcattattc

SEQ ID NO: 40115 - protein, 231 aa, Arabidopsis thaliana
  peptide (1)..(231): Ceres Seq. ID no. 13575741
TIHPTCNSLSLFLLHSVCSATSFRVYYCWFLHFLSLKYLQRKREREREIMGIYGVMTGKKGKSGFGSASTAEDVTQAIDASHLTAIITGGTSGIGLEAARVLAMRGAHVIIAARNPKAANESKEMILQMNPNARVDYLQIDVSSIKSVRSFVDQFLALNVPLNILINNAGVMFCPFKLTEDGIESQFATNHIGHFLLTNLLLDKMKSTARRKWSPRKDCESVIYCSYLYLL

SEQ ID NO: 40116 - protein, 182 aa, Arabidopsis thaliana
  peptide (1)..(182): Ceres Seq. ID no. 13575742
MGIYGVMTGKKGKSGFGSASTAEDVTQAIDASHLTAIITGGTSGIGLEAARVLAMRGAHVIIAARNPKAANESKEMILQMNPNARVDYLQIDVSSIKSVRSFVDQFLALNVPLNILINNAGVMFCPFKLTEDGIESQFATNHIGHFLLTNLLLDKMKSTARRKWSPRKDCESVIYCSYLYLL

SEQ ID NO: 40117 - protein, 176 aa, Arabidopsis thaliana
  peptide (1)..(176): Ceres Seq. ID no. 13575743
MTGKKGKSGFGSASTAEDVTQAIDASHLTAIITGGTSGIGLEAARVLAMRGAHVIIAARNPKAANESKEMILQMNPNARVDYLQIDVSSIKSVRSFVDQFLALNVPLNILINNAGVMFCPFKLTEDGIESQFATNHIGHFLLTNLLLDKMKSTARRKWSPRKDCESVIYCSYLYLL

SEQ ID NO: 40118 - DNA, 1361 bp, Arabidopsis thaliana
  misc_feature (1)..(1361): Ceres Seq. ID no. 13490993
  misc_feature (1)..(1361): Ortholog of  Ceres SEQ ID NO 12556956 as cited in SEQ ID NO 78
tttcatcatcatctcagtctctctcgaagtttcaagttcgcgactatggcagcagcgatgtcttcttcttgttgcgcttcctcgcttcgtttaatcccattcaaacggaccttgttttcttcaatccattatccggccaaaacccttcttctacgaccactaaaaccgtcggaagttccttcctttcgccggacgatcatcactttccagaaaatttcaaccgggattgttcctccaccatcggcttcatcatctccgtcgagctatggagaccttcaaccaatcgaagagcttccaccgaagctacaagagatcgtcaagcttttccaatcggtacaagagccaaaggctaaatacgagcagcttatgttctacgggaagaatctgacacctctcgattctcaattcaagacgagggagaataaagtagaaggatgtgtttctcaggtttgggttagggctttctttgatgaggaacgtaatgttgtgtatgaagctgattctgattcggttctcactaaagggttagctgctctattagtcaagggtttatctggaagacctgtccctgagattttgaggataacacctgatttcgctgttcttctcgggttgcagcagagtctgtctccttctagaaacaatggattacttaatatgcttaagctgatgcagaaaaaggctcttcatttggaagtcaaaggtgaggaagattcaagttctggagagagttcagaatccagctttgtgtctattcctgagactaaggacgaagctaatgttccggaggtggatttggagtctaaacctgatctagttgaggatttgggaacagaaaagattgatgattctgagagtgggtcaaatgttgttgctttagggagtagagggatgaggataagagagaaattggagaaggagctagatcctgttgagttagaagttgaagatgtttcttaccagcacgcaggacatgccgctgttagaggtagtgctggtgatgatggggaaacacatttcaacttgcgaatcgtttcggatgctttccaaggtaaaagcttggtcaagagacataggctgatatatgacttgttgcaagatgagttgaagagcgggttacatgctctctctattgtggcaaagactcctgctgaggtttgagggtgtaacattggaagaagtcaggtcctgattcttttacttcttttggtccatttgctttggatattgttctctggaccttctaataatgttaagagctcgatcaggattgtgttaaatgagagatagatattgaaggatataaataatgttttcgccaatcgccacatgattcaccattttcaaactgatttcccttt

SEQ ID NO: 40119 - protein, 386 aa, Arabidopsis thaliana
  peptide (1)..(386): Ceres Seq. ID no. 13490994
FHHHLSLSRSFKFATMAAAMSSSCCASSLRLIPFKRTLFSSIHYPAKTLLLRPLKPSEVPSFRRTIITFQKISTGIVPPPSASSSPSSYGDLQPIEELPPKLQEIVKLFQSVQEPKAKYEQLMFYGKNLTPLDSQFKTRENKVEGCVSQVWVRAFFDEERNVVYEADSDSVLTKGLAALLVKGLSGRPVPEILRITPDFAVLLGLQQSLSPSRNNGLLNMLKLMQKKALHLEVKGEEDSSSGESSESSFVSIPETKDEANVPEVDLESKPDLVEDLGTEKIDDSESGSNVVALGSRGMRIREKLEKELDPVELEVEDVSYQHAGHAAVRGSAGDDGETHFNLRIVSDAFQGKSLVKRHRLIYDLLQDELKSGLHALSIVAKTPAEV

SEQ ID NO: 40120 - protein, 371 aa, Arabidopsis thaliana
  peptide (1)..(371): Ceres Seq. ID no. 13490995
MAAAMSSSCCASSLRLIPFKRTLFSSIHYPAKTLLLRPLKPSEVPSFRRTIITFQKISTGIVPPPSASSSPSSYGDLQPIEELPPKLQEIVKLFQSVQEPKAKYEQLMFYGKNLTPLDSQFKTRENKVEGCVSQVWVRAFFDEERNVVYEADSDSVLTKGLAALLVKGLSGRPVPEILRITPDFAVLLGLQQSLSPSRNNGLLNMLKLMQKKALHLEVKGEEDSSSGESSESSFVSIPETKDEANVPEVDLESKPDLVEDLGTEKIDDSESGSNVVALGSRGMRIREKLEKELDPVELEVEDVSYQHAGHAAVRGSAGDDGETHFNLRIVSDAFQGKSLVKRHRLIYDLLQDELKSGLHALSIVAKTPAEV

SEQ ID NO: 40121 - protein, 367 aa, Arabidopsis thaliana
  peptide (1)..(367): Ceres Seq. ID no. 13490996
MSSSCCASSLRLIPFKRTLFSSIHYPAKTLLLRPLKPSEVPSFRRTIITFQKISTGIVPPPSASSSPSSYGDLQPIEELPPKLQEIVKLFQSVQEPKAKYEQLMFYGKNLTPLDSQFKTRENKVEGCVSQVWVRAFFDEERNVVYEADSDSVLTKGLAALLVKGLSGRPVPEILRITPDFAVLLGLQQSLSPSRNNGLLNMLKLMQKKALHLEVKGEEDSSSGESSESSFVSIPETKDEANVPEVDLESKPDLVEDLGTEKIDDSESGSNVVALGSRGMRIREKLEKELDPVELEVEDVSYQHAGHAAVRGSAGDDGETHFNLRIVSDAFQGKSLVKRHRLIYDLLQDELKSGLHALSIVAKTPAEV

SEQ ID NO: 40122 - DNA, 870 bp, Arabidopsis thaliana
  misc_feature (1)..(870): Ceres Seq. ID no. 12323255
  misc_feature (1)..(870): Ortholog of  Ceres SEQ ID NO 13638889 as cited in SEQ ID NO 55831
attatttcgtcagaacaacattgaaaagttaccgttaaacactctaagcgctcttcttcatcttcttatacacttctcttccaacaagaatctcaccaagaaacttcttcacttttacaaagttaaaaccatatggcgaacatgaacgctcttcaacaaatgatcttcccagacgagaacgctccaattcatcgcaaaaagtctgtcactgctgcttctgtgaaatccaaagggactgtacttggtcagaagaaacctgtaggagctcgtaaggctctgaatgatattacaaacaagtctgggattcatgcgaaagctgctgcttcttcaaagaacaagcaaattgcttctgctgctgtgaaagatgagattgatatagctggggaaaggtttttacatgatcacagcaaatgcatcaaagaacagcaaaatctttgggatgatcactactctgctgatctcatgctacttcatcatggttccagcatcaaggagaagcatctcaattgggacattgaaaagatggatgctaaggacgatctgacttacgaagaaccagaagagatggcatcgcccaagttttctgattggctgaagaactcgactccatggcgctctccaatccgtcatggctctatgatgccttccactcctctggcttggcggttcgattcatgcgaattcacacttaaagaagactctgacgacctcttctgagtttctgtttcttaatgtcttcaaaattcatccttcagatgaagtagtaatagtagtagtggcgtttatcttttgttcagctcttcatgaatcactctgtgtctatcactttgtaactggtttcaggaaataaagttggtatcttttcaagtg

SEQ ID NO: 40123 - protein, 194 aa, Arabidopsis thaliana
  peptide (1)..(194): Ceres Seq. ID no. 12323256
MANMNALQQMIFPDENAPIHRKKSVTAASVKSKGTVLGQKKPVGARKALNDITNKSGIHAKAAASSKNKQIASAAVKDEIDIAGERFLHDHSKCIKEQQNLWDDHYSADLMLLHHGSSIKEKHLNWDIEKMDAKDDLTYEEPEEMASPKFSDWLKNSTPWRSPIRHGSMMPSTPLAWRFDSCEFTLKEDSDDLF

SEQ ID NO: 40124 - protein, 191 aa, Arabidopsis thaliana
  peptide (1)..(191): Ceres Seq. ID no. 12323257
MNALQQMIFPDENAPIHRKKSVTAASVKSKGTVLGQKKPVGARKALNDITNKSGIHAKAAASSKNKQIASAAVKDEIDIAGERFLHDHSKCIKEQQNLWDDHYSADLMLLHHGSSIKEKHLNWDIEKMDAKDDLTYEEPEEMASPKFSDWLKNSTPWRSPIRHGSMMPSTPLAWRFDSCEFTLKEDSDDLF

SEQ ID NO: 40125 - protein, 185 aa, Arabidopsis thaliana
  peptide (1)..(185): Ceres Seq. ID no. 12323258
MIFPDENAPIHRKKSVTAASVKSKGTVLGQKKPVGARKALNDITNKSGIHAKAAASSKNKQIASAAVKDEIDIAGERFLHDHSKCIKEQQNLWDDHYSADLMLLHHGSSIKEKHLNWDIEKMDAKDDLTYEEPEEMASPKFSDWLKNSTPWRSPIRHGSMMPSTPLAWRFDSCEFTLKEDSDDLF

SEQ ID NO: 40126 - DNA, 1213 bp, Arabidopsis thaliana
  misc_feature (1)..(1213): Ceres Seq. ID no. 12481792
  misc_feature (1)..(1213): Ortholog of  Ceres SEQ ID NO 14304969 as cited in SEQ ID NO 53193
  misc_feature (1)..(1213): Ortholog of  Ceres SEQ ID NO 14314851 as cited in SEQ ID NO 54014
  misc_feature (1)..(1213): Ortholog of  Ceres SEQ ID NO 15227214 as cited in SEQ ID NO 55368
  misc_feature (1)..(1213): Ortholog of  Ceres SEQ ID NO 13638897 as cited in SEQ ID NO 55839
  misc_feature (1)..(1213): Ortholog of  Ceres SEQ ID NO 15177758 as cited in SEQ ID NO 57504
  misc_feature (1)..(1213): Ortholog of  Ceres SEQ ID NO 15177710 as cited in SEQ ID NO 59217
  misc_feature (1)..(1213): Ortholog of  Ceres SEQ ID NO 15173484 as cited in SEQ ID NO 61804
  misc_feature (1)..(1213): Ortholog of  Ceres SEQ ID NO 13596958 as cited in SEQ ID NO 63319
  misc_feature (1)..(1213): Ortholog of  Ceres SEQ ID NO 12614814 as cited in SEQ ID NO 68816
aaaaaatgtctgtatctgtagcagcagagcatgattacataggtttgtcagagtttccaaccatggaagcaacaacaatgtctgacaaaaccaaaaccagagacaataacaacggtctcaatttcaaggctaccgagttaagactcggtttacccggttctgagtcgccggagcgagtcgactcaagattcttggctctcaacaagagtagctgtcccgtgtcaggtgccaaaagggtgttctccgacgctattaacgactctaacaaatgggtcttctctcctggatccactactgctactggtgatgtcggctcgggttctggtccccgtacctccgtcgttaaagatggaaagtcgacaactttcactaaaccggctgttccggttaaggagaagaagagctctgctacagctccagcttcaaaagcacaagtggtgggatggccaccaataagatcattcaggaagaactcaatggcttcttctcaatctcagaaacctggtaataactcagagactgaagaagcagaagctaagtctggaccagaacaaccttgcttgtatgtcaaagtgagtatggaaggtgctccttacttgaggaaaatcgatctcaagacttacaaaagctaccttgagctctcttctgctcttgagaagatgttcagttgcttcaccattggtcagtttggttctcatggagggtgtggcagagatgggttaaacgagagtcgcttgactgatctcttgcgtggttctgagtatgttgtaacctatgaagataaagacagtgactggatgctggtcggagatgtcccttgggaaatgtttatatgctcctgcaagaagctgagaatcatgaagagctctgaggctatcggcttagctccaagggtgatggagaagtgcagaagcaggaactaggaaaagcccttttatgtgataatatatgatttgaaaaaatatgtttttaagaaattgaatagccattttgttttgaagtattcttgtgtgtttgtgtgctaggagtgatgtttgatctttcttaaaccagcctctactaagctctaataaggcctcttcctcttacttctttctctaatcaatctaatgaaacatatgggtttgtgtatgtgtgtttgccaaggaagacttcataattcatatgtataaaagttttggtagtgtgtaaaccggatgtggttttcattgtt

SEQ ID NO: 40127 - protein, 306 aa, Arabidopsis thaliana
  peptide (1)..(306): Ceres Seq. ID no. 12481793
KMSVSVAAEHDYIGLSEFPTMEATTMSDKTKTRDNNNGLNFKATELRLGLPGSESPERVDSRFLALNKSSCPVSGAKRVFSDAINDSNKWVFSPGSTTATGDVGSGSGPRTSVVKDGKSTTFTKPAVPVKEKKSSATAPASKAQVVGWPPIRSFRKNSMASSQSQKPGNNSETEEAEAKSGPEQPCLYVKVSMEGAPYLRKIDLKTYKSYLELSSALEKMFSCFTIGQFGSHGGCGRDGLNESRLTDLLRGSEYVVTYEDKDSDWMLVGDVPWEMFICSCKKLRIMKSSEAIGLAPRVMEKCRSRN

SEQ ID NO: 40128 - protein, 305 aa, Arabidopsis thaliana
  peptide (1)..(305): Ceres Seq. ID no. 12481794
MSVSVAAEHDYIGLSEFPTMEATTMSDKTKTRDNNNGLNFKATELRLGLPGSESPERVDSRFLALNKSSCPVSGAKRVFSDAINDSNKWVFSPGSTTATGDVGSGSGPRTSVVKDGKSTTFTKPAVPVKEKKSSATAPASKAQVVGWPPIRSFRKNSMASSQSQKPGNNSETEEAEAKSGPEQPCLYVKVSMEGAPYLRKIDLKTYKSYLELSSALEKMFSCFTIGQFGSHGGCGRDGLNESRLTDLLRGSEYVVTYEDKDSDWMLVGDVPWEMFICSCKKLRIMKSSEAIGLAPRVMEKCRSRN

SEQ ID NO: 40129 - protein, 286 aa, Arabidopsis thaliana
  peptide (1)..(286): Ceres Seq. ID no. 12481795
MEATTMSDKTKTRDNNNGLNFKATELRLGLPGSESPERVDSRFLALNKSSCPVSGAKRVFSDAINDSNKWVFSPGSTTATGDVGSGSGPRTSVVKDGKSTTFTKPAVPVKEKKSSATAPASKAQVVGWPPIRSFRKNSMASSQSQKPGNNSETEEAEAKSGPEQPCLYVKVSMEGAPYLRKIDLKTYKSYLELSSALEKMFSCFTIGQFGSHGGCGRDGLNESRLTDLLRGSEYVVTYEDKDSDWMLVGDVPWEMFICSCKKLRIMKSSEAIGLAPRVMEKCRSRN

SEQ ID NO: 40130 - DNA, 854 bp, Arabidopsis thaliana
  misc_feature (1)..(854): Ceres Seq. ID no. 13497569
  misc_feature (1)..(854): Ortholog of  Ceres SEQ ID NO 13594501 as cited in SEQ ID NO 51327
tcgattggccaaatcggccctcgagttaattaaattaatccccccccccccccgatcttcttgtctctctctcatttcttgttattatccacgaacgaagaaaaacctagaaaacagttgaagaaagaaaatcacaagagaagccatggccggaattggaccgattactcaggattgggaaccagttgtgatccgcaagagagctcctaacgctgcagctaagcgcgacgagaagactgtcaacgccgctcgtcgaagcggcgccgatattgagaccgttcgaaaattcaatgctggatcgaacaaggctgcatcaagcggcacctccttgaacacaaagaagctagatgatgatactgagaacttatctcatgatcgtgtgcccactgaattgaagaaagccatcatgcaagctagaggggagaagaagctgactcagtcccaacttgcccatctgatcaatgagaagccacaagtgatccaagaatacgagtctgggaaagcaattccgaatcaacagatcctttcaaagctggagagggcacttggtgctaaactccgtggaaagaagtagaagtgtagaacaaagctcttaaaggtaacaacaaaagctgatcgcagtttctctccagtccacatgctttaccatatcctaaaaactatatctatgtatggtttggtttaatggcgtagtagtttgttgcgaggaatctttcatgatgtaagaaaaacaaagctgtttggaaccttttgtcattataaataatctcttctctttctttttcgtcangtctcgtaaactttatctgccacggatgtatgttnttaaagaaattgaagattgaaattggtcc

SEQ ID NO: 40131 - protein, 142 aa, Arabidopsis thaliana
  peptide (1)..(142): Ceres Seq. ID no. 13497570
MAGIGPITQDWEPVVIRKRAPNAAAKRDEKTVNAARRSGADIETVRKFNAGSNKAASSGTSLNTKKLDDDTENLSHDRVPTELKKAIMQARGEKKLTQSQLAHLINEKPQVIQEYESGKAIPNQQILSKLERALGAKLRGKK

SEQ ID NO: 40132 - DNA, 1612 bp, Arabidopsis thaliana; identical to SEQ ID NO: 37971
  misc_feature (1)..(1612): Ceres Seq. ID no. 12329884
  misc_feature (1)..(1612): Ortholog of  Ceres SEQ ID NO 15170155 as cited in SEQ ID NO 64363

SEQ ID NO: 40133 - protein, 498 aa, Arabidopsis thaliana; identical to SEQ ID NO: 37972
  peptide (1)..(498): Ceres Seq. ID no. 12329885

SEQ ID NO: 40134 - protein, 480 aa, Arabidopsis thaliana; identical to SEQ ID NO: 37973
  peptide (1)..(480): Ceres Seq. ID no. 12329886

SEQ ID NO: 40135 - protein, 391 aa, Arabidopsis thaliana; identical to SEQ ID NO: 37974
  peptide (1)..(391): Ceres Seq. ID no. 12329887

SEQ ID NO: 40136 - DNA, 1127 bp, Arabidopsis thaliana
  misc_feature (1)..(1127): Ceres Seq. ID no. 13499960
  misc_feature (1)..(1127): Ortholog of  Ceres SEQ ID NO 13664220 as cited in SEQ ID NO 61151
  misc_feature (1)..(1127): Ortholog of  Ceres SEQ ID NO 13597477 as cited in SEQ ID NO 65160
ggaattcggcacgaggatgaggtcgtttgtctcgttgatttctcttctccttcttctctcattttcttcatctgttctctcaaccaaaaagtcatcatttcaaaaacttccggtgccaggaaacagaacaggccctgaagctttcgcttttgattccaccggaaaaggatttctacccggagtcaccggcggtaaaatcctcaaatatcttccaaagaaaggttatgtcgactttgcccagatcacaaactcttcgaagtcttcgttgtgcgacggagcacttggaaccactaacgtcgaaaaatgtggtcgaccagccggaatagccttcaacacgaaaacaggtgatctttacgtcgcagatgctgcattgggtctccacgtcatccctcgccgtgggggtttggctaagaagatcgccgacagtgtcggcggcaagccctttttgtttcttgacgggcttgacgtagatcccaataccggcgtcgtctatttcacttccttcagctcaacatttggccctagggatgtgttgaaagcagtggcaacaaaagactcgaccggtaagttcttcaaatacgatccatcaaaaaaggtcgtgactgtattgatggacggtcttagcggctcagccggatgtgccgttagctcagatggttcattcgtgctggttggtcagttcacaaaaagtaacatcaagaggtattggatcaaaggatccaaagctggtacttctgaagacttcaccaactcggtctcgaaccctgacaacatcaagaggatcggttctactggaaacttttgggttgcttcggtcgtgaactcagccaccggaccgacaaacccttcggcggttaaagtcagttctgccggtaaagtgcttcagaccattcccctaaaagacaagtttggggatactttggttagtgaagttaacgatcaaaggacagctttatatcggagctctttttgggcctttcgccggaattccttaagctttaaagtgaacatggtattagtatgggttagaattaaagtgattgaatcgaaataaatatggttacaaagtcttgacggatcaatgtacgctcatgttgattctgttcaaataaatatgaatttttttt

SEQ ID NO: 40137 - protein, 350 aa, Arabidopsis thaliana
  peptide (1)..(350): Ceres Seq. ID no. 13499961
EFGTRMRSFVSLISLLLLLSFSSSVLSTKKSSFQKLPVPGNRTGPEAFAFDSTGKGFLPGVTGGKILKYLPKKGYVDFAQITNSSKSSLCDGALGTTNVEKCGRPAGIAFNTKTGDLYVADAALGLHVIPRRGGLAKKIADSVGGKPFLFLDGLDVDPNTGVVYFTSFSSTFGPRDVLKAVATKDSTGKFFKYDPSKKVVTVLMDGLSGSAGCAVSSDGSFVLVGQFTKSNIKRYWIKGSKAGTSEDFTNSVSNPDNIKRIGSTGNFWVASVVNSATGPTNPSAVKVSSAGKVLQTIPLKDKFGDTLVSEVNDQRTALYRSSFWAFRRNSLSFKVNMVLVWVRIKVIESK

SEQ ID NO: 40138 - protein, 345 aa, Arabidopsis thaliana
  peptide (1)..(345): Ceres Seq. ID no. 13499962
MRSFVSLISLLLLLSFSSSVLSTKKSSFQKLPVPGNRTGPEAFAFDSTGKGFLPGVTGGKILKYLPKKGYVDFAQITNSSKSSLCDGALGTTNVEKCGRPAGIAFNTKTGDLYVADAALGLHVIPRRGGLAKKIADSVGGKPFLFLDGLDVDPNTGVVYFTSFSSTFGPRDVLKAVATKDSTGKFFKYDPSKKVVTVLMDGLSGSAGCAVSSDGSFVLVGQFTKSNIKRYWIKGSKAGTSEDFTNSVSNPDNIKRIGSTGNFWVASVVNSATGPTNPSAVKVSSAGKVLQTIPLKDKFGDTLVSEVNDQRTALYRSSFWAFRRNSLSFKVNMVLVWVRIKVIESK

SEQ ID NO: 40139 - DNA, 1407 bp, Arabidopsis thaliana
  misc_feature (1)..(1407): Ceres Seq. ID no. 12389097
  misc_feature (1)..(1407): Ortholog of  Ceres SEQ ID NO 15171382 as cited in SEQ ID NO 51642
  misc_feature (1)..(1407): Ortholog of  Ceres SEQ ID NO 15168545 as cited in SEQ ID NO 57829
  misc_feature (1)..(1407): Ortholog of  Ceres SEQ ID NO 15168468 as cited in SEQ ID NO 58115
  misc_feature (1)..(1407): Ortholog of  Ceres SEQ ID NO 15179784 as cited in SEQ ID NO 64755
  misc_feature (1)..(1407): Ortholog of  Ceres SEQ ID NO 13596440 as cited in SEQ ID NO 68769
  misc_feature (1)..(1407): Ortholog of  Ceres SEQ ID NO 15180012 as cited in SEQ ID NO 0
tctttcaattactataatgttgaatttgggtttcatctactaactaagatgaagtttcttgtctctttctgtctccctctttcttaattcctctctacttttcggttaattgctcctcttcagctaactttggggctttaaagtgataggatggctcgcttcagttttccttgttttccaaattttgggggttttaatcagcacaggatgagagaggcacagctaggcggtcacactctgaggtcccatggaatgactgttgcaaggactcacatgcatgattggatcattctcgtgttacttgttattctcgagtgtgtactccttataatccacccattttatcgctttgttggtaaagatatgatgactgatctaagttacccgttaaagagtaacaccgtaccaatttggtctgtcccggtatatgcgatgctgttacctttggtaatcttcatctttatctacttccgtcgaagagatgtttatgatcttcatcacgcggtgctaggtctcttatactctgttctggtgacagcagtacttaccgatgcaataaagaatgcagttggtcgaccacgtcctgacttcttctggcgttgttttccagatggcaaagctctttatgatagccttggagatgttatatgccatggtgataaaagcgtcataagggaaggtcacaaaagctttccaagtggacacacgtcatggtctttttcgggtctcggatttctttcgctttacttatcgggaaagattcaagcatttgacggtaaaggccacgttgcaaagctatgcatagtcatactccctttgctatttgcagctcttgtcggcatttcccgtgttgatgactattggcatcattggcaagacgtctttgcaggaggcttgctaggtcttgcgatctctacaatctgttatcttcaatttttcccgccaccatatcacaccgaaggttggggaccatatgcttacttccaagtgttggaggctgcgagagtgcaaggagcagcgaatggagcagtgcaacagccgccgccccaagttaacaacggtgaagaagaagacggtgggtttatgggtttacatttggtggataatccgactatgaggagagaagaggatgtagaaactggtagaggctgagatgaagaaactctgaagctggtttggttacttgttaggacactttctcttgttcttttgattctttgttggacaactttagtagatttctctaagataactaatagagtcgtttggttttggttttggtttaaatggatgaccggttttatggttccggtattggtggttaaagtttatgtttttcaaaaaagttcactggataaatgtagctttattttcaatattttaaggattgaaatcggatttgaactt

SEQ ID NO: 40140 - protein, 333 aa, Arabidopsis thaliana
  peptide (1)..(333): Ceres Seq. ID no. 12389098
MARFSFPCFPNFGGFNQHRMREAQLGGHTLRSHGMTVARTHMHDWIILVLLVILECVLLIIHPFYRFVGKDMMTDLSYPLKSNTVPIWSVPVYAMLLPLVIFIFIYFRRRDVYDLHHAVLGLLYSVLVTAVLTDAIKNAVGRPRPDFFWRCFPDGKALYDSLGDVICHGDKSVIREGHKSFPSGHTSWSFSGLGFLSLYLSGKIQAFDGKGHVAKLCIVILPLLFAALVGISRVDDYWHHWQDVFAGGLLGLAISTICYLQFFPPPYHTEGWGPYAYFQVLEAARVQGAANGAVQQPPPQVNNGEEEDGGFMGLHLVDNPTMRREEDVETGRG

SEQ ID NO: 40141 - protein, 314 aa, Arabidopsis thaliana; identical to SEQ ID NO: 27353
  peptide (1)..(314): Ceres Seq. ID no. 12389099

SEQ ID NO: 40142 - protein, 299 aa, Arabidopsis thaliana; identical to SEQ ID NO: 27354
  peptide (1)..(299): Ceres Seq. ID no. 12389100

SEQ ID NO: 40143 - DNA, 1166 bp, Arabidopsis thaliana
  misc_feature (1)..(1166): Ceres Seq. ID no. 13645869
  misc_feature (1)..(1166): Ortholog of  Ceres SEQ ID NO 12578784 as cited in SEQ ID NO 20729
  misc_feature (1)..(1166): Ortholog of  Ceres SEQ ID NO 13658847 as cited in SEQ ID NO 66674
acagattcgccgcagctagagagaaaacgaaactaaccggagcatgaagagacgaagatcggcgaagaaatctccggcgatggtgacggttaccgattggaaagggttagattgcggcgaagagacgagaatcgtaaggagattgatgaagttcgaagacttgcctgagtatttgaaggacaacgagtttatacacaaccattatcgatgtcaatggtctctcaaagatacttttctcagtgctttctcttggcacaacgagactctcaacatttggacgcatttaattggatttggtatatttctgtggatgacggtggtgagttgcttggagacgacggagattagtctcgccggcgtttttaacggcatggccggagtgaggatttgcctctcaagcaatcagactctgcttcatgattcgaacgtgacacatcacatctcatgtcttacctcacaaggagaagctattccaaaatggccgtggctcgtgtacttagtcggagcaatgggttgtttaatctgcagctctgtttcacacctccttgcttgtcactcaaaacgtttcaacgtcttcttctggcgtttggactacgcaggaatatcacttatgatcgtcgcttctttctttgcaccaatctactacgcattctcctgccaccctaacttccgtttactctacttatcctcgatctcgatcctcggtctcctcgctatcatcactctcctctctcccgctctctctacgccgcgttttagacctttcagagctaatcttttccttgcaatgggatcatctgctgtgatacctgctacacatgtgctttgcctttactgggatcaccctaatgtcttcatcgccctcggttacgagattgccacggctttgtcgtattttgtgggagcaacgttttatgtcagccgtgtgcctgagagatggaagcctggagcgtttgatatggcgggacatagccatcagattttccatgtgtttgtagttatgggtgctcttgctcattgtgttaccactcttctcatcattgatttttcacgggcttccccttcttgtgggttttagcaagaagatattgtttagtaagcttctgtgatcttgcgtttcgatgtatgtgatcttgatttgctttggacaatccatggctatttcc

SEQ ID NO: 40144 - protein, 344 aa, Arabidopsis thaliana
  peptide (1)..(344): Ceres Seq. ID no. 13645870
MKRRRSAKKSPAMVTVTDWKGLDCGEETRIVRRLMKFEDLPEYLKDNEFIHNHYRCQWSLKDTFLSAFSWHNETLNIWTHLIGFGIFLWMTVVSCLETTEISLAGVFNGMAGVRICLSSNQTLLHDSNVTHHISCLTSQGEAIPKWPWLVYLVGAMGCLICSSVSHLLACHSKRFNVFFWRLDYAGISLMIVASFFAPIYYAFSCHPNFRLLYLSSISILGLLAIITLLSPALSTPRFRPFRANLFLAMGSSAVIPATHVLCLYWDHPNVFIALGYEIATALSYFVGATFYVSRVPERWKPGAFDMAGHSHQIFHVFVVMGALAHCVTTLLIIDFSRASPSCGF

SEQ ID NO: 40145 - protein, 332 aa, Arabidopsis thaliana
  peptide (1)..(332): Ceres Seq. ID no. 13645871
MVTVTDWKGLDCGEETRIVRRLMKFEDLPEYLKDNEFIHNHYRCQWSLKDTFLSAFSWHNETLNIWTHLIGFGIFLWMTVVSCLETTEISLAGVFNGMAGVRICLSSNQTLLHDSNVTHHISCLTSQGEAIPKWPWLVYLVGAMGCLICSSVSHLLACHSKRFNVFFWRLDYAGISLMIVASFFAPIYYAFSCHPNFRLLYLSSISILGLLAIITLLSPALSTPRFRPFRANLFLAMGSSAVIPATHVLCLYWDHPNVFIALGYEIATALSYFVGATFYVSRVPERWKPGAFDMAGHSHQIFHVFVVMGALAHCVTTLLIIDFSRASPSCGF

SEQ ID NO: 40146 - protein, 310 aa, Arabidopsis thaliana
  peptide (1)..(310): Ceres Seq. ID no. 13645872
MKFEDLPEYLKDNEFIHNHYRCQWSLKDTFLSAFSWHNETLNIWTHLIGFGIFLWMTVVSCLETTEISLAGVFNGMAGVRICLSSNQTLLHDSNVTHHISCLTSQGEAIPKWPWLVYLVGAMGCLICSSVSHLLACHSKRFNVFFWRLDYAGISLMIVASFFAPIYYAFSCHPNFRLLYLSSISILGLLAIITLLSPALSTPRFRPFRANLFLAMGSSAVIPATHVLCLYWDHPNVFIALGYEIATALSYFVGATFYVSRVPERWKPGAFDMAGHSHQIFHVFVVMGALAHCVTTLLIIDFSRASPSCGF

SEQ ID NO: 40147 - DNA, 1407 bp, Arabidopsis thaliana
  misc_feature (1)..(1407): Ceres Seq. ID no. 13488586
  misc_feature (1)..(1407): Ortholog of  Ceres SEQ ID NO 14308679 as cited in SEQ ID NO 58616
  misc_feature (1)..(1407): Ortholog of  Ceres SEQ ID NO 13596492 as cited in SEQ ID NO 68623
gcactttttcttctttgtctatctctctctctctctatctctaacctttgcttctccgtccttttctctgcttcagttttctcttcctaacaagcaaaacccgaaacagatcgaaccatttttttcctttagaaattaaacaacaaaaatcatttttttgtttgttttcggtttcacctaaccaaattgattctcttacctttttatatcacattgcatctgggtttccattagaaacaacaacaaacgaaaaaagaggcttctttcgtttcagagaggggttcaaaaatggcgacgaacattgggatgatggatagtgcttactttgttggaaggaatgagattctgagttggatcaatgaccgccttcatctcaatctctctcgtatcgaagaggctgcatcaggtgctgtgcaatgtcaaatgttggacatgacttttccaggagttgtgccaatgcacaaggttaactttgaagcaaagaacgagtacgaaatgatacaaaactacaaggtcatgcaagaagtcttcaccaaattgaaaattacaaagccattggaagtcaacaggcttgtcaaaggccgaccactagacaatttggagtttcttcaatggttgaaacgtttttgcgattcaataaatggcggcattatgaacgagaattataatccagtagaacgaagatcaagaggtgggagagagaaaagcgtaaagggatctagtaagatctcaaagtcattgcaaacaaacaatatgcatcatcctcctgtggctacttccaacaaaccagctggtcccaagcaagcaaaatcacatggaattggaggtgggagcaactcatcagccgaagtgcaagctctgtcaaaggaggtagaagatctcaaggtctcggttgatctcttggaaaaagaaagagatttttacttctctaagctccgggatatagagatactatgtcagactcctgaactcgatgatcttccgatagtggtagcggttaagaagatattatacgcaaccgatgcaaatgaatctgtgctagaagaagctcaagagtgcctaaaccagtctctagggcttgagggttatgaagaagaaggaaaagaggaggaagaagaagaagaagaagaagaagaagaagcagcagctgctgcagagacccaaacttaaagttgtgacaaataaaagtagagggcaacaatgatccattgccttgtcttagaagatagaatcacttggagaggatgtttgcacaatattcaatttaccctaaccggttttttggttttacagtgaactgaaccgaatttattccttcctaaacttgaaagattatctgatggattttcattgtatcacaaaaatgattttattaaatgttccccaataagtaaaattaaaaattac

SEQ ID NO: 40148 - protein, 293 aa, Arabidopsis thaliana
  peptide (1)..(293): Ceres Seq. ID no. 13488587
MATNIGMMDSAYFVGRNEILSWINDRLHLNLSRIEEAASGAVQCQMLDMTFPGVVPMHKVNFEAKNEYEMIQNYKVMQEVFTKLKITKPLEVNRLVKGRPLDNLEFLQWLKRFCDSINGGIMNENYNPVERRSRGGREKSVKGSSKISKSLQTNNMHHPPVATSNKPAGPKQAKSHGIGGGSNSSAEVQALSKEVEDLKVSVDLLEKERDFYFSKLRDIEILCQTPELDDLPIVVAVKKILYATDANESVLEEAQECLNQSLGLEGYEEEGKEEEEEEEEEEEEAAAAAETQT

SEQ ID NO: 40149 - protein, 287 aa, Arabidopsis thaliana
  peptide (1)..(287): Ceres Seq. ID no. 13488588
MMDSAYFVGRNEILSWINDRLHLNLSRIEEAASGAVQCQMLDMTFPGVVPMHKVNFEAKNEYEMIQNYKVMQEVFTKLKITKPLEVNRLVKGRPLDNLEFLQWLKRFCDSINGGIMNENYNPVERRSRGGREKSVKGSSKISKSLQTNNMHHPPVATSNKPAGPKQAKSHGIGGGSNSSAEVQALSKEVEDLKVSVDLLEKERDFYFSKLRDIEILCQTPELDDLPIVVAVKKILYATDANESVLEEAQECLNQSLGLEGYEEEGKEEEEEEEEEEEEAAAAAETQT

SEQ ID NO: 40150 - protein, 286 aa, Arabidopsis thaliana
  peptide (1)..(286): Ceres Seq. ID no. 13488589
MDSAYFVGRNEILSWINDRLHLNLSRIEEAASGAVQCQMLDMTFPGVVPMHKVNFEAKNEYEMIQNYKVMQEVFTKLKITKPLEVNRLVKGRPLDNLEFLQWLKRFCDSINGGIMNENYNPVERRSRGGREKSVKGSSKISKSLQTNNMHHPPVATSNKPAGPKQAKSHGIGGGSNSSAEVQALSKEVEDLKVSVDLLEKERDFYFSKLRDIEILCQTPELDDLPIVVAVKKILYATDANESVLEEAQECLNQSLGLEGYEEEGKEEEEEEEEEEEEAAAAAETQT

SEQ ID NO: 40151 - DNA, 1181 bp, Arabidopsis thaliana
  misc_feature (1)..(1181): Ceres Seq. ID no. 12395326
  misc_feature (1)..(1181): Ortholog of  Ceres SEQ ID NO 13654531 as cited in SEQ ID NO 68083
tttttacaaatcagacaaaacccaacaattaatgaaacaatgtcaaaaacggctaattttctcagcctgagatccaatcctctacctccgattttctcctccaccggaaactctcctttcctccgagcttcctcggctctgaatcttccgacaactgcttcgaaacctttccacagttggattcgtgcttcttcacgtcgccggttggttctcggtggttttggcggcgcttctttgtggatgaacaacaatatgtccggtaaatttggcggtaaatctttcattgcttccgctaggcagaccaatccttctcccgtcgaacaggcgttgaataaggtggattggccagagactttccctttcaaagaagaagatttccagagatacgatgagtcgtctgattcaacattctacgaagctccaaggtttgtgacacacattgatgatccagctatagctgcattgacaaagtattactccaaggttttgcctcagagcgatactccaggagtgagcatactcgatatgtgtagcagttgggtcagtcattatccaccggggtataggcaagaacgaatagttggaatgggtatgaatgaagaagagcttaagcgaaatccggttctcaccgagtacatagtccaagacttaaatctcaattcaaatctgccttttgaagacaattctttccaagttataaccaatgtggtaagtgtggattatcttacaaagccgcttgaagtgttcaaggaaatgaacagaatccttaagcccggaggactcgctctaatgagcttctcgaaccgttgcttctttactaaagcaatctcgatatggacatcaactggcgacgcagatcatgctctcattgttggatcatactttcactacgccggaggatttgaagctcctcaggccgttgatatatctccaaatccagggcgttcagatcctatgtacgttgtttactctagaaaactccccatggtttaaacctgagatccaagcacatcatgtatacacatagtagagaccgaggaaactaattcttcgattaagacaagggaacttctgaaatcttgtttataaagaatgtgccactctctcaacactaataacaatgtcatataaagaatctgaagccagattcgcaaatttgacgataatacttttcttcgagg

SEQ ID NO: 40152 - protein, 330 aa, Arabidopsis thaliana
  peptide (1)..(330): Ceres Seq. ID no. 12395327
FLQIRQNPTINETMSKTANFLSLRSNPLPPIFSSTGNSPFLRASSALNLPTTASKPFHSWIRASSRRRLVLGGFGGASLWMNNNMSGKFGGKSFIASARQTNPSPVEQALNKVDWPETFPFKEEDFQRYDESSDSTFYEAPRFVTHIDDPAIAALTKYYSKVLPQSDTPGVSILDMCSSWVSHYPPGYRQERIVGMGMNEEELKRNPVLTEYIVQDLNLNSNLPFEDNSFQVITNVVSVDYLTKPLEVFKEMNRILKPGGLALMSFSNRCFFTKAISIWTSTGDADHALIVGSYFHYAGGFEAPQAVDISPNPGRSDPMYVVYSRKLPMV

SEQ ID NO: 40153 - protein, 317 aa, Arabidopsis thaliana
  peptide (1)..(317): Ceres Seq. ID no. 12395328
MSKTANFLSLRSNPLPPIFSSTGNSPFLRASSALNLPTTASKPFHSWIRASSRRRLVLGGFGGASLWMNNNMSGKFGGKSFIASARQTNPSPVEQALNKVDWPETFPFKEEDFQRYDESSDSTFYEAPRFVTHIDDPAIAALTKYYSKVLPQSDTPGVSILDMCSSWVSHYPPGYRQERIVGMGMNEEELKRNPVLTEYIVQDLNLNSNLPFEDNSFQVITNVVSVDYLTKPLEVFKEMNRILKPGGLALMSFSNRCFFTKAISIWTSTGDADHALIVGSYFHYAGGFEAPQAVDISPNPGRSDPMYVVYSRKLPMV

SEQ ID NO: 40154 - protein, 250 aa, Arabidopsis thaliana
  peptide (1)..(250): Ceres Seq. ID no. 12395329
MNNNMSGKFGGKSFIASARQTNPSPVEQALNKVDWPETFPFKEEDFQRYDESSDSTFYEAPRFVTHIDDPAIAALTKYYSKVLPQSDTPGVSILDMCSSWVSHYPPGYRQERIVGMGMNEEELKRNPVLTEYIVQDLNLNSNLPFEDNSFQVITNVVSVDYLTKPLEVFKEMNRILKPGGLALMSFSNRCFFTKAISIWTSTGDADHALIVGSYFHYAGGFEAPQAVDISPNPGRSDPMYVVYSRKLPMV

SEQ ID NO: 40155 - DNA, 1302 bp, Arabidopsis thaliana
  misc_feature (1)..(1302): Ceres Seq. ID no. 13575072
  misc_feature (1)..(1302): Ortholog of  Ceres SEQ ID NO 13595688 as cited in SEQ ID NO 54342
  misc_feature (1)..(1302): Ortholog of  Ceres SEQ ID NO 13595240 as cited in SEQ ID NO 56316
  misc_feature (1)..(1302): Ortholog of  Ceres SEQ ID NO 15168425 as cited in SEQ ID NO 57370
atccggagacatccattttctctggtagctgtttacttcttcttcttcttcttcttcttcttcctcctcctctgttcgtcaatcgccgatctcgttgcttcattttccttgagatcgattggtacaagtgttcatccaatggttggaggaggagttatccggcagcttcttagaaggaaacttcattcccaatcagtcgcaactccggtattgtcatggttgtcttcgaagaaagcgaatgaagatgctgggtctgctggtttaagagcatttgctctcatgggtgctggtattaccggattattgagtttttctactgttgcatctgctgatgaggctgaacatggtctggagtgtcctaactacccttggccacatgagggcattctcagctcatatgaccatgcttcgatccgtcgtggtcaccaagtttatcagcaagtttgtgcgtcttgccattcgatgtctctgatctcataccgagacttggtgggtgttgcctacacagaggaagaggcgaaggccatggcagctgaaatcgaggttgttgatggaccaaatgatgagggtgagatgttcacccgacctggtaaactcagtgatcggcttcctgaaccatactcaaatgaatcggctgctaggttcgccaatggaggagcgtatccaccggatctaagtcttgtaactaaggcacgtcacaatggccaaaattatgtctttgctctgttgactggttatcgtgatcctcctgctggaatttcgatcagagaggggctacactacaatccttatttccctggtggagcaatcgctatgccaaaaatgctcaacgatgaagctgtggaatatgaagatggaactcctgcaacagaagcacagatgggtaaagatgttgtatccttcttgtcctgggcagctgaaccagagatggaagagaggaaattgatggggttcaaatggatattcttactgtctttggctctgcttcaagctgcgtattacaggagactgaaatggtcagtactcaaatcccgtaagcttgttctcgacgttgttaactaatcccgtgaagatcaccttttctctgggtaataatcattaatcttgaaagggataaatggtgaatcccactttttgtctcaaaagacatgtttctttgtttattgtttagaaagtctaatgaggcaaagaagtaaagcttttttaacctcaagtcacacatgattttgagattatattatttctttttggtttgttgtctcctaaaccggactcggtttgtcttaataaaaatgtggtttt

SEQ ID NO: 40156 - protein, 353 aa, Arabidopsis thaliana
  peptide (1)..(353): Ceres Seq. ID no. 13575073
IRRHPFSLVAVYFFFFFFFFFLLLCSSIADLVASFSLRSIGTSVHPMVGGGVIRQLLRRKLHSQSVATPVLSWLSSKKANEDAGSAGLRAFALMGAGITGLLSFSTVASADEAEHGLECPNYPWPHEGILSSYDHASIRRGHQVYQQVCASCHSMSLISYRDLVGVAYTEEEAKAMAAEIEVVDGPNDEGEMFTRPGKLSDRLPEPYSNESAARFANGGAYPPDLSLVTKARHNGQNYVFALLTGYRDPPAGISIREGLHYNPYFPGGAIAMPKMLNDEAVEYEDGTPATEAQMGKDVVSFLSWAAEPEMEERKLMGFKWIFLLSLALLQAAYYRRLKWSVLKSRKLVLDVVN

SEQ ID NO: 40157 - protein, 307 aa, Arabidopsis thaliana
  peptide (1)..(307): Ceres Seq. ID no. 13575074
MVGGGVIRQLLRRKLHSQSVATPVLSWLSSKKANEDAGSAGLRAFALMGAGITGLLSFSTVASADEAEHGLECPNYPWPHEGILSSYDHASIRRGHQVYQQVCASCHSMSLISYRDLVGVAYTEEEAKAMAAEIEVVDGPNDEGEMFTRPGKLSDRLPEPYSNESAARFANGGAYPPDLSLVTKARHNGQNYVFALLTGYRDPPAGISIREGLHYNPYFPGGAIAMPKMLNDEAVEYEDGTPATEAQMGKDVVSFLSWAAEPEMEERKLMGFKWIFLLSLALLQAAYYRRLKWSVLKSRKLVLDVVN

SEQ ID NO: 40158 - protein, 260 aa, Arabidopsis thaliana; identical to SEQ ID NO: 23964
  peptide (1)..(260): Ceres Seq. ID no. 13575075

SEQ ID NO: 40159 - DNA, 2150 bp, Arabidopsis thaliana
  misc_feature (1)..(2150): Ceres Seq. ID no. 13489476
  misc_feature (1)..(2150): Ortholog of  Ceres SEQ ID NO 14312825 as cited in SEQ ID NO 55638
agacttaacatttcatatagagaaacttgaaacaacaatctgagcaaagagcgttttatcttgttaattttggaatctccattacgatggaaggtgcggctgatcaaactacgaaagcgttatctgaattagccatggattcttctaccaccttgaatgctgctgagtctagcgctggtgatggagctggacctcggagtaaaaatgctttgaagaaggaacagaaaatgaagcagaaagaggaagagaagagacgaaaggacgaagagaaagctgaaaaggctaaacaagcacctaaagcaagctcccagaaggcagtggcagcagatgatgaagagatggatgcaacgcaatactatgagaacagattgaaatatcttgcggctgagaaggctaaaggggagaatccatatcctcacaagttcgctgtgtcaatgtcgattcctaaatacattgagacgtatggtagtttgaacaatggagatcatgttgaaaacgctgaggagtctttagctgggcggataatgagcaagcgatcttcctcttccaagctcttcttctatgatctacacggtgatgatttcaaggtccaagtcatggctgatgcaagtaagtcaggattggatgaagctgagttcttaaagctccattcgaatgctaagcgtggtgatattgttggagtcattgggtttccaggaaaaactaagaggggagaattgagtatctttccccgatcatttattcttctgtcccattgcctccacatgatgccgagaaaggctgataatgttaatgcaaagaaacctgaaatctgggttccaggtcaaacgagaaatcctgaagcatatgttctgaaagaccaggaatcaagatatcgtcagcgtcatcttgatatgattttgaacgtggaggttcgtcagatattcaggactagagctaaaatcatctcctatgtccgcagattcctcgacaacaaaaatttcttggaggtcgagacacctatgatgaacatgattgctggtggagcagctgctagaccttttgtgacacatcacaatgatctagatatgaggctgtacatgcgaatcgcacctgaactctatctcaagcaacttattgttggtggcttggaacgtgtttacgagataggaaagcaattcagaaacgagggtatagacctgacccacaatccggagttcaccacttgcgagttctatatggcttttgcagactacaatgacctgatggaaatgactgaggttatgttgagtggcatggttaaggaattaacaggtggttataaaatcaagtataatgctaatgggtatgacaaggatccaattgaaatcgactttactccaccattcaggaggattgagatgataggagagttagagaaggttgctaagctcaatataccaaaagacttggctagcgaagaagctaacaagtatctgattgatgcatgtgcgaggtttgatgtcaaatgccctcctcctcagacaacagctcgtctgttagataaacttgttggagaatttctggaaccgacatgtgtgaacccaactttcatcatcaaccagcccgagatcatgagtcctttggctaaatggcacagatcgaagagtggattgacagagagattcgagctgttcatcaacaaacatgaactctgcaatgcctacacggagctaaacgatcctgtggtacagcgccagcgttttgctgatcagctcaaggatcgacagtctggagacgatgaagcgatggctttagatgaaacattttgtaatgctttagaatatgggttggctcctacaggtggctggggattaggaatagacagactctctatgcttttgaccgactcactgaacatcaaggaggttcttttcttcccggcaatgaggccaccacaggaggagtcagcagccgctcaagctcctttaacagaagagaagaaataaggagtctacacaagttttctgactaagcttagtcaattcgctattatgcactctgttctcaagttacttgtaattgcagaccatatttttcaaaaaacaaataccaattaattattatcaaaaacctttgtaagacttttttgcaattagtagtgatttcacttatattgaagggcctttttt

SEQ ID NO: 40160 - protein, 626 aa, Arabidopsis thaliana
  peptide (1)..(626): Ceres Seq. ID no. 13489477
MEGAADQTTKALSELAMDSSTTLNAAESSAGDGAGPRSKNALKKEQKMKQKEEEKRRKDEEKAEKAKQAPKASSQKAVAADDEEMDATQYYENRLKYLAAEKAKGENPYPHKFAVSMSIPKYIETYGSLNNGDHVENAEESLAGRIMSKRSSSSKLFFYDLHGDDFKVQVMADASKSGLDEAEFLKLHSNAKRGDIVGVIGFPGKTKRGELSIFPRSFILLSHCLHMMPRKADNVNAKKPEIWVPGQTRNPEAYVLKDQESRYRQRHLDMILNVEVRQIFRTRAKIISYVRRFLDNKNFLEVETPMMNMIAGGAAARPFVTHHNDLDMRLYMRIAPELYLKQLIVGGLERVYEIGKQFRNEGIDLTHNPEFTTCEFYMAFADYNDLMEMTEVMLSGMVKELTGGYKIKYNANGYDKDPIEIDFTPPFRRIEMIGELEKVAKLNIPKDLASEEANKYLIDACARFDVKCPPPQTTARLLDKLVGEFLEPTCVNPTFIINQPEIMSPLAKWHRSKSGLTERFELFINKHELCNAYTELNDPVVQRQRFADQLKDRQSGDDEAMALDETFCNALEYGLAPTGGWGLGIDRLSMLLTDSLNIKEVLFFPAMRPPQEESAAAQAPLTEEKK

SEQ ID NO: 40161 - protein, 610 aa, Arabidopsis thaliana
  peptide (1)..(610): Ceres Seq. ID no. 13489478
MDSSTTLNAAESSAGDGAGPRSKNALKKEQKMKQKEEEKRRKDEEKAEKAKQAPKASSQKAVAADDEEMDATQYYENRLKYLAAEKAKGENPYPHKFAVSMSIPKYIETYGSLNNGDHVENAEESLAGRIMSKRSSSSKLFFYDLHGDDFKVQVMADASKSGLDEAEFLKLHSNAKRGDIVGVIGFPGKTKRGELSIFPRSFILLSHCLHMMPRKADNVNAKKPEIWVPGQTRNPEAYVLKDQESRYRQRHLDMILNVEVRQIFRTRAKIISYVRRFLDNKNFLEVETPMMNMIAGGAAARPFVTHHNDLDMRLYMRIAPELYLKQLIVGGLERVYEIGKQFRNEGIDLTHNPEFTTCEFYMAFADYNDLMEMTEVMLSGMVKELTGGYKIKYNANGYDKDPIEIDFTPPFRRIEMIGELEKVAKLNIPKDLASEEANKYLIDACARFDVKCPPPQTTARLLDKLVGEFLEPTCVNPTFIINQPEIMSPLAKWHRSKSGLTERFELFINKHELCNAYTELNDPVVQRQRFADQLKDRQSGDDEAMALDETFCNALEYGLAPTGGWGLGIDRLSMLLTDSLNIKEVLFFPAMRPPQEESAAAQAPLTEEKK

SEQ ID NO: 40162 - protein, 579 aa, Arabidopsis thaliana
  peptide (1)..(579): Ceres Seq. ID no. 13489479
MKQKEEEKRRKDEEKAEKAKQAPKASSQKAVAADDEEMDATQYYENRLKYLAAEKAKGENPYPHKFAVSMSIPKYIETYGSLNNGDHVENAEESLAGRIMSKRSSSSKLFFYDLHGDDFKVQVMADASKSGLDEAEFLKLHSNAKRGDIVGVIGFPGKTKRGELSIFPRSFILLSHCLHMMPRKADNVNAKKPEIWVPGQTRNPEAYVLKDQESRYRQRHLDMILNVEVRQIFRTRAKIISYVRRFLDNKNFLEVETPMMNMIAGGAAARPFVTHHNDLDMRLYMRIAPELYLKQLIVGGLERVYEIGKQFRNEGIDLTHNPEFTTCEFYMAFADYNDLMEMTEVMLSGMVKELTGGYKIKYNANGYDKDPIEIDFTPPFRRIEMIGELEKVAKLNIPKDLASEEANKYLIDACARFDVKCPPPQTTARLLDKLVGEFLEPTCVNPTFIINQPEIMSPLAKWHRSKSGLTERFELFINKHELCNAYTELNDPVVQRQRFADQLKDRQSGDDEAMALDETFCNALEYGLAPTGGWGLGIDRLSMLLTDSLNIKEVLFFPAMRPPQEESAAAQAPLTEEKK

SEQ ID NO: 40163 - DNA, 1467 bp, Arabidopsis thaliana
  misc_feature (1)..(1467): Ceres Seq. ID no. 12395585
  misc_feature (1)..(1467): Ortholog of  Ceres SEQ ID NO 13658778 as cited in SEQ ID NO 66511
atcaatagttcaatactaagaaaccggcctatatatatatttgtggtcactaatttctccaaaaaccagttgccttccgtaaaaagatggaacctcagagaaaacactcgacagccctccacacgtgtcatccctgccggcgaaccattccatacagaatctacgccgtatttcacacgtgtggcatcatagctctcatgtatcaccatgtacactcaattgtcaacgcaaacaacactctaataacatgtcttcttctcctctccgatattgttctcgccttcatgtgggcaaccacaacttccctccggttaaacccgattcatcggaccgagtaccctgaaaaatatgctgctaaaccggaggactttccaaagctggacgtttttatatgcacggctgatccgtacaaggagcctccgatgatggtggttaacaccgctttatcggtgatggcttacgagtatccgtctcataagatctcagtgtacgtatcggacgatggaggatcttccttgactttgtttgctcttatggaggctgccaagttctctaagcattggttgcccttttgcaagaataacaatgttcaagatcgctctcctgaagtttatttttcttcaaagtcacattcttcgagtgatgaagctgaaaatcttaagatgatgtacgaagacatgaagagtagagtcgaacatgtggtcgagagcggaaaagttgagactgcgtttatcgcatgcgatcaatttagttgtgtgttcgatctgtggacagataaattcactcgtcatgaccatcctaccattattatggtgctacaacataacgaaacagagatgatgccaaaccttatatatgtttcaagagaaaagagtaaagtttcaccacatcatttcaaagccggtgctcttaatactttgttacgtgtatctgccgtgatgacaaactcaccaatcattctaacactagattgtgacatgtactcaaacaatcctacaacaccacttcatgctctgtgctatttgtcagaccctaaaatcaattttgatttaggatttgtgcaatttcctcaaaaatttcaaggagtaaacaaaaatgatatttatgcatccgagctcaaacgcccatttgacatcaacacggttgggtttgatggacttatgggaccagttcatatgggaactgggtgtttcttcaatcgacgggcgttttatgggcctccgactactttgattttgcctgagatagaaacatttgggccaaatcggattgccgataagcccattaaagcccaagatattttggcgttggcacacgatgtagcaggatgtaactacgagtgcaacaccaattggggatccaaggtaagattaaaatgaactttagctttcttttatgtatgttgattttttggttatgtttacagattttgtttcttttacatcaactagtcttctcaaaatccat

SEQ ID NO: 40164 - protein, 430 aa, Arabidopsis thaliana
  peptide (1)..(430): Ceres Seq. ID no. 12395586
MEPQRKHSTALHTCHPCRRTIPYRIYAVFHTCGIIALMYHHVHSIVNANNTLITCLLLLSDIVLAFMWATTTSLRLNPIHRTEYPEKYAAKPEDFPKLDVFICTADPYKEPPMMVVNTALSVMAYEYPSHKISVYVSDDGGSSLTLFALMEAAKFSKHWLPFCKNNNVQDRSPEVYFSSKSHSSSDEAENLKMMYEDMKSRVEHVVESGKVETAFIACDQFSCVFDLWTDKFTRHDHPTIIMVLQHNETEMMPNLIYVSREKSKVSPHHFKAGALNTLLRVSAVMTNSPIILTLDCDMYSNNPTTPLHALCYLSDPKINFDLGFVQFPQKFQGVNKNDIYASELKRPFDINTVGFDGLMGPVHMGTGCFFNRRAFYGPPTTLILPEIETFGPNRIADKPIKAQDILALAHDVAGCNYECNTNWGSKVRLK

SEQ ID NO: 40165 - protein, 393 aa, Arabidopsis thaliana
  peptide (1)..(393): Ceres Seq. ID no. 12395587
MYHHVHSIVNANNTLITCLLLLSDIVLAFMWATTTSLRLNPIHRTEYPEKYAAKPEDFPKLDVFICTADPYKEPPMMVVNTALSVMAYEYPSHKISVYVSDDGGSSLTLFALMEAAKFSKHWLPFCKNNNVQDRSPEVYFSSKSHSSSDEAENLKMMYEDMKSRVEHVVESGKVETAFIACDQFSCVFDLWTDKFTRHDHPTIIMVLQHNETEMMPNLIYVSREKSKVSPHHFKAGALNTLLRVSAVMTNSPIILTLDCDMYSNNPTTPLHALCYLSDPKINFDLGFVQFPQKFQGVNKNDIYASELKRPFDINTVGFDGLMGPVHMGTGCFFNRRAFYGPPTTLILPEIETFGPNRIADKPIKAQDILALAHDVAGCNYECNTNWGSKVRLK

SEQ ID NO: 40166 - protein, 364 aa, Arabidopsis thaliana
  peptide (1)..(364): Ceres Seq. ID no. 12395588
MWATTTSLRLNPIHRTEYPEKYAAKPEDFPKLDVFICTADPYKEPPMMVVNTALSVMAYEYPSHKISVYVSDDGGSSLTLFALMEAAKFSKHWLPFCKNNNVQDRSPEVYFSSKSHSSSDEAENLKMMYEDMKSRVEHVVESGKVETAFIACDQFSCVFDLWTDKFTRHDHPTIIMVLQHNETEMMPNLIYVSREKSKVSPHHFKAGALNTLLRVSAVMTNSPIILTLDCDMYSNNPTTPLHALCYLSDPKINFDLGFVQFPQKFQGVNKNDIYASELKRPFDINTVGFDGLMGPVHMGTGCFFNRRAFYGPPTTLILPEIETFGPNRIADKPIKAQDILALAHDVAGCNYECNTNWGSKVRLK

SEQ ID NO: 40167 - DNA, 670 bp, Arabidopsis thaliana
  misc_feature (1)..(670): Ceres Seq. ID no. 12422360
  misc_feature (1)..(670): Ortholog of  Ceres SEQ ID NO 13598935 as cited in SEQ ID NO 1239
  misc_feature (1)..(670): Ortholog of  Ceres SEQ ID NO 13598171 as cited in SEQ ID NO 61357
acaaacaacgaacatggctaaacgttttctgcttcttcttcctcttttgtcatctattcttcttcttgccgtgtccgttacagcttactccacaacaacgccgtatcaaggctacaagccggagaaattcacccacctccacttctacttccatgacgtcatcaccggtgacaaacctaccgccatcaaagtcgccgaagcccgccgaacaaactccctcaacgtcaattttggcgtgatcatgatcgcagatgatcctttgaccgaaggaccagacccgagctcaaagtaagtgggaagagctcaggggatgtacgcatcaacagccatgaaggacatagtcttcacaatggtctttaactatgttttcacggcaggagagtttaatggaagcaccatcgcggtgtatggacggaatgatatattttcgaaggtgagagagttgccgattattgtaggaactggtgctttcaggtttgctagaggctatgcactgcccaagacttataagattgttggtctagatgccgtggtcgagtataatgtcttcatttggcattaatcatttgcatattgtctaatgtctttccgaaataaattgtttcactctggtttcctcatattgtttttggttcttttatatatatatatatataacaattgttctgtt

SEQ ID NO: 40168 - protein, 96 aa, Arabidopsis thaliana
  peptide (1)..(96): Ceres Seq. ID no. 12422361
QTTNMAKRFLLLLPLLSSILLLAVSVTAYSTTTPYQGYKPEKFTHLHFYFHDVITGDKPTAIKVAEARRTNSLNVNFGVIMIADDPLTEGPDPSSK

SEQ ID NO: 40169 - protein, 92 aa, Arabidopsis thaliana
  peptide (1)..(92): Ceres Seq. ID no. 12422362
MAKRFLLLLPLLSSILLLAVSVTAYSTTTPYQGYKPEKFTHLHFYFHDVITGDKPTAIKVAEARRTNSLNVNFGVIMIADDPLTEGPDPSSK

SEQ ID NO: 40170 - protein, 83 aa, Arabidopsis thaliana
  peptide (1)..(83): Ceres Seq. ID no. 12422363
MYASTAMKDIVFTMVFNYVFTAGEFNGSTIAVYGRNDIFSKVRELPIIVGTGAFRFARGYALPKTYKIVGLDAVVEYNVFIWH

SEQ ID NO: 40171 - DNA, 1033 bp, Arabidopsis thaliana
  misc_feature (1)..(1033): Ceres Seq. ID no. 12326197
  misc_feature (1)..(1033): Ortholog of  Ceres SEQ ID NO 12635513 as cited in SEQ ID NO 0
aatctcctctctttgattctttctgctccgaaaaacagagagagagaacaacaaccaaacactcatttctccacatcttgagagaaaaaaacagagcaagtatattagagatctcatggcgatggcggtctccggagctgtcctcagtgggcttggttcttcgttcctcaccggaggcaagagaggtgccaccgcattggcaagcggcgtaggcactggagctcagagagttggcaggaaaactcttattgtcgctgctgcggctgctcagcctaagaaatcttggatccctgccgttaaaggtggtggcaacttccttgaccctgaatggctcgatggctcgctaccaggagatttcgggttcgacccattgggtttggggaaagacccggcttttctgaaatggtacagagaggctgagctgatccatggccgatgggcgatggcagcggttcttgggatcttcgtcggccaggcctggagcggtgtggcatggtttgaagctggagcccagccagacgcgatcgctcccttctcgttcgggtcgcttcttggaacccaattgcttctcatgggttgggtggagagcaaacgatgggtcgatttcttcaacccggattctcaatcggttgagtgggcaacgccatggtcgaagaccgccgagaatttcgcgaactataccggcgatcagggataccccggtgggagattcttcgatccgttgggtctcgccgggaaaaaccgcgacggtgtttatgagccggactttgagaagctggagaggctgaaattggcagagattaagcactcgaggctcgcaatggttgccatgttgatcttttactttgaggccgggcaggggaaaacgcctctcggtgctcttggtttgtgagaaaacggcatgatgtttttgattctgtagatacaatttctcttccaaaaacctaatgtttctcttcttcaatgtgacatttgggaaaagatcatcaaaccattgctttaaatgtaaaatgaaatcatgaggcttgttcgt

SEQ ID NO: 40172 - protein, 258 aa, Arabidopsis thaliana
  peptide (1)..(258): Ceres Seq. ID no. 12326198
MAMAVSGAVLSGLGSSFLTGGKRGATALASGVGTGAQRVGRKTLIVAAAAAQPKKSWIPAVKGGGNFLDPEWLDGSLPGDFGFDPLGLGKDPAFLKWYREAELIHGRWAMAAVLGIFVGQAWSGVAWFEAGAQPDAIAPFSFGSLLGTQLLLMGWVESKRWVDFFNPDSQSVEWATPWSKTAENFANYTGDQGYPGGRFFDPLGLAGKNRDGVYEPDFEKLERLKLAEIKHSRLAMVAMLIFYFEAGQGKTPLGALGL

SEQ ID NO: 40173 - protein, 256 aa, Arabidopsis thaliana
  peptide (1)..(256): Ceres Seq. ID no. 12326199
MAVSGAVLSGLGSSFLTGGKRGATALASGVGTGAQRVGRKTLIVAAAAAQPKKSWIPAVKGGGNFLDPEWLDGSLPGDFGFDPLGLGKDPAFLKWYREAELIHGRWAMAAVLGIFVGQAWSGVAWFEAGAQPDAIAPFSFGSLLGTQLLLMGWVESKRWVDFFNPDSQSVEWATPWSKTAENFANYTGDQGYPGGRFFDPLGLAGKNRDGVYEPDFEKLERLKLAEIKHSRLAMVAMLIFYFEAGQGKTPLGALGL

SEQ ID NO: 40174 - protein, 149 aa, Arabidopsis thaliana
  peptide (1)..(149): Ceres Seq. ID no. 12326200
MAAVLGIFVGQAWSGVAWFEAGAQPDAIAPFSFGSLLGTQLLLMGWVESKRWVDFFNPDSQSVEWATPWSKTAENFANYTGDQGYPGGRFFDPLGLAGKNRDGVYEPDFEKLERLKLAEIKHSRLAMVAMLIFYFEAGQGKTPLGALGL

SEQ ID NO: 40175 - DNA, 936 bp, Arabidopsis thaliana
  misc_feature (1)..(936): Ceres Seq. ID no. 13494708
  misc_feature (1)..(936): Ortholog of  Ceres SEQ ID NO 15168557 as cited in SEQ ID NO 58119
  misc_feature (1)..(936): Ortholog of  Ceres SEQ ID NO 14316469 as cited in SEQ ID NO 59125
atgaccgacgaacccataaaagaccaccagttcgacaacggcggcgacgaggctgagataacagacgcggcgaagaggtcccttccgattaaaagtcgcaagcattcaacgatggcttccatcacgaattatgtccgatacatggctcacaagctcgagtactctctcactctcagccttaagaaacatactagagagaagctcagtgaccgggaactctttggtgtagtcatgaagaatctattctatggaagaataagctacttacactcggacaaaggaaaagagatggccccaaccatgggaacaaatgaaagcacgctacttgtccgtaagctaccagttgttgatacaaggtacattttcgtaggggatgctgttgtcttgaaggacccgaatgaaacaaataagtatatagtcagaagactagcagctttagagggatctgaaatggtatcaagtgatgagaaagatgagccttttgttctcgaaaaggatcagtgctgggtcgttgctgagaatcaagagatgaaatctaaagaagcatatgatagtcgaacatttggtccaatttcaatggcggacatagtgggaagagctatatattgtctgaggacagcagtggatcatggtccagtaagcaacagtgaatttgccatggacgaggattccccaatcctggcggtagaacttgacgtggatgaattggctaaaggccacaaggcgtcataatgaagaacctttcttgtaccacattttcattcactgtgtcgatgtttcacttataaactccaatttagttgtcattggaggtgtttgtggcaaatgttggcccgttggtacttaagcttaatacgtcggatgctgttgagtgttgacttgaggaaaaggttcttcatgagcttcatcctctctataataaacaaccatttctat

SEQ ID NO: 40176 - protein, 243 aa, Arabidopsis thaliana
  peptide (1)..(243): Ceres Seq. ID no. 13494709
MTDEPIKDHQFDNGGDEAEITDAAKRSLPIKSRKHSTMASITNYVRYMAHKLEYSLTLSLKKHTREKLSDRELFGVVMKNLFYGRISYLHSDKGKEMAPTMGTNESTLLVRKLPVVDTRYIFVGDAVVLKDPNETNKYIVRRLAALEGSEMVSSDEKDEPFVLEKDQCWVVAENQEMKSKEAYDSRTFGPISMADIVGRAIYCLRTAVDHGPVSNSEFAMDEDSPILAVELDVDELAKGHKAS

SEQ ID NO: 40177 - protein, 206 aa, Arabidopsis thaliana
  peptide (1)..(206): Ceres Seq. ID no. 13494710
MASITNYVRYMAHKLEYSLTLSLKKHTREKLSDRELFGVVMKNLFYGRISYLHSDKGKEMAPTMGTNESTLLVRKLPVVDTRYIFVGDAVVLKDPNETNKYIVRRLAALEGSEMVSSDEKDEPFVLEKDQCWVVAENQEMKSKEAYDSRTFGPISMADIVGRAIYCLRTAVDHGPVSNSEFAMDEDSPILAVELDVDELAKGHKAS

SEQ ID NO: 40178 - protein, 196 aa, Arabidopsis thaliana
  peptide (1)..(196): Ceres Seq. ID no. 13494711
MAHKLEYSLTLSLKKHTREKLSDRELFGVVMKNLFYGRISYLHSDKGKEMAPTMGTNESTLLVRKLPVVDTRYIFVGDAVVLKDPNETNKYIVRRLAALEGSEMVSSDEKDEPFVLEKDQCWVVAENQEMKSKEAYDSRTFGPISMADIVGRAIYCLRTAVDHGPVSNSEFAMDEDSPILAVELDVDELAKGHKAS

SEQ ID NO: 40179 - DNA, 1411 bp, Arabidopsis thaliana
  misc_feature (1)..(1411): Ceres Seq. ID no. 13497337
  misc_feature (1)..(1411): Ortholog of  Ceres SEQ ID NO 14301420 as cited in SEQ ID NO 56580
actaccatcgtcgtctccgcgagttcttctctgcgtttaagccatagataacaaaccaaactaaaaaaaaaaagtttctccttttatcattccttctcttcccttgtataggtgtgatcctcttcaaggggatttctctggcgggtcatacattcgcaccgatcaaagtcggattggtctttcttaacgcaatcttgacccgattcaaaaaatttctgggtttgttagtgaatagataagaagataaatgggagctccgttagtgtgccacgggcattctcgtcccgtcgtcgatgtggcttatagtccggtgactccagatgggttctttctcattagcgccagcaaagattcgaatccgatgttgaggaatggagagactggtgactggattgggacttttgaaggacataagggagcagtttggagttgcagccttgataaaaatgctattcgtgctgcctcagcttctgctgatttcactgcgaaaatatggaatgcattgacaggagatgaattgcactcctttgaacacaagcacattgttcgtgcatgtgccttttctgaggacactcaccgtttactcactggtggaatggagaaaatacttcggatattcgatttgaatcggccagacgcacctccaaaagaagtcgggaattcccctggttcaattagaactgtcgaatggcttcatagtgataatacaatcttaagctcttgcacagataccggtgacattaggttatgggacataagaagtgacaagattgttcatacattagaaacaaagtccccagttactagtgctgaagtaagtcaggatgggcgatacatcactactgctgatggatctagtgttaagttttgggacgctaaaaattttggattgctgaagagctatgacatgccttgcaatgttgaatcggcatcgttggaaccgaaacacggtaacactttcattgctggaggagaagatatgtgggtgcacaggtttgatttccagactggagaagagattgggtgtaacaagggtcatcacgggccagtgcactgcgtgaggtatgcgccaggaggggagtcatacacctcaggctcagaagacggaacggtcagaatatgggtggtgggttcggtaaaccatcctgaggagagcaatctaagcggccacgtgaagcttgtggcagaggaggttgtgcgtaaagctgaaagtctccgtatcagtgagaaagccgcagaagctaaatgaaacaccatcgttagcttatgatatcacatagattcatagttgtttttgcatcattataagatgtgacaaaggggttttgccttttaaaagtctctcagaccgaataaaacgaaataatcttcaactatacttgagtgaatagtgaatctaatccaaattttg

SEQ ID NO: 40180 - protein, 333 aa, Arabidopsis thaliana
  peptide (1)..(333): Ceres Seq. ID no. 13497338
MGAPLVCHGHSRPVVDVAYSPVTPDGFFLISASKDSNPMLRNGETGDWIGTFEGHKGAVWSCSLDKNAIRAASASADFTAKIWNALTGDELHSFEHKHIVRACAFSEDTHRLLTGGMEKILRIFDLNRPDAPPKEVGNSPGSIRTVEWLHSDNTILSSCTDTGDIRLWDIRSDKIVHTLETKSPVTSAEVSQDGRYITTADGSSVKFWDAKNFGLLKSYDMPCNVESASLEPKHGNTFIAGGEDMWVHRFDFQTGEEIGCNKGHHGPVHCVRYAPGGESYTSGSEDGTVRIWVVGSVNHPEESNLSGHVKLVAEEVVRKAESLRISEKAAEAK

SEQ ID NO: 40181 - protein, 295 aa, Arabidopsis thaliana
  peptide (1)..(295): Ceres Seq. ID no. 13497339
MLRNGETGDWIGTFEGHKGAVWSCSLDKNAIRAASASADFTAKIWNALTGDELHSFEHKHIVRACAFSEDTHRLLTGGMEKILRIFDLNRPDAPPKEVGNSPGSIRTVEWLHSDNTILSSCTDTGDIRLWDIRSDKIVHTLETKSPVTSAEVSQDGRYITTADGSSVKFWDAKNFGLLKSYDMPCNVESASLEPKHGNTFIAGGEDMWVHRFDFQTGEEIGCNKGHHGPVHCVRYAPGGESYTSGSEDGTVRIWVVGSVNHPEESNLSGHVKLVAEEVVRKAESLRISEKAAEAK

SEQ ID NO: 40182 - protein, 217 aa, Arabidopsis thaliana
  peptide (1)..(217): Ceres Seq. ID no. 13497340
MEKILRIFDLNRPDAPPKEVGNSPGSIRTVEWLHSDNTILSSCTDTGDIRLWDIRSDKIVHTLETKSPVTSAEVSQDGRYITTADGSSVKFWDAKNFGLLKSYDMPCNVESASLEPKHGNTFIAGGEDMWVHRFDFQTGEEIGCNKGHHGPVHCVRYAPGGESYTSGSEDGTVRIWVVGSVNHPEESNLSGHVKLVAEEVVRKAESLRISEKAAEAK

SEQ ID NO: 40183 - DNA, 1835 bp, Arabidopsis thaliana
  misc_feature (1)..(1835): Ceres Seq. ID no. 13487232
  misc_feature (1)..(1835): Ortholog of  Ceres SEQ ID NO 13599900 as cited in SEQ ID NO 531
  misc_feature (1)..(1835): Ortholog of  Ceres SEQ ID NO 15171402 as cited in SEQ ID NO 51174
  misc_feature (1)..(1835): Ortholog of  Ceres SEQ ID NO 13659971 as cited in SEQ ID NO 67565
  misc_feature (1)..(1835): Ortholog of  Ceres SEQ ID NO 13500385 as cited in SEQ ID NO 67583
aatccattattattctatcgaacttatctttttaaaagcttccgcgttacgccatcacttctccaccatttaaatacctaaaccactttctttcaaatttcttattccataaaaagtaaattcacaacaaaaccaaaaaaaaaaaagagaagaagaattagcttacgtgttcatcacatctgcattacgcgcaaacgaaacagattcaaattctccggcgaagttttcttattcatcaatcaatctctggattcatcaatcatgccagagatcgagattgccgccggcagcggcgacaacaacgacgccttattcggtaaatatgagctcggaaagcttctcggatgcggcgcattcgccaaagtcttccacgcacgtgatcgtcgtaccggccaaagcgtcgccgtgaaaatcctcaacaagaaaaaactcctcacaaatccagctctagccaacaacatcaaacgcgagatctcaatcatgagaagattatctcatccaaacatcgtcaagctccacgaagtaatggcgacaaaatcaaagatcttcttcgcaatggagtttgttaaaggaggagaactattcaacaaaatctcaaaacatggacgtcttagcgaagatttaagccggagatatttccagcaactgatctccgccgttggttattgccacgctcgcggtgtttaccaccgcgatctcaaaccagagaatctattaatagacgaaaacggaaacttaaaagtttccgatttcggtctaagcgcgttaacggatcagatccgacccgatgggttgttacataccttgtgtggtactccggcgtacgttgcgccggagattctatctaaaaaaggatatgaaggtgctaaagttgatgtatggtcttgtggaatcgtcttgttcgttctcgtcgccggttatttaccgtttaacgatccgaatgtgatgaatatgtataagaagatttataaaggagagtatcgttttcctcgttggatgtctccagatctgaaacgattcgtttctcgtcttttagatattaatcctgagactagaatcaccattgatgagattttgaaagatccttggtttgttagaggaggttttaaacagatcaagttccacgatgacgagatcgaagatcagaaagtggaatcgtcactagaagctgtgaagagtttaaacgcgtttgatttgatttcttactcgtcgggattggatttgtcgggattgtttgctggttgtagtaattcgagtggtgaatcggagaggtttttatcggaaaagtcgccggagatgttggcggaggaagtggaggggtttgcgagagaggagaatctgaggatgaagaagaagaaggaggaagagtatgggtttgagatggaggggcaaaatgggaaatttggtatcgggatttgtatttcgcggttgaatgatttgcttgtggtggtggaggcacggcggagaggtggtgatggtgattgttataaggagatgtggaatggtaaactcagggttcaacttattcgcgtttgcgatcagacgtcgtcaacaaacgcggctatttaaaagaacgctatgaagttttctaccgtgctttcaattttaaaacgccaatcgcgtttcgttggttggatttggtttctactacttttgtttcggaattaaaaacagagaaaaaataataaaaattaatgtatgtatttaaatactgtaccaaattgtaggtatctattttgtgctttttgatcaatgtgttactatgtacaacaacaagtctaaaattgcatttgtagatacttcactcttttgtataatgtagaaaatgttcttct

SEQ ID NO: 40184 - protein, 435 aa, Arabidopsis thaliana
  peptide (1)..(435): Ceres Seq. ID no. 13487233
MPEIEIAAGSGDNNDALFGKYELGKLLGCGAFAKVFHARDRRTGQSVAVKILNKKKLLTNPALANNIKREISIMRRLSHPNIVKLHEVMATKSKIFFAMEFVKGGELFNKISKHGRLSEDLSRRYFQQLISAVGYCHARGVYHRDLKPENLLIDENGNLKVSDFGLSALTDQIRPDGLLHTLCGTPAYVAPEILSKKGYEGAKVDVWSCGIVLFVLVAGYLPFNDPNVMNMYKKIYKGEYRFPRWMSPDLKRFVSRLLDINPETRITIDEILKDPWFVRGGFKQIKFHDDEIEDQKVESSLEAVKSLNAFDLISYSSGLDLSGLFAGCSNSSGESERFLSEKSPEMLAEEVEGFAREENLRMKKKKEEEYGFEMEGQNGKFGIGICISRLNDLLVVVEARRRGGDGDCYKEMWNGKLRVQLIRVCDQTSSTNAAI

SEQ ID NO: 40185 - protein, 362 aa, Arabidopsis thaliana
  peptide (1)..(362): Ceres Seq. ID no. 13487234
MRRLSHPNIVKLHEVMATKSKIFFAMEFVKGGELFNKISKHGRLSEDLSRRYFQQLISAVGYCHARGVYHRDLKPENLLIDENGNLKVSDFGLSALTDQIRPDGLLHTLCGTPAYVAPEILSKKGYEGAKVDVWSCGIVLFVLVAGYLPFNDPNVMNMYKKIYKGEYRFPRWMSPDLKRFVSRLLDINPETRITIDEILKDPWFVRGGFKQIKFHDDEIEDQKVESSLEAVKSLNAFDLISYSSGLDLSGLFAGCSNSSGESERFLSEKSPEMLAEEVEGFAREENLRMKKKKEEEYGFEMEGQNGKFGIGICISRLNDLLVVVEARRRGGDGDCYKEMWNGKLRVQLIRVCDQTSSTNAAI

SEQ ID NO: 40186 - protein, 347 aa, Arabidopsis thaliana
  peptide (1)..(347): Ceres Seq. ID no. 13487235
MATKSKIFFAMEFVKGGELFNKISKHGRLSEDLSRRYFQQLISAVGYCHARGVYHRDLKPENLLIDENGNLKVSDFGLSALTDQIRPDGLLHTLCGTPAYVAPEILSKKGYEGAKVDVWSCGIVLFVLVAGYLPFNDPNVMNMYKKIYKGEYRFPRWMSPDLKRFVSRLLDINPETRITIDEILKDPWFVRGGFKQIKFHDDEIEDQKVESSLEAVKSLNAFDLISYSSGLDLSGLFAGCSNSSGESERFLSEKSPEMLAEEVEGFAREENLRMKKKKEEEYGFEMEGQNGKFGIGICISRLNDLLVVVEARRRGGDGDCYKEMWNGKLRVQLIRVCDQTSSTNAAI

SEQ ID NO: 40187 - DNA, 1052 bp, Arabidopsis thaliana
  misc_feature (1)..(1052): Ceres Seq. ID no. 12371451
  misc_feature (1)..(1052): Ortholog of  Ceres SEQ ID NO 13583408 as cited in SEQ ID NO 62616
  misc_feature (1)..(1052): Ortholog of  Ceres SEQ ID NO 15179752 as cited in SEQ ID NO 63074
cctagtccaaaaatttctcatactataaaaagatttttttttttgcttcgctccctctttttcacttcgttaacggccccgcctccactctatcctaccgccgacgtccgtgatcgccgaaatgactgaagcagagtccaagactgttgttcctgagtcagtgttgaagaagagaaagagggaggaagaatgggcacttgccaagaaacaggagcttgaggctgccaaaaagcagaatgctgagaagaggaaactcatatttaaccgggctaaacagtactccaaggagtaccaggagaaagaaagggaattaatccagctgaagcgtgaggcaaaattgaaaggaggcttttatgttgacccagaagctaaactgcttttcattatccgtatccgtggtatcaatgccattgacccaaagacaaagaagattttgcaacttttgcgtttaagacagattttcaatggtgtgttcttgaaggtcaacaaggcaaccattaacatgcttcgccgtgttgaaccctatgtaacctatggatacccgaacttaaaaagtgtgaaggaattgatttacaaacgaggttttggaaagcttaaccaccagaggactgccttaacagacaattctattgtagatcaggggctaggaaagcatggcatcatctgcgttgaggatctgatccatgagatcatgacggttgggccacatttcaaggaagccaataactttttgtggccattccagttgaaggctccattgggagggatgaagaagaagaggaaccattacgtggaaggaggagatgctggaaaccgcgagaacttcatcaacgagctcgttaggagaatgaactgaagcgtaagcgttattgctctgaaactccctaggaaacgttttgctataggtggaaaacttctgttcgcttgcttgtgttgccattgaggcgaagtaaacatttacggtgaaagactttgatattttataagtttgaaattgtaagaacacatcatttatttccttccacattacatcgtcacttgcattgcatttt

SEQ ID NO: 40188 - protein, 244 aa, Arabidopsis thaliana
  peptide (1)..(244): Ceres Seq. ID no. 12371452
MTEAESKTVVPESVLKKRKREEEWALAKKQELEAAKKQNAEKRKLIFNRAKQYSKEYQEKERELIQLKREAKLKGGFYVDPEAKLLFIIRIRGINAIDPKTKKILQLLRLRQIFNGVFLKVNKATINMLRRVEPYVTYGYPNLKSVKELIYKRGFGKLNHQRTALTDNSIVDQGLGKHGIICVEDLIHEIMTVGPHFKEANNFLWPFQLKAPLGGMKKKRNHYVEGGDAGNRENFINELVRRMN

SEQ ID NO: 40189 - DNA, 1258 bp, Arabidopsis thaliana
  misc_feature (1)..(1258): Ceres Seq. ID no. 12482357
  misc_feature (1)..(1258): Ortholog of  Ceres SEQ ID NO 15177104 as cited in SEQ ID NO 56048
aattcgcacgattactcacctactcgagagtggtttagcttttttgtaccgtacatcttcttcccagaaacatggctgaggcttctgatttgttggaatggcctaagaaggataaccgtcgttttctccatgttgtctaccgcgttggtgatcttgatcgcaccattgagttttacactgaggtctttggtatgaagctgttgaggaaaagagatatccctgaggagaagtattctaatgcttttcttggttttggacctgaaacatctaactttgttgtggagctcacatataactatggtgttagctcatatgatattggaactggctttgggcattttgccatttcaactcaagatgtttccaaactggttgagaacgtccgtgccaagggtggaaatgtgactagggaacctggtccagtcaaaggtggaggcagtgtcattgcgtttgtgaaggaccctgatggctacacttttgagctcatccagagaggtccaactcctgaacctttctgccaagtcatgcttcgtgttggtgatctcgaccgtgccatcaaattctatgaaaaggccctcgggatgagactcttgagaaagattgagagacctgagtacaagtacaccataggcatgatggggtatgctgaagaatacgagtcgatagttttggagctgacctataactacgacgtgactgagtacacaaagggcaatgcatatgcacagattgcaataggcacagatgatgtgtacaaaagcggtgaagttattaagatagtcaaccaagagctaggaggaaagatcactagagaagccggacctcttcctggactcggcaccaagattgtctcattccttgatccagatggctggaaaacggttttggtggacaacaaagattttctcaaggaactggaatgagaagagcgatgaatgaaggtcgagatcacaaaaccataataataaaaatgtgatcataaaataaaaggaagacttagagtttgatctaaaataagaagatgtggtttagtttgtgtcgtgctatgtgtgtgtgctcgtttcttttgtctttgagcttaaaagttaaaactctagtctatatggacctgaataaaaatatttccaccaccttgaggttttggtgtttgcggttatggacggtttattgaatgtaatattttcgtaccaaatcggtttactagatttgagacggatcatatggctcttcttggaaaaagagacggtttaaatcggtt

SEQ ID NO: 40190 - protein, 283 aa, Arabidopsis thaliana; identical to SEQ ID NO: 22714
  peptide (1)..(283): Ceres Seq. ID no. 12482358

SEQ ID NO: 40191 - protein, 243 aa, Arabidopsis thaliana; identical to SEQ ID NO: 22715
  peptide (1)..(243): Ceres Seq. ID no. 12482359

SEQ ID NO: 40192 - DNA, 1639 bp, Arabidopsis thaliana
  misc_feature (1)..(1639): Ceres Seq. ID no. 12370903
  misc_feature (1)..(1639): Ortholog of  Ceres SEQ ID NO 13596299 as cited in SEQ ID NO 68023
aatttggagtcagagggaggcgttgcaaactcaataaagctcaaaactttccgccgtcgttttcgtcgtcggagaatacaacaaaagacctaaagcagatcaaagtaattgtagttgacggagatggagaaagtaaagattgaagaaattcagtccaccgctaagaaacaacggattgctactcacacccatatcaaaggccttggcctcgagccaactggtatccctataaaattggcagctggatttgttggtcaacttgaggctagagaggcagctggtcttgtagttgacatgattaagcagaagaaaatggcgggcaaggctcttttgcttgctggacctcctggaactgggaaaacagctttggctcttggaatctctcaagagctgggaagcaaggttccattctgtccaatggttggatctgaggtttactcatcagaggttaagaaaacagaggttctcatggagaattttagacgtgccattggtctacgtatcaaggaaaccaaagaagtctatgaaggggaggtcaccgagctgtcaccagaagaaactgaaagcctcactggaggttatggtaaaagcatcagccatgttgtaattacactcaagacagtcaaaggaaccaaacatctgaaattggatcccactatctatgatgccttgattaaggaaaaggtagctgtaggagatgtaatctatatcgaagcaaacagtggagctgtcaaacgggtaggtagaagtgatgcttttgccactgaatttgatctggaagcagaagaatatgttccacttcccaaaggagaggtccacaaaaagaaagagatagtgcaggatgtcacactccaagatctggatgcagcaaatgctcgacctcaaggtggccaggatatactttctttgatgggccaaatgatgaaaccgcggaagactgagatcactgataagcttcggcaagaaattaacaaggttgtgaaccgatatatagatgaaggtgtggcagagcttgttccaggagttctatttattgatgaggttcatatgcttgatatggagtgcttctcatacttgaaccgtgctcttgagagctcattatctccgatagtgatatttgcaacaaatagaggtgtttgcaacgtaagagggactgatatgcccagcccccatggagtccctattgatctattagatcgattggttatcatccggactcaaatctatgatccctctgaaatgatccagattatagccattcgtgcgcaagttgaagaattaaccgtggatgaagaatgcttggttctacttggggagattgggcaaagaacttcactaaggcacgctgtgcagcttctgtctcctgccagcattgtagcgaaaatgaatggccgtgacaatatttgcaaggctgatatagaggaagtaacatcactctacttggatgctaaatcttcagcaaagcttttgcatgagcaacaagaaaaatacatctcatgagaagaacactaatcgcacattttgttgaaacatctcataatttttctgtcgttttattttgtaatgtcggaatatggagaatgtctaatgggattacaatttggtttctctgaattcatttatttatgtgctatttttt

SEQ ID NO: 40193 - protein, 458 aa, Arabidopsis thaliana
  peptide (1)..(458): Ceres Seq. ID no. 12370904
MEKVKIEEIQSTAKKQRIATHTHIKGLGLEPTGIPIKLAAGFVGQLEAREAAGLVVDMIKQKKMAGKALLLAGPPGTGKTALALGISQELGSKVPFCPMVGSEVYSSEVKKTEVLMENFRRAIGLRIKETKEVYEGEVTELSPEETESLTGGYGKSISHVVITLKTVKGTKHLKLDPTIYDALIKEKVAVGDVIYIEANSGAVKRVGRSDAFATEFDLEAEEYVPLPKGEVHKKKEIVQDVTLQDLDAANARPQGGQDILSLMGQMMKPRKTEITDKLRQEINKVVNRYIDEGVAELVPGVLFIDEVHMLDMECFSYLNRALESSLSPIVIFATNRGVCNVRGTDMPSPHGVPIDLLDRLVIIRTQIYDPSEMIQIIAIRAQVEELTVDEECLVLLGEIGQRTSLRHAVQLLSPASIVAKMNGRDNICKADIEEVTSLYLDAKSSAKLLHEQQEKYIS

SEQ ID NO: 40194 - protein, 401 aa, Arabidopsis thaliana
  peptide (1)..(401): Ceres Seq. ID no. 12370905
MIKQKKMAGKALLLAGPPGTGKTALALGISQELGSKVPFCPMVGSEVYSSEVKKTEVLMENFRRAIGLRIKETKEVYEGEVTELSPEETESLTGGYGKSISHVVITLKTVKGTKHLKLDPTIYDALIKEKVAVGDVIYIEANSGAVKRVGRSDAFATEFDLEAEEYVPLPKGEVHKKKEIVQDVTLQDLDAANARPQGGQDILSLMGQMMKPRKTEITDKLRQEINKVVNRYIDEGVAELVPGVLFIDEVHMLDMECFSYLNRALESSLSPIVIFATNRGVCNVRGTDMPSPHGVPIDLLDRLVIIRTQIYDPSEMIQIIAIRAQVEELTVDEECLVLLGEIGQRTSLRHAVQLLSPASIVAKMNGRDNICKADIEEVTSLYLDAKSSAKLLHEQQEKYIS

SEQ ID NO: 40195 - protein, 395 aa, Arabidopsis thaliana
  peptide (1)..(395): Ceres Seq. ID no. 12370906
MAGKALLLAGPPGTGKTALALGISQELGSKVPFCPMVGSEVYSSEVKKTEVLMENFRRAIGLRIKETKEVYEGEVTELSPEETESLTGGYGKSISHVVITLKTVKGTKHLKLDPTIYDALIKEKVAVGDVIYIEANSGAVKRVGRSDAFATEFDLEAEEYVPLPKGEVHKKKEIVQDVTLQDLDAANARPQGGQDILSLMGQMMKPRKTEITDKLRQEINKVVNRYIDEGVAELVPGVLFIDEVHMLDMECFSYLNRALESSLSPIVIFATNRGVCNVRGTDMPSPHGVPIDLLDRLVIIRTQIYDPSEMIQIIAIRAQVEELTVDEECLVLLGEIGQRTSLRHAVQLLSPASIVAKMNGRDNICKADIEEVTSLYLDAKSSAKLLHEQQEKYIS

SEQ ID NO: 40196 - DNA, 1787 bp, Arabidopsis thaliana
  misc_feature (1)..(1787): Ceres Seq. ID no. 13491387
  misc_feature (1)..(1787): Ortholog of  Ceres SEQ ID NO 13658728 as cited in SEQ ID NO 66270
  misc_feature (1)..(1787): Ortholog of  Ceres SEQ ID NO 12465428 as cited in SEQ ID NO 68898
atccttacaacaaaaatgaatttccgtaatctgattgcttccggttctcgcctcggcaagaggttctgtgcaacggtatttgctccggcgtcggcgactggcatcgtcgaagcctctgtttcttctccagcggcggcgaatgtcgtcgaagcctctgtttcttctccggcggcggagaatggcgtcagaacctctgttgctgctccgacggtggcttcaaggcagcgagagttgtacaagaaactttctatgcttagtgtgacgggaggaacagtggcagagacgttaaatcagttcatcatggagggtattactgtcagaaaagacgatctctttcgctgtgctaaaacccttcgcaaattccgtcgacctcaacacgcttttgagatctttgattggatggagaagaggaaaatgacattttctgtgtctgatcatgcaatttgtttggatctaattggaaagactaaaggtttagaagcagctgagaactactttaacaacttagatccttctgcaaagaatcatcagtcgacttatggggcgctcatgaactgttactgtgttgaacttgaggaagagaaagcaaaggctcattttgagataatggatgagcttaactttgttaacaattcgttaccgtttaataacatgatgtctatgtacatgcggttgagtcaaccggagaaggtacctgtgttggttgatgcgataaaacagaggggtatatctccttgtggtgtcacttactctatatggatgcagagctgtggaagtttgaatgacttagatggattagagaagattatagatgagatggggaaagacagtgaagctaaaaccacttggaatactttctctaatctggctgcaatctacactaaagctggtctttacgagaaggcggattctgcactgaaatctatggaggagaaaatgaatcctaacaaccgtgattcccaccattttctcatgagtttgtacgctggaatctcgaaaggtcctgaggtttatagggtttgggaatcgctgaagaaggctcgtcctgaggtcaacaacttgagctatctagtcatgttacaagcgatgagtaaactaggcgacttagatgggattaagaagattttcacagagtgggaatcgaaatgctgggcttacgatatgaggctggctaatatcgcgattaacacgtatttgaaagggaatatgtatgaagaagcagagaagattcttgatggtgccatgaaaaagtctaaaggtcctttctccaaagcgagacagcttctgatgatccatctgttggagaacgataaagcggatttggctatgaagcatttggaagcagcggtttctgattctgcagagaacaaagacgaatggggctggagctcagagctggtcagcttgtttttccttcactttgagaaagctaaagatgttgatggagcggaagatttctgcaagattttgtcgaattggaaacctcttgattctgaaactatgacatttctcataaagacttatgcagcagcagagaagactagtcctgatatgcgagagagattgtctcaacagcagatcgaagtaagcgaggagatccaagacttgcttaaaacagtttgtccctaaactaagtaataaatgtgattagcacgttatgtttaaacttgtgtcccgtttagagtttccagttccagaaaacaaagcttagttctttttttaagtctttgacatatgtgtcggttacatagtggaagatctcataaacaattaagtgtttctttcat

SEQ ID NO: 40197 - protein, 542 aa, Arabidopsis thaliana
  peptide (1)..(542): Ceres Seq. ID no. 13491388
ILTTKMNFRNLIASGSRLGKRFCATVFAPASATGIVEASVSSPAAANVVEASVSSPAAENGVRTSVAAPTVASRQRELYKKLSMLSVTGGTVAETLNQFIMEGITVRKDDLFRCAKTLRKFRRPQHAFEIFDWMEKRKMTFSVSDHAICLDLIGKTKGLEAAENYFNNLDPSAKNHQSTYGALMNCYCVELEEEKAKAHFEIMDELNFVNNSLPFNNMMSMYMRLSQPEKVPVLVDAIKQRGISPCGVTYSIWMQSCGSLNDLDGLEKIIDEMGKDSEAKTTWNTFSNLAAIYTKAGLYEKADSALKSMEEKMNPNNRDSHHFLMSLYAGISKGPEVYRVWESLKKARPEVNNLSYLVMLQAMSKLGDLDGIKKIFTEWESKCWAYDMRLANIAINTYLKGNMYEEAEKILDGAMKKSKGPFSKARQLLMIHLLENDKADLAMKHLEAAVSDSAENKDEWGWSSELVSLFFLHFEKAKDVDGAEDFCKILSNWKPLDSETMTFLIKTYAAAEKTSPDMRERLSQQQIEVSEEIQDLLKTVCP

SEQ ID NO: 40198 - protein, 537 aa, Arabidopsis thaliana
  peptide (1)..(537): Ceres Seq. ID no. 13491389
MNFRNLIASGSRLGKRFCATVFAPASATGIVEASVSSPAAANVVEASVSSPAAENGVRTSVAAPTVASRQRELYKKLSMLSVTGGTVAETLNQFIMEGITVRKDDLFRCAKTLRKFRRPQHAFEIFDWMEKRKMTFSVSDHAICLDLIGKTKGLEAAENYFNNLDPSAKNHQSTYGALMNCYCVELEEEKAKAHFEIMDELNFVNNSLPFNNMMSMYMRLSQPEKVPVLVDAIKQRGISPCGVTYSIWMQSCGSLNDLDGLEKIIDEMGKDSEAKTTWNTFSNLAAIYTKAGLYEKADSALKSMEEKMNPNNRDSHHFLMSLYAGISKGPEVYRVWESLKKARPEVNNLSYLVMLQAMSKLGDLDGIKKIFTEWESKCWAYDMRLANIAINTYLKGNMYEEAEKILDGAMKKSKGPFSKARQLLMIHLLENDKADLAMKHLEAAVSDSAENKDEWGWSSELVSLFFLHFEKAKDVDGAEDFCKILSNWKPLDSETMTFLIKTYAAAEKTSPDMRERLSQQQIEVSEEIQDLLKTVCP

SEQ ID NO: 40199 - protein, 459 aa, Arabidopsis thaliana
  peptide (1)..(459): Ceres Seq. ID no. 13491390
MLSVTGGTVAETLNQFIMEGITVRKDDLFRCAKTLRKFRRPQHAFEIFDWMEKRKMTFSVSDHAICLDLIGKTKGLEAAENYFNNLDPSAKNHQSTYGALMNCYCVELEEEKAKAHFEIMDELNFVNNSLPFNNMMSMYMRLSQPEKVPVLVDAIKQRGISPCGVTYSIWMQSCGSLNDLDGLEKIIDEMGKDSEAKTTWNTFSNLAAIYTKAGLYEKADSALKSMEEKMNPNNRDSHHFLMSLYAGISKGPEVYRVWESLKKARPEVNNLSYLVMLQAMSKLGDLDGIKKIFTEWESKCWAYDMRLANIAINTYLKGNMYEEAEKILDGAMKKSKGPFSKARQLLMIHLLENDKADLAMKHLEAAVSDSAENKDEWGWSSELVSLFFLHFEKAKDVDGAEDFCKILSNWKPLDSETMTFLIKTYAAAEKTSPDMRERLSQQQIEVSEEIQDLLKTVCP

SEQ ID NO: 40200 - DNA, 904 bp, Arabidopsis thaliana
  misc_feature (1)..(904): Ceres Seq. ID no. 12395811
  misc_feature (1)..(904): Ortholog of  Ceres SEQ ID NO 12584967 as cited in SEQ ID NO 63078
ctactttcttctcctttctcgtaacttgatcaaatctgcttactgtggagttatacaccttgaagagtctcgcgataatgaagaaattctatcaaaatgctgatcatgagactgataaatccaaatcggcggagacgaagaagaggaagaacatgaggagattaggaggcggtggtctttctctccaaacttttgccaacatgaaatcggaaaataatcgctataacccttctttgatcaaaaagcaaaaagagttctacaagaatgcaaagtatgtgagcaagtttaggaagtcgttgaagcagcagaacattcctgataagaatgagactggagagactagtaaggtaggtgatgatgatgatgatgataagcggaagggtaaatctaataagagaattggtgtagaggatttgtacaagcagacaagagaagagatggagagagtaaggaaggagagagaggcaatgtttcaggcgaagaaggaagcgaaagaagaggctgaatctaggaggaaagaagcaaaggggaaaatgttgaggaagactcgacatggtcagcctgtaatgaaatacagaattgagcatcttcttgaatccatcaagaaatctgccggaatcaacgaaatcgcctaacttgtgcgggttgatacagtgcagatgaagaacccagtgaggagaagttgctgatgttgcggaggctcaaagcagaaaccttgttgtcactcagatactgacctttttcttcccggagatattatgttacactactgcttatactttgagagatgctttgcggcaacatatgtagttttttgctaggccttaccgtttagctcatgattttagatgtttctttacaaacttcttttactataaatcttataaaatgataattttattcc

SEQ ID NO: 40201 - protein, 185 aa, Arabidopsis thaliana; identical to SEQ ID NO: 25810
  peptide (1)..(185): Ceres Seq. ID no. 12395812

SEQ ID NO: 40202 - protein, 160 aa, Arabidopsis thaliana; identical to SEQ ID NO: 25811
  peptide (1)..(160): Ceres Seq. ID no. 12395813

SEQ ID NO: 40203 - protein, 144 aa, Arabidopsis thaliana; identical to SEQ ID NO: 25812
  peptide (1)..(144): Ceres Seq. ID no. 12395814

SEQ ID NO: 40204 - DNA, 1980 bp, Arabidopsis thaliana
  misc_feature (1)..(1980): Ceres Seq. ID no. 13501412
  misc_feature (1)..(1980): Ortholog of  Ceres SEQ ID NO 14309715 as cited in SEQ ID NO 55353
  misc_feature (1)..(1980): Ortholog of  Ceres SEQ ID NO 13595521 as cited in SEQ ID NO 59840
tgaaagaaaatatccagttgactccaaatagactagaaagagaaagaaagagagagagagagagagagagaaccagagattatcgaacacgaagcagaagacgattcgtggaagagacttggagagaatatttctcaatgtctcctctcccaatcttccatcgtcttcctcacgccacgttctcttcctttctcctctcactgtctcaagctggaagttctaaaacatcagtggcattcctcaatgccttcaaatcagaagatatcattgctcgaattggactatggtggcagcttataagggctgttgtagttgtacctgtcttcaagttcctggtgcttctatgtttggtcatgtctgtcatgttcttcgttgaggttatgtacatgggaatcgttgttttgtatgtcaagctgttcaagagaaagccagagaaattttacaaatgggaagccatggaggatgatgttgagtgtggcagtgcaagctaccctatggttcttgtgcagatacctatgtacaatgaaaaagaggtttgtgagcaatctattgcagctgcttgcaaaatctcatggccatcgaatcgtataataattcaagtgcttgatgattccacggatccagccagtaaggagttggtgaaaaaggagtgtgacagatggtctaaagaaggtgtcaacataacgtttgagataagggacaacaggaacggatacaaagctggtgcgttgagagaaggaatgaggcatagctatgtgaagcagtgtgattatgttgctatctttgatgctgatttccagcctgatcctgacttcctccaccgcactgttccattcttaattcacaatcccaagttagcacttgtacaaggccggtgggagtttgtgaacgcgggtcaatgcatgatgacgagattacaggagatgtctctaagttaccactttacaatagagcagcaagttggatcttcaacatttgccttctttgggttcaacggaactgctggcgtctggagaatctcagcattgaatgagtccgggggatggaatgaccagacaacagtagaagacatggatttagctgtacgagctacactgagaggctggaagtttctatatatcgatgatctcaaggtaaaaagtgagttaccttgttccttcaaagctctgcgtagccagcagcatcgatggacttgcggccctgccaatcttttaaggaaaatggctggacaaataataagaagcgagaatgtatctctatggaagaagtggtatatgttgtacagcttcttcttcatgcgcaagatcgtggctcacatcctcacattctgcttctactgtgttatcttgccagcaactgtattgttcccagaagtcacagttccgaaatgggctgcattttatctcccttctttgatcactctcttaatcgcaattggtagactaagatcaatccaccttttggctttctgggttctatttgagaatgcaatgtccctgctaagagcaaaggctctggtcatgggcttgttcgaaacaggaagagtacaagaatgggttgtgacggagaagttaggtgatactctcaagacgaagctgattccacaagttcctaacgtcagattcagagagagggtgcatttgctggagctattggttggagcgtacctgttattctgcggaatctacgacatcgtctatgggaagaacacactctatgtgtaccttctgtttcagtcagtggccttcttcgttgttggttttggatttgtaggaaaatatgttcctgcttcctcttacttagcataggatagatcatagagtctcaatatgtttcagaaggttttttgtttgatgtcatattgagaacaatgcctatatactactctccatttgtattaacacttgagtatctgtaaccaacgaagctcagatgtgatcgatattattttttttaacagtataaaaccacttaacactg

SEQ ID NO: 40205 - protein, 601 aa, Arabidopsis thaliana
  peptide (1)..(601): Ceres Seq. ID no. 13501413
KENIQLTPNRLERERKRERERERTRDYRTRSRRRFVEETWREYFSMSPLPIFHRLPHATFSSFLLSLSQAGSSKTSVAFLNAFKSEDIIARIGLWWQLIRAVVVVPVFKFLVLLCLVMSVMFFVEVMYMGIVVLYVKLFKRKPEKFYKWEAMEDDVECGSASYPMVLVQIPMYNEKEVCEQSIAAACKISWPSNRIIIQVLDDSTDPASKELVKKECDRWSKEGVNITFEIRDNRNGYKAGALREGMRHSYVKQCDYVAIFDADFQPDPDFLHRTVPFLIHNPKLALVQGRWEFVNAGQCMMTRLQEMSLSYHFTIEQQVGSSTFAFFGFNGTAGVWRISALNESGGWNDQTTVEDMDLAVRATLRGWKFLYIDDLKVKSELPCSFKALRSQQHRWTCGPANLLRKMAGQIIRSENVSLWKKWYMLYSFFFMRKIVAHILTFCFYCVILPATVLFPEVTVPKWAAFYLPSLITLLIAIGRLRSIHLLAFWVLFENAMSLLRAKALVMGLFETGRVQEWVVTEKLGDTLKTKLIPQVPNVRFRERVHLLELLVGAYLLFCGIYDIVYGKNTLYVYLLFQSVAFFVVGFGFVGKYVPASSYLA

SEQ ID NO: 40206 - protein, 556 aa, Arabidopsis thaliana
  peptide (1)..(556): Ceres Seq. ID no. 13501414
MSPLPIFHRLPHATFSSFLLSLSQAGSSKTSVAFLNAFKSEDIIARIGLWWQLIRAVVVVPVFKFLVLLCLVMSVMFFVEVMYMGIVVLYVKLFKRKPEKFYKWEAMEDDVECGSASYPMVLVQIPMYNEKEVCEQSIAAACKISWPSNRIIIQVLDDSTDPASKELVKKECDRWSKEGVNITFEIRDNRNGYKAGALREGMRHSYVKQCDYVAIFDADFQPDPDFLHRTVPFLIHNPKLALVQGRWEFVNAGQCMMTRLQEMSLSYHFTIEQQVGSSTFAFFGFNGTAGVWRISALNESGGWNDQTTVEDMDLAVRATLRGWKFLYIDDLKVKSELPCSFKALRSQQHRWTCGPANLLRKMAGQIIRSENVSLWKKWYMLYSFFFMRKIVAHILTFCFYCVILPATVLFPEVTVPKWAAFYLPSLITLLIAIGRLRSIHLLAFWVLFENAMSLLRAKALVMGLFETGRVQEWVVTEKLGDTLKTKLIPQVPNVRFRERVHLLELLVGAYLLFCGIYDIVYGKNTLYVYLLFQSVAFFVVGFGFVGKYVPASSYLA

SEQ ID NO: 40207 - protein, 484 aa, Arabidopsis thaliana
  peptide (1)..(484): Ceres Seq. ID no. 13501415
MSVMFFVEVMYMGIVVLYVKLFKRKPEKFYKWEAMEDDVECGSASYPMVLVQIPMYNEKEVCEQSIAAACKISWPSNRIIIQVLDDSTDPASKELVKKECDRWSKEGVNITFEIRDNRNGYKAGALREGMRHSYVKQCDYVAIFDADFQPDPDFLHRTVPFLIHNPKLALVQGRWEFVNAGQCMMTRLQEMSLSYHFTIEQQVGSSTFAFFGFNGTAGVWRISALNESGGWNDQTTVEDMDLAVRATLRGWKFLYIDDLKVKSELPCSFKALRSQQHRWTCGPANLLRKMAGQIIRSENVSLWKKWYMLYSFFFMRKIVAHILTFCFYCVILPATVLFPEVTVPKWAAFYLPSLITLLIAIGRLRSIHLLAFWVLFENAMSLLRAKALVMGLFETGRVQEWVVTEKLGDTLKTKLIPQVPNVRFRERVHLLELLVGAYLLFCGIYDIVYGKNTLYVYLLFQSVAFFVVGFGFVGKYVPASSYLA

SEQ ID NO: 40208 - DNA, 1420 bp, Arabidopsis thaliana
  misc_feature (1)..(1420): Ceres Seq. ID no. 12395338
  misc_feature (1)..(1420): Ortholog of  Ceres SEQ ID NO 15171386 as cited in SEQ ID NO 51479
gctaaactccatcatcttctctttcttttttttcacttgtcccatttttttatattttcatctttctcttttggagtttcttcttctactgactctactggtaggtgtatggatttgtgagagaagaaaaaaaagcacaatctttgaatggactggaatttcaaacttagctctggttatttatctggattcgatcaagaaccagatttatcaccaatggatggttcgatctcgtttggtgggtcgtcacagtcaaaagcggatttttcatttgatctaaaacttggaagaaacattggaaactcttcctctgtttttggtgatacagagcaagtgattagtcttagtaagtggaaagatagtgctttagctaaaccagaaggttcaagaagctcgagttcaaagagaacaagagggaatggtgttggaaccaaccagatgccgatttgtcttgttgatggatgtgattctgattttagtaattgtagagagtatcataagagacataaagtttgtgatgttcattcaaaaactcctgtggttactattaatggtcataaacagaggttttgtcaacaatgcagcaggtttcatgctttggaggagtttgatgaagggaagagaagttgtaggaaacgtcttgatggacataatcgaagacgacggaagccgcagcctgaacatatcggtcgtcctgccaacttctttacgggttttcaaggtagcaaattgctagagttttctggtggttcacatgtgtttccaactacatctgtgttgaacccgagctggggaaatagtcttgtaagcgttgctgtagccgccaatggttcgagttatgggcagagccagagctatgttgttggttcttctcctgcaaagacagggataatgtttccaatctcttcttctccaaacagtaccagaagcatagcaaaacaattccctttcttgcaagaagaagaaagctcgagaaccgcatcgttgtgtgagagaatgacgagttgcatccatgactctgattgtgctctctctcttctgtcatcctcctcgtcgtcagtccctcatttgcttcaaccaccactttctttgtcccaagaagcagttgagacagttttttacgggtcgggattgtttgagaatgcctgtgcagtctctgatggatcggttatatccggtaacgaggctgtccgtcttccgcagacattcccgtttcattgggagtagtagaagaagaagtaggtagatagatagaatcagaaagatctatttgtgtctcttctcttctccctcatttttcaatgttctttatcatcatcattgttcttgttaacactacaagaaatatggacattcttaacacaccgaaaacgctataataacgtttacatagcggattcataaacgctgtgtttgccgc

SEQ ID NO: 40209 - protein, 359 aa, Arabidopsis thaliana
  peptide (1)..(359): Ceres Seq. ID no. 12395339
MDWNFKLSSGYLSGFDQEPDLSPMDGSISFGGSSQSKADFSFDLKLGRNIGNSSSVFGDTEQVISLSKWKDSALAKPEGSRSSSSKRTRGNGVGTNQMPICLVDGCDSDFSNCREYHKRHKVCDVHSKTPVVTINGHKQRFCQQCSRFHALEEFDEGKRSCRKRLDGHNRRRRKPQPEHIGRPANFFTGFQGSKLLEFSGGSHVFPTTSVLNPSWGNSLVSVAVAANGSSYGQSQSYVVGSSPAKTGIMFPISSSPNSTRSIAKQFPFLQEEESSRTASLCERMTSCIHDSDCALSLLSSSSSSVPHLLQPPLSLSQEAVETVFYGSGLFENACAVSDGSVISGNEAVRLPQTFPFHWE

SEQ ID NO: 40210 - protein, 336 aa, Arabidopsis thaliana
  peptide (1)..(336): Ceres Seq. ID no. 12395340
MDGSISFGGSSQSKADFSFDLKLGRNIGNSSSVFGDTEQVISLSKWKDSALAKPEGSRSSSSKRTRGNGVGTNQMPICLVDGCDSDFSNCREYHKRHKVCDVHSKTPVVTINGHKQRFCQQCSRFHALEEFDEGKRSCRKRLDGHNRRRRKPQPEHIGRPANFFTGFQGSKLLEFSGGSHVFPTTSVLNPSWGNSLVSVAVAANGSSYGQSQSYVVGSSPAKTGIMFPISSSPNSTRSIAKQFPFLQEEESSRTASLCERMTSCIHDSDCALSLLSSSSSSVPHLLQPPLSLSQEAVETVFYGSGLFENACAVSDGSVISGNEAVRLPQTFPFHWE

SEQ ID NO: 40211 - protein, 262 aa, Arabidopsis thaliana
  peptide (1)..(262): Ceres Seq. ID no. 12395341
MPICLVDGCDSDFSNCREYHKRHKVCDVHSKTPVVTINGHKQRFCQQCSRFHALEEFDEGKRSCRKRLDGHNRRRRKPQPEHIGRPANFFTGFQGSKLLEFSGGSHVFPTTSVLNPSWGNSLVSVAVAANGSSYGQSQSYVVGSSPAKTGIMFPISSSPNSTRSIAKQFPFLQEEESSRTASLCERMTSCIHDSDCALSLLSSSSSSVPHLLQPPLSLSQEAVETVFYGSGLFENACAVSDGSVISGNEAVRLPQTFPFHWE

SEQ ID NO: 40212 - DNA, 1590 bp, Arabidopsis thaliana
  misc_feature (1)..(1590): Ceres Seq. ID no. 12327937
  misc_feature (1)..(1590): Ortholog of  Ceres SEQ ID NO 13599520 as cited in SEQ ID NO 633
  misc_feature (1)..(1590): Ortholog of  Ceres SEQ ID NO 13595142 as cited in SEQ ID NO 56671
  misc_feature (1)..(1590): Ortholog of  Ceres SEQ ID NO 15168569 as cited in SEQ ID NO 58123
  misc_feature (1)..(1590): Ortholog of  Ceres SEQ ID NO 13598460 as cited in SEQ ID NO 63382
ataacctatcaattagataccatttagattagcagcgaatttcaaacggagatgtcagaatcagtgattcagggatcgaatccggatcgggttttatctccgacgagctcgaaatcagtgacgcagacggtgaacgggtcgcatcaattcgtgattcaaggatacagcttagcgaaagggatgggtatagggaagcacatagcgagtgataatttctccgtcggaggttatcagtgggggatcttcttctacccggacggtaagaatccggaggataattcgtcgtacgtctctgtttttatcgcattggccagtgaaggaaccgaagttagggcgcttttcgagctagctcttgttgaccaaagtggaaaggggaaacataaggttcatagccattttgagcggtcactcgatggtggcccttatacactcaaatacagaggaagcatgtggggatacaagcgtttcttcagacgttccattcttgagacatctgactacctgaaagacgattgcttgataatcaattgtacggttggagttgtggtttcagaaatactctgcccacagttacactctgttcacgtccctgattcagaacttggatcacattttggagttctactggatagcatggaaggttctgatataacttttaacattgctggcgagaagtttctagctcataaactagtactggctgctcgatctccatttttcaagtctaagtttttcagtgagtttgaagcaaacaatacagaggttactattaacgatttggaacctaaggtttttaaggctttgctacaattcatgtacaaagattctcttccggaagatgtggagcctgcaacagctcatacatttgagcgcttaaagctgtcagaaatatacgaaacattgattgtaaaagttttagcagcagccgacaagtacgacctgattaggctcaggttgttgtgtgaatcccacatctgcaaaggcgtatcagtcaaatccgtcgcgaagatcttagcgttggctgacagatataatgctaaggaactaaaaggcgtttgccttaagtttactgccgagaacctagcagctgtcctggagacagacgcttaccaacagatgaaggatgaatgtgtgaccctccagtccgagcttctgaaggcggtggctggtcacgaggaaggtagtaacagtactggagagcaaagtctcagagcgtgtgggcccaactttctgacggcgggggcgataccaccagccgacatgttagacaacgaaccacctagagcctcaaaatatgcatcatttcctcaggttaatagtagccatagagagggtaaatagctgtttttttctgtattcaaaaaaaaatatatgatcccaagtcctaactctatgataggtaaactctttcacttatcacttcagtaacagctttggattattcttcttttcgtgtttatgtattttaaatcccagaacatgtggttgtttcttttactctaaaacattttgatttttacggatccagaagtataccagtgtacatatcaaacagatgcatatttttccatcgagtgagttgattttatg

SEQ ID NO: 40213 - protein, 429 aa, Arabidopsis thaliana
  peptide (1)..(429): Ceres Seq. ID no. 12327938
MSESVIQGSNPDRVLSPTSSKSVTQTVNGSHQFVIQGYSLAKGMGIGKHIASDNFSVGGYQWGIFFYPDGKNPEDNSSYVSVFIALASEGTEVRALFELALVDQSGKGKHKVHSHFERSLDGGPYTLKYRGSMWGYKRFFRRSILETSDYLKDDCLIINCTVGVVVSEILCPQLHSVHVPDSELGSHFGVLLDSMEGSDITFNIAGEKFLAHKLVLAARSPFFKSKFFSEFEANNTEVTINDLEPKVFKALLQFMYKDSLPEDVEPATAHTFERLKLSEIYETLIVKVLAAADKYDLIRLRLLCESHICKGVSVKSVAKILALADRYNAKELKGVCLKFTAENLAAVLETDAYQQMKDECVTLQSELLKAVAGHEEGSNSTGEQSLRACGPNFLTAGAIPPADMLDNEPPRASKYASFPQVNSSHREGK

SEQ ID NO: 40214 - protein, 386 aa, Arabidopsis thaliana
  peptide (1)..(386): Ceres Seq. ID no. 12327939
MGIGKHIASDNFSVGGYQWGIFFYPDGKNPEDNSSYVSVFIALASEGTEVRALFELALVDQSGKGKHKVHSHFERSLDGGPYTLKYRGSMWGYKRFFRRSILETSDYLKDDCLIINCTVGVVVSEILCPQLHSVHVPDSELGSHFGVLLDSMEGSDITFNIAGEKFLAHKLVLAARSPFFKSKFFSEFEANNTEVTINDLEPKVFKALLQFMYKDSLPEDVEPATAHTFERLKLSEIYETLIVKVLAAADKYDLIRLRLLCESHICKGVSVKSVAKILALADRYNAKELKGVCLKFTAENLAAVLETDAYQQMKDECVTLQSELLKAVAGHEEGSNSTGEQSLRACGPNFLTAGAIPPADMLDNEPPRASKYASFPQVNSSHREGK

SEQ ID NO: 40215 - protein, 297 aa, Arabidopsis thaliana
  peptide (1)..(297): Ceres Seq. ID no. 12327940
MWGYKRFFRRSILETSDYLKDDCLIINCTVGVVVSEILCPQLHSVHVPDSELGSHFGVLLDSMEGSDITFNIAGEKFLAHKLVLAARSPFFKSKFFSEFEANNTEVTINDLEPKVFKALLQFMYKDSLPEDVEPATAHTFERLKLSEIYETLIVKVLAAADKYDLIRLRLLCESHICKGVSVKSVAKILALADRYNAKELKGVCLKFTAENLAAVLETDAYQQMKDECVTLQSELLKAVAGHEEGSNSTGEQSLRACGPNFLTAGAIPPADMLDNEPPRASKYASFPQVNSSHREGK

SEQ ID NO: 40216 - DNA, 1779 bp, Arabidopsis thaliana; identical to SEQ ID NO: 29030
  misc_feature (1)..(1779): Ceres Seq. ID no. 13600793
  misc_feature (1)..(1779): Ortholog of  Ceres SEQ ID NO 12780298 as cited in SEQ ID NO 65880
  misc_feature (1)..(1779): Ortholog of  Ceres SEQ ID NO 13654539 as cited in SEQ ID NO 68015

SEQ ID NO: 40217 - protein, 464 aa, Arabidopsis thaliana; identical to SEQ ID NO: 29031
  peptide (1)..(464): Ceres Seq. ID no. 15219006

SEQ ID NO: 40218 - protein, 403 aa, Arabidopsis thaliana; identical to SEQ ID NO: 29032
  peptide (1)..(403): Ceres Seq. ID no. 15219007

SEQ ID NO: 40219 - protein, 389 aa, Arabidopsis thaliana; identical to SEQ ID NO: 29033
  peptide (1)..(389): Ceres Seq. ID no. 15219008

SEQ ID NO: 40220 - DNA, 1627 bp, Arabidopsis thaliana
  misc_feature (1)..(1627): Ceres Seq. ID no. 13488633
  misc_feature (1)..(1627): Ortholog of  Ceres SEQ ID NO 15172560 as cited in SEQ ID NO 57325
  misc_feature (1)..(1627): Ortholog of  Ceres SEQ ID NO 13655716 as cited in SEQ ID NO 68965
gtttctaactttttcttatgtaacccacccacatgcttgttcttctttctatcatcttcttacacgactacgacttgtctttctttacccttttttttttttgttttgtttaaagtttctctctttgtgggttcttgttgttagagaaatcagctgccccagatcagagcttggttttggatttaggattgtttgttaggttttacaatggactccccacaatctgttgtttcaccattcaagattggtgagtcagagaatgagaactcaaattctgtgcagagttctggaaaccaatcgaatggcataaattccaatgggaaagattctaaaagttgtggccggcaagaccttgttggtgctcttgaggtttatgtccatcaggcaagggatatccataacatttgtatatatcacaagcaagacgtttatgccaagctttgccttacaagtgatcctgataagtctgtctcgaccaaaatcatcaatggcggtgggaggaatccggtttttgatgacaatgttaagcttgatgtcagggttctggacacttccctcaaatgtgagatttacatgatgagcagggtgaagaattatcttgaggaccagctgcttggttttactctggttcctatgtcggaactgctcttcaagaatgggaaactcgagaaagagttctctctttcttccactgatctctaccattcgccagctggttttgttcaattgtcactctcctattatggatcctaccctgacgtgatggctattccctctatgccttcgtctgtttctattgatgaaactaccaaggatccagaagggtctgaatcagttccgggtgagttggataagatagagtttccagatcctaatgttgctaatgaaaatgagaagatggtttccgagtattttgggatctcttgttccactattgactcagaaacttctgacagcttggttacttccgatgctgagaatcatgtgactaattctgtcacttctatactgaagcaagattcacctgagagcagcaatgcaacaaatggagctgcttctcctcacgcttcagctcactccgccacagaaacaccaaaccatgaacatctctctgtcgtgaactccaaagcgagttcccaggagtcagagagcgaggcttctggtgagacatctgaggagaagactgtgaaatccgtcctcactgtgaaggttgagccagagtcaaaggtggtgcagcaggatatagccgacatgtacatgaaaagcatgcaacagtttacagattcactggctaagatgaagcttcctctggacattgacagcccaacaaaatcagaaaattcaagctctgattctcagaagctgccaacaccaaagagcaacaacggatcccgtgtgttctatgggagcaggcctttcttctgagcatctcttttaccaagttcagagaaagaacgcaggtcacccttagacttttctaatgaagaaagactaatcctaatgatgtaattttataatgtactatttcatgttgtatctcccatctggtcagcttgatgctttagttgatgtgagttattattacgtatcactagcctttactctattagaactatgtacgcattat

SEQ ID NO: 40221 - protein, 405 aa, Arabidopsis thaliana
  peptide (1)..(405): Ceres Seq. ID no. 13488634
MDSPQSVVSPFKIGESENENSNSVQSSGNQSNGINSNGKDSKSCGRQDLVGALEVYVHQARDIHNICIYHKQDVYAKLCLTSDPDKSVSTKIINGGGRNPVFDDNVKLDVRVLDTSLKCEIYMMSRVKNYLEDQLLGFTLVPMSELLFKNGKLEKEFSLSSTDLYHSPAGFVQLSLSYYGSYPDVMAIPSMPSSVSIDETTKDPEGSESVPGELDKIEFPDPNVANENEKMVSEYFGISCSTIDSETSDSLVTSDAENHVTNSVTSILKQDSPESSNATNGAASPHASAHSATETPNHEHLSVVNSKASSQESESEASGETSEEKTVKSVLTVKVEPESKVVQQDIADMYMKSMQQFTDSLAKMKLPLDIDSPTKSENSSSDSQKLPTPKSNNGSRVFYGSRPFF

SEQ ID NO: 40222 - protein, 283 aa, Arabidopsis thaliana
  peptide (1)..(283): Ceres Seq. ID no. 13488635
MMSRVKNYLEDQLLGFTLVPMSELLFKNGKLEKEFSLSSTDLYHSPAGFVQLSLSYYGSYPDVMAIPSMPSSVSIDETTKDPEGSESVPGELDKIEFPDPNVANENEKMVSEYFGISCSTIDSETSDSLVTSDAENHVTNSVTSILKQDSPESSNATNGAASPHASAHSATETPNHEHLSVVNSKASSQESESEASGETSEEKTVKSVLTVKVEPESKVVQQDIADMYMKSMQQFTDSLAKMKLPLDIDSPTKSENSSSDSQKLPTPKSNNGSRVFYGSRPFF

SEQ ID NO: 40223 - protein, 282 aa, Arabidopsis thaliana
  peptide (1)..(282): Ceres Seq. ID no. 13488636
MSRVKNYLEDQLLGFTLVPMSELLFKNGKLEKEFSLSSTDLYHSPAGFVQLSLSYYGSYPDVMAIPSMPSSVSIDETTKDPEGSESVPGELDKIEFPDPNVANENEKMVSEYFGISCSTIDSETSDSLVTSDAENHVTNSVTSILKQDSPESSNATNGAASPHASAHSATETPNHEHLSVVNSKASSQESESEASGETSEEKTVKSVLTVKVEPESKVVQQDIADMYMKSMQQFTDSLAKMKLPLDIDSPTKSENSSSDSQKLPTPKSNNGSRVFYGSRPFF

SEQ ID NO: 40224 - DNA, 2775 bp, Arabidopsis thaliana
  misc_feature (1)..(2775): Ceres Seq. ID no. 12344987
  misc_feature (1)..(2775): Ortholog of  Ceres SEQ ID NO 13595900 as cited in SEQ ID NO 69289
gaggtctctttctctatctccctctgtttactcccacagctctaaaagcgttttcgaatcgtcacacctggagaaggaagctaatcactttctcattttggaactttgaggagagatctgaaagtttttttttttgttgttgttctggatcgttcctgttccactctcttcatcttccgatcatcgttattttcgaagctctctacaaacaaaatcgattttttttctggttaatctaaagaggtgaccgaaagaagaaaacttttacgttttgcatggagtaagaatgccagagttaagaagtggagcaaggagatcgagacgccttgacgagcagcctaaccctccgctagttgaacaagcagaaaatatcgtacttcctcctcagactgcaacaaggagaagaggtggtggtagaggaagggggaatgctgctttagctaaaggtgcggcacctccaagaccaactgctgccggtaggggcaggggtatcaggttgacagacttagagccagaaccttgtgaggttcgtccagctgcaggtgctataggggccactgaacctgccttaaatcgagttgaaggggtagctgataaggatattgctgcggaaggcggtagcgcagagaaagtagtaggcatggaagaagattccagcatgggtccagtccctgagagggtacaagttggaaattctcctgtttataagacggagaggaaacttggtaaaggtggctttggtcaagtttatgttggcagaagggtgagtggtggcagtgataggattggagcagatgcaattgaggtagctctaaaacttgaacatcgcaatagtaaaggctgtaactttggcccaccttacgagtggcaagtgtacaatacgctcaatagctgttatggaattcctgctgtacatcataagggtcgtcaaggagatttttacattctggtcatggacatgcttgggcctagcctttgggatgtttggaattctttggctcaatcgatgtctccaaacatggtagcatgcattgcagtggaggcgatatctattcttgaaaaactgcatatgaaggggtttgtgcatggagatgtgaaaccagaaaactttttgcttggtcagcctggaacagcagacgagaagaaactataccttatcgatcttggtctagcatcaagatggaaagattcacactctggccagcatgttgaatatgatcaaaggccagatgtatttagaggaacaataaggtatgcaagttgccatgcacatcttggtcgtacaggaagtcggagggatgatctggagtcattggcttatacattaatatttctgatgcggggaaggttgccatggcaaggataccagggtgataacaagagctttcttgtttgcaagaaaaagatgtcaacctctcctgaattgatgtgttgtttttgtcctcccccgtttaagctgttcctcgaggcagttacgaatatgaagtttgatgaggagcccaactatgccaagcttatctcgatttttgatactcttatcgagccatgtgctatatctagaccaattagaattgatggggctctaaaggttggccaaaagcgaggaagattgcttatcaatttggaagaggatgaacagccaaggaagaaaattagaatcggcagtcctgccacacagtggatttcagtctataatgcacgccgtcctatgaaacagagatatcattacaacgttgcagacttaagacttgcacagcatgttgagaaaggtaatgaggatggccttttcataagctgtgtagcatcatcagctaatctctgggccatcatcatggatgctgggactggtttcagttctcaagtttatgaactgtcctcagtcttcctgcacaaggactggatcatggaacaatgggaaaagaactactatatcagttccatagctggtgcaaataatggaagctcgttggttgttatggctaaaggaactccttatacccagcaatcttacaaagtcagcgactcatttccattcaagtggataaataaaaagtggaaagaaggttttcatgtaacatccatgaccaccgctgggagtcgttggggtgtagtaatgtccaggaactcaggctactctgaacaggtggtggagcttgacttcttgtacccaagtgaaggaatacatcgaaggtgggaaagtggatacaggataacatcaatggctgcaacagctgatcaagcagctcttatattgagtatacctaaacgaaaaataaccgatgaaacccaagagactctccggacttctgccttcccaagtacccatgtcaaggagaaatgggcgaaaaatctgtacattgcatcaatatgctatggtcggacagtttgctgatgaaacatggagtatactgtttcaacctctctcactctctctctagggttttagggacgatctctctctagaagcctgacaacgtgtagccttcggtttcagtacaatccaaaggtaaaccttaaccaggagccaacctatgtgactgtgtaatgaaatgaaatttgtctctatgtatgtagtaagtacaagataaaaggaaaaaaaaaaaattgagtagaagagacgaaatcattattactagaaatgatgaagagctgcaacaagattatgcagtttctggcttatttggctttgtacctgatttgagtacagaatcaggaggaagcaacatgtttgttataatgaacatataattctaagaaggctttcatcttttggtc

SEQ ID NO: 40225 - protein, 701 aa, Arabidopsis thaliana
  peptide (1)..(701): Ceres Seq. ID no. 12344988
MPELRSGARRSRRLDEQPNPPLVEQAENIVLPPQTATRRRGGGRGRGNAALAKGAAPPRPTAAGRGRGIRLTDLEPEPCEVRPAAGAIGATEPALNRVEGVADKDIAAEGGSAEKVVGMEEDSSMGPVPERVQVGNSPVYKTERKLGKGGFGQVYVGRRVSGGSDRIGADAIEVALKLEHRNSKGCNFGPPYEWQVYNTLNSCYGIPAVHHKGRQGDFYILVMDMLGPSLWDVWNSLAQSMSPNMVACIAVEAISILEKLHMKGFVHGDVKPENFLLGQPGTADEKKLYLIDLGLASRWKDSHSGQHVEYDQRPDVFRGTIRYASCHAHLGRTGSRRDDLESLAYTLIFLMRGRLPWQGYQGDNKSFLVCKKKMSTSPELMCCFCPPPFKLFLEAVTNMKFDEEPNYAKLISIFDTLIEPCAISRPIRIDGALKVGQKRGRLLINLEEDEQPRKKIRIGSPATQWISVYNARRPMKQRYHYNVADLRLAQHVEKGNEDGLFISCVASSANLWAIIMDAGTGFSSQVYELSSVFLHKDWIMEQWEKNYYISSIAGANNGSSLVVMAKGTPYTQQSYKVSDSFPFKWINKKWKEGFHVTSMTTAGSRWGVVMSRNSGYSEQVVELDFLYPSEGIHRRWESGYRITSMAATADQAALILSIPKRKITDETQETLRTSAFPSTHVKEKWAKNLYIASICYGRTVC

SEQ ID NO: 40226 - protein, 583 aa, Arabidopsis thaliana
  peptide (1)..(583): Ceres Seq. ID no. 12344989
MEEDSSMGPVPERVQVGNSPVYKTERKLGKGGFGQVYVGRRVSGGSDRIGADAIEVALKLEHRNSKGCNFGPPYEWQVYNTLNSCYGIPAVHHKGRQGDFYILVMDMLGPSLWDVWNSLAQSMSPNMVACIAVEAISILEKLHMKGFVHGDVKPENFLLGQPGTADEKKLYLIDLGLASRWKDSHSGQHVEYDQRPDVFRGTIRYASCHAHLGRTGSRRDDLESLAYTLIFLMRGRLPWQGYQGDNKSFLVCKKKMSTSPELMCCFCPPPFKLFLEAVTNMKFDEEPNYAKLISIFDTLIEPCAISRPIRIDGALKVGQKRGRLLINLEEDEQPRKKIRIGSPATQWISVYNARRPMKQRYHYNVADLRLAQHVEKGNEDGLFISCVASSANLWAIIMDAGTGFSSQVYELSSVFLHKDWIMEQWEKNYYISSIAGANNGSSLVVMAKGTPYTQQSYKVSDSFPFKWINKKWKEGFHVTSMTTAGSRWGVVMSRNSGYSEQVVELDFLYPSEGIHRRWESGYRITSMAATADQAALILSIPKRKITDETQETLRTSAFPSTHVKEKWAKNLYIASICYGRTVC

SEQ ID NO: 40227 - protein, 577 aa, Arabidopsis thaliana
  peptide (1)..(577): Ceres Seq. ID no. 12344990
MGPVPERVQVGNSPVYKTERKLGKGGFGQVYVGRRVSGGSDRIGADAIEVALKLEHRNSKGCNFGPPYEWQVYNTLNSCYGIPAVHHKGRQGDFYILVMDMLGPSLWDVWNSLAQSMSPNMVACIAVEAISILEKLHMKGFVHGDVKPENFLLGQPGTADEKKLYLIDLGLASRWKDSHSGQHVEYDQRPDVFRGTIRYASCHAHLGRTGSRRDDLESLAYTLIFLMRGRLPWQGYQGDNKSFLVCKKKMSTSPELMCCFCPPPFKLFLEAVTNMKFDEEPNYAKLISIFDTLIEPCAISRPIRIDGALKVGQKRGRLLINLEEDEQPRKKIRIGSPATQWISVYNARRPMKQRYHYNVADLRLAQHVEKGNEDGLFISCVASSANLWAIIMDAGTGFSSQVYELSSVFLHKDWIMEQWEKNYYISSIAGANNGSSLVVMAKGTPYTQQSYKVSDSFPFKWINKKWKEGFHVTSMTTAGSRWGVVMSRNSGYSEQVVELDFLYPSEGIHRRWESGYRITSMAATADQAALILSIPKRKITDETQETLRTSAFPSTHVKEKWAKNLYIASICYGRTVC

SEQ ID NO: 40228 - DNA, 1197 bp, Arabidopsis thaliana
  misc_feature (1)..(1197): Ceres Seq. ID no. 12678852
  misc_feature (1)..(1197): Ortholog of  Ceres SEQ ID NO 12615764 as cited in SEQ ID NO 63015
cggcgtctgtttaccgctatcatcattcttccgggaagaggaaaaggtttcttcgatcgtcgaagagattctttggacaagtcccctccttcctggttcaatcttcgattcagctctcttttaatttttttggttttgggaagctgctatgttatttgagaggcttaccaagaaaccaccttcgcttgttgatctttgcgtaaggaaagcgattgataatgtaaagtacattggatatgttggtggggttgattttcagctccttgagcagattctgcaacactgtacactagaacagctgaagcacatagaggatgctactgacgacacagatcttagtccaatcaccgataagttttggaagggattctataagaagcactatggagaagaggacatgaaggatcttatagaggacctggagtggaataaagtaaatgatttcaaatggaggaacttatatgagttgaaggttatagctgtgcaacaaaaggagaaggaacttggtggtcgactgaaagaacgttacaaggacgaaaatgaaaggaaacaaagtcgacaaactaaggtctgctcgaaagctcctccaagcaaaagaccattttggggtaatagtgcatcaggttacaatcttgggcatgtgaagagcaacatcatgaagaaggcaaaaatagatctgttgaagagtcaagaagtgaaaaatcttactgcgattaaaaggaacaccattcagaagagtttcagtatttctactccaaagaaaactggcttatctgcgaattcgccttcaacttcaagaagcattccttatggtggacgaaatcttactgaaactaaaaagaacacgattcagaagagtttcagtatatctgctccaaagaggactggcttatccgctaatgcgccttcaacttcaagaagcgttccttctggtggacaaaagctacctccaaggaggatcaacggccttcctgggactgctccttcaacttcaaaaaatgcagccaccagacaaaaacatgtaatgtaacttatatagcttttttacagatcattttttcttcgagtgtatcatttacatggctacttcaagtttcaagaactccgagttttgaaactctggcttgatgatatcctagtttgtaacaatagatcttcaaaagtttttacaatgatttaataaagtgctttgttttc

SEQ ID NO: 40229 - protein, 293 aa, Arabidopsis thaliana
  peptide (1)..(293): Ceres Seq. ID no. 12678853
MLFERLTKKPPSLVDLCVRKAIDNVKYIGYVGGVDFQLLEQILQHCTLEQLKHIEDATDDTDLSPITDKFWKGFYKKHYGEEDMKDLIEDLEWNKVNDFKWRNLYELKVIAVQQKEKELGGRLKERYKDENERKQSRQTKVCSKAPPSKRPFWGNSASGYNLGHVKSNIMKKAKIDLLKSQEVKNLTAIKRNTIQKSFSISTPKKTGLSANSPSTSRSIPYGGRNLTETKKNTIQKSFSISAPKRTGLSANAPSTSRSVPSGGQKLPPRRINGLPGTAPSTSKNAATRQKHVM

SEQ ID NO: 40230 - protein, 210 aa, Arabidopsis thaliana
  peptide (1)..(210): Ceres Seq. ID no. 12678854
MKDLIEDLEWNKVNDFKWRNLYELKVIAVQQKEKELGGRLKERYKDENERKQSRQTKVCSKAPPSKRPFWGNSASGYNLGHVKSNIMKKAKIDLLKSQEVKNLTAIKRNTIQKSFSISTPKKTGLSANSPSTSRSIPYGGRNLTETKKNTIQKSFSISAPKRTGLSANAPSTSRSVPSGGQKLPPRRINGLPGTAPSTSKNAATRQKHVM

SEQ ID NO: 40231 - DNA, 1214 bp, Arabidopsis thaliana
  misc_feature (1)..(1214): Ceres Seq. ID no. 13489093
  misc_feature (1)..(1214): Ortholog of  Ceres SEQ ID NO 14302351 as cited in SEQ ID NO 66690
gtcactttgtctcgtccaccttttaaaaaccctctctaaagtctccgaaacatcttctctcttaaacaaatcctctctgattcgatgggttttagcaaagaagagattagtaaaaccagaaagctttggtcatctctatggagaggaatcaaaactatattcgttttgttcacaatgttcttctcttttctccttgtctctgctcctatcttcctcgccgtcgccgatgctctcctcccttccgctctcctccaccgcttctcttcgccggcgactctctcttctcatctcaccaactacgatttccgtcactccctcatcgatattcctttaatctcaatcattagatccgctgttatactctgtgtttatggactctgtgacggaccaaaactatcgagaggaccgtatctgacaataacaatgatttgttcaatatcttctctaatctacgtttcgttaaaagctgcgtttgtgttcggtgagccagcgatcggagacggaggaggaaactacttcagagcggcggaagtggctctgtttctatgctcgtcagtcttagccataggtcacatcgttgtggcttatcgaacaagttgtagagaaagaaaaaagcttctcgtcttcaaaatcgacattgaagccgtttcggcttgtaaaaacgtgtacccgagataccaaaagatcttattacaacaagagagactcaaatagagacgtatttccaagagaatcaatacttgtaaatatatacacatacctcaacatgtaaataaaactaatatataaaaacatacggcgtataaatgtaacttctccttctgcctttcggcgttgacccatcaactccttcgcttttaagtttcagaaggatccaaagcaaaaggaatggagattaattatataacctatgcttttttaaatgagacatttcagatgaactggcagttgttagctttaacattatattagttagggcgatttgtaaataatccagagttcctcaatgagaaaagaagcccaaggctgtctctccgttttgtatatatgtttatgtttgtatttctttgtggttttaatatatgttttgtaattgtaatttgtaagcataagcacatagtatgtgatacgtccgcgtggatttctttatacgtcaccaaaatctctaatagaatcgtaaagcaacctttttacgatcaatatctatttatctt

SEQ ID NO: 40232 - protein, 209 aa, Arabidopsis thaliana
  peptide (1)..(209): Ceres Seq. ID no. 13489094
MGFSKEEISKTRKLWSSLWRGIKTIFVLFTMFFSFLLVSAPIFLAVADALLPSALLHRFSSPATLSSHLTNYDFRHSLIDIPLISIIRSAVILCVYGLCDGPKLSRGPYLTITMICSISSLIYVSLKAAFVFGEPAIGDGGGNYFRAAEVALFLCSSVLAIGHIVVAYRTSCRERKKLLVFKIDIEAVSACKNVYPRYQKILLQQERLK

SEQ ID NO: 40233 - protein, 179 aa, Arabidopsis thaliana
  peptide (1)..(179): Ceres Seq. ID no. 13489095
MFFSFLLVSAPIFLAVADALLPSALLHRFSSPATLSSHLTNYDFRHSLIDIPLISIIRSAVILCVYGLCDGPKLSRGPYLTITMICSISSLIYVSLKAAFVFGEPAIGDGGGNYFRAAEVALFLCSSVLAIGHIVVAYRTSCRERKKLLVFKIDIEAVSACKNVYPRYQKILLQQERLK

SEQ ID NO: 40234 - protein, 110 aa, Arabidopsis thaliana
  peptide (1)..(110): Ceres Seq. ID no. 13489096
SLCLVHLLKTLSKVSETSSLLNKSSLIRWVLAKKRLVKPESFGHLYGEESKLYSFCSQCSSLFSLSLLLSSSPSPMLSSLPLSSTASLRRRLSLLISPTTISVTPSSIFL

SEQ ID NO: 40235 - DNA, 1339 bp, Arabidopsis thaliana
  misc_feature (1)..(1339): Ceres Seq. ID no. 12395822
  misc_feature (1)..(1339): Ortholog of  Ceres SEQ ID NO 15177500 as cited in SEQ ID NO 0
agagatgatcaaacaatggcgactttgattctatcattcttgcttcttcttctagcaacaaagcttcctgaatcactagctggtcactgcaccaccacgacggcgacgaaaagcttcgagaaatgtatctctcttccaacacaacaaacgtcaatcgcgtggacataccatccacacaacgctactctcgacctttgtttctttggaactttcatctcaccttccgggtgggttggatgggggattaacccggattccccggcgcagatgactggttctcgtgtcctcatcgcctttccagatccgaattctggtcagctcatcctccttccttacgttcttgactcttcagtcaagcttcagaaaggtcctctgctttcccgtccgcttgaccttgtccgtctctcttcctcctctgcttctctctacggtggtaaaatggccactatccgtaatggcgcttccgttcagatttatgcctctgttaagctctcctcgaacaatactaagatccaccatgtttggaacagaggtctttatgtccaaggttactctcccaccattcatcctactacttccaccgatctctcctccttctccacctttgatgtcacttcaggatttgcaactgttaatcaaaacagcggttcccgagctttaaaagtgactcacggagtagtcaacgcgatatcgtggggttttctcctcccggcgggagcagtaacagctagatacctccgccaaatgcaatcaataggacccacttggttctacatccacgcagcaatacagctaaccggtttcctcctaggaaccattggcttctccattggaatcgtgctcggccataattcccctggagtgacctatgggttacatcggagcctcgggatagctactttcacagcagcggcgctgcaaacactggctttgctgttcagaccaaagacgaccaataagttccggaggtactggaagtcttaccatcattttgtcgggtacgcgtgtgtggtgatgggcgtggtgaatgtgttccaagggtttgaggttttaagggaaggaaggtcgtacgcaaagctcggttactgtctatgtctgtcgacgctggttggtgtctgcgtggccatggaagttaactcgtgggttgtgttttgtcgaaaggctaaagaggagaagatgaagagagatggtttgaccggtgtcgatagatgcagtgggagtcatagttaggtcttgggtcctaattataagacagaaaaagagacacaatatcatttatatatctttgcttagtaccctcatgtacaatgtaacttgttggttcaaagttgacttaccc

SEQ ID NO: 40236 - protein, 409 aa, Arabidopsis thaliana
  peptide (1)..(409): Ceres Seq. ID no. 12395823
RDDQTMATLILSFLLLLLATKLPESLAGHCTTTTATKSFEKCISLPTQQTSIAWTYHPHNATLDLCFFGTFISPSGWVGWGINPDSPAQMTGSRVLIAFPDPNSGQLILLPYVLDSSVKLQKGPLLSRPLDLVRLSSSSASLYGGKMATIRNGASVQIYASVKLSSNNTKIHHVWNRGLYVQGYSPTIHPTTSTDLSSFSTFDVTSGFATVNQNSGSRALKVTHGVVNAISWGFLLPAGAVTARYLRQMQSIGPTWFYIHAAIQLTGFLLGTIGFSIGIVLGHNSPGVTYGLHRSLGIATFTAAALQTLALLFRPKTTNKFRRYWKSYHHFVGYACVVMGVVNVFQGFEVLREGRSYAKLGYCLCLSTLVGVCVAMEVNSWVVFCRKAKEEKMKRDGLTGVDRCSGSHS

SEQ ID NO: 40237 - protein, 404 aa, Arabidopsis thaliana
  peptide (1)..(404): Ceres Seq. ID no. 12395824
MATLILSFLLLLLATKLPESLAGHCTTTTATKSFEKCISLPTQQTSIAWTYHPHNATLDLCFFGTFISPSGWVGWGINPDSPAQMTGSRVLIAFPDPNSGQLILLPYVLDSSVKLQKGPLLSRPLDLVRLSSSSASLYGGKMATIRNGASVQIYASVKLSSNNTKIHHVWNRGLYVQGYSPTIHPTTSTDLSSFSTFDVTSGFATVNQNSGSRALKVTHGVVNAISWGFLLPAGAVTARYLRQMQSIGPTWFYIHAAIQLTGFLLGTIGFSIGIVLGHNSPGVTYGLHRSLGIATFTAAALQTLALLFRPKTTNKFRRYWKSYHHFVGYACVVMGVVNVFQGFEVLREGRSYAKLGYCLCLSTLVGVCVAMEVNSWVVFCRKAKEEKMKRDGLTGVDRCSGSHS

SEQ ID NO: 40238 - protein, 320 aa, Arabidopsis thaliana
  peptide (1)..(320): Ceres Seq. ID no. 12395825
MTGSRVLIAFPDPNSGQLILLPYVLDSSVKLQKGPLLSRPLDLVRLSSSSASLYGGKMATIRNGASVQIYASVKLSSNNTKIHHVWNRGLYVQGYSPTIHPTTSTDLSSFSTFDVTSGFATVNQNSGSRALKVTHGVVNAISWGFLLPAGAVTARYLRQMQSIGPTWFYIHAAIQLTGFLLGTIGFSIGIVLGHNSPGVTYGLHRSLGIATFTAAALQTLALLFRPKTTNKFRRYWKSYHHFVGYACVVMGVVNVFQGFEVLREGRSYAKLGYCLCLSTLVGVCVAMEVNSWVVFCRKAKEEKMKRDGLTGVDRCSGSHS

SEQ ID NO: 40239 - DNA, 946 bp, Arabidopsis thaliana
  misc_feature (1)..(946): Ceres Seq. ID no. 12325904
  misc_feature (1)..(946): Ortholog of  Ceres SEQ ID NO 14302000 as cited in SEQ ID NO 52175
  misc_feature (1)..(946): Ortholog of  Ceres SEQ ID NO 14316371 as cited in SEQ ID NO 60113
acagtcgtcactcaccacctcaccgacctcaccgttccttatccatttggctgacgcaaaatcgaatcggaaccctaaaatctctccgaaagccatgtctcctcctcctgctgtagtcactgaatctgccgatggacaacctgagcaaccaccggttaccgccattgctgaagagctggagaaaaagcttcagactgatgaaccgattgtagaagatgttaaagatgatgaagacgatgatgatgatgacgaagaagaggaagacgacgatgctcaaggtgtaagtggaagttcaaagcagagtagaagtgaaaagaagagtaggaaggcgatgttgaagctcggtatgaaacctgtcactggtgttagtcgagtaaccatcaagagaacgaaaaacgttctcttctttatctctaagcctgatgtctttaagagcccgcattcagaaacctatgttatattcggtgaggccaagatcgaggatttgagctctcagcttcaaacgcaagctgctcaacagtttaagatgcctgaaattggagccacatctcagagagcagaggcatcgacagccactgtagaagcacaggtggaagaagatgaagaggaaatcgatgagaccggtgtggaggctcgtgacattgacttggtcatgactcaggctggagtttctcgtagcaaagcggttaaagcactcaagagtcacgatggagacattgtaagtgcaataatggaactcactacttgagagttaagagagattgagtctctatgctttattcacttgcagattgttttcaaatacttttggatttatcaggaaattggattattgttgtccttacgagtatctaatctagtttgtttgttatgatgcttatgcagtatctgagttgtactgtgtttttcacgacaatgtattggagaaaatacatatcaaaattcg

SEQ ID NO: 40240 - protein, 248 aa, Arabidopsis thaliana
  peptide (1)..(248): Ceres Seq. ID no. 12325905
QSSLTTSPTSPFLIHLADAKSNRNPKISPKAMSPPPAVVTESADGQPEQPPVTAIAEELEKKLQTDEPIVEDVKDDEDDDDDDEEEEDDDAQGVSGSSKQSRSEKKSRKAMLKLGMKPVTGVSRVTIKRTKNVLFFISKPDVFKSPHSETYVIFGEAKIEDLSSQLQTQAAQQFKMPEIGATSQRAEASTATVEAQVEEDEEEIDETGVEARDIDLVMTQAGVSRSKAVKALKSHDGDIVSAIMELTT

SEQ ID NO: 40241 - protein, 217 aa, Arabidopsis thaliana
  peptide (1)..(217): Ceres Seq. ID no. 12325906
MSPPPAVVTESADGQPEQPPVTAIAEELEKKLQTDEPIVEDVKDDEDDDDDDEEEEDDDAQGVSGSSKQSRSEKKSRKAMLKLGMKPVTGVSRVTIKRTKNVLFFISKPDVFKSPHSETYVIFGEAKIEDLSSQLQTQAAQQFKMPEIGATSQRAEASTATVEAQVEEDEEEIDETGVEARDIDLVMTQAGVSRSKAVKALKSHDGDIVSAIMELTT

SEQ ID NO: 40242 - protein, 138 aa, Arabidopsis thaliana
  peptide (1)..(138): Ceres Seq. ID no. 12325907
MLKLGMKPVTGVSRVTIKRTKNVLFFISKPDVFKSPHSETYVIFGEAKIEDLSSQLQTQAAQQFKMPEIGATSQRAEASTATVEAQVEEDEEEIDETGVEARDIDLVMTQAGVSRSKAVKALKSHDGDIVSAIMELTT

SEQ ID NO: 40243 - DNA, 1982 bp, Arabidopsis thaliana
  misc_feature (1)..(1982): Ceres Seq. ID no. 13576744
  misc_feature (1)..(1982): Ortholog of  Ceres SEQ ID NO 14302588 as cited in SEQ ID NO 0
aggttacttgttagatctcaacaaccaggtcgcacacactaaaatggcgttccgcgttttgctcctcttctcactcaccgcacttctcatcttctccgccgtttctccttctttcgccgcttcttcctccgacgacgttgacgatgaggatctcagcttcctcgaagatctcaaagaagacgacgttcccggcgctgactcactctcttcctcaactggatttgacgaattcgaaggaggagaagaagaagatcccgatatgtacaacgacgatgacgatgaagaaggagatttttccgatctaggtaatccggattccgatccgttaccgacgccggagattgatgagaaagacgttgtggttatcaaggagcgtaacttcactgatgtgattgagaataatcaatacgttttggttgagttttatgctccgtggtgtggtcattgtcagtctcttgctcctgagtatgctgctgctgccacggagcttaaggaagatggtgttgttttggctaagattgatgcgacggaggagaatgagttagctcaggagtatcgtgttcagggctttccgacgcttcttttcttcgttgatggtgagcacaagccttacactggaggaaggactaaagaaacaattgtgacatgggtgaagaagaagattggtcctggtgtgtataatctaactacattagatgatgctgagaaagtgttgacttctgggaacaaagttgttttgggatacttgaactccttggtgggtgttgagcacgatcagcttaatgctgcttccaaagctgaagacgatgtgaacttttatcaaacagtgaatcctgatgttgcaaagatgtttcaccttgatccggagtctaaaaggcctgctcttgtcctagttaagaaggaagaggagaaaattagccattttgatggagaatttgttaagtctgctctagttagttttgtgtctgccaacaagcttgctttggtctctgttttcaccagagagactgctccggaaatttttgagagtgcaatcaagaaacagttgttgttgtttgtaaccaaaaatgaatctgaaaaggttcttacggaatttcaagaagcagcgaaatcattcaaaggaaagctcatctttgtatctgtggatctggataatgaggattatgggaagccagtcgctgaatactttggtgtgtctggaaatggtcctaaacttattggctacacagggaatgaagaccctaaaaaatactttttcgatggcgagatccagtcagataaaattaagatatttggggaggatttcctgaacgacaagttaaagcctttctataagtcagaccccattcctgaaaagaacgatgaagatgtgaaaatagtggttggagataactttgatgaaattgttctggacgattctaaagatgtgcttctcgaggtctacgcaccatggtgtggccattgccaagcccttgagccaatgtataacaaacttgccaagcatttacgaagtattgattctctcgtcataaccaagatggatggaacaaccaatgaacatcccaaggcaaaggctgaggggttccctaccattctcttcttccctgcgggcaacaagacttcagagccgattactgtagatacagaccgcactgtggttgcattttacaagttcttaaggaaacacgcaacgatcccattcaaactggagaaacctgcatcaaccgaatcacctaaaactgcagagtccacaccaaaagtagaaactaccgagaccaaagaatcacccgatagcacgacaaagagtagccaaagtgactcgaaggacgaattgtgatcagaaaagggtataatatatattacatgtctccttaagttgttatatgtatgatcagaattgtcacatcatgagtttggactagataaagatgggaattaaagtaattttagttttgagaaagacaatttcttttgatttggtc

SEQ ID NO: 40244 - protein, 611 aa, Arabidopsis thaliana
  peptide (1)..(611): Ceres Seq. ID no. 13576745
GYLLDLNNQVAHTKMAFRVLLLFSLTALLIFSAVSPSFAASSSDDVDDEDLSFLEDLKEDDVPGADSLSSSTGFDEFEGGEEEDPDMYNDDDDEEGDFSDLGNPDSDPLPTPEIDEKDVVVIKERNFTDVIENNQYVLVEFYAPWCGHCQSLAPEYAAAATELKEDGVVLAKIDATEENELAQEYRVQGFPTLLFFVDGEHKPYTGGRTKETIVTWVKKKIGPGVYNLTTLDDAEKVLTSGNKVVLGYLNSLVGVEHDQLNAASKAEDDVNFYQTVNPDVAKMFHLDPESKRPALVLVKKEEEKISHFDGEFVKSALVSFVSANKLALVSVFTRETAPEIFESAIKKQLLLFVTKNESEKVLTEFQEAAKSFKGKLIFVSVDLDNEDYGKPVAEYFGVSGNGPKLIGYTGNEDPKKYFFDGEIQSDKIKIFGEDFLNDKLKPFYKSDPIPEKNDEDVKIVVGDNFDEIVLDDSKDVLLEVYAPWCGHCQALEPMYNKLAKHLRSIDSLVITKMDGTTNEHPKAKAEGFPTILFFPAGNKTSEPITVDTDRTVVAFYKFLRKHATIPFKLEKPASTESPKTAESTPKVETTETKESPDSTTKSSQSDSKDEL

SEQ ID NO: 40245 - protein, 597 aa, Arabidopsis thaliana
  peptide (1)..(597): Ceres Seq. ID no. 13576746
MAFRVLLLFSLTALLIFSAVSPSFAASSSDDVDDEDLSFLEDLKEDDVPGADSLSSSTGFDEFEGGEEEDPDMYNDDDDEEGDFSDLGNPDSDPLPTPEIDEKDVVVIKERNFTDVIENNQYVLVEFYAPWCGHCQSLAPEYAAAATELKEDGVVLAKIDATEENELAQEYRVQGFPTLLFFVDGEHKPYTGGRTKETIVTWVKKKIGPGVYNLTTLDDAEKVLTSGNKVVLGYLNSLVGVEHDQLNAASKAEDDVNFYQTVNPDVAKMFHLDPESKRPALVLVKKEEEKISHFDGEFVKSALVSFVSANKLALVSVFTRETAPEIFESAIKKQLLLFVTKNESEKVLTEFQEAAKSFKGKLIFVSVDLDNEDYGKPVAEYFGVSGNGPKLIGYTGNEDPKKYFFDGEIQSDKIKIFGEDFLNDKLKPFYKSDPIPEKNDEDVKIVVGDNFDEIVLDDSKDVLLEVYAPWCGHCQALEPMYNKLAKHLRSIDSLVITKMDGTTNEHPKAKAEGFPTILFFPAGNKTSEPITVDTDRTVVAFYKFLRKHATIPFKLEKPASTESPKTAESTPKVETTETKESPDSTTKSSQSDSKDEL

SEQ ID NO: 40246 - protein, 525 aa, Arabidopsis thaliana
  peptide (1)..(525): Ceres Seq. ID no. 13576747
MYNDDDDEEGDFSDLGNPDSDPLPTPEIDEKDVVVIKERNFTDVIENNQYVLVEFYAPWCGHCQSLAPEYAAAATELKEDGVVLAKIDATEENELAQEYRVQGFPTLLFFVDGEHKPYTGGRTKETIVTWVKKKIGPGVYNLTTLDDAEKVLTSGNKVVLGYLNSLVGVEHDQLNAASKAEDDVNFYQTVNPDVAKMFHLDPESKRPALVLVKKEEEKISHFDGEFVKSALVSFVSANKLALVSVFTRETAPEIFESAIKKQLLLFVTKNESEKVLTEFQEAAKSFKGKLIFVSVDLDNEDYGKPVAEYFGVSGNGPKLIGYTGNEDPKKYFFDGEIQSDKIKIFGEDFLNDKLKPFYKSDPIPEKNDEDVKIVVGDNFDEIVLDDSKDVLLEVYAPWCGHCQALEPMYNKLAKHLRSIDSLVITKMDGTTNEHPKAKAEGFPTILFFPAGNKTSEPITVDTDRTVVAFYKFLRKHATIPFKLEKPASTESPKTAESTPKVETTETKESPDSTTKSSQSDSKDEL

SEQ ID NO: 40247 - DNA, 1133 bp, Arabidopsis thaliana
  misc_feature (1)..(1133): Ceres Seq. ID no. 12327732
  misc_feature (1)..(1133): Ortholog of  Ceres SEQ ID NO 13504028 as cited in SEQ ID NO 56107
ttctttcttcgtcttcaacttcttctaccgagattgattctatttcttccggatcttacgcaaccattactctcacctcaggcagaaatgtttctatgttgaagaagaaggaaatggttataagtcttggaagttttagtatcatcagttgtgtcttagaaaactgggaacggctcttttcctctgttaccatagctgagttagcttgagaaacttttgaattggattcagatcatgccttactttgctcagaggctttacaatacttgcaaggcgtctttctcttcagacggaccaataacagaagatgctctggagaaggttcgcaatgtcttggagaaaatcaagccatctgatgttggaattgagcaggatgctcaattggcacggtccaggtctggtcctctcaatgaacgcaatggaagtaatcagtctcccccagcaataaagtatcttcatttgcatgagtgtgacagtttctctatagtaatcttctgtatgccaccttcttctatgatacctcttcataaccatccgggcatgaccgtgctaagcaagctcgtttatggttcaatgcatgtgaagtcatatgattggctagagcctcaactgaccgaaccagaggatccatcacaagcaagacctgctaaactggtgaaggatactgagatgacggctcaaagcccagtaacaacattatatccgaaaagtggtggcaacattcactgtttcaaagccatcacccattgtgctattcttgacatcttagctccaccttactcttcagagcatgatcggcattgcacttacttccggaaatccagaagagaagacttaccaggtgaattagaagtggatggagaagtggtcacagacgtgacatggcttgaggaatttcaaccgcctgatgactttgtgatacgacgaattccgtacagaggtcctgtcattagaacttgatgatgatctaatctttacttgtcacataatttgggcggcttcgggtttttattttttatttatattcctttcggaaataatttggggggtctttttatattgcaaacgggattgtacatactaatttgtgatacaccgtgtgtctccgtttcattatattgcaaaagacttcc

SEQ ID NO: 40248 - protein, 241 aa, Arabidopsis thaliana
  peptide (1)..(241): Ceres Seq. ID no. 12327733
MPYFAQRLYNTCKASFSSDGPITEDALEKVRNVLEKIKPSDVGIEQDAQLARSRSGPLNERNGSNQSPPAIKYLHLHECDSFSIVIFCMPPSSMIPLHNHPGMTVLSKLVYGSMHVKSYDWLEPQLTEPEDPSQARPAKLVKDTEMTAQSPVTTLYPKSGGNIHCFKAITHCAILDILAPPYSSEHDRHCTYFRKSRREDLPGELEVDGEVVTDVTWLEEFQPPDDFVIRRIPYRGPVIRT

SEQ ID NO: 40249 - protein, 153 aa, Arabidopsis thaliana
  peptide (1)..(153): Ceres Seq. ID no. 12327734
MPPSSMIPLHNHPGMTVLSKLVYGSMHVKSYDWLEPQLTEPEDPSQARPAKLVKDTEMTAQSPVTTLYPKSGGNIHCFKAITHCAILDILAPPYSSEHDRHCTYFRKSRREDLPGELEVDGEVVTDVTWLEEFQPPDDFVIRRIPYRGPVIRT

SEQ ID NO: 40250 - protein, 148 aa, Arabidopsis thaliana
  peptide (1)..(148): Ceres Seq. ID no. 12327735
MIPLHNHPGMTVLSKLVYGSMHVKSYDWLEPQLTEPEDPSQARPAKLVKDTEMTAQSPVTTLYPKSGGNIHCFKAITHCAILDILAPPYSSEHDRHCTYFRKSRREDLPGELEVDGEVVTDVTWLEEFQPPDDFVIRRIPYRGPVIRT

SEQ ID NO: 40251 - DNA, 1894 bp, Arabidopsis thaliana
  misc_feature (1)..(1894): Ceres Seq. ID no. 13495826
  misc_feature (1)..(1894): Ortholog of  Ceres SEQ ID NO 13595900 as cited in SEQ ID NO 69289
ggggaatgtgacaaagcaatctgggttgtctgattatttccaatgacttccttctctgtctgattcgtttgtttcggcgattcaactcttcttcaacgccctgagagtcacgcacgagaattggattgatggtttttcacacgcaggagaggcgattcgttgtcttcttcttgtcccgttgacctgtttcgatctcagatggtgattatgcagcagctgattctaaattagggcatttaaatccgccttccaggtgaatttttgaaaagtaattaaagggtgttcttgaatggacttgaaaatggataatgttattgggggaaagtttaaacttggtcggaagatcggtggtggctcttttggagaactttttcttgccgtaagtttgcaaaccggagaggaagcagctgttaagctggagcctgcgaaaactaagcatccccaacttcattatgagtcgaagatatacatgcttctacaaggaggaagtggcatccccagccttaagtggtttggggttcagggagactacaatgcgatggtcattgatctgcttgggccgagtttggaagacttgttcaactactgcaataggaggcttactttgaaggcagttttgatgcttgcagatcaactgattagcagagttgaatatatgcattcaagggggtttcttcaccgtgacatcaaacctgacaatttcttgatgggacttggtcgcaaagcaaaccaggtgtatatcattgattttgggcttgcaaagaagtatagggatctccaaacacataggcatatcccctatagagaaaacaagaaccttacgggcacagctcggtatgctagtgtcaacactcacctaggagttgagcaaagtaggagggatgatctggagtctcttggttacgtactcatgtatttcctgagaggaagcttaccgtggcagggactaaaagctggcacaaagaagcaaaagtatgacagaattagcgagaagaaagtatcaactcctatagaggtcttgtgcaagtcatatccacccgaattcgtatcatactttcaatactgcagatctctgcgattcgaagacaaaccagactactcatatctaaagagacttttccgagacttgtttatccgtgaaggttatcagtttgattatgtattcgactggactgcattgaaacaccctcagagtagtgccaggtcccattccagtacacatgaaaggcatcgtaccggtaaaccagggatgggtgcgggaccgtctgctgaaaaacctgaaaggatttcagtagggaacatccgcgataaattctcaggtgcggtcgaagcatttgcgagaaggaacgttagaggacccagtccccatcaaaaccataccagacatcgaactcttgacgaaattccttcaatgaaacctgctgtgaatatggtatctgagaaaggaagaaacacttccagatacggcagtgcttcgaggagagcagtagcctcaggaagtagaccaagctcatcaggtgaacaaagggagagccgggactcgagccgcgtagcctcaagcggtggcggtgtccgaccatcagtcttccaaagaacccaagcagcagctgctgtgagtggatacgagtcaaagacagcatctgcctttaaccgcgaccgagtagccgcttcaagaacagcacgagacgaggctctcagaagcttcgagcttctttcgatccgcaaatgaagccttcatcaattggctctttgctgtaaattggattcttctttacatatgttgtttggtcctttgtttccacgaaactcccaatttttcatgtattatcaaattctctggattttgtatcaatttttacacactttattgtaatcatgacaatttgttgagttt

SEQ ID NO: 40252 - protein, 479 aa, Arabidopsis thaliana
  peptide (1)..(479): Ceres Seq. ID no. 13495827
MDLKMDNVIGGKFKLGRKIGGGSFGELFLAVSLQTGEEAAVKLEPAKTKHPQLHYESKIYMLLQGGSGIPSLKWFGVQGDYNAMVIDLLGPSLEDLFNYCNRRLTLKAVLMLADQLISRVEYMHSRGFLHRDIKPDNFLMGLGRKANQVYIIDFGLAKKYRDLQTHRHIPYRENKNLTGTARYASVNTHLGVEQSRRDDLESLGYVLMYFLRGSLPWQGLKAGTKKQKYDRISEKKVSTPIEVLCKSYPPEFVSYFQYCRSLRFEDKPDYSYLKRLFRDLFIREGYQFDYVFDWTALKHPQSSARSHSSTHERHRTGKPGMGAGPSAEKPERISVGNIRDKFSGAVEAFARRNVRGPSPHQNHTRHRTLDEIPSMKPAVNMVSEKGRNTSRYGSASRRAVASGSRPSSSGEQRESRDSSRVASSGGGVRPSVFQRTQAAAAVSGYESKTASAFNRDRVAASRTARDEALRSFELLSIRK

SEQ ID NO: 40253 - protein, 475 aa, Arabidopsis thaliana
  peptide (1)..(475): Ceres Seq. ID no. 13495828
MDNVIGGKFKLGRKIGGGSFGELFLAVSLQTGEEAAVKLEPAKTKHPQLHYESKIYMLLQGGSGIPSLKWFGVQGDYNAMVIDLLGPSLEDLFNYCNRRLTLKAVLMLADQLISRVEYMHSRGFLHRDIKPDNFLMGLGRKANQVYIIDFGLAKKYRDLQTHRHIPYRENKNLTGTARYASVNTHLGVEQSRRDDLESLGYVLMYFLRGSLPWQGLKAGTKKQKYDRISEKKVSTPIEVLCKSYPPEFVSYFQYCRSLRFEDKPDYSYLKRLFRDLFIREGYQFDYVFDWTALKHPQSSARSHSSTHERHRTGKPGMGAGPSAEKPERISVGNIRDKFSGAVEAFARRNVRGPSPHQNHTRHRTLDEIPSMKPAVNMVSEKGRNTSRYGSASRRAVASGSRPSSSGEQRESRDSSRVASSGGGVRPSVFQRTQAAAAVSGYESKTASAFNRDRVAASRTARDEALRSFELLSIRK

SEQ ID NO: 40254 - protein, 419 aa, Arabidopsis thaliana
  peptide (1)..(419): Ceres Seq. ID no. 13495829
MLLQGGSGIPSLKWFGVQGDYNAMVIDLLGPSLEDLFNYCNRRLTLKAVLMLADQLISRVEYMHSRGFLHRDIKPDNFLMGLGRKANQVYIIDFGLAKKYRDLQTHRHIPYRENKNLTGTARYASVNTHLGVEQSRRDDLESLGYVLMYFLRGSLPWQGLKAGTKKQKYDRISEKKVSTPIEVLCKSYPPEFVSYFQYCRSLRFEDKPDYSYLKRLFRDLFIREGYQFDYVFDWTALKHPQSSARSHSSTHERHRTGKPGMGAGPSAEKPERISVGNIRDKFSGAVEAFARRNVRGPSPHQNHTRHRTLDEIPSMKPAVNMVSEKGRNTSRYGSASRRAVASGSRPSSSGEQRESRDSSRVASSGGGVRPSVFQRTQAAAAVSGYESKTASAFNRDRVAASRTARDEALRSFELLSIRK

SEQ ID NO: 40255 - DNA, 800 bp, Arabidopsis thaliana
  misc_feature (1)..(800): Ceres Seq. ID no. 12323263
  misc_feature (1)..(800): Ortholog of  Ceres SEQ ID NO 12619999 as cited in SEQ ID NO 66123
  misc_feature (1)..(800): Ortholog of  Ceres SEQ ID NO 13656436 as cited in SEQ ID NO 69154
aaaaagagaaacttaaaaaaaatcgatcctttaagttaaagtttgtatctttcgattgttttgttccgacccttgtaaaatttgttctcaggaaattaaaaaaggttggattttgatcgatgggttcttcgtcaggacaacccgaatttgattacttgtttaaggttttattgatcggagattctggtgttggaaagagctctcttttgttgagtttcacatctaatacctttgatgatctttctccaacgattggtgtggattttaaggttaagtatctgacaattggagaaaagaaactcaagcttgcgatttgggatacagctgggcaagagagatttaggacgctaacaagttcgtattacagaggagctcagggtataattatggtatatgatgtgacacgaagagacacgttcacaaacctatcagacatatgggctaaggaaatcgacctctattcgactaatcaggattgcattaagatgcttgtcgggaataaagttgataaggagagtgaaagagctgtttctaaaaaagaaggcatagactttgctcgggagtacggatgtttgtttctggagtgtagtgcaaagactcgagtcaacgttgagcaatgttttgaagagcttgttcttaagatattggaaacgccgagtcttactgctgaaggttcgtctggcggaaagaagaacatcttcaaacaaaaccccgcacagaccaccagtacctcgtcgagctactgctgctcgtcttagacatggttttacagtttatgacaaattacactcttgctcatc

SEQ ID NO: 40256 - protein, 212 aa, Arabidopsis thaliana [sequence omitted]

SEQ ID NO: 40257 - protein, 123 aa, Arabidopsis thaliana; identical to SEQ ID NO: 26494
  peptide (1)..(123): Ceres Seq. ID no. 12323265

SEQ ID NO: 40258 - DNA, 1724 bp, Arabidopsis thaliana
  misc_feature (1)..(1724): Ceres Seq. ID no. 12328006
  misc_feature (1)..(1724): Ortholog of  Ceres SEQ ID NO 15177285 as cited in SEQ ID NO 52481
  misc_feature (1)..(1724): Ortholog of  Ceres SEQ ID NO 13594068 as cited in SEQ ID NO 58624
aaacaaattcagacaagaaacctcaacggctcagacccaccaataccaattttttaaagagatttctgtcacaattgcgaatcgagctggattcttgggctcgctttttctttcaatcaaaagtttcgatattagtgaaggataaaattcgctaaaaaaagagaattttttttgttaaaaaaattataaaagctggctttctcaaaatttctccatgtggtcgacgaagaagacgaagaagacgaagaagaaagagaaagtctcttagcaaacatgaccgccaccgaagctaagaatcgcaaaatcaatgtcggagatggagatgacgttgttgatatcgaaatccctgacactgctcatcaaattagcagcgattcatggtttcaggtggcgttcgttttgaccaccggtataaacagcgcgtatgtgttgggatattcaggaacaattatggttcctttaggttggattggtggtgtggttggtcttcttattgctactgcaatctctctttatgcaaacactctcatagctaagcttcatgagtttggtggcagaagacatattcgctatagagaccttgctggattcatttacggtaggaaggcttatcatcttacatggggattgcaatatgttaatcttttcatgattaattgtggattcattatcctagctggttccgccttaaaggctgtttatgtgcttttcagggatgatcataccatgaaactacctcattttatagccattgctggtttgatttgtgcgattttcgctattgggattcctcatttatcggctcttggggtctggcttggagtttcgaccttcctcagtctcatctatattgttgtggcaatcgtgctatcggttagagatggagtaaaaacaccttcaagagattacgagatacaaggatcatcattgagcaaactttttaccatcacaggagcagccgcaaatctggttttcgcattcaacaccgggatgcttccagaaattcaggcaacagtgaggcaaccagttgttaaaaacatgatgaaggctctatactttcaattcacagcgggtgttttaccgatgtacgcagttacattcatcggatattgggcttacggatcctcaacctcgacctatctactaaacagtgttaatggcccactctgggtcaaagcccttgctaacgtctctgctatccttcaatctgttatctctttgcacatatttgcgagtccaacatatgagtacatggacacaaagtatgggatcaaaggaaacccatttgcgataaagaacttgctgtttaggatcatggcgagaggcgggtacatagcggtaagcacgcttatctcagcgctgctgccgttcctcggtgacttcatgagcctaactggtgcagtgagcacattccctctcacattcattctagccaaccatatgtactataaggcaaagaacaataagctgaatgctatgcaaaagctatggcattggcttaacgttgtcttctttagtttgatgtctgttgctgcagccattgcagctgtcagactcatcgccgttgattccaaaaatttccatgtttttgcagatttgtaattcattatattatatagtcaattgtgtatccttcattcttaggcaggtttatttctcctgtaagcttgtattctctctctctttgtcttaccattagagcctaaataaataaatcaagttct

SEQ ID NO: 40259 - protein, 442 aa, Arabidopsis thaliana
  peptide (1)..(442): Ceres Seq. ID no. 12328007
MTATEAKNRKINVGDGDDVVDIEIPDTAHQISSDSWFQVAFVLTTGINSAYVLGYSGTIMVPLGWIGGVVGLLIATAISLYANTLIAKLHEFGGRRHIRYRDLAGFIYGRKAYHLTWGLQYVNLFMINCGFIILAGSALKAVYVLFRDDHTMKLPHFIAIAGLICAIFAIGIPHLSALGVWLGVSTFLSLIYIVVAIVLSVRDGVKTPSRDYEIQGSSLSKLFTITGAAANLVFAFNTGMLPEIQATVRQPVVKNMMKALYFQFTAGVLPMYAVTFIGYWAYGSSTSTYLLNSVNGPLWVKALANVSAILQSVISLHIFASPTYEYMDTKYGIKGNPFAIKNLLFRIMARGGYIAVSTLISALLPFLGDFMSLTGAVSTFPLTFILANHMYYKAKNNKLNAMQKLWHWLNVVFFSLMSVAAAIAAVRLIAVDSKNFHVFADL

SEQ ID NO: 40260 - protein, 383 aa, Arabidopsis thaliana
  peptide (1)..(383): Ceres Seq. ID no. 12328008
MVPLGWIGGVVGLLIATAISLYANTLIAKLHEFGGRRHIRYRDLAGFIYGRKAYHLTWGLQYVNLFMINCGFIILAGSALKAVYVLFRDDHTMKLPHFIAIAGLICAIFAIGIPHLSALGVWLGVSTFLSLIYIVVAIVLSVRDGVKTPSRDYEIQGSSLSKLFTITGAAANLVFAFNTGMLPEIQATVRQPVVKNMMKALYFQFTAGVLPMYAVTFIGYWAYGSSTSTYLLNSVNGPLWVKALANVSAILQSVISLHIFASPTYEYMDTKYGIKGNPFAIKNLLFRIMARGGYIAVSTLISALLPFLGDFMSLTGAVSTFPLTFILANHMYYKAKNNKLNAMQKLWHWLNVVFFSLMSVAAAIAAVRLIAVDSKNFHVFADL

SEQ ID NO: 40261 - protein, 317 aa, Arabidopsis thaliana; identical to SEQ ID NO: 24809
  peptide (1)..(317): Ceres Seq. ID no. 12328009

SEQ ID NO: 40262 - DNA, 1757 bp, Arabidopsis thaliana
  misc_feature (1)..(1757): Ceres Seq. ID no. 12327748
  misc_feature (1)..(1757): Ortholog of  Ceres SEQ ID NO 13657220 as cited in SEQ ID NO 66169
  misc_feature (1)..(1757): Ortholog of  Ceres SEQ ID NO 13663074 as cited in SEQ ID NO 69191
gagagataacagagagatagtttcttcttcatccaaaagaatccaatcttttcctcaaaagatagtttctggatcgaacgacaatggagattttctactacttggtgtttggggttttgggtctcgtcgtcgcggcgttggagcttagcaagaacaacaaggatcgaatcaacacttcttcagctttcaattctttcaagaacaattatctccttgtctattcgctcatgatggcgggtgattggttgcagggtccatatgtgtactatctttatagtacttatggatttggtaaaggggacattggacagcttttcattgctggttttggttcctctatgttgtttggtaccatcgttgggtctctagccgacaaacagggtcgtaagagggcatgtgttacctattgtattacctatatattgagctgcatcaccaagcattctcctcaatataaggttttgatggtaggccgtgtcttgggaggcattgctacttcccttctgttttcgtcatttgaatcatggctagttgctgagcacaataagaggggctttgagcagcaatggctgtctgtgacattttcaaaggcagtgttttttggcaacggtctcgttgcaattatcgctggattgtttgggaacctgcttgttgataccttctctcttgggcctgttgcgccatttgacgctgctgcatgctttcttactattggaatggctgtcattctatcatcatggacagaaaactatggagatccatcagaaaacaaggacttgcttacccagttcagaggtgctgcagtggccattgcctctgatgagaagatagcactattgggtgctatccagtcgctctttgaaggatctatgtatacttttgtattcctctggactcctgctctaagtccgaacgatgaggagattccccatggtttcatttttgcaacatttatgctagcttcgatgctaggcagttcccttgcatctcgtctgttgtctcgttcaactcccaaagtagagagctacatgcagattgttttcctagtttccggtgctgcactattgcttccaatattaatgactttgttcatagcaccttccaaggtgaaaggtggaggaatctctttctcgggttgctttcagctccttgggttctgtatattcgaggcgtgtgtaggactgttttggccatccataatgaagatgagatcccaatacatcccagaagaagccagaagcacaataatgaactttttccgcattcctctgaatatctttgtctgcgttgtattgtacaatgtaaatgcattccctatcacggtcatgtttggaatgtgctcgatcttcctctttgttgcaagtctcctacaaaggcggctcatgatgattgttgacaaaccaaaaacaaatgactggacaccccttgaagaaagaaacacagaagaagatcccctcaacatatgatgaattaactatacatatgcacattctggattcagtaatggagacagatagaagaagaggactttaaggtatatggtatatagaacgcaacaatgcatacaaagagatcatagcgttgtaagactcgatgcagtagttcgattgtttaatttttcttggctatatttttgaatatgttaaattcaaagacaagtataagttttatgcaatcaatgtgttattctttctttctatgcaacctctaccatcctcaccataattagccagcttttaagaggcaaaacatctttc

SEQ ID NO: 40263 - protein, 460 aa, Arabidopsis thaliana
  peptide (1)..(460): Ceres Seq. ID no. 12327749
MEIFYYLVFGVLGLVVAALELSKNNKDRINTSSAFNSFKNNYLLVYSLMMAGDWLQGPYVYYLYSTYGFGKGDIGQLFIAGFGSSMLFGTIVGSLADKQGRKRACVTYCITYILSCITKHSPQYKVLMVGRVLGGIATSLLFSSFESWLVAEHNKRGFEQQWLSVTFSKAVFFGNGLVAIIAGLFGNLLVDTFSLGPVAPFDAAACFLTIGMAVILSSWTENYGDPSENKDLLTQFRGAAVAIASDEKIALLGAIQSLFEGSMYTFVFLWTPALSPNDEEIPHGFIFATFMLASMLGSSLASRLLSRSTPKVESYMQIVFLVSGAALLLPILMTLFIAPSKVKGGGISFSGCFQLLGFCIFEACVGLFWPSIMKMRSQYIPEEARSTIMNFFRIPLNIFVCVVLYNVNAFPITVMFGMCSIFLFVASLLQRRLMMIVDKPKTNDWTPLEERNTEEDPLNI

SEQ ID NO: 40264 - protein, 412 aa, Arabidopsis thaliana
  peptide (1)..(412): Ceres Seq. ID no. 12327750
MMAGDWLQGPYVYYLYSTYGFGKGDIGQLFIAGFGSSMLFGTIVGSLADKQGRKRACVTYCITYILSCITKHSPQYKVLMVGRVLGGIATSLLFSSFESWLVAEHNKRGFEQQWLSVTFSKAVFFGNGLVAIIAGLFGNLLVDTFSLGPVAPFDAAACFLTIGMAVILSSWTENYGDPSENKDLLTQFRGAAVAIASDEKIALLGAIQSLFEGSMYTFVFLWTPALSPNDEEIPHGFIFATFMLASMLGSSLASRLLSRSTPKVESYMQIVFLVSGAALLLPILMTLFIAPSKVKGGGISFSGCFQLLGFCIFEACVGLFWPSIMKMRSQYIPEEARSTIMNFFRIPLNIFVCVVLYNVNAFPITVMFGMCSIFLFVASLLQRRLMMIVDKPKTNDWTPLEERNTEEDPLNI

SEQ ID NO: 40265 - protein, 411 aa, Arabidopsis thaliana
  peptide (1)..(411): Ceres Seq. ID no. 12327751
MAGDWLQGPYVYYLYSTYGFGKGDIGQLFIAGFGSSMLFGTIVGSLADKQGRKRACVTYCITYILSCITKHSPQYKVLMVGRVLGGIATSLLFSSFESWLVAEHNKRGFEQQWLSVTFSKAVFFGNGLVAIIAGLFGNLLVDTFSLGPVAPFDAAACFLTIGMAVILSSWTENYGDPSENKDLLTQFRGAAVAIASDEKIALLGAIQSLFEGSMYTFVFLWTPALSPNDEEIPHGFIFATFMLASMLGSSLASRLLSRSTPKVESYMQIVFLVSGAALLLPILMTLFIAPSKVKGGGISFSGCFQLLGFCIFEACVGLFWPSIMKMRSQYIPEEARSTIMNFFRIPLNIFVCVVLYNVNAFPITVMFGMCSIFLFVASLLQRRLMMIVDKPKTNDWTPLEERNTEEDPLNI

SEQ ID NO: 40266 - DNA, 1537 bp, Arabidopsis thaliana
  misc_feature (1)..(1537): Ceres Seq. ID no. 12327752
  misc_feature (1)..(1537): Ortholog of  Ceres SEQ ID NO 14303770 as cited in SEQ ID NO 53890
agattccgattgttttcttcgattaagttttgagctagattctctagatctgtttcaccgatttggttgatttctccgtcaatctgaactcgcggtgtgcatcttgttgtttgcagtgtttttagtttgttttacgaagaatcaactatggcgacgaagagaagcgttggaactttgaaggaagcggatctgaagggaaagagtgtgttcgtgagggttgatctcaacgttcctttggatgataactctaacatcaccgatgacaccaggattcgtgccgctgttcccaccatcaagtacttgatgggtaatggatctagggttgttctctgcagtcacttgggccgcccaaaaggtgttactcctaagtacagcttaaagcctcttgtgcccagattgtctgaacttcttggtgttgaggttgtaatggcaaatgactctattggtgaggaagtccagaagttggttgcaggactacctgaaggtggtgttttgctcttggagaatgtgaggttctacgccgaggaagagaagaatgatcctgaatttgcaaagaagcttgctgctcttgccgatgtttacgttaatgatgccttcggaactgctcacagagctcatgcttccactgagggagttgccaaattcttgaagccttcagttgctggtttcctcatgcagaaggaacttgattaccttgtcggagctgtggcaaaccccaagaagccttttgctgccattgttggaggctcaaaggtttcaacaaagattggtgtcattgagtctctcttgaacacagttgacatcctcctgctcggtggaggtatgatttttactttctacaaggcacaaggactctcagtcggatcttcccttgtggaggaggacaagcttgacttggcaaagtcactcatggagaaagcaaaggccaaaggtgtctctctcttgctcccaaccgatgtggttattgctgacaagtttgctcccgatgctaacagcaagatagtgccagccactgccatccctgatggctggatgggtctagatattggtccagactccatcaagacattcagcgaagctctggacacaaccaaaaccatcatctggaatggtcccatgggtgtgtttgaattcgataagtttgctgctggaactgaggccgtagcaaagcagcttgcagaactaagcggaaagggagtaaccacaatcattggaggaggtgactctgttgctgccgtcgagaaggttggtttggcagacaagatgagccacatctctaccggaggcggtgctagtttggagcttcttgagggtaagccacttccaggagtcctcgctctcgacgaagcttgaaaatcctcacgttggatttcatcgctattttgtgttgttatatgtataagtcgtctggttatcttgtgaccagacgagcaagccattatttatcagcttgagattttcgtctacggctctctttttatgagttttttagtttggagcctttttttaataataagagatgaaactctgattgacg

SEQ ID NO: 40267 - protein, 401 aa, Arabidopsis thaliana; identical to SEQ ID NO: 24557
  peptide (1)..(401): Ceres Seq. ID no. 12327753

SEQ ID NO: 40268 - protein, 349 aa, Arabidopsis thaliana; identical to SEQ ID NO: 24558
  peptide (1)..(349): Ceres Seq. ID no. 12327754

SEQ ID NO: 40269 - protein, 308 aa, Arabidopsis thaliana
  peptide (1)..(308): Ceres Seq. ID no. 12327755
MANDSIGEEVQKLVAGLPEGGVLLLENVRFYAEEEKNDPEFAKKLAALADVYVNDAFGTAHRAHASTEGVAKFLKPSVAGFLMQKELDYLVGAVANPKKPFAAIVGGSKVSTKIGVIESLLNTVDILLLGGGMIFTFYKAQGLSVGSSLVEEDKLDLAKSLMEKAKAKGVSLLLPTDVVIADKFAPDANSKIVPATAIPDGWMGLDIGPDSIKTFSEALDTTKTIIWNGPMGVFEFDKFAAGTEAVAKQLAELSGKGVTTIIGGGDSVAAVEKVGLADKMSHISTGGGASLELLEGKPLPGVLALDEA

SEQ ID NO: 40270 - DNA, 1500 bp, Arabidopsis thaliana
  misc_feature (1)..(1500): Ceres Seq. ID no. 13494132
  misc_feature (1)..(1500): Ortholog of  Ceres SEQ ID NO 13596932 as cited in SEQ ID NO 62984
  misc_feature (1)..(1500): Ortholog of  Ceres SEQ ID NO 13662197 as cited in SEQ ID NO 63622
acgtgtgattctatcttcaaagtatcaaagtatggaccatcaagtgtctctgccacaatctaccaccactggtctttctttcaaggtgcatcgccagcagcgggagctagtcactccggctaaaccaacgccacgagagctcaagcctctctccgacatagacgaccaacaaggactaagatttcaaattccagttatttttttctatagacctaacctttcaagtgatcttgatccggtccaggtgataaagaaagccctcgccgatgcgctggtttactactatccgttcgctggtaggctccgggaactttcaaaccggaaactcgcggtggactgcaccggtgaaggcgttttgttcatcgaggctgaagctgacgtggcgcttgctgagctggaagaggctgatgctcttcttcctccattccctttcctagaagagcttctctttgatgtggaaggctctagtgatgtgcttaacactcctctgcttctcgtccaggtcacgcgattgaaatgctgtggatttatcttcgcactccgcttcaaccataccatgaccgatggagccggcctgtcgctctttctgaaatcactatgcgagttggcgtgtgggcttcacgcaccctcggttccacccgtatggaaccgacacttgttgactgtgagtgcttcggaggcgcgtgtgacccacacacaccgtgagtacgatgatcaggtgggaatcgatgtggtcgccactggacaccctttggttagccggtctttctttttcagagcagaagagatctccgctataaggaaactccttccgcctgatctacacaatacctcatttgaagctttgtcgtcatttttgtggcgttgtcggactattgcgttgaatcctgaccccaacactgagatgcgtctaacttgcatcatcaactcgcgttccaagcttagaaacccaccgctagagcctggttactacggaaatgtgtttgtcattcccgcagcaatagcgacagcaagagatctaatagagaaaccgcttgagtttgttttgaggttgatacaagaaacgaagtcaagtgtaaccgaggactacgtccgttcagtgaccgccctaatggcgactagaggccggcctatgtttgtggcatcagggaactacataatatcggacttgagacattttgatttaggaaaaattgattttggaccgtggggtaagccagtgtacggtggaaccgctaaggccggtatcgcgcttttcccgggagtgagcttctacgtgccgtttaagaataaaaaaggtgagacaggtacagttgtggcgattagcttgccggtacgggcgatggagacgttcgtagcagagctaaatggagtgctaaatgtgtctaaaggatgagagcttagtcgagactcgagacgttattagtaatgtagtaaatagttccttttcttattcgacatcatagtgtagtaactaatatttatatcattgcatctttc

SEQ ID NO: 40271 - protein, 464 aa, Arabidopsis thaliana
  peptide (1)..(464): Ceres Seq. ID no. 13494133
RVILSSKYQSMDHQVSLPQSTTTGLSFKVHRQQRELVTPAKPTPRELKPLSDIDDQQGLRFQIPVIFFYRPNLSSDLDPVQVIKKALADALVYYYPFAGRLRELSNRKLAVDCTGEGVLFIEAEADVALAELEEADALLPPFPFLEELLFDVEGSSDVLNTPLLLVQVTRLKCCGFIFALRFNHTMTDGAGLSLFLKSLCELACGLHAPSVPPVWNRHLLTVSASEARVTHTHREYDDQVGIDVVATGHPLVSRSFFFRAEEISAIRKLLPPDLHNTSFEALSSFLWRCRTIALNPDPNTEMRLTCIINSRSKLRNPPLEPGYYGNVFVIPAAIATARDLIEKPLEFVLRLIQETKSSVTEDYVRSVTALMATRGRPMFVASGNYIISDLRHFDLGKIDFGPWGKPVYGGTAKAGIALFPGVSFYVPFKNKKGETGTVVAISLPVRAMETFVAELNGVLNVSKG

SEQ ID NO: 40272 - protein, 454 aa, Arabidopsis thaliana
  peptide (1)..(454): Ceres Seq. ID no. 13494134
MDHQVSLPQSTTTGLSFKVHRQQRELVTPAKPTPRELKPLSDIDDQQGLRFQIPVIFFYRPNLSSDLDPVQVIKKALADALVYYYPFAGRLRELSNRKLAVDCTGEGVLFIEAEADVALAELEEADALLPPFPFLEELLFDVEGSSDVLNTPLLLVQVTRLKCCGFIFALRFNHTMTDGAGLSLFLKSLCELACGLHAPSVPPVWNRHLLTVSASEARVTHTHREYDDQVGIDVVATGHPLVSRSFFFRAEEISAIRKLLPPDLHNTSFEALSSFLWRCRTIALNPDPNTEMRLTCIINSRSKLRNPPLEPGYYGNVFVIPAAIATARDLIEKPLEFVLRLIQETKSSVTEDYVRSVTALMATRGRPMFVASGNYIISDLRHFDLGKIDFGPWGKPVYGGTAKAGIALFPGVSFYVPFKNKKGETGTVVAISLPVRAMETFVAELNGVLNVSKG

SEQ ID NO: 40273 - protein, 279 aa, Arabidopsis thaliana
  peptide (1)..(279): Ceres Seq. ID no. 13494135
MTDGAGLSLFLKSLCELACGLHAPSVPPVWNRHLLTVSASEARVTHTHREYDDQVGIDVVATGHPLVSRSFFFRAEEISAIRKLLPPDLHNTSFEALSSFLWRCRTIALNPDPNTEMRLTCIINSRSKLRNPPLEPGYYGNVFVIPAAIATARDLIEKPLEFVLRLIQETKSSVTEDYVRSVTALMATRGRPMFVASGNYIISDLRHFDLGKIDFGPWGKPVYGGTAKAGIALFPGVSFYVPFKNKKGETGTVVAISLPVRAMETFVAELNGVLNVSKG

SEQ ID NO: 40274 - DNA, 872 bp, Arabidopsis thaliana
  misc_feature (1)..(872): Ceres Seq. ID no. 12337298
  misc_feature (1)..(872): Ortholog of  Ceres SEQ ID NO 13660094 as cited in SEQ ID NO 60820
aaataatcggaaacagcgtcttctccataaacccagaaaatcgcagagagctttctcttgtctttgtacagatctctcccatcatcgttcgtgattcgatgccttctcgtagaagaactctcctcaaagtcatcatcctcggtgatagcggggttgggaagacttctttaatgaatcaatatgttaataagaagttcagcaaccagtataaggcaactattggggctgatttcttgactaaggaagttcaatttgaagaccggcttttcactttacagatctgggacacagctggtcaagaaaggtttcagagtcttggtgttgcgttttatcgtggtgctgattgctgtgttcttgtatatgatgtcaactccgcaaaatcattcgaggatctcaacaactggagggaagagtttctgatccaggcaagtccttcggatccagagaactttccctttgttgttatcggtaataagatcgatgtggatggtggaagcagccgggtggtatcagagaagaaggctcgagcttggtgtgcttcgaaaggaaacattccatactatgaaacctcagctaaagtaggcaccaatgtagaagacgcgttcctgtgcataactacgaacgcaatgaagagtggagaagaggaagaaatgtacctaccagacacgatcgatgtcggaaccagcaatccacagaggtcaacaggatgtgaatgctgaaagtgttcatttgacctatgctctctcatcagttatcccactctgaggttttttaccatattgtaaatctgttgttctgtggtacattaatattttaaaattttagaaccctaataaataaataattaaaaagccgaattgggttggtcggtg

SEQ ID NO: 40275 - protein, 238 aa, Arabidopsis thaliana
  peptide (1)..(238): Ceres Seq. ID no. 12337299
IIGNSVFSINPENRRELSLVFVQISPIIVRDSMPSRRRTLLKVIILGDSGVGKTSLMNQYVNKKFSNQYKATIGADFLTKEVQFEDRLFTLQIWDTAGQERFQSLGVAFYRGADCCVLVYDVNSAKSFEDLNNWREEFLIQASPSDPENFPFVVIGNKIDVDGGSSRVVSEKKARAWCASKGNIPYYETSAKVGTNVEDAFLCITTNAMKSGEEEEMYLPDTIDVGTSNPQRSTGCEC

SEQ ID NO: 40276 - protein, 206 aa, Arabidopsis thaliana
  peptide (1)..(206): Ceres Seq. ID no. 12337300
MPSRRRTLLKVIILGDSGVGKTSLMNQYVNKKFSNQYKATIGADFLTKEVQFEDRLFTLQIWDTAGQERFQSLGVAFYRGADCCVLVYDVNSAKSFEDLNNWREEFLIQASPSDPENFPFVVIGNKIDVDGGSSRVVSEKKARAWCASKGNIPYYETSAKVGTNVEDAFLCITTNAMKSGEEEEMYLPDTIDVGTSNPQRSTGCEC

SEQ ID NO: 40277 - protein, 182 aa, Arabidopsis thaliana
  peptide (1)..(182): Ceres Seq. ID no. 12337301
MNQYVNKKFSNQYKATIGADFLTKEVQFEDRLFTLQIWDTAGQERFQSLGVAFYRGADCCVLVYDVNSAKSFEDLNNWREEFLIQASPSDPENFPFVVIGNKIDVDGGSSRVVSEKKARAWCASKGNIPYYETSAKVGTNVEDAFLCITTNAMKSGEEEEMYLPDTIDVGTSNPQRSTGCEC

SEQ ID NO: 40278 - DNA, 1231 bp, Arabidopsis thaliana
  misc_feature (1)..(1231): Ceres Seq. ID no. 12329306
  misc_feature (1)..(1231): Ortholog of  Ceres SEQ ID NO 14303355 as cited in SEQ ID NO 59746
  misc_feature (1)..(1231): Ortholog of  Ceres SEQ ID NO 14302415 as cited in SEQ ID NO 62781
atcttttcgtagacattctctctcgatctttagttttcataactcatcttcttttttactttttttttttttttttggaagatgaatatctccgtcgaaaaccctgtttttgtacatgaggactcgacaacgcagaagaccggagagttacgattggacagcgacataccaatgtcgaagatatcatccgatgatgaagtgtttttggctcctgagatgaacgcatttggtcgtcaattcagagactacacggatacaaacagcgagaggcaaaagagcgtcgaacatttctatgcaacacaacacactaaccaaactttagactttgtacagaaaatgagaagtgagtatggaaaattggacaagatggtgatgaacatttgggaatgttgtgaacttttaaaagaagtggtggacgagagtgatcccgacctcgacgaaccacaaattcaacatttgcttcaatctgcggaagcaatccgtaaagattatcctaacgaagattggcttcatctcactgcgcttatccatgatcttgggaaggttcttaccctaccacagtttggagggcttcctcaatgggctgttgttggtgacacatttcctgttgggtgtgcatttgatgaatctaacgtacaccacaagtattttatggaaaaccctgattttaacaaccctaagtacaataccaaagctggaatttattctgaaggctgtggacttgaaaatgttcttatgtcatggggacatgatgactacatgtatctggtggccaaggagaatggaagcaccttaccatccccgggactattcatcatccgataccattccttttatccattgcacaaggctggagcttacactcaccttatgaacgaggaagacaaggagaatctcaaatggcttcatgtttttaacaagtatgacttatacagcaagagcaaagtacacgtcaatgtcgagaaggttaagccgtactacatgtctcttatcaagaaatatttcccggaaaatctgaggtggtgaaaacggcatcgaggccgtccaaaaaaagtctactattagaaagataaaatggtgtgtgtgtttgattagttgtcgtttaagcatattattgcccagttaataaagttgtattgttacattagctaatgttaatgttaatgttgatacaaacggttattgtatcttgtctgtcctattataaactaaaatgatattttcttctttc

SEQ ID NO: 40279 - protein, 314 aa, Arabidopsis thaliana
  peptide (1)..(314): Ceres Seq. ID no. 12329307
MNISVENPVFVHEDSTTQKTGELRLDSDIPMSKISSDDEVFLAPEMNAFGRQFRDYTDTNSERQKSVEHFYATQHTNQTLDFVQKMRSEYGKLDKMVMNIWECCELLKEVVDESDPDLDEPQIQHLLQSAEAIRKDYPNEDWLHLTALIHDLGKVLTLPQFGGLPQWAVVGDTFPVGCAFDESNVHHKYFMENPDFNNPKYNTKAGIYSEGCGLENVLMSWGHDDYMYLVAKENGSTLPSPGLFIIRYHSFYPLHKAGAYTHLMNEEDKENLKWLHVFNKYDLYSKSKVHVNVEKVKPYYMSLIKKYFPENLRW

SEQ ID NO: 40280 - protein, 284 aa, Arabidopsis thaliana
  peptide (1)..(284): Ceres Seq. ID no. 12329308
MSKISSDDEVFLAPEMNAFGRQFRDYTDTNSERQKSVEHFYATQHTNQTLDFVQKMRSEYGKLDKMVMNIWECCELLKEVVDESDPDLDEPQIQHLLQSAEAIRKDYPNEDWLHLTALIHDLGKVLTLPQFGGLPQWAVVGDTFPVGCAFDESNVHHKYFMENPDFNNPKYNTKAGIYSEGCGLENVLMSWGHDDYMYLVAKENGSTLPSPGLFIIRYHSFYPLHKAGAYTHLMNEEDKENLKWLHVFNKYDLYSKSKVHVNVEKVKPYYMSLIKKYFPENLRW

SEQ ID NO: 40281 - protein, 269 aa, Arabidopsis thaliana
  peptide (1)..(269): Ceres Seq. ID no. 12329309
MNAFGRQFRDYTDTNSERQKSVEHFYATQHTNQTLDFVQKMRSEYGKLDKMVMNIWECCELLKEVVDESDPDLDEPQIQHLLQSAEAIRKDYPNEDWLHLTALIHDLGKVLTLPQFGGLPQWAVVGDTFPVGCAFDESNVHHKYFMENPDFNNPKYNTKAGIYSEGCGLENVLMSWGHDDYMYLVAKENGSTLPSPGLFIIRYHSFYPLHKAGAYTHLMNEEDKENLKWLHVFNKYDLYSKSKVHVNVEKVKPYYMSLIKKYFPENLRW

SEQ ID NO: 40282 - DNA, 1376 bp, Arabidopsis thaliana
  misc_feature (1)..(1376): Ceres Seq. ID no. 13489321
  misc_feature (1)..(1376): Ortholog of  Ceres SEQ ID NO 13594740 as cited in SEQ ID NO 51721
  misc_feature (1)..(1376): Ortholog of  Ceres SEQ ID NO 14316497 as cited in SEQ ID NO 58285
  misc_feature (1)..(1376): Ortholog of  Ceres SEQ ID NO 13595944 as cited in SEQ ID NO 68153
ccttatctctctctctctttctctcttatataaagagagaaatatacaaaacctccaagtacgtttcatcgatcctacctaattcatcaaaaaattgtgtgaggcttatttgatcaataattatgaattctggtcgtcgatcgttaatgtccgccacggcgagtctgagtttgctgttgtgtatcttcaccaccttcgtcgtggtgtcgaacggtgagcttcagagatttatagagccggctaaaagcgacggttccgttagttttatagtcatcggagattggggtcgtcgtggctccttcaatcagtctctcgttgcttatcagatgggaaaaattggagagaagattgacttagatttcgtggtgtctacgggagataacttctacgacaatggattgtttagtgaacatgatccaaacttcgaacaatctttctctaacatctacactgctccaagtcttcagaaacagtggtacagtgttttgggaaaccatgactatagaggtgacgcagaagctcagctgagttctgttctccgggaaatcgacagccgttggatttgtcttcgatcatttgtcgttgatgcagagttggtagagatgttctttgttgacacgactcctttcgtgaaagaatactacacagaagcagatggtcactcatatgattggcgcgcagttccatctcgcaactcttatgtcaaagctcttctccgtgatcttgaagtttccttaaagagttctaaagcaagatggaagattgttgttggtcaccatgcaatgagaagcattggacatcatggagatactaaagagctcaacgaagagcttcttccgattcttaaagagaacggtgttgatctctacatgaatggacatgatcattgtcttcaacatatgagtgatgaagacagtcctattcagtttctaactagtggtgctggatccaaggcttggagaggagatattaacccagtgaccatcaatcccaagctactgaaattctattatgatggtcaaggattcatgtctgctcggttcactcactcggacgcagagatcgtcttctacgatgtctttggtgagattttgcacaaatgggtcacttctaaacaacttcttcattcctctgtttgaagataaaaagccttaataaatttggcttcctttgtaattttgtaacatacatttaagattcttaagtcctattgcaggctaggtaggcttcctgcttagtttagcatccctatcatttttagcaatagcttattccatcacaataacatataaaatgtacgatcttttcctcaaatttttgatacaagtgtaatgatacccttaatgggtatcttcttaatgctacataagttagtc

SEQ ID NO: 40283 - protein, 338 aa, Arabidopsis thaliana
  peptide (1)..(338): Ceres Seq. ID no. 13489322
MNSGRRSLMSATASLSLLLCIFTTFVVVSNGELQRFIEPAKSDGSVSFIVIGDWGRRGSFNQSLVAYQMGKIGEKIDLDFVVSTGDNFYDNGLFSEHDPNFEQSFSNIYTAPSLQKQWYSVLGNHDYRGDAEAQLSSVLREIDSRWICLRSFVVDAELVEMFFVDTTPFVKEYYTEADGHSYDWRAVPSRNSYVKALLRDLEVSLKSSKARWKIVVGHHAMRSIGHHGDTKELNEELLPILKENGVDLYMNGHDHCLQHMSDEDSPIQFLTSGAGSKAWRGDINPVTINPKLLKFYYDGQGFMSARFTHSDAEIVFYDVFGEILHKWVTSKQLLHSSV

SEQ ID NO: 40284 - protein, 330 aa, Arabidopsis thaliana
  peptide (1)..(330): Ceres Seq. ID no. 13489323
MSATASLSLLLCIFTTFVVVSNGELQRFIEPAKSDGSVSFIVIGDWGRRGSFNQSLVAYQMGKIGEKIDLDFVVSTGDNFYDNGLFSEHDPNFEQSFSNIYTAPSLQKQWYSVLGNHDYRGDAEAQLSSVLREIDSRWICLRSFVVDAELVEMFFVDTTPFVKEYYTEADGHSYDWRAVPSRNSYVKALLRDLEVSLKSSKARWKIVVGHHAMRSIGHHGDTKELNEELLPILKENGVDLYMNGHDHCLQHMSDEDSPIQFLTSGAGSKAWRGDINPVTINPKLLKFYYDGQGFMSARFTHSDAEIVFYDVFGEILHKWVTSKQLLHSSV

SEQ ID NO: 40285 - protein, 270 aa, Arabidopsis thaliana
  peptide (1)..(270): Ceres Seq. ID no. 13489324
MGKIGEKIDLDFVVSTGDNFYDNGLFSEHDPNFEQSFSNIYTAPSLQKQWYSVLGNHDYRGDAEAQLSSVLREIDSRWICLRSFVVDAELVEMFFVDTTPFVKEYYTEADGHSYDWRAVPSRNSYVKALLRDLEVSLKSSKARWKIVVGHHAMRSIGHHGDTKELNEELLPILKENGVDLYMNGHDHCLQHMSDEDSPIQFLTSGAGSKAWRGDINPVTINPKLLKFYYDGQGFMSARFTHSDAEIVFYDVFGEILHKWVTSKQLLHSSV

SEQ ID NO: 40286 - DNA, 1159 bp, Arabidopsis thaliana
  misc_feature (1)..(1159): Ceres Seq. ID no. 13580377
  misc_feature (1)..(1159): Ortholog of  Ceres SEQ ID NO 14314050 as cited in SEQ ID NO 59952
  misc_feature (1)..(1159): Ortholog of  Ceres SEQ ID NO 13596474 as cited in SEQ ID NO 62169
  misc_feature (1)..(1159): Ortholog of  Ceres SEQ ID NO 13598714 as cited in SEQ ID NO 62656
  misc_feature (1)..(1159): Ortholog of  Ceres SEQ ID NO 13596969 as cited in SEQ ID NO 63375
  misc_feature (1)..(1159): Ortholog of  Ceres SEQ ID NO 13597519 as cited in SEQ ID NO 64759
  misc_feature (1)..(1159): Ortholog of  Ceres SEQ ID NO 14302388 as cited in SEQ ID NO 65655
  misc_feature (1)..(1159): Ortholog of  Ceres SEQ ID NO 13587054 as cited in SEQ ID NO 0
atataaacacaaaagcctttagtatcattctcgaaaaccaccaaaaacctctttataacccaacaaacaaagtctctacttcttcttcaatcactgaaacacaacaccaaaaaagaaaaaagtatgtctcttcttccccatctcatcctctacctaacacttttgacggtggttgttactggagaaactctccgaccaagaatctacagcgagacatgccctgaagctgaatccatagtaagaagagaaatgaagaaagcatgatcaaagaagcaagaagcgtcgcttccgtcatgcgtttccaatttcacgactgtttcgtcaatggatgtgacgcatctctgttgcttgacgacacaccaaacatgcttggtgaaaaactatcactttccaacatcgattcactaagatctttcgaagtcgttgacgacattaaagaagctctagagaaagcttgtccagctactgtttcttgtgccgatatcgttatcatggccgctcgtgacgccgttgctcttacaggaggaccagattgggaagtgaagctagggaggaaagacagtttaacagcgagtcagcaagattccgacgatataatgccaagtccaagagccaacgcaactttcttgattgatctcttcgaaagattcaatctttctgtaaaagacatggttgctttatcagggtcacactcaataggtcaaggtcggtgtttttcaatcatgttcagactttataaccaatccggttctggtaaaccggatccagctcttgaaccgacttaccgtaagaagcttgacaacctttgtcctttgggtggagatgagaatgtgactggagatctagatgcaacacctcaggtttttgataatcagtatttcaaagacttggtttcagggagagggtttcttaactctgatcagactttgtacacgaatctagtgacgagagagtatgtgaagatgtttagtgaggatcaagatgagttcttcagggcttttgcagaaggcatggtgaagttgggtgatttgcaatctgggagagatggtgagattaggtttaattgtagagttgttaatagaaggcctattgatgtattgcttgtatcttgaattatcattagtaaagagaagaaatcttaattatgacttctaaattg

SEQ ID NO: 40287 - protein, 283 aa, Arabidopsis thaliana
  peptide (1)..(283): Ceres Seq. ID no. 13580378
MIKEARSVASVMRFQFHDCFVNGCDASLLLDDTPNMLGEKLSLSNIDSLRSFEVVDDIKEALEKACPATVSCADIVIMAARDAVALTGGPDWEVKLGRKDSLTASQQDSDDIMPSPRANATFLIDLFERFNLSVKDMVALSGSHSIGQGRCFSIMFRLYNQSGSGKPDPALEPTYRKKLDNLCPLGGDENVTGDLDATPQVFDNQYFKDLVSGRGFLNSDQTLYTNLVTREYVKMFSEDQDEFFRAFAEGMVKLGDLQSGRDGEIRFNCRVVNRRPIDVLLVS

SEQ ID NO: 40288 - protein, 272 aa, Arabidopsis thaliana
  peptide (1)..(272): Ceres Seq. ID no. 13580379
MRFQFHDCFVNGCDASLLLDDTPNMLGEKLSLSNIDSLRSFEVVDDIKEALEKACPATVSCADIVIMAARDAVALTGGPDWEVKLGRKDSLTASQQDSDDIMPSPRANATFLIDLFERFNLSVKDMVALSGSHSIGQGRCFSIMFRLYNQSGSGKPDPALEPTYRKKLDNLCPLGGDENVTGDLDATPQVFDNQYFKDLVSGRGFLNSDQTLYTNLVTREYVKMFSEDQDEFFRAFAEGMVKLGDLQSGRDGEIRFNCRVVNRRPIDVLLVS

SEQ ID NO: 40289 - protein, 248 aa, Arabidopsis thaliana
  peptide (1)..(248): Ceres Seq. ID no. 13580380
MLGEKLSLSNIDSLRSFEVVDDIKEALEKACPATVSCADIVIMAARDAVALTGGPDWEVKLGRKDSLTASQQDSDDIMPSPRANATFLIDLFERFNLSVKDMVALSGSHSIGQGRCFSIMFRLYNQSGSGKPDPALEPTYRKKLDNLCPLGGDENVTGDLDATPQVFDNQYFKDLVSGRGFLNSDQTLYTNLVTREYVKMFSEDQDEFFRAFAEGMVKLGDLQSGRDGEIRFNCRVVNRRPIDVLLVS

SEQ ID NO: 40290 - DNA, 1839 bp, Arabidopsis thaliana
  misc_feature (1)..(1839): Ceres Seq. ID no. 12327921
  misc_feature (1)..(1839): Ortholog of  Ceres SEQ ID NO 13599520 as cited in SEQ ID NO 633
  misc_feature (1)..(1839): Ortholog of  Ceres SEQ ID NO 13595142 as cited in SEQ ID NO 56671
  misc_feature (1)..(1839): Ortholog of  Ceres SEQ ID NO 15168569 as cited in SEQ ID NO 58123
  misc_feature (1)..(1839): Ortholog of  Ceres SEQ ID NO 15226382 as cited in SEQ ID NO 63295
  misc_feature (1)..(1839): Ortholog of  Ceres SEQ ID NO 13598460 as cited in SEQ ID NO 63382
  misc_feature (1)..(1839): Ortholog of  Ceres SEQ ID NO 13597403 as cited in SEQ ID NO 64085
aaaaacttaaaccgatctatcaagcaagtggttcctctctctctctacctctcgtttttggccaacgtcgtcgtcttcacgatccacgacgattcagttcttgagttccggcgattatcggtctctcacttctggttccgttgaacccctcatttctcttctcgcccgtgctctcaaattccgatatttgcccctgtgattcgaaaccctaatttcgcctatcaatctggaaaatctctcaattcgaagactttagcagcgcaaagatactctatccgggtaataagatcgaagaaaccatcaatttcttaccaaagtcgtgattcttggatctcgtctttgtttgatggacacaattagggtttccaaggaggttcctggatcttcgaaatcgaccgcacagtcgctcacggagtcgacctctcgcacggaaaccatcaatggctcccacgaattcaagatcagcggctactctttggtcaaaggcatggggattggcaaatacgttgcctcggatactttcatggtcggtggatactcctgggccatctacttctacccagatggaaagagtccagaggataattctgtctacgtgtctctcttcatagcccttgcgagtgaaggagccgatgttagggctttgtttgagcttaccctcgtggatcagagcggtaacgaaaggcacaaagttcatagccattttggtagaactctcgaaagcggaccctatactcttaaatatcgagggagtatgtggggatacaaacgatttttcaagaggtctcttttggagtcatcggactatctgaaggacaatggtctcttggtccggtgttgtgttggagtggtgaagtcacgcacagaaggaccgaggtgttacaatatcccggtgccggtttctggcttgggtcagcagtttggaaagcttttggaaagtgggaaaggagctgacgttactttcgaagttgatggagaaacatttcctgctcacaaattggttcttgcagcacgttctgcagttttcagggcacagctttttggcccgttgagaagtgaaaataccaattgtataatcatagaagacgtacaagcccctattttcaagatgttgcttcattttatctactgggatgaaatgcctgatatgcaagacttaatcggcacagacttgaaatgggcatcaactcttgtggctcagcatctgcttgcagctgcagaccgttatgctcttgagcggcttagaacaatatgcgagtcaaaactctgtgaaggaatcagcataaatacggtagcaaccaccttggctcttgcagagcagcatcattgtttccagctgaaagccgcctgcctcaaatttatagctttgccagaaaacctgaaagctgtgatggaaacggatgggtttgattatctgaaggaaagctgcccgtccctactaagtgagctattggagtatgtggctaggctgagtgagcactctttaacatcatcagggcatcgaaaggagttatttgctgatggttgtgacttaaatgggagacgtgtgaagcaacggttacattagcaactaattgagagagagagagagagagaggtcacttcgagagcctgagaagatgatggtgaagtaaacagaattttagaagagtaaagatttgtgtatttgtcattgtaaaaggattagtggttgatctgtgttgttcagctagctaatagagtgaaatgttgggtttttttcttttcttttctcttttgttttcccaggattttatgaccagaaccggttctctcaaggaaaaagtttcatgtgacttcattgataaatttggacttgcc

SEQ ID NO: 40291 - protein, 406 aa, Arabidopsis thaliana
  peptide (1)..(406): Ceres Seq. ID no. 12327922
MDTIRVSKEVPGSSKSTAQSLTESTSRTETINGSHEFKISGYSLVKGMGIGKYVASDTFMVGGYSWAIYFYPDGKSPEDNSVYVSLFIALASEGADVRALFELTLVDQSGNERHKVHSHFGRTLESGPYTLKYRGSMWGYKRFFKRSLLESSDYLKDNGLLVRCCVGVVKSRTEGPRCYNIPVPVSGLGQQFGKLLESGKGADVTFEVDGETFPAHKLVLAARSAVFRAQLFGPLRSENTNCIIIEDVQAPIFKMLLHFIYWDEMPDMQDLIGTDLKWASTLVAQHLLAAADRYALERLRTICESKLCEGISINTVATTLALAEQHHCFQLKAACLKFIALPENLKAVMETDGFDYLKESCPSLLSELLEYVARLSEHSLTSSGHRKELFADGCDLNGRRVKQRLH

SEQ ID NO: 40292 - protein, 359 aa, Arabidopsis thaliana
  peptide (1)..(359): Ceres Seq. ID no. 12327923
MGIGKYVASDTFMVGGYSWAIYFYPDGKSPEDNSVYVSLFIALASEGADVRALFELTLVDQSGNERHKVHSHFGRTLESGPYTLKYRGSMWGYKRFFKRSLLESSDYLKDNGLLVRCCVGVVKSRTEGPRCYNIPVPVSGLGQQFGKLLESGKGADVTFEVDGETFPAHKLVLAARSAVFRAQLFGPLRSENTNCIIIEDVQAPIFKMLLHFIYWDEMPDMQDLIGTDLKWASTLVAQHLLAAADRYALERLRTICESKLCEGISINTVATTLALAEQHHCFQLKAACLKFIALPENLKAVMETDGFDYLKESCPSLLSELLEYVARLSEHSLTSSGHRKELFADGCDLNGRRVKQRLH

SEQ ID NO: 40293 - protein, 347 aa, Arabidopsis thaliana
  peptide (1)..(347): Ceres Seq. ID no. 12327924
MVGGYSWAIYFYPDGKSPEDNSVYVSLFIALASEGADVRALFELTLVDQSGNERHKVHSHFGRTLESGPYTLKYRGSMWGYKRFFKRSLLESSDYLKDNGLLVRCCVGVVKSRTEGPRCYNIPVPVSGLGQQFGKLLESGKGADVTFEVDGETFPAHKLVLAARSAVFRAQLFGPLRSENTNCIIIEDVQAPIFKMLLHFIYWDEMPDMQDLIGTDLKWASTLVAQHLLAAADRYALERLRTICESKLCEGISINTVATTLALAEQHHCFQLKAACLKFIALPENLKAVMETDGFDYLKESCPSLLSELLEYVARLSEHSLTSSGHRKELFADGCDLNGRRVKQRLH

SEQ ID NO: 40294 - DNA, 1117 bp, Arabidopsis thaliana; identical to SEQ ID NO: 39595
  misc_feature (1)..(1117): Ceres Seq. ID no. 12325040
  misc_feature (1)..(1117): Ortholog of  Ceres SEQ ID NO 12611971 as cited in SEQ ID NO 53205
  misc_feature (1)..(1117): Ortholog of  Ceres SEQ ID NO 12615976 as cited in SEQ ID NO 62440

SEQ ID NO: 40295 - protein, 312 aa, Arabidopsis thaliana; identical to SEQ ID NO: 39596
  peptide (1)..(312): Ceres Seq. ID no. 12325041

SEQ ID NO: 40296 - protein, 302 aa, Arabidopsis thaliana; identical to SEQ ID NO: 39597
  peptide (1)..(302): Ceres Seq. ID no. 12325042

SEQ ID NO: 40297 - DNA, 1534 bp, Arabidopsis thaliana
  misc_feature (1)..(1534): Ceres Seq. ID no. 12558430
  misc_feature (1)..(1534): Ortholog of  Ceres SEQ ID NO 15177878 as cited in SEQ ID NO 59929
  misc_feature (1)..(1534): Ortholog of  Ceres SEQ ID NO 13658888 as cited in SEQ ID NO 66542
aaaaaccagacgcttcaacttatccccatttctctgaaaaccctaacaaatcctcctcttgttccgccactgccgccgccgctactcaacggtggtgaattttctatacggtcagttcgatcctctttttatcgacaatcctacacaaatccataatcatggccgccactgcttcctccgaagcttctgaaggaccagtgatgggtctcatcaacaagcgtctccgtgctctccgtaagaaatacaaccgaatcactcaaatggaagaatcgatttctcaaggcaaaaccctaaacaaggagcaagaagaagtcctccgctctaaacctgccgtcgtcatcctaatcgacgagcttgaaaagatccgtgctcctctctccgccgctgtgacagaggaaatcagcctcgctactcagcttaaccgtgcttcatccgatcaaaccaccgcatctgagcaaaaggaagtcactgatatcccgcaggaagttagcggcggcgatgatggcgctaagttggaggatctggtgaatttcctctactttggttcactcttcgacgtcaagtcacagaacgagttcacttcgataatgttgaccaggactcatgagagaagttgctgcttgtcttacgattacgttaccgatgatgccactgatctcctcggcgatcgggatttggattctatttctcagctttggagcctgatggtttctcgtccggtggattcaagcttatctcacaagaacgctttggagcgttgtgttgagcacgctaagctatggttagctaattccgagcagccaatcgaatcaaactgcaatacttcatatgctgcattgagagagaagttgaagaagattatggcgtctgactatttcaccactactccggaaatgaaagctccggttgatgtggcggctgcagctggtaactatacttcttaccaggtgcctgtggacgtggaggcttcagggcattaccagcaaaaggaagaagatgcatcaaattccaaagaagtagaatcagttgttaatgatcaatctcaacaagatgagcatcaaaaggttgagttagtgaccgaaggagaggtggtccatggacagcaagaacagggctatactcaggtgggaggagcagagaatgctaaaagagactatgtgccacgtgggtcttaccagaaccaaagaggtcgtcgaggtgctcgaagaggtggtggtggctatcagaatgggcgaggaggacgaggtggtggtggtggctaccagaatgggcggtacgaatcttatgatcaatctggtggaaacggttatcaaaggaactactacaacaacagaggaaggggacgtggtggtggtggtggtggaggaaatggccattcatacaacaactaccaagaccccaatgttgctgttgcgtcttagcttttgtgcctctgtcttttgggtgcgtctctttcattatcttgcgtttatgctataacgcatataagcctaatctcgtgtttgaaacgtttgacaatggctcggttattgct

SEQ ID NO: 40298 - protein, 420 aa, Arabidopsis thaliana
  peptide (1)..(420): Ceres Seq. ID no. 12558431
MAATASSEASEGPVMGLINKRLRALRKKYNRITQMEESISQGKTLNKEQEEVLRSKPAVVILIDELEKIRAPLSAAVTEEISLATQLNRASSDQTTASEQKEVTDIPQEVSGGDDGAKLEDLVNFLYFGSLFDVKSQNEFTSIMLTRTHERSCCLSYDYVTDDATDLLGDRDLDSISQLWSLMVSRPVDSSLSHKNALERCVEHAKLWLANSEQPIESNCNTSYAALREKLKKIMASDYFTTTPEMKAPVDVAAAAGNYTSYQVPVDVEASGHYQQKEEDASNSKEVESVVNDQSQQDEHQKVELVTEGEVVHGQQEQGYTQVGGAENAKRDYVPRGSYQNQRGRRGARRGGGGYQNGRGGRGGGGGYQNGRYESYDQSGGNGYQRNYYNNRGRGRGGGGGGGNGHSYNNYQDPNVAVAS

SEQ ID NO: 40299 - protein, 406 aa, Arabidopsis thaliana
  peptide (1)..(406): Ceres Seq. ID no. 12558432
MGLINKRLRALRKKYNRITQMEESISQGKTLNKEQEEVLRSKPAVVILIDELEKIRAPLSAAVTEEISLATQLNRASSDQTTASEQKEVTDIPQEVSGGDDGAKLEDLVNFLYFGSLFDVKSQNEFTSIMLTRTHERSCCLSYDYVTDDATDLLGDRDLDSISQLWSLMVSRPVDSSLSHKNALERCVEHAKLWLANSEQPIESNCNTSYAALREKLKKIMASDYFTTTPEMKAPVDVAAAAGNYTSYQVPVDVEASGHYQQKEEDASNSKEVESVVNDQSQQDEHQKVELVTEGEVVHGQQEQGYTQVGGAENAKRDYVPRGSYQNQRGRRGARRGGGGYQNGRGGRGGGGGYQNGRYESYDQSGGNGYQRNYYNNRGRGRGGGGGGGNGHSYNNYQDPNVAVAS

SEQ ID NO: 40300 - protein, 386 aa, Arabidopsis thaliana
  peptide (1)..(386): Ceres Seq. ID no. 12558433
MEESISQGKTLNKEQEEVLRSKPAVVILIDELEKIRAPLSAAVTEEISLATQLNRASSDQTTASEQKEVTDIPQEVSGGDDGAKLEDLVNFLYFGSLFDVKSQNEFTSIMLTRTHERSCCLSYDYVTDDATDLLGDRDLDSISQLWSLMVSRPVDSSLSHKNALERCVEHAKLWLANSEQPIESNCNTSYAALREKLKKIMASDYFTTTPEMKAPVDVAAAAGNYTSYQVPVDVEASGHYQQKEEDASNSKEVESVVNDQSQQDEHQKVELVTEGEVVHGQQEQGYTQVGGAENAKRDYVPRGSYQNQRGRRGARRGGGGYQNGRGGRGGGGGYQNGRYESYDQSGGNGYQRNYYNNRGRGRGGGGGGGNGHSYNNYQDPNVAVAS

SEQ ID NO: 40301 - DNA, 1124 bp, Arabidopsis thaliana
  misc_feature (1)..(1124): Ceres Seq. ID no. 12421812
  misc_feature (1)..(1124): Ortholog of  Ceres SEQ ID NO 15169316 as cited in SEQ ID NO 54821
  misc_feature (1)..(1124): Ortholog of  Ceres SEQ ID NO 13598294 as cited in SEQ ID NO 61982
attttttgatatgtaaaatttatcgaaaacgttccatttcaatatgtagacaaagcggagaagtatattgtggcaggcggcaagcaagggagcagagctagtgttgttcccggaggggtttatcggtgtctatcctcgaggttttaggttcggtttagcggttggcgttcataacgaagaagggcgtgatgagtttcggaagtaccatgcttctgctattcatgttcctggccctgaagtagcaagattggctgacgtggctaggaaaaaccatgtgtacttggtaatgggagccatagagaaggaagggtataccctctattgcacagttcttttctttagtccacagggtcagttcttgggcaagcaccgtaaactcatgcccacaagtttggaacgttgcatttggggccaaggggacgggatcaaccatccccgtttacgacactcccattggaaaactcggtgctgctatttgctgggagaataggatgcccctctacagaactgcattgtacgccaaaggcattgagctttattgtgcacctactgctgatggttcgaaagaatggcaatcgtcgatgcttcacattgcgatcgaaggtggatgtttcgtcttgtcggcttgccaattctgccagcgtaaacatttccctgatcatcctgactacttgtttaccgattggtacgacgacaaagaacatgattctattgtctcccaaggtggaagtgtcattatttcacctttgggacaagttctcgccggaccaaactttgaatcagagggtctcgtcacagctgatattgatcttggtgatatagcaagagccaagttatacttcgattcggttggacattactcgagaccagatgttttacacttgaccgtaaatgagcacccgaggaaatcggttacattcgtgacgaaggtggagaaagctgaggatgactcaaacaaatagtaagagacttgaagttcgtatctgctggagttatgtcaatcgtatggagtcaagtccaaaatgttctgttgcgttttcattttatgttcaagtttatttatcttttctcttcaatggtaagatctatggagtcaagtaataatggtaagacttatgttgttg

SEQ ID NO: 40302 - protein, 156 aa, Arabidopsis thaliana
  peptide (1)..(156): Ceres Seq. ID no. 12421813
MPLYRTALYAKGIELYCAPTADGSKEWQSSMLHIAIEGGCFVLSACQFCQRKHFPDHPDYLFTDWYDDKEHDSIVSQGGSVIISPLGQVLAGPNFESEGLVTADIDLGDIARAKLYFDSVGHYSRPDVLHLTVNEHPRKSVTFVTKVEKAEDDSNK

SEQ ID NO: 40303 - protein, 126 aa, Arabidopsis thaliana
  peptide (1)..(126): Ceres Seq. ID no. 12421814
MLHIAIEGGCFVLSACQFCQRKHFPDHPDYLFTDWYDDKEHDSIVSQGGSVIISPLGQVLAGPNFESEGLVTADIDLGDIARAKLYFDSVGHYSRPDVLHLTVNEHPRKSVTFVTKVEKAEDDSNK

SEQ ID NO: 40304 - protein, 88 aa, Arabidopsis thaliana
  peptide (1)..(88): Ceres Seq. ID no. 12421815
MVRKNGNRRCFTLRSKVDVSSCRLANSASVNISLIILTTCLPIGTTTKNMILLSPKVEVSLFHLWDKFSPDQTLNQRVSSQLILILVI

SEQ ID NO: 40305 - DNA, 1403 bp, Arabidopsis thaliana
  misc_feature (1)..(1403): Ceres Seq. ID no. 12330825
  misc_feature (1)..(1403): Ortholog of  Ceres SEQ ID NO 13597865 as cited in SEQ ID NO 64954
tttcctctaacccctccacaatcggaggaagacgattcctgggagcaagagaaacgatgggacttcccatcggaaaatctcttagagtgagagaattatggtgtgttcttaatgcttaataatcaccgacacagccattgttcttcatcatctccatggattttgattccatttctcgggaaagcacttttctttccccattgcttaaccaaaatgcaatgtggcaaatgaacttgggatcagatgatacaatgggtgttgatgggtcttatccggaacgtcacggagagccagattgtgcttattatataaggactggactttgtaggtttggttcaacttgccgattcaatcatcctcacgaccggaaactggttatagcaactgcaaggattaaaggagaataccctgaaagaattggtcagcctgaatgtgagttttatctgaagacagggacctgcaaattcggagtgacttgcaagtttcatcatcctaggaacaaagctggtattgatggaagtgtatcagttaatgtcttaagctatcctctacgtccgaacgaagatgattgctcttactttttgagaattggacaatgtaaatttgggggaacttgtaaattcaatcaccctcagactcaatcaaccaacttgatggtttctgttcgtggctctccggtttactctgctcttcaatctctaactggtcaaccgtcttattcttggtcgagaacatcttttgttgcaaaccctcctcgtttgcaagatccttctggtttcgcttcaggatctcaaggaggtctcttctcatccgggtttcattcgggaaattctgttccgctcgggttctatgcattacctagagagaatgtattcccggaaagaccaggccaacctgaatgccaattctacatgaagacaggagattgcaaatttggaacagtctgcaaatttcatcatcctagagacaggcaaacccctcctcctgattgtgtcttaagctcggttggccttcctttacgcccgggagaaccactgtgcgtgttctattctcggtatgggatctgcaagtttggtccaagctgtaaatttgatcacccgatgcgagtcttcacttacaacaacaatactgcatctccttctccttcatcatctctgcatcaagagactgcaatcaccacagagctcaggaatctcctagtctcttcttctgtggaagcaaaacccacatcactccctgaaacaacctctgctaaagacaccattgttgatgcacagcactgaaaaccctgtgttttgtctatcttgaaacaatatgtaacatttgttttgctttatcttgtaagcatttatgtacagagatgatatctgatctaatctgattcgccttttgttgtaattttc

SEQ ID NO: 40306 - protein, 375 aa, Arabidopsis thaliana
  peptide (1)..(375): Ceres Seq. ID no. 12330826
MDFDSISRESTFLSPLLNQNAMWQMNLGSDDTMGVDGSYPERHGEPDCAYYIRTGLCRFGSTCRFNHPHDRKLVIATARIKGEYPERIGQPECEFYLKTGTCKFGVTCKFHHPRNKAGIDGSVSVNVLSYPLRPNEDDCSYFLRIGQCKFGGTCKFNHPQTQSTNLMVSVRGSPVYSALQSLTGQPSYSWSRTSFVANPPRLQDPSGFASGSQGGLFSSGFHSGNSVPLGFYALPRENVFPERPGQPECQFYMKTGDCKFGTVCKFHHPRDRQTPPPDCVLSSVGLPLRPGEPLCVFYSRYGICKFGPSCKFDHPMRVFTYNNNTASPSPSSSLHQETAITTELRNLLVSSSVEAKPTSLPETTSAKDTIVDAQH

SEQ ID NO: 40307 - protein, 354 aa, Arabidopsis thaliana
  peptide (1)..(354): Ceres Seq. ID no. 12330827
MWQMNLGSDDTMGVDGSYPERHGEPDCAYYIRTGLCRFGSTCRFNHPHDRKLVIATARIKGEYPERIGQPECEFYLKTGTCKFGVTCKFHHPRNKAGIDGSVSVNVLSYPLRPNEDDCSYFLRIGQCKFGGTCKFNHPQTQSTNLMVSVRGSPVYSALQSLTGQPSYSWSRTSFVANPPRLQDPSGFASGSQGGLFSSGFHSGNSVPLGFYALPRENVFPERPGQPECQFYMKTGDCKFGTVCKFHHPRDRQTPPPDCVLSSVGLPLRPGEPLCVFYSRYGICKFGPSCKFDHPMRVFTYNNNTASPSPSSSLHQETAITTELRNLLVSSSVEAKPTSLPETTSAKDTIVDAQH

SEQ ID NO: 40308 - protein, 351 aa, Arabidopsis thaliana
  peptide (1)..(351): Ceres Seq. ID no. 12330828
MNLGSDDTMGVDGSYPERHGEPDCAYYIRTGLCRFGSTCRFNHPHDRKLVIATARIKGEYPERIGQPECEFYLKTGTCKFGVTCKFHHPRNKAGIDGSVSVNVLSYPLRPNEDDCSYFLRIGQCKFGGTCKFNHPQTQSTNLMVSVRGSPVYSALQSLTGQPSYSWSRTSFVANPPRLQDPSGFASGSQGGLFSSGFHSGNSVPLGFYALPRENVFPERPGQPECQFYMKTGDCKFGTVCKFHHPRDRQTPPPDCVLSSVGLPLRPGEPLCVFYSRYGICKFGPSCKFDHPMRVFTYNNNTASPSPSSSLHQETAITTELRNLLVSSSVEAKPTSLPETTSAKDTIVDAQH

SEQ ID NO: 40309 - DNA, 1374 bp, Arabidopsis thaliana
  misc_feature (1)..(1374): Ceres Seq. ID no. 12328837
  misc_feature (1)..(1374): Ortholog of  Ceres SEQ ID NO 13595525 as cited in SEQ ID NO 56679
  misc_feature (1)..(1374): Ortholog of  Ceres SEQ ID NO 15226984 as cited in SEQ ID NO 62173
  misc_feature (1)..(1374): Ortholog of  Ceres SEQ ID NO 14302236 as cited in SEQ ID NO 68793
cgctccggcattgagctccgtcgagagaatggcgagtaatcaacaaccaccgtcgaatctacagacctacggtgtaccaatttacgccgtcgactggattctagaggaagctgtcagatccaaaatcactaaggatcaggatgatgatgatgatgatggatcgtcgtcgtcgtcgtacatcgttttatccggcggaggaggagaaggacgaagtggaatacctaatgtcatcttaatctgtcgtgttgatctccacaccaattctctctctgaacaacctattggtaggcgtgtgattggcactgatctaccttatcgtatggctattcatcctcgtcaaggtggtcttatttgtgcattgcctaacagttgcagactgtttgattgggaaaacattatagaggatgataatgaggaagagtcagagaaagttgttaaagagttaaaagatgttggacaacagttgtctctctcgtttaatcaggatgggactgttctagctactggtgcagaggatgggactttgagggtttttgaatggccaagcatgaagactttacttaatgagtctaaggcacatgcatcagttaaaagcctaactttcagcgaaagtggtaagtttcttgtatctcttggagctccactttgtcgggtttgggatgtgaatgcttctgctgctattgccagtctatcaaaagagaaggacgagatgtttgcctcgtgtagattctctgtagacaattcaggcagtgaagttctttatgttgctgcaaacactgaacgtggtgggagtattataacatgggatacaacatcatggagaagaagaagttcaaagcttattaaaagaaacaactctatatctgcctttaatgtctcagctgatgggaagcttcttgcagtaggaaccctcgaaggagatgttttaataattgattcgacaaagatgcaaactaaccaaatcgtcaagaaagctcatctcggtttggtcaccgcactgactttctcccctgattcaaggtgcttagtgtcagtatcttttgactcaagggcaaggctaaccgtgatcaaacaaaagggtgaaaaacgtcgagtatatctgtgggtggcggcattgttgtttgtgttggtatacgtggttttgtattatttgatggtggcaatggggatcatacattagacatacgtaaagaaagcctctaagtaaatccacacgacaatacatggaatggcttgaagaaaccaacatacagatttataccctcgttaagttttcttagactttgtgttttgagtaggtcgtagagattcttcacagaaactttcatgcttttattagtttacatcatatattcatattctcgtttctatctt

SEQ ID NO: 40310 - protein, 392 aa, Arabidopsis thaliana
  peptide (1)..(392): Ceres Seq. ID no. 12328838
APALSSVERMASNQQPPSNLQTYGVPIYAVDWILEEAVRSKITKDQDDDDDDGSSSSSYIVLSGGGGEGRSGIPNVILICRVDLHTNSLSEQPIGRRVIGTDLPYRMAIHPRQGGLICALPNSCRLFDWENIIEDDNEEESEKVVKELKDVGQQLSLSFNQDGTVLATGAEDGTLRVFEWPSMKTLLNESKAHASVKSLTFSESGKFLVSLGAPLCRVWDVNASAAIASLSKEKDEMFASCRFSVDNSGSEVLYVAANTERGGSIITWDTTSWRRRSSKLIKRNNSISAFNVSADGKLLAVGTLEGDVLIIDSTKMQTNQIVKKAHLGLVTALTFSPDSRCLVSVSFDSRARLTVIKQKGEKRRVYLWVAALLFVLVYVVLYYLMVAMGIIH

SEQ ID NO: 40311 - protein, 383 aa, Arabidopsis thaliana
  peptide (1)..(383): Ceres Seq. ID no. 12328839
MASNQQPPSNLQTYGVPIYAVDWILEEAVRSKITKDQDDDDDDGSSSSSYIVLSGGGGEGRSGIPNVILICRVDLHTNSLSEQPIGRRVIGTDLPYRMAIHPRQGGLICALPNSCRLFDWENIIEDDNEEESEKVVKELKDVGQQLSLSFNQDGTVLATGAEDGTLRVFEWPSMKTLLNESKAHASVKSLTFSESGKFLVSLGAPLCRVWDVNASAAIASLSKEKDEMFASCRFSVDNSGSEVLYVAANTERGGSIITWDTTSWRRRSSKLIKRNNSISAFNVSADGKLLAVGTLEGDVLIIDSTKMQTNQIVKKAHLGLVTALTFSPDSRCLVSVSFDSRARLTVIKQKGEKRRVYLWVAALLFVLVYVVLYYLMVAMGIIH

SEQ ID NO: 40312 - protein, 286 aa, Arabidopsis thaliana
  peptide (1)..(286): Ceres Seq. ID no. 12328840
MAIHPRQGGLICALPNSCRLFDWENIIEDDNEEESEKVVKELKDVGQQLSLSFNQDGTVLATGAEDGTLRVFEWPSMKTLLNESKAHASVKSLTFSESGKFLVSLGAPLCRVWDVNASAAIASLSKEKDEMFASCRFSVDNSGSEVLYVAANTERGGSIITWDTTSWRRRSSKLIKRNNSISAFNVSADGKLLAVGTLEGDVLIIDSTKMQTNQIVKKAHLGLVTALTFSPDSRCLVSVSFDSRARLTVIKQKGEKRRVYLWVAALLFVLVYVVLYYLMVAMGIIH

SEQ ID NO: 40313 - DNA, 1182 bp, Arabidopsis thaliana
  misc_feature (1)..(1182): Ceres Seq. ID no. 12328359
  misc_feature (1)..(1182): Ortholog of  Ceres SEQ ID NO 13582619 as cited in SEQ ID NO 56520
  misc_feature (1)..(1182): Ortholog of  Ceres SEQ ID NO 13660872 as cited in SEQ ID NO 60830
  misc_feature (1)..(1182): Ortholog of  Ceres SEQ ID NO 12616221 as cited in SEQ ID NO 63291
cctctctcttaaaaacctcaactttcttctctcttctcaaaaacccttccctcttcgtctccaaacaacaacaaacacaacaacaacaaaaatcttacaagaagatcatttttagaaaccctattaggataaaatggattacgaggcatcaagaatcgtcgaaatggtagaagatgaagaacatatagatctaccaccaggattcagatttcaccctactgatgaagaactcataactcactacctcaaaccaaaggttttcaacactttcttctctgctactgccattggtgaagttgatctcaacaagattgagccttgggacttaccatggaaggctaagatgggagaaaaagaatggtatttcttctgtgtgagagaccggaaatacccgaccggtttaaggacaaaccgggcgacagaagccggttattggaaagccacaggaaaagacaaagagatattcaagggaaaatcacttgtgggtatgaagaaaactttggttttctataaaggaagagctcctaaaggagttaaaaccaattgggttatgcatgaatatcgtttagaaggcaaatattgtattgaaaatcttccccaaacagctaagaacgaatgggttatatgtcgtgttttccaaaaacgtgccgatggtacaaaggttccaatgtcaatgcttgatccacacattaaccgaatggaaccagccggtttaccttcgttaatggattgttctcaacgagactccttcaccggttcgtcgtctcacgtgacctgcttctccgaccaagaaaccgaagacaaaagacttgtccacgagtccaaagacggttttggttctctgttttactcggatcctctgtttttacaagacaattattcgctaatgaagctgttgcttgacggtcaagaaactcaattctccggcaaacctttcgacggtcgtgattcgtccggtacagaagaattggattgcgtttggaatttctgagttgtataagttatgttgtagacttgtagtagtcatgtgttcgtgtgtgtgaatgaatattcttgttacatttttttgtaaaaaaggagaaaaaaatatgctagaaagtcaattgcttttgttatgtagcattagtgttttttatgtactcaatagacttcctaattaaataaaaatcttaatttatttgc

SEQ ID NO: 40314 - protein, 285 aa, Arabidopsis thaliana
  peptide (1)..(285): Ceres Seq. ID no. 12328360
MDYEASRIVEMVEDEEHIDLPPGFRFHPTDEELITHYLKPKVFNTFFSATAIGEVDLNKIEPWDLPWKAKMGEKEWYFFCVRDRKYPTGLRTNRATEAGYWKATGKDKEIFKGKSLVGMKKTLVFYKGRAPKGVKTNWVMHEYRLEGKYCIENLPQTAKNEWVICRVFQKRADGTKVPMSMLDPHINRMEPAGLPSLMDCSQRDSFTGSSSHVTCFSDQETEDKRLVHESKDGFGSLFYSDPLFLQDNYSLMKLLLDGQETQFSGKPFDGRDSSGTEELDCVWNF

SEQ ID NO: 40315 - protein, 275 aa, Arabidopsis thaliana
  peptide (1)..(275): Ceres Seq. ID no. 12328361
MVEDEEHIDLPPGFRFHPTDEELITHYLKPKVFNTFFSATAIGEVDLNKIEPWDLPWKAKMGEKEWYFFCVRDRKYPTGLRTNRATEAGYWKATGKDKEIFKGKSLVGMKKTLVFYKGRAPKGVKTNWVMHEYRLEGKYCIENLPQTAKNEWVICRVFQKRADGTKVPMSMLDPHINRMEPAGLPSLMDCSQRDSFTGSSSHVTCFSDQETEDKRLVHESKDGFGSLFYSDPLFLQDNYSLMKLLLDGQETQFSGKPFDGRDSSGTEELDCVWNF

SEQ ID NO: 40316 - protein, 215 aa, Arabidopsis thaliana
  peptide (1)..(215): Ceres Seq. ID no. 12328362
MGEKEWYFFCVRDRKYPTGLRTNRATEAGYWKATGKDKEIFKGKSLVGMKKTLVFYKGRAPKGVKTNWVMHEYRLEGKYCIENLPQTAKNEWVICRVFQKRADGTKVPMSMLDPHINRMEPAGLPSLMDCSQRDSFTGSSSHVTCFSDQETEDKRLVHESKDGFGSLFYSDPLFLQDNYSLMKLLLDGQETQFSGKPFDGRDSSGTEELDCVWNF

SEQ ID NO: 40317 - DNA, 1930 bp, Arabidopsis thaliana
  misc_feature (1)..(1930): Ceres Seq. ID no. 12701320
  misc_feature (1)..(1930): Ortholog of  Ceres SEQ ID NO 15171446 as cited in SEQ ID NO 51590
cctacgctattctctcctctcctcttcttcctcgatcccacccagcttctacttcgttttccaattctgggtttcgattcttccaatctaaccatctcttctcttcacagtctggttcactcatggaagtgtttaaagcagctttttcagaagcgtctaattcttgtgataggattgcgattaaagccgatggaaagagttactcttatggccagctaacatcgtctgctttgaggatatctaaattgttcttaaaagatgatacgacaaatggaggtcaagaaactaagaagtatgaagggtttggtagtctaaaaggagctagaatcggaattgtggcaaaaccttcagctgagtttgttgcaggagtcctggggacatggtttagcggtggtgtagcggttccacttgcactcagctatcctgaggctgaactcttacatgtcatgaatgattcggatatatctctgttattgagcacagaggaccatagtgaaactatgaaaaccatcgcagcaaagagtggtgctcgatttcatcttattcctcctgttgttaactcaacttcggaaactgttgcttgcaatcagtttcaggatgacagttttgaagcagaaggaaagtttctagatgatccagcattgatcgtctacactagtggtacaactggtaagccaaaaggagttgttcatactcacaacagcatcaattcccaggttagaatgctcactgaagcttgggagtacacatctgctgatcattttctccactgcctcccactacatcatgttcatgggcttttcaacgctttatttgctcctctttacgcacggtctttggtggagtttttgcccaaatttagtgttagtggaatctggcgtagatggcgtgaatcatatccggtgaatgatgaaaaaaccaacgactccataactgtatttactggagttccaaccatgtacactcggttgatacaaggttatgaagcaatggataaagagatgcaggactcgagcgcttttgctgcacggaagcttcgcctaatgatgtctggctcctctgctctccctcgacctgtcatgcatcaatgggaaagtatcacaggtcatcgtcttttggaaagatatggcatgactgagtttgtaatggcaatgtcaaaccccttacggggtgcacgaaatgcaggtactgtcggcaaaccgcttcctggtgtggaggctaaaataaaagaagatgaaaatgacgcaaatggagtgggtgagatatgtgttaaaagcccatctttgttcaaggagtactggaatcttccagaggtgactaaagaatcatttacggaagatggatacttcaagacgggagatgctggaagagtggatgaggatggatattacgtgattctaggacgtaatagcgctgacattatgaaggttggaggatacaagttatctgccttagaaatcgaatcaacccttctcgagcaccctactgttgcagaatgttgcgtgttggggttaacagacaacgactatggagaagccgtgactgcgataattatagcagagagtgcagcaaagaagagaagagaggatgagtcaaaacctgtaataaccttagaagaactgtgcggttgggctaaagacaagcttgctccttacaagctaccaacaagattgctgatatgggagagcttgcctcgcaacgccatgggaaaggtgaacaaaaaagagctaaagaaatctctggaaaatcaagaataaagacaaccatggatttcattgctactccttgttcttttgattatatgacacgtatgcataaaatgtaatttccttctttcctgtatcatgtactttgactcaataatgtcaagaatcaataccaaattaactatttgagaagtaaatctttgttatatactatttctttgttt

SEQ ID NO: 40318 - protein, 584 aa, Arabidopsis thaliana
  peptide (1)..(584): Ceres Seq. ID no. 12701321
YAILSSPLLPRSHPASTSFSNSGFRFFQSNHLFSSQSGSLMEVFKAAFSEASNSCDRIAIKADGKSYSYGQLTSSALRISKLFLKDDTTNGGQETKKYEGFGSLKGARIGIVAKPSAEFVAGVLGTWFSGGVAVPLALSYPEAELLHVMNDSDISLLLSTEDHSETMKTIAAKSGARFHLIPPVVNSTSETVACNQFQDDSFEAEGKFLDDPALIVYTSGTTGKPKGVVHTHNSINSQVRMLTEAWEYTSADHFLHCLPLHHVHGLFNALFAPLYARSLVEFLPKFSVSGIWRRWRESYPVNDEKTNDSITVFTGVPTMYTRLIQGYEAMDKEMQDSSAFAARKLRLMMSGSSALPRPVMHQWESITGHRLLERYGMTEFVMAMSNPLRGARNAGTVGKPLPGVEAKIKEDENDANGVGEICVKSPSLFKEYWNLPEVTKESFTEDGYFKTGDAGRVDEDGYYVILGRNSADIMKVGGYKLSALEIESTLLEHPTVAECCVLGLTDNDYGEAVTAIIIAESAAKKRREDESKPVITLEELCGWAKDKLAPYKLPTRLLIWESLPRNAMGKVNKKELKKSLENQE

SEQ ID NO: 40319 - protein, 544 aa, Arabidopsis thaliana
  peptide (1)..(544): Ceres Seq. ID no. 12701322
MEVFKAAFSEASNSCDRIAIKADGKSYSYGQLTSSALRISKLFLKDDTTNGGQETKKYEGFGSLKGARIGIVAKPSAEFVAGVLGTWFSGGVAVPLALSYPEAELLHVMNDSDISLLLSTEDHSETMKTIAAKSGARFHLIPPVVNSTSETVACNQFQDDSFEAEGKFLDDPALIVYTSGTTGKPKGVVHTHNSINSQVRMLTEAWEYTSADHFLHCLPLHHVHGLFNALFAPLYARSLVEFLPKFSVSGIWRRWRESYPVNDEKTNDSITVFTGVPTMYTRLIQGYEAMDKEMQDSSAFAARKLRLMMSGSSALPRPVMHQWESITGHRLLERYGMTEFVMAMSNPLRGARNAGTVGKPLPGVEAKIKEDENDANGVGEICVKSPSLFKEYWNLPEVTKESFTEDGYFKTGDAGRVDEDGYYVILGRNSADIMKVGGYKLSALEIESTLLEHPTVAECCVLGLTDNDYGEAVTAIIIAESAAKKRREDESKPVITLEELCGWAKDKLAPYKLPTRLLIWESLPRNAMGKVNKKELKKSLENQE

SEQ ID NO: 40320 - protein, 436 aa, Arabidopsis thaliana
  peptide (1)..(436): Ceres Seq. ID no. 12701323
MNDSDISLLLSTEDHSETMKTIAAKSGARFHLIPPVVNSTSETVACNQFQDDSFEAEGKFLDDPALIVYTSGTTGKPKGVVHTHNSINSQVRMLTEAWEYTSADHFLHCLPLHHVHGLFNALFAPLYARSLVEFLPKFSVSGIWRRWRESYPVNDEKTNDSITVFTGVPTMYTRLIQGYEAMDKEMQDSSAFAARKLRLMMSGSSALPRPVMHQWESITGHRLLERYGMTEFVMAMSNPLRGARNAGTVGKPLPGVEAKIKEDENDANGVGEICVKSPSLFKEYWNLPEVTKESFTEDGYFKTGDAGRVDEDGYYVILGRNSADIMKVGGYKLSALEIESTLLEHPTVAECCVLGLTDNDYGEAVTAIIIAESAAKKRREDESKPVITLEELCGWAKDKLAPYKLPTRLLIWESLPRNAMGKVNKKELKKSLENQE

SEQ ID NO: 40321 - DNA, 1801 bp, Arabidopsis thaliana; identical to SEQ ID NO: 40047
  misc_feature (1)..(1801): Ceres Seq. ID no. 12579671
  misc_feature (1)..(1801): Ortholog of  Ceres SEQ ID NO 12605517 as cited in SEQ ID NO 20422

SEQ ID NO: 40322 - protein, 256 aa, Arabidopsis thaliana; identical to SEQ ID NO: 40048
  peptide (1)..(256): Ceres Seq. ID no. 12579672

SEQ ID NO: 40323 - protein, 247 aa, Arabidopsis thaliana; identical to SEQ ID NO: 40049
  peptide (1)..(247): Ceres Seq. ID no. 12579673

SEQ ID NO: 40324 - protein, 225 aa, Arabidopsis thaliana; identical to SEQ ID NO: 40050
  peptide (1)..(225): Ceres Seq. ID no. 12579674

SEQ ID NO: 40325 - DNA, 1489 bp, Arabidopsis thaliana
  misc_feature (1)..(1489): Ceres Seq. ID no. 13491706
  misc_feature (1)..(1489): Ortholog of  Ceres SEQ ID NO 12609146 as cited in SEQ ID NO 52118
  misc_feature (1)..(1489): Ortholog of  Ceres SEQ ID NO 14303397 as cited in SEQ ID NO 54614
  misc_feature (1)..(1489): Ortholog of  Ceres SEQ ID NO 13594056 as cited in SEQ ID NO 55691
  misc_feature (1)..(1489): Ortholog of  Ceres SEQ ID NO 14314186 as cited in SEQ ID NO 57457
  misc_feature (1)..(1489): Ortholog of  Ceres SEQ ID NO 13638136 as cited in SEQ ID NO 58644
  misc_feature (1)..(1489): Ortholog of  Ceres SEQ ID NO 13596868 as cited in SEQ ID NO 62806
  misc_feature (1)..(1489): Ortholog of  Ceres SEQ ID NO 13595885 as cited in SEQ ID NO 69265
  misc_feature (1)..(1489): Ortholog of  Ceres SEQ ID NO 12566239 as cited in SEQ ID NO 0
  misc_feature (1)..(1489): Ortholog of  Ceres SEQ ID NO 13599119 as cited in SEQ ID NO 0
  misc_feature (1)..(1489): Ortholog of  Ceres SEQ ID NO 14308987 as cited in SEQ ID NO 0
agaagccgcaaagaaagcggcggtggaagctgagacatgcaacaatggcgttcgtgtcattctcttcttctccttctctctctcttacactcgcgattcaacattaatttcgttcttcttcatacacatatatagatagtgtcttcattttccaaccatgaccggtagagaaatcctccacaagatgaaggaatccgtcaaggagaaagttgggcttggtgcatctgcttcatctgcagattcagggaaaggtaagagcaagatgttgaagcagatcacacatggttttcatttggtgaaagggaaagcttttcacgagatggaagattatgtggttgccaaattcaaggaagttgatgataatgagcttggtctgtttgctatcttcgatggccatcttagccacgagattccggactacttgtgctcccatttgtttgagaacatcttgaaagagccgaatttctggcaagaacctgagaaagcgataaagaaagcttactatataacggatacaacgattctagacaaggcagatgatttgggaaaaggaggttctactgctgtgactgcgatattgatcaattgccagaagctggtggttgctaatgttggtgactctcgagctgttatttgccaaaatggtgttgcgaagccactctcagttgatcatgagccgaacatggagaaggatgaaatcgagaacagaggaggattcgtttctaactttcctggggatgttcctcgagttgatggtcaactggctgtggcaagggcatttggtgataagagtttaaagatgcatttgagttcagaaccatatgttacggtggagataattgatgatgatgcagaatttcttatcctagcaagtgatggactatggaaggtcatgtcaaaccaagaagccgttgactcaatcaagggaataaaagatgcgaaggctgcagcaaagcaccttgcagaggaggctgttgcaaggaaaagctcagacgatatctcagtcgtcgtcgtgaaatttcagtgacattagctttcggagaagagacctctgcagactgcagatccctttcatcgcaagtcttactggtcacttaaacaagtaaagagtctttgagattggaccagctaaagaaagaatcacaagtatgggcgtttcctctgtaagatgcaattatcacctctatgttactcttttctttttttccttttcaactctgtgattatctctaagtctgtttctttctgggaataaaattttaacagtgaaaaactttctttgcttctccttttttttgttgtaaatgttttttgttatacaatagggcagtgtaagaaagatgaaatagttagaattagtgggtagtgaaagagacaggacataaaaggtttcacatgccaaactgtactcatgtctcgagtctatgacctaagcttttgggattgttatttacaataacagaataaataagtgttgtcccttttttcc

SEQ ID NO: 40326 - protein, 289 aa, Arabidopsis thaliana
  peptide (1)..(289): Ceres Seq. ID no. 13491707
MTGREILHKMKESVKEKVGLGASASSADSGKGKSKMLKQITHGFHLVKGKAFHEMEDYVVAKFKEVDDNELGLFAIFDGHLSHEIPDYLCSHLFENILKEPNFWQEPEKAIKKAYYITDTTILDKADDLGKGGSTAVTAILINCQKLVVANVGDSRAVICQNGVAKPLSVDHEPNMEKDEIENRGGFVSNFPGDVPRVDGQLAVARAFGDKSLKMHLSSEPYVTVEIIDDDAEFLILASDGLWKVMSNQEAVDSIKGIKDAKAAAKHLAEEAVARKSSDDISVVVVKFQ

SEQ ID NO: 40327 - protein, 280 aa, Arabidopsis thaliana
  peptide (1)..(280): Ceres Seq. ID no. 13491708
MKESVKEKVGLGASASSADSGKGKSKMLKQITHGFHLVKGKAFHEMEDYVVAKFKEVDDNELGLFAIFDGHLSHEIPDYLCSHLFENILKEPNFWQEPEKAIKKAYYITDTTILDKADDLGKGGSTAVTAILINCQKLVVANVGDSRAVICQNGVAKPLSVDHEPNMEKDEIENRGGFVSNFPGDVPRVDGQLAVARAFGDKSLKMHLSSEPYVTVEIIDDDAEFLILASDGLWKVMSNQEAVDSIKGIKDAKAAAKHLAEEAVARKSSDDISVVVVKFQ

SEQ ID NO: 40328 - protein, 254 aa, Arabidopsis thaliana
  peptide (1)..(254): Ceres Seq. ID no. 13491709
MLKQITHGFHLVKGKAFHEMEDYVVAKFKEVDDNELGLFAIFDGHLSHEIPDYLCSHLFENILKEPNFWQEPEKAIKKAYYITDTTILDKADDLGKGGSTAVTAILINCQKLVVANVGDSRAVICQNGVAKPLSVDHEPNMEKDEIENRGGFVSNFPGDVPRVDGQLAVARAFGDKSLKMHLSSEPYVTVEIIDDDAEFLILASDGLWKVMSNQEAVDSIKGIKDAKAAAKHLAEEAVARKSSDDISVVVVKFQ

SEQ ID NO: 40329 - DNA, 1762 bp, Arabidopsis thaliana
  misc_feature (1)..(1762): Ceres Seq. ID no. 13576748
  misc_feature (1)..(1762): Ortholog of  Ceres SEQ ID NO 14315146 as cited in SEQ ID NO 52929
  misc_feature (1)..(1762): Ortholog of  Ceres SEQ ID NO 14302263 as cited in SEQ ID NO 64701
  misc_feature (1)..(1762): Ortholog of  Ceres SEQ ID NO 13584538 as cited in SEQ ID NO 64739
  misc_feature (1)..(1762): Ortholog of  Ceres SEQ ID NO 15169643 as cited in SEQ ID NO 64826
  misc_feature (1)..(1762): Ortholog of  Ceres SEQ ID NO 15169647 as cited in SEQ ID NO 64930
aagtccaagcccgaaaacaagggttcttgctccgacacgacaacaaatccagattttgagcttagggaaacttgagaaggagaaaaaaatgtcgaacatagacatagaagggatcttgaaggagctacctaatgatgggaggatcccaaagacgaagatagtttgcacattaggaccagcttctcgcactgtttccatgatcgaaaagcttttgaaagccggtatgaatgtggctcgcttcaacttctcacatggaagccatgaataccatcaagagacactcgacaacctccgctctgctatgcataataccggcattctcgctgctgtcatgcttgatactaaggggcctgagattcgtactggtttcttgaaagatgggaaccctatacaactgaaggaaggtcaagagattactataaccactgattatgacattcaaggagacgaatcaacgatatccatgagctataaaaagctgcctttggatgtgaagcccggaaacaccatactctgtgcagatggaagcataagtctagctgtcttgtcatgtgatcctgagtctggaactgttaggtgccggtgtgaaaactcggcgatgcttggtgaaagaaagaatgtgaatcttcctggcgttgttgttgatcttcccactttgacagataaggatattgaagatattctcggttggggtgttccgaacagcattgatatgattgctctttcgtttgtccgtaaaggttcggatcttgttaatgtccgcaaggttcttggatctcatgctaaaagcataatgctcatgtcaaaggttgagaaccaggaaggtgtgattaactttgatgagatcttgcgtgaaacagatgcgttcatggttgcccgtggtgatctcgggatggagattccgatagagaagatcttcttggctcaaaagttgatgatctacaagtgtaaccttgcgggtaaaccggtggtcacagccactcagatgctggagtcaatgatcaaatcacctcggccaacccgagctgaagccacagatgttgcaaatgctgttcttgatggtactgactgtgtgatgcttagcggtgagagtgcagcaggagcttatccggaaatagctgtgaaagtcatggctaagatctgcattgaagccgaatcctcgcttgattacaacacaatctttaaagagatgatccgagcaactccacttccaatgagcccactcgagagtcttgcatcatccgctgtacggactgctaacaaagcgagggcaaaactcatcattgtgttgacacgtggaggttcaactgctaatctcgtggctaaatacagaccggctgttccgattctgtcagtggttgtcccggttatgaccactgattcctttgactggtcttgtagtgacgagtcacctgcaaggcatagtctgatatacagaggtctaatccctatgttggctgaaggatctgcaaaggcaacagatagtgaagccaccgaagttatcattgaagctgctctgaagtcggctactcagagaggactgtgcaaccgtggtgatgcaatcgtggcgctgcaccgtattggagctgcctcagttattaagatctgtgtggttaagtgagattacagacttctttcaatacctcaaatcttggattgttggtaatcgtaactgagattttgctttgtagcatgaaataaagaaaacaggtcacaatagttcctgaaactctgttacttttaagatatctctctctctttt

SEQ ID NO: 40330 - protein, 539 aa, Arabidopsis thaliana
  peptide (1)..(539): Ceres Seq. ID no. 13576749
SPSPKTRVLAPTRQQIQILSLGKLEKEKKMSNIDIEGILKELPNDGRIPKTKIVCTLGPASRTVSMIEKLLKAGMNVARFNFSHGSHEYHQETLDNLRSAMHNTGILAAVMLDTKGPEIRTGFLKDGNPIQLKEGQEITITTDYDIQGDESTISMSYKKLPLDVKPGNTILCADGSISLAVLSCDPESGTVRCRCENSAMLGERKNVNLPGVVVDLPTLTDKDIEDILGWGVPNSIDMIALSFVRKGSDLVNVRKVLGSHAKSIMLMSKVENQEGVINFDEILRETDAFMVARGDLGMEIPIEKIFLAQKLMIYKCNLAGKPVVTATQMLESMIKSPRPTRAEATDVANAVLDGTDCVMLSGESAAGAYPEIAVKVMAKICIEAESSLDYNTIFKEMIRATPLPMSPLESLASSAVRTANKARAKLIIVLTRGGSTANLVAKYRPAVPILSVVVPVMTTDSFDWSCSDESPARHSLIYRGLIPMLAEGSAKATDSEATEVIIEAALKSATQRGLCNRGDAIVALHRIGAASVIKICVVK

SEQ ID NO: 40331 - protein, 510 aa, Arabidopsis thaliana
  peptide (1)..(510): Ceres Seq. ID no. 13576750
MSNIDIEGILKELPNDGRIPKTKIVCTLGPASRTVSMIEKLLKAGMNVARFNFSHGSHEYHQETLDNLRSAMHNTGILAAVMLDTKGPEIRTGFLKDGNPIQLKEGQEITITTDYDIQGDESTISMSYKKLPLDVKPGNTILCADGSISLAVLSCDPESGTVRCRCENSAMLGERKNVNLPGVVVDLPTLTDKDIEDILGWGVPNSIDMIALSFVRKGSDLVNVRKVLGSHAKSIMLMSKVENQEGVINFDEILRETDAFMVARGDLGMEIPIEKIFLAQKLMIYKCNLAGKPVVTATQMLESMIKSPRPTRAEATDVANAVLDGTDCVMLSGESAAGAYPEIAVKVMAKICIEAESSLDYNTIFKEMIRATPLPMSPLESLASSAVRTANKARAKLIIVLTRGGSTANLVAKYRPAVPILSVVVPVMTTDSFDWSCSDESPARHSLIYRGLIPMLAEGSAKATDSEATEVIIEAALKSATQRGLCNRGDAIVALHRIGAASVIKICVVK

SEQ ID NO: 40332 - protein, 474 aa, Arabidopsis thaliana
  peptide (1)..(474): Ceres Seq. ID no. 13576751
MIEKLLKAGMNVARFNFSHGSHEYHQETLDNLRSAMHNTGILAAVMLDTKGPEIRTGFLKDGNPIQLKEGQEITITTDYDIQGDESTISMSYKKLPLDVKPGNTILCADGSISLAVLSCDPESGTVRCRCENSAMLGERKNVNLPGVVVDLPTLTDKDIEDILGWGVPNSIDMIALSFVRKGSDLVNVRKVLGSHAKSIMLMSKVENQEGVINFDEILRETDAFMVARGDLGMEIPIEKIFLAQKLMIYKCNLAGKPVVTATQMLESMIKSPRPTRAEATDVANAVLDGTDCVMLSGESAAGAYPEIAVKVMAKICIEAESSLDYNTIFKEMIRATPLPMSPLESLASSAVRTANKARAKLIIVLTRGGSTANLVAKYRPAVPILSVVVPVMTTDSFDWSCSDESPARHSLIYRGLIPMLAEGSAKATDSEATEVIIEAALKSATQRGLCNRGDAIVALHRIGAASVIKICVVK

SEQ ID NO: 40333 - DNA, 1561 bp, Arabidopsis thaliana; identical to SEQ ID NO: 24591
  misc_feature (1)..(1561): Ceres Seq. ID no. 13491567
  misc_feature (1)..(1561): Ortholog of  Ceres SEQ ID NO 14307534 as cited in SEQ ID NO 55715
  misc_feature (1)..(1561): Ortholog of  Ceres SEQ ID NO 14307548 as cited in SEQ ID NO 58859
  misc_feature (1)..(1561): Ortholog of  Ceres SEQ ID NO 15172032 as cited in SEQ ID NO 59531

SEQ ID NO: 40334 - protein, 466 aa, Arabidopsis thaliana; identical to SEQ ID NO: 24592
  peptide (1)..(466): Ceres Seq. ID no. 13491568

SEQ ID NO: 40335 - protein, 465 aa, Arabidopsis thaliana; identical to SEQ ID NO: 24593
  peptide (1)..(465): Ceres Seq. ID no. 13491569

SEQ ID NO: 40336 - protein, 414 aa, Arabidopsis thaliana; identical to SEQ ID NO: 24594
  peptide (1)..(414): Ceres Seq. ID no. 13491570

SEQ ID NO: 40337 - DNA, 712 bp, Arabidopsis thaliana
  misc_feature (1)..(712): Ceres Seq. ID no. 13488083
  misc_feature (1)..(712): Ortholog of  Ceres SEQ ID NO 14311773 as cited in SEQ ID NO 59245
attgttgcctagagaaaaaaaggaaaagagagaaagagttaccccaaaaaatgagcgaagaacagctgcagaaacctatagattgtgctgatgtaaaaggagaggcagagaagatttcgacaacggagggaggcattaaggcggcggaggacaaagagaaaggtgttgtagccgaggcctccggtgaacaggcggagggagaagttaaccagaaaaaggtggtagctaatcctctgaaatcggaaggaaccataacaattggagaggctctagaggcagcggttctcacggcagggaataagccggtggagtggagtgacgcagccgccattcaagcggccgaggttagagctacggggcggaccaatatcatgcccggcggtgttgcggcttcagctcaatcagccgccactcttaatgctcgtatcggctctgacgataccaagactacgctagccgacgttctcactggagcgagtagcaaattaccatcggataaagcagcaacgagaaaggacgcagagggagtgactggcgccgagatgaggaacgatcctcatctcactacatacccaaccggtgtggctgcctctgtcgctgccgccgctcggatcaatcagtccaaatgatgcaattcttctttcttgttattgagaagcaagtttatataaacttaaacaaatgtatatatgttgatctatataagattccc

SEQ ID NO: 40338 - protein, 208 aa, Arabidopsis thaliana
  peptide (1)..(208): Ceres Seq. ID no. 13488084
CCLEKKRKREKELPQKMSEEQLQKPIDCADVKGEAEKISTTEGGIKAAEDKEKGVVAEASGEQAEGEVNQKKVVANPLKSEGTITIGEALEAAVLTAGNKPVEWSDAAAIQAAEVRATGRTNIMPGGVAASAQSAATLNARIGSDDTKTTLADVLTGASSKLPSDKAATRKDAEGVTGAEMRNDPHLTTYPTGVAASVAAAARINQSK

SEQ ID NO: 40339 - protein, 192 aa, Arabidopsis thaliana
  peptide (1)..(192): Ceres Seq. ID no. 13488085
MSEEQLQKPIDCADVKGEAEKISTTEGGIKAAEDKEKGVVAEASGEQAEGEVNQKKVVANPLKSEGTITIGEALEAAVLTAGNKPVEWSDAAAIQAAEVRATGRTNIMPGGVAASAQSAATLNARIGSDDTKTTLADVLTGASSKLPSDKAATRKDAEGVTGAEMRNDPHLTTYPTGVAASVAAAARINQSK

SEQ ID NO: 40340 - DNA, 1381 bp, Arabidopsis thaliana
  misc_feature (1)..(1381): Ceres Seq. ID no. 12395571
  misc_feature (1)..(1381): Ortholog of  Ceres SEQ ID NO 15176325 as cited in SEQ ID NO 52802
  misc_feature (1)..(1381): Ortholog of  Ceres SEQ ID NO 15176313 as cited in SEQ ID NO 52831
attttgaatacatatccaccacttgtcttgttcttgaaacacacggtcgtggccatgtctgttctgcttccgatctatcctctccaatccttggccagaagcaagagattgtttccggttcgaaccagatcaaaaccggtttgtttagcactgaccaatgctcaaacaaacggtggtgaccaagaggagaaagtagtgattgttggcgccgggattggcggacttgccactgccgtttcacttcacaggcttggaatccggtcggtggtgttggagcaggcagagtcgcttcgtactggaggaacatcgctgacgctattcaagaatgggtggcgcgttcttgatgccatctccgtggggcctcaactccgaacgcagtttcttgaaatcgaagggatggtagtgaagaaggaagatggaagagagcttcgttctttcaaattcaaagacgatgatcaaagccaagaagttcgggccgtggagaggcgagtactcttggaaacacttgcaagccagcttcctccacaaaccattcggttttcctcaaaactggaaagtatacaaagcaatgccaatggtgacactctccttcaacttggagatggaacccggttgcttgcacagattgttattggttgtgacggtatccggtctaaggttgcaacttggatggggttcagtgagccgaaatatgttggccattgcgcttaccgtggtcttgggttctatccaaatggacagccatttcagaaaaaggtgaactacatatacggtaaagggattagagctggatatgtacctgtatctacaacaaaagtctactggttcatctgtttcaacagcccatctctagggcccaaaattacggatccagcgatcctaaaaaaacaagccaaagaactggttagtacatggccagaagatctgcaaaacctcatcgatttaacacctgatgaaactatcagcagaactcctctagtagaccggtggctatggcctggcattgctcctccagcatcaaaaggccgagtggttctcgttggagatgcttggcacccaatgactccaaatcttggacaaggtgcttgttgtgccttggaagattcagtagttctggcaaataaactagccaatgcaataaatggaggaaccgaatcaattgaagtagcaatggaatcatacgggagtgagagatggtctcgagcattcccgttgacagtacgcgcaaacctagttggcgcacttctgcaatgggagaatcctctagtgtgttccattagaaacaatattgtcataccaaagttactgaggcttggaccaatgcttgaacacacaaactttgagtgtgaacctctctttgtttctaaaagctgaatttcgt

SEQ ID NO: 40341 - protein, 457 aa, Arabidopsis thaliana
  peptide (1)..(457): Ceres Seq. ID no. 12395572
ILNTYPPLVLFLKHTVVAMSVLLPIYPLQSLARSKRLFPVRTRSKPVCLALTNAQTNGGDQEEKVVIVGAGIGGLATAVSLHRLGIRSVVLEQAESLRTGGTSLTLFKNGWRVLDAISVGPQLRTQFLEIEGMVVKKEDGRELRSFKFKDDDQSQEVRAVERRVLLETLASQLPPQTIRFSSKLESIQSNANGDTLLQLGDGTRLLAQIVIGCDGIRSKVATWMGFSEPKYVGHCAYRGLGFYPNGQPFQKKVNYIYGKGIRAGYVPVSTTKVYWFICFNSPSLGPKITDPAILKKQAKELVSTWPEDLQNLIDLTPDETISRTPLVDRWLWPGIAPPASKGRVVLVGDAWHPMTPNLGQGACCALEDSVVLANKLANAINGGTESIEVAMESYGSERWSRAFPLTVRANLVGALLQWENPLVCSIRNNIVIPKLLRLGPMLEHTNFECEPLFVSKS

SEQ ID NO: 40342 - protein, 439 aa, Arabidopsis thaliana
  peptide (1)..(439): Ceres Seq. ID no. 12395573
MSVLLPIYPLQSLARSKRLFPVRTRSKPVCLALTNAQTNGGDQEEKVVIVGAGIGGLATAVSLHRLGIRSVVLEQAESLRTGGTSLTLFKNGWRVLDAISVGPQLRTQFLEIEGMVVKKEDGRELRSFKFKDDDQSQEVRAVERRVLLETLASQLPPQTIRFSSKLESIQSNANGDTLLQLGDGTRLLAQIVIGCDGIRSKVATWMGFSEPKYVGHCAYRGLGFYPNGQPFQKKVNYIYGKGIRAGYVPVSTTKVYWFICFNSPSLGPKITDPAILKKQAKELVSTWPEDLQNLIDLTPDETISRTPLVDRWLWPGIAPPASKGRVVLVGDAWHPMTPNLGQGACCALEDSVVLANKLANAINGGTESIEVAMESYGSERWSRAFPLTVRANLVGALLQWENPLVCSIRNNIVIPKLLRLGPMLEHTNFECEPLFVSKS

SEQ ID NO: 40343 - protein, 325 aa, Arabidopsis thaliana
  peptide (1)..(325): Ceres Seq. ID no. 12395574
MVVKKEDGRELRSFKFKDDDQSQEVRAVERRVLLETLASQLPPQTIRFSSKLESIQSNANGDTLLQLGDGTRLLAQIVIGCDGIRSKVATWMGFSEPKYVGHCAYRGLGFYPNGQPFQKKVNYIYGKGIRAGYVPVSTTKVYWFICFNSPSLGPKITDPAILKKQAKELVSTWPEDLQNLIDLTPDETISRTPLVDRWLWPGIAPPASKGRVVLVGDAWHPMTPNLGQGACCALEDSVVLANKLANAINGGTESIEVAMESYGSERWSRAFPLTVRANLVGALLQWENPLVCSIRNNIVIPKLLRLGPMLEHTNFECEPLFVSKS

SEQ ID NO: 40344 - DNA, 1535 bp, Arabidopsis thaliana
  misc_feature (1)..(1535): Ceres Seq. ID no. 12348672
  misc_feature (1)..(1535): Ortholog of  Ceres SEQ ID NO 15177676 as cited in SEQ ID NO 52631
  misc_feature (1)..(1535): Ortholog of  Ceres SEQ ID NO 14314212 as cited in SEQ ID NO 57401
  misc_feature (1)..(1535): Ortholog of  Ceres SEQ ID NO 13596376 as cited in SEQ ID NO 68056
acaaacaatcacattcatcatttcatttaccaaaaaaaattataacctgaatataatagagatgggtagtagcctcacgcgcctactagtcttcctttccattttcgcagccatagctctgaaatcaaactctcaataccttcttccgatcaccaagcacgaacccaccaatctattctacaccactttcaacgtcggatccgccgcaaaatctcccgtaaacctcctcctcgacctcggaacaaacctcacgtggctcgactgccgcaaacttaaatctttatcatctctccgcctagtcacttgccagagctccacatgcaagtctatccccggtaatggatgcgctggcaaatcttgtctttacaagcaaccaaacccactcggacaaaaccccgttgtaaccggccgtgtcgtccaagacagagcttccatctacaccacagacggcggcaagttcctctctcaagtctccgtccgccacttcacattctcatgcgccggtgagaaagccctccaaggccttcctcctccagtcgacggagttctggctctttctcccggatcttcgtcgttcacgaaacaagtgacgtcagcgtttaacgtcatccctaaattctctctctgcttgccttcttccggtaccggtcatttctatatcgccggcattcactactttatcccaccattcaatagtagcgataatccgattccaaggactttaactcccattaaaggcactgactcaggagattatctaatcactgtaaaatctatctacgttggtggaactgctttgaagttgaaccctgatttgctaaccggcggagccaaactcagtacggtggttcactacaccgtacttcaaaccgatatctacaatgctcttgctcagtcttttacactcaaggctaaggctatgggaatagctaaggttccatcggtggcgccgtttaaacattgttttgattcacgcaccgctggaaagaatttgacggcggggcctaacgtgcccgtgatagagattggtctgccggggaggataggggaggtaaagtgggggttctacggtgcgaatacggtggtgaaagtgaaggaaacggtgatgtgtttggcgtttatcgacggtggaaagacaccgaaggatttgatggtgattgggacacatcagcttcaagatcatatgctcgagttcgatttcagcgggacggttctcgcttttagtgagtcactcttgctccataacacaagctgctccacttggccttcccaaaaatagaatcatcagtcactcatgatagtatcacagtttttggtcttgtatgacacgttttcagcgacacatgtgttctaatcgaaattttaagaaattatcacccgtttctcataaatatcgtctatgttattttattcaaatttgatattcgcttgttttgataaaaaatattgtctgaggattttgcacattaataattatctaaagtattctgtatttcttattagaaattgcaatttagatttgaaattcaaaagtt

SEQ ID NO: 40345 - protein, 425 aa, Arabidopsis thaliana
  peptide (1)..(425): Ceres Seq. ID no. 12348673
QTITFIISFTKKNYNLNIIEMGSSLTRLLVFLSIFAAIALKSNSQYLLPITKHEPTNLFYTTFNVGSAAKSPVNLLLDLGTNLTWLDCRKLKSLSSLRLVTCQSSTCKSIPGNGCAGKSCLYKQPNPLGQNPVVTGRVVQDRASIYTTDGGKFLSQVSVRHFTFSCAGEKALQGLPPPVDGVLALSPGSSSFTKQVTSAFNVIPKFSLCLPSSGTGHFYIAGIHYFIPPFNSSDNPIPRTLTPIKGTDSGDYLITVKSIYVGGTALKLNPDLLTGGAKLSTVVHYTVLQTDIYNALAQSFTLKAKAMGIAKVPSVAPFKHCFDSRTAGKNLTAGPNVPVIEIGLPGRIGEVKWGFYGANTVVKVKETVMCLAFIDGGKTPKDLMVIGTHQLQDHMLEFDFSGTVLAFSESLLLHNTSCSTWPSQK

SEQ ID NO: 40346 - protein, 405 aa, Arabidopsis thaliana
  peptide (1)..(405): Ceres Seq. ID no. 12348674
MGSSLTRLLVFLSIFAAIALKSNSQYLLPITKHEPTNLFYTTFNVGSAAKSPVNLLLDLGTNLTWLDCRKLKSLSSLRLVTCQSSTCKSIPGNGCAGKSCLYKQPNPLGQNPVVTGRVVQDRASIYTTDGGKFLSQVSVRHFTFSCAGEKALQGLPPPVDGVLALSPGSSSFTKQVTSAFNVIPKFSLCLPSSGTGHFYIAGIHYFIPPFNSSDNPIPRTLTPIKGTDSGDYLITVKSIYVGGTALKLNPDLLTGGAKLSTVVHYTVLQTDIYNALAQSFTLKAKAMGIAKVPSVAPFKHCFDSRTAGKNLTAGPNVPVIEIGLPGRIGEVKWGFYGANTVVKVKETVMCLAFIDGGKTPKDLMVIGTHQLQDHMLEFDFSGTVLAFSESLLLHNTSCSTWPSQK

SEQ ID NO: 40347 - DNA, 1370 bp, Arabidopsis thaliana
  misc_feature (1)..(1370): Ceres Seq. ID no. 12385146
  misc_feature (1)..(1370): Ortholog of  Ceres SEQ ID NO 12782785 as cited in SEQ ID NO 0
acaaaggaaaacgttaatggtggatctgagcactgtcaatgtcatcaccaccgaagtagagttgactccactcaacagaaactgaaactggaaagtttgagacttttaagtgatgaaaagttctcagatgtcagaaacagaatttaaagtgttgcttgagacattcacatttcctgctgattctgctcccttcaagagttgtcatgcctctaccatagttgaggttgttaaagatcatttcttggctgcgtatttcggaggcaccagggaaggagcacctgatgtcaaaatctggttgcagcatttcaaggatggtcaatgggattcaccggttattgttgatgaagagccaggagttccaatgtataaccctgtcttgttcaaacttccatctcatgagctcttattgttctacaaaatcggccaggaggttcaaaaatggagtggttgcatgaaacgatcatatgataaaggtataacttggactgaaagagaacagcttcctcctgggattctcggtcctatcaaaaacaagcccattttgcttgaagacggtactctcctttgcggatcatctgttgagagttggaattcttggggagcatggatggaggtcacttcagatgcgggtagaacatggagaaagaaagggccaatatacattcaaggcaagagtcttagcgtgatccaaccagttccataccaaaccgcagctgggaacttacggattttactcagatcctttactggcattgacaaaatctgtatctcagagtctttggatggcggtgagaactggagttttgcagtaccaacggttctcccaaacccaaattcaggtattgatggagtcaagcttaaggatggtaggctagtgcttgcttacaacacagactcaagaggtgtgctcaaattaggagtttctttagacgacggtgattcatggaccgatattttaacgttggaggaatctccgggaatggagtattcgtacccggctgttatacaaagccggagacggcaatgtccacgtcacctatacatataacaggacacaaattaagcatgtggtgctcaagactgcgacagatatcgattcgaagccataccgacatggtgaagcaggaggaggacacgtgaacttggatttgtacgaaccaaacattaattaattagctatttgtctcttgaaccatcgatgtggagtgtgacttccttcttacggaagaacaaagaatgttctctttcttgtcttgtaagttattgattgatcgattcttgagtttgtaaaagttgccactagttgatgaatattattgagattgtttataatatatttattgtaatcatataagttagagatttacttt

SEQ ID NO: 40348 - protein, 311 aa, Arabidopsis thaliana
  peptide (1)..(311): Ceres Seq. ID no. 12385147
MKSSQMSETEFKVLLETFTFPADSAPFKSCHASTIVEVVKDHFLAAYFGGTREGAPDVKIWLQHFKDGQWDSPVIVDEEPGVPMYNPVLFKLPSHELLLFYKIGQEVQKWSGCMKRSYDKGITWTEREQLPPGILGPIKNKPILLEDGTLLCGSSVESWNSWGAWMEVTSDAGRTWRKKGPIYIQGKSLSVIQPVPYQTAAGNLRILLRSFTGIDKICISESLDGGENWSFAVPTVLPNPNSGIDGVKLKDGRLVLAYNTDSRGVLKLGVSLDDGDSWTDILTLEESPGMEYSYPAVIQSRRRQCPRHLYI

SEQ ID NO: 40349 - protein, 306 aa, Arabidopsis thaliana
  peptide (1)..(306): Ceres Seq. ID no. 12385148
MSETEFKVLLETFTFPADSAPFKSCHASTIVEVVKDHFLAAYFGGTREGAPDVKIWLQHFKDGQWDSPVIVDEEPGVPMYNPVLFKLPSHELLLFYKIGQEVQKWSGCMKRSYDKGITWTEREQLPPGILGPIKNKPILLEDGTLLCGSSVESWNSWGAWMEVTSDAGRTWRKKGPIYIQGKSLSVIQPVPYQTAAGNLRILLRSFTGIDKICISESLDGGENWSFAVPTVLPNPNSGIDGVKLKDGRLVLAYNTDSRGVLKLGVSLDDGDSWTDILTLEESPGMEYSYPAVIQSRRRQCPRHLYI

SEQ ID NO: 40350 - protein, 228 aa, Arabidopsis thaliana
  peptide (1)..(228): Ceres Seq. ID no. 12385149
MYNPVLFKLPSHELLLFYKIGQEVQKWSGCMKRSYDKGITWTEREQLPPGILGPIKNKPILLEDGTLLCGSSVESWNSWGAWMEVTSDAGRTWRKKGPIYIQGKSLSVIQPVPYQTAAGNLRILLRSFTGIDKICISESLDGGENWSFAVPTVLPNPNSGIDGVKLKDGRLVLAYNTDSRGVLKLGVSLDDGDSWTDILTLEESPGMEYSYPAVIQSRRRQCPRHLYI

SEQ ID NO: 40351 - DNA, 1488 bp, Arabidopsis thaliana
  misc_feature (1)..(1488): Ceres Seq. ID no. 13492411
  misc_feature (1)..(1488): Ortholog of  Ceres SEQ ID NO 15169053 as cited in SEQ ID NO 53926
gaagaaagcaaagaaatatcgaagaatttaaggaataaaaaataaaaacagaaagctggaggaagaaaaaataaaaattccttctttcctcctgaaggcaaaaaaggaagagaagagaagagaagagaaggaagcagaatctaattttggattataatcggagagagaatctattccgacgaatcttttcgggttgattttttggtctttaatttgaagggtttaggtgtggtttcgaagatgatggtagcgaatagtttcgatctatggcaaaaggatgtttttttctctgcagctgaggaggttcaagaatctgctgatataatggaatctgcgtataggttgtggtttaaagagaagagagacggtcgagtatccgtagaatcagacgagctctgcaaagaactccaagctgctttgagcactgctaaatggcagttggaagagtttgagagggcagtgagcttaagccatggaaattgtcgagatgacactaccttaactaggcataaacagtttgttaccgctattgaaaaccagatttatcaagtggaatctactctgctagagtcgttaagcgagaatgggaaacaacctttgcgttgggtggatcttaacaaagaagagcgtgatgatctcgccatgtttctatctggatcttctcagacgtcagagagtttaaacagtgatagcatcaacttgagagattcctcaacgagttctgtagctgagaatccacgtgggatcaatggcagaagagagggtagatgttatggcgacagtcctgattgtgtgatagacattgacgacataggaagtccggaaagtgcagataaaaaaggcggtacaagaagaacatggagttcaccaaatgtaccaaatatcagtgcgttgaggattaatgtccctgttaatgcaaaagaagaagagagggagaagttcctatcacatattgaagacactcctaaagagaaaggagctaaacctatgttttggctgcagagatgtcgtgattataaccagctctttgacagagtcaaggtttatcaaagacgatttcgcgttccattgagccgccctattaagctcattctttccttaacgctaatcttgattcttctattattcatcttgagaacttaaaaccgcggtttcagaaactctcaagaaacattgacaggttttttcacagattcttgcgtattgggttacacactcgttagatgctacatgattcaacatccttcgagggaaggaggagagattaaaagactttgtcaagattcaaatgaaggacaaagcctgatttattactctctcttaatcctcagggaacatataggaacctgtaaatttgtaagatcaatttgtaaaacttgaagctacgacgtttcgttaaactttagacgtgtacctaaaggaaaccaatgcgtgtttgtgctcaatgatatctccagtgtttgtttgtctctcagatatttgttttgg

SEQ ID NO: 40352 - protein, 300 aa, Arabidopsis thaliana
  peptide (1)..(300): Ceres Seq. ID no. 13492412
MMVANSFDLWQKDVFFSAAEEVQESADIMESAYRLWFKEKRDGRVSVESDELCKELQAALSTAKWQLEEFERAVSLSHGNCRDDTTLTRHKQFVTAIENQIYQVESTLLESLSENGKQPLRWVDLNKEERDDLAMFLSGSSQTSESLNSDSINLRDSSTSSVAENPRGINGRREGRCYGDSPDCVIDIDDIGSPESADKKGGTRRTWSSPNVPNISALRINVPVNAKEEEREKFLSHIEDTPKEKGAKPMFWLQRCRDYNQLFDRVKVYQRRFRVPLSRPIKLILSLTLILILLLFILRT

SEQ ID NO: 40353 - protein, 299 aa, Arabidopsis thaliana
  peptide (1)..(299): Ceres Seq. ID no. 13492413
MVANSFDLWQKDVFFSAAEEVQESADIMESAYRLWFKEKRDGRVSVESDELCKELQAALSTAKWQLEEFERAVSLSHGNCRDDTTLTRHKQFVTAIENQIYQVESTLLESLSENGKQPLRWVDLNKEERDDLAMFLSGSSQTSESLNSDSINLRDSSTSSVAENPRGINGRREGRCYGDSPDCVIDIDDIGSPESADKKGGTRRTWSSPNVPNISALRINVPVNAKEEEREKFLSHIEDTPKEKGAKPMFWLQRCRDYNQLFDRVKVYQRRFRVPLSRPIKLILSLTLILILLLFILRT

SEQ ID NO: 40354 - protein, 272 aa, Arabidopsis thaliana
  peptide (1)..(272): Ceres Seq. ID no. 13492414
MESAYRLWFKEKRDGRVSVESDELCKELQAALSTAKWQLEEFERAVSLSHGNCRDDTTLTRHKQFVTAIENQIYQVESTLLESLSENGKQPLRWVDLNKEERDDLAMFLSGSSQTSESLNSDSINLRDSSTSSVAENPRGINGRREGRCYGDSPDCVIDIDDIGSPESADKKGGTRRTWSSPNVPNISALRINVPVNAKEEEREKFLSHIEDTPKEKGAKPMFWLQRCRDYNQLFDRVKVYQRRFRVPLSRPIKLILSLTLILILLLFILRT

SEQ ID NO: 40355 - DNA, 844 bp, Arabidopsis thaliana; identical to SEQ ID NO: 21187
  misc_feature (1)..(844): Ceres Seq. ID no. 12377524
  misc_feature (1)..(844): Ortholog of  Ceres SEQ ID NO 13595021 as cited in SEQ ID NO 55815

SEQ ID NO: 40356 - protein, 208 aa, Arabidopsis thaliana; identical to SEQ ID NO: 21188
  peptide (1)..(208): Ceres Seq. ID no. 12377525

SEQ ID NO: 40357 - DNA, 1205 bp, Arabidopsis thaliana
  misc_feature (1)..(1205): Ceres Seq. ID no. 12385178
  misc_feature (1)..(1205): Ortholog of  Ceres SEQ ID NO 15171366 as cited in SEQ ID NO 51578
  misc_feature (1)..(1205): Ortholog of  Ceres SEQ ID NO 15175723 as cited in SEQ ID NO 57875
  misc_feature (1)..(1205): Ortholog of  Ceres SEQ ID NO 14314909 as cited in SEQ ID NO 58002
  misc_feature (1)..(1205): Ortholog of  Ceres SEQ ID NO 15179772 as cited in SEQ ID NO 64248
aaactttcgctctctcattcatcaaaaaaacttgcacatcttctcagatcttcaagtttctcctctggtttctcatcatgaccgttgatattatgcgtttacctaagatggaagatcaaacggctatacaagaagctgcatcacaaggcttaaaaagcatggaacacttgattcgtgtcctctctaaccgtcccgaagaacgtaacgttgattgctctgagatcactgatttcacagtttctaagttcaagaaagttatctctcttcttaaccgttccggtcacgcccggtttagacgtggtccggttcattcccctccttcctcctccgttcctccaccggtgaaagtgacaactccggctcccactcagatctctgctccagcaccggttagcttcgttcaggcaaatcaacaaagcgtgacgttagatttcactagaccgagcgtttttggcgctaaaaccaagagctcggaggttgttgagtttgctaaagagagctttagcgtatcttctaactcttctttcatgtcttctgcgatcaccggtgatggaagtgtctctaaaggctcttcgatctttcttgctccggctccagcggtgccagtgacttcctccgggaaaccgccgctttctggtcttccttacaggaagagatgctttgaacatgaccactctgaaggcttttccggcaagatctctggctccggcaacggcaagtgccattgcaagaaaagccgaaaaaatcggatgaagagaaccgtgagagtaccggcggtaagtgcaaagatcgccgatataccaccagacgaatattcatggagaaagtatggacaaaaaccgatcaaaggctcaccacatccacggggttattacaagtgtagtacatttagaggatgtccagcgaggaaacacgtggaaagagctttggatgattcaacgatgttgattgtgacgtacgaaggagagcaccgtcatcaccagtccacgatgcaggagcatgtaactcctagcgtgagtggtttggtgtttggttcggcttgaagaattaattagtttggtagttttgtaatattttgagaaatagaggggttggttttgtaattttttttctataacaaaattagttttagatttttttttagtagtcttttgaatggattttaatcttactaccgagaaagaaaaaattcttactacattttc

SEQ ID NO: 40358 - protein, 346 aa, Arabidopsis thaliana
  peptide (1)..(346): Ceres Seq. ID no. 12385179
TFALSFIKKTCTSSQIFKFLLWFLIMTVDIMRLPKMEDQTAIQEAASQGLKSMEHLIRVLSNRPEERNVDCSEITDFTVSKFKKVISLLNRSGHARFRRGPVHSPPSSSVPPPVKVTTPAPTQISAPAPVSFVQANQQSVTLDFTRPSVFGAKTKSSEVVEFAKESFSVSSNSSFMSSAITGDGSVSKGSSIFLAPAPAVPVTSSGKPPLSGLPYRKRCFEHDHSEGFSGKISGSGNGKCHCKKSRKNRMKRTVRVPAVSAKIADIPPDEYSWRKYGQKPIKGSPHPRGYYKCSTFRGCPARKHVERALDDSTMLIVTYEGEHRHHQSTMQEHVTPSVSGLVFGSA

SEQ ID NO: 40359 - protein, 321 aa, Arabidopsis thaliana
  peptide (1)..(321): Ceres Seq. ID no. 12385180
MTVDIMRLPKMEDQTAIQEAASQGLKSMEHLIRVLSNRPEERNVDCSEITDFTVSKFKKVISLLNRSGHARFRRGPVHSPPSSSVPPPVKVTTPAPTQISAPAPVSFVQANQQSVTLDFTRPSVFGAKTKSSEVVEFAKESFSVSSNSSFMSSAITGDGSVSKGSSIFLAPAPAVPVTSSGKPPLSGLPYRKRCFEHDHSEGFSGKISGSGNGKCHCKKSRKNRMKRTVRVPAVSAKIADIPPDEYSWRKYGQKPIKGSPHPRGYYKCSTFRGCPARKHVERALDDSTMLIVTYEGEHRHHQSTMQEHVTPSVSGLVFGSA

SEQ ID NO: 40360 - protein, 316 aa, Arabidopsis thaliana
  peptide (1)..(316): Ceres Seq. ID no. 12385181
MRLPKMEDQTAIQEAASQGLKSMEHLIRVLSNRPEERNVDCSEITDFTVSKFKKVISLLNRSGHARFRRGPVHSPPSSSVPPPVKVTTPAPTQISAPAPVSFVQANQQSVTLDFTRPSVFGAKTKSSEVVEFAKESFSVSSNSSFMSSAITGDGSVSKGSSIFLAPAPAVPVTSSGKPPLSGLPYRKRCFEHDHSEGFSGKISGSGNGKCHCKKSRKNRMKRTVRVPAVSAKIADIPPDEYSWRKYGQKPIKGSPHPRGYYKCSTFRGCPARKHVERALDDSTMLIVTYEGEHRHHQSTMQEHVTPSVSGLVFGSA

SEQ ID NO: 40361 - DNA, 1121 bp, Arabidopsis thaliana
  misc_feature (1)..(1121): Ceres Seq. ID no. 13497353
  misc_feature (1)..(1121): Ortholog of  Ceres SEQ ID NO 15171216 as cited in SEQ ID NO 59366
cccccggttccttccctcccatttgtcatcttatcttctgcgattactggtaaagtgagaaatccgttaatccctagagaaactgtaatcgtcgcggtgattcggagaaattcttctgcttccgcggaaaatgtcactaacccagatcgtgaatccaatcatatatccatctcgcacaattccacggcgtttcacggcgatctcgccttttaaaaccctaagtccccaattttcccgccacccacctcacgcactgtctcgtagactcttccttccttctgtttcctctatatgggatgccataaccggcggcggagattcgaaccctcgtgaggccatcgcagcggttcgacgcggaatgcagctcttcagacagggtgatgttgctggatcggtggcagagttcgatagagcaatcattttggatcccaggcaaaaggcatatctttggcaacgcgggctttctctttactatgtagataggtttgaagaaggtgcagagcagttccggatagatgttgctcagaatcctaatgacacagaggagtccatttggtgctttatctgcgaggcgaggctccatggtgttgatgttgcacgaacacagtttctcgaggttggtagagattctcggcctgtgatgcgagaagcttataatctattcaagaatggtggtgatcctgaaaagttagtaaatgacttctctagcggtcaagcaagcgaatacttctatgcttctctgtacgcagggctctactatgaagctgagggtaaatcagaaaacgcaaagtttcatttaaccgcggcttgtggatctccatatgggcagaggtctgatgattatatggcttcacttgctaaagtccattgcctttgtagaaactggagctccggtattctttgaaccggttcatggttttgtggagccaacatattagttattaaggcccaatttttgaaatatcagcccaattaaaaattggacctgggtttgcgatttccaacctttatttatgggaaataaataaagaaagtaaccattcacaaacattttaacaaataggtaaaattgtgccgttttggagtgtaccattcacaaacatattaaccaaattttgttg

SEQ ID NO: 40362 - protein, 257 aa, Arabidopsis thaliana
  peptide (1)..(257): Ceres Seq. ID no. 13497354
MSLTQIVNPIIYPSRTIPRRFTAISPFKTLSPQFSRHPPHALSRRLFLPSVSSIWDAITGGGDSNPREAIAAVRRGMQLFRQGDVAGSVAEFDRAIILDPRQKAYLWQRGLSLYYVDRFEEGAEQFRIDVAQNPNDTEESIWCFICEARLHGVDVARTQFLEVGRDSRPVMREAYNLFKNGGDPEKLVNDFSSGQASEYFYASLYAGLYYEAEGKSENAKFHLTAACGSPYGQRSDDYMASLAKVHCLCRNWSSGIL

SEQ ID NO: 40363 - protein, 181 aa, Arabidopsis thaliana
  peptide (1)..(181): Ceres Seq. ID no. 13497355
MQLFRQGDVAGSVAEFDRAIILDPRQKAYLWQRGLSLYYVDRFEEGAEQFRIDVAQNPNDTEESIWCFICEARLHGVDVARTQFLEVGRDSRPVMREAYNLFKNGGDPEKLVNDFSSGQASEYFYASLYAGLYYEAEGKSENAKFHLTAACGSPYGQRSDDYMASLAKVHCLCRNWSSGIL

SEQ ID NO: 40364 - DNA, 1566 bp, Arabidopsis thaliana
  misc_feature (1)..(1566): Ceres Seq. ID no. 13497116
  misc_feature (1)..(1566): Ortholog of  Ceres SEQ ID NO 13582332 as cited in SEQ ID NO 59890
  misc_feature (1)..(1566): Ortholog of  Ceres SEQ ID NO 13598278 as cited in SEQ ID NO 68456
gtattgtgttgttggagactgaaccatcaacgctttttcgacacttcttcttcttcctcctttctctcttcatgcaaaatcacagttacaagaaataaacaaaagattataaatcaaaacataaagagacaaaaatgagtgatggtcgagttaacgcagatcctcaacaagaagagaacatggttaaaccaccggttaagagatctctcactctcctcatcgtgacttacttttttctcttcttcggctctatcgcttcgagccttctcgcgaagtactatttcgtctacggtggctcgagccggtgggtctccacgtgggttcaatctgctggcttccctctcctcctcatcctaatctacttccctcactacgttctcaaaaccaccactcgccgtcctttcacgcgcttcacgctccgccatctcatcttctccgtgttgatcgggcttgttctcggtttcaacaacttcctcttctcatggggaacctcgtaccttccggtgtccacgtcatcgcttctcctctcgacacaactcgtcttcactctcattttgtctaggatcatagtgaaacagaagatcactttctcaaacctcaactgcgttgtcctgttgacgttaagctctgttttgttggctcttgattcgagtaaagataaaccgtccggtttaaccaaaaccaagtatttcatcgggtatgtatccacgatcggagccggtttactcttcgctctttacctccccgtgacggagaagctataccgtaccgtttattgttacgcgatggtcatggaggtgcaactggtgatggaattcgcagcgacggttttcgcgacaatcggtatggcttgcgaaggcgggtttaaggaaatggttaaggaagcgaaccatgttttcaccaaaggaccaacattttattggacgtttgcgatactagcaaatgtggtgacgtggcagctctctttcgcagccacgtcagggatggtttacttgacgtcaggtatcaccggaggtatctgcatgacggcgttgctcgcgatgaatgtgataggaggtgtggtggcttacggtgacgtgtttggtggagtgaagattgtgtcgacggtgctatgtatttggggattctcatcttacacatacgggatgtatatgaagatgaagaaggaggagaaggagaagggagaatattccggcgtaaagacgacggaagacagcggagagatggaggtggaaatgggaaatgttaaagatgacgtggcggcggcggatgatagggcttgaagatatctgtgtgattgagacggccgttatgattattattaggaaggaagccaacaaaaaaaaaaaaagtagtagtatctttttgtgttctttctttttctcaccttatgtttttttagtaatgcatttgcttttgtttttcttgtttttttaggttgttttgtttttccttttctggttatttttatgaattatcctcttatcatggccacaactaatgatgttgtacactttttaagtgtggattttccaatgtcggttgataagtatgtatttttctgtt

SEQ ID NO: 40365 - protein, 382 aa, Arabidopsis thaliana
  peptide (1)..(382): Ceres Seq. ID no. 13497117
MSDGRVNADPQQEENMVKPPVKRSLTLLIVTYFFLFFGSIASSLLAKYYFVYGGSSRWVSTWVQSAGFPLLLILIYFPHYVLKTTTRRPFTRFTLRHLIFSVLIGLVLGFNNFLFSWGTSYLPVSTSSLLLSTQLVFTLILSRIIVKQKITFSNLNCVVLLTLSSVLLALDSSKDKPSGLTKTKYFIGYVSTIGAGLLFALYLPVTEKLYRTVYCYAMVMEVQLVMEFAATVFATIGMACEGGFKEMVKEANHVFTKGPTFYWTFAILANVVTWQLSFAATSGMVYLTSGITGGICMTALLAMNVIGGVVAYGDVFGGVKIVSTVLCIWGFSSYTYGMYMKMKKEEKEKGEYSGVKTTEDSGEMEVEMGNVKDDVAAADDRA

SEQ ID NO: 40366 - protein, 367 aa, Arabidopsis thaliana
  peptide (1)..(367): Ceres Seq. ID no. 13497118
MVKPPVKRSLTLLIVTYFFLFFGSIASSLLAKYYFVYGGSSRWVSTWVQSAGFPLLLILIYFPHYVLKTTTRRPFTRFTLRHLIFSVLIGLVLGFNNFLFSWGTSYLPVSTSSLLLSTQLVFTLILSRIIVKQKITFSNLNCVVLLTLSSVLLALDSSKDKPSGLTKTKYFIGYVSTIGAGLLFALYLPVTEKLYRTVYCYAMVMEVQLVMEFAATVFATIGMACEGGFKEMVKEANHVFTKGPTFYWTFAILANVVTWQLSFAATSGMVYLTSGITGGICMTALLAMNVIGGVVAYGDVFGGVKIVSTVLCIWGFSSYTYGMYMKMKKEEKEKGEYSGVKTTEDSGEMEVEMGNVKDDVAAADDRA

SEQ ID NO: 40367 - DNA, 1180 bp, Arabidopsis thaliana
  misc_feature (1)..(1180): Ceres Seq. ID no. 12331259
  misc_feature (1)..(1180): Ortholog of  Ceres SEQ ID NO 12562983 as cited in SEQ ID NO 53309
  misc_feature (1)..(1180): Ortholog of  Ceres SEQ ID NO 14309224 as cited in SEQ ID NO 0
gcaagtctcatcagaagaggaagagaatcaatggcgagttgtttcagctacgtgtcttctcgtaacaaatgttaccaatacagcttctctcgtgctggtctccgatcatctacctccgatcttggcgacggcaccgtcttccactgttggatcccacttactcacatccacaccaagcccacgctcctcctccttcacgggatcggagctaacgctatgtggcagtgggaccgcttcatcgaccgttttatcccccgcttcaacgtctacgtaccggacctcatcttctttggcgactcctacaccactcgtcccgaccgctcagagtctttccaggcgacttgtgtcatgaaggcgatggatgcttacggtgttaggaccatgaccgtcgctggcctcagctacggtggttttgtggcctactcattggcggcgcagtttaaggagagggtagatcgagttgtgctaatatgcgccggtgttgctctggaggagaaagactcggaggatggtatgttcaaagtgaagagcccggaggaagcggcggctgttttgtttcctcagtctccttcgatgctccggcggcttctccagttatctttctataaaccgccgatttggatcccttcttgctttgccatggactacattcatgtaatgtgtaaagactatcttcaagaaaggaaagaacttgtggaagctctgcataagggtagaagattcgccaatcttccaaagataacacagccgacattgatgatatggggagaggaagatcaagtatttccagttgaattagctcatcgattgaaaagatatttaggggaagacagagcacaattggtgttactgaagaagacaggacatgcgattaatgaagagaaaccaaaagagatgtacaaacacatgaaatcttttctttgcactgacgcaatgattcctccaaatcaccagatcaatgctaagagactcatgttagcaaacttgatatccccagatcagcagatcaacaagtgatgttactgcagaaaaaaaaaaagtgttgttagaagacataatagttaatcatgttttagcttgtccctaaatgtgatttgtatcgttattgttaaagaaagacattgcttctaatagttggaattaagaatacttttatttcaagaaagtaatcatattcttt

SEQ ID NO: 40368 - protein, 338 aa, Arabidopsis thaliana
  peptide (1)..(338): Ceres Seq. ID no. 12331260
ASLIRRGRESMASCFSYVSSRNKCYQYSFSRAGLRSSTSDLGDGTVFHCWIPLTHIHTKPTLLLLHGIGANAMWQWDRFIDRFIPRFNVYVPDLIFFGDSYTTRPDRSESFQATCVMKAMDAYGVRTMTVAGLSYGGFVAYSLAAQFKERVDRVVLICAGVALEEKDSEDGMFKVKSPEEAAAVLFPQSPSMLRRLLQLSFYKPPIWIPSCFAMDYIHVMCKDYLQERKELVEALHKGRRFANLPKITQPTLMIWGEEDQVFPVELAHRLKRYLGEDRAQLVLLKKTGHAINEEKPKEMYKHMKSFLCTDAMIPPNHQINAKRLMLANLISPDQQINK

SEQ ID NO: 40369 - protein, 328 aa, Arabidopsis thaliana
  peptide (1)..(328): Ceres Seq. ID no. 12331261
MASCFSYVSSRNKCYQYSFSRAGLRSSTSDLGDGTVFHCWIPLTHIHTKPTLLLLHGIGANAMWQWDRFIDRFIPRFNVYVPDLIFFGDSYTTRPDRSESFQATCVMKAMDAYGVRTMTVAGLSYGGFVAYSLAAQFKERVDRVVLICAGVALEEKDSEDGMFKVKSPEEAAAVLFPQSPSMLRRLLQLSFYKPPIWIPSCFAMDYIHVMCKDYLQERKELVEALHKGRRFANLPKITQPTLMIWGEEDQVFPVELAHRLKRYLGEDRAQLVLLKKTGHAINEEKPKEMYKHMKSFLCTDAMIPPNHQINAKRLMLANLISPDQQINK

SEQ ID NO: 40370 - protein, 266 aa, Arabidopsis thaliana
  peptide (1)..(266): Ceres Seq. ID no. 12331262
MWQWDRFIDRFIPRFNVYVPDLIFFGDSYTTRPDRSESFQATCVMKAMDAYGVRTMTVAGLSYGGFVAYSLAAQFKERVDRVVLICAGVALEEKDSEDGMFKVKSPEEAAAVLFPQSPSMLRRLLQLSFYKPPIWIPSCFAMDYIHVMCKDYLQERKELVEALHKGRRFANLPKITQPTLMIWGEEDQVFPVELAHRLKRYLGEDRAQLVLLKKTGHAINEEKPKEMYKHMKSFLCTDAMIPPNHQINAKRLMLANLISPDQQINK

SEQ ID NO: 40371 - DNA, 1285 bp, Arabidopsis thaliana
  misc_feature (1)..(1285): Ceres Seq. ID no. 13499963
  misc_feature (1)..(1285): Ortholog of  Ceres SEQ ID NO 14311727 as cited in SEQ ID NO 51259
aaaagatccctctcgcctctcggtgtccttgtatacagtacttcagttttccgatctctttcagattctgttgccaaacttcatataaacttagtgagcggaactggatttggggagaatggcttcttctttagctcaatctagaatctcgaatctccagaatcatctttcacctcttgaagcaaacaacaagctcaggagtctggtcaagatttctccccaagtatctgaagccttgtctaatggacgtgctgttgtcgctcttgagtcaaccattatctcccatgggatgccttaccctcaaaatctgcaaacagcaaaagaggtggagtcaattgtgagagaaaatggagcaatccctgcaacaattgctatccttaatggagtaccttgcataggtctgagcgaggaagaactagaacgtcttgcatctctcggaaaaagtgtccaaaagacagcgggaagggacatagcaaatgttgtggctacaagaggaaacggtgcaactacagtctctgcaacgttgtttttcgcttcaatggttggcatccaagtttttgtgacgggcgggataggtggtgtccatagacatgccaaccattcgatggacatatcatctgatcttactgcacttgggaggactccaatagcagtgatatcagcaggcgttaaatcaatacttgatattccaaagactcttgaatatttggaaactcaagaagtgtatgttgctgcatacaagagcgatgagtttccagcatttttcacagaaaaaagtggctgtaaggcaccttcccgtgtaaatagccctgaagactgtgctagagtaatagatgcaaacatgaagctaaaccgtcaggcggggattctatttgccattccaattccgaaacaccattcagccgctggaaatcttatcgaatcagcaacacagcgtgctcttacagaagcaagggaacaaaacgttactggaaatgcagaaactccattcttacttgcacgggtaaatgagttaaccggaggcacatcacttgcagcaaacattgcgcttgtgaaaaacaatgcccttatcggttctcagattgcagtagccctttctcagctgatgtgagcttccttatcaatcccagactcaagctcaagcgcaagttattcaggttcatgattcaggacagatcaaagatgttttggattggtagttatcaatttatattggttatcaaagatttttctttagctaaagaaactcgttaacttattataacatgttatatattagatttat

SEQ ID NO: 40372 - protein, 330 aa, Arabidopsis thaliana
  peptide (1)..(330): Ceres Seq. ID no. 13499964
MASSLAQSRISNLQNHLSPLEANNKLRSLVKISPQVSEALSNGRAVVALESTIISHGMPYPQNLQTAKEVESIVRENGAIPATIAILNGVPCIGLSEEELERLASLGKSVQKTAGRDIANVVATRGNGATTVSATLFFASMVGIQVFVTGGIGGVHRHANHSMDISSDLTALGRTPIAVISAGVKSILDIPKTLEYLETQEVYVAAYKSDEFPAFFTEKSGCKAPSRVNSPEDCARVIDANMKLNRQAGILFAIPIPKHHSAAGNLIESATQRALTEAREQNVTGNAETPFLLARVNELTGGTSLAANIALVKNNALIGSQIAVALSQLM

SEQ ID NO: 40373 - protein, 273 aa, Arabidopsis thaliana
  peptide (1)..(273): Ceres Seq. ID no. 13499965
MPYPQNLQTAKEVESIVRENGAIPATIAILNGVPCIGLSEEELERLASLGKSVQKTAGRDIANVVATRGNGATTVSATLFFASMVGIQVFVTGGIGGVHRHANHSMDISSDLTALGRTPIAVISAGVKSILDIPKTLEYLETQEVYVAAYKSDEFPAFFTEKSGCKAPSRVNSPEDCARVIDANMKLNRQAGILFAIPIPKHHSAAGNLIESATQRALTEAREQNVTGNAETPFLLARVNELTGGTSLAANIALVKNNALIGSQIAVALSQLM

SEQ ID NO: 40374 - protein, 190 aa, Arabidopsis thaliana
  peptide (1)..(190): Ceres Seq. ID no. 13499966
MVGIQVFVTGGIGGVHRHANHSMDISSDLTALGRTPIAVISAGVKSILDIPKTLEYLETQEVYVAAYKSDEFPAFFTEKSGCKAPSRVNSPEDCARVIDANMKLNRQAGILFAIPIPKHHSAAGNLIESATQRALTEAREQNVTGNAETPFLLARVNELTGGTSLAANIALVKNNALIGSQIAVALSQLM

SEQ ID NO: 40375 - DNA, 1383 bp, Arabidopsis thaliana
  misc_feature (1)..(1383): Ceres Seq. ID no. 12370864
  misc_feature (1)..(1383): Ortholog of  Ceres SEQ ID NO 12636863 as cited in SEQ ID NO 0
attcaatgcacacaaacatttacccaaaatggcatcggcggttcagaaatcagcgttgctcttatgtggagactacatggaagcctatgaaacgattgttcctctctatgttctccaatcgtttggggttagcgttcattgcgtttcacccaaccgcaacgccggcgatcgctgcgttatgtctgcccacgatttcttgggcctcgagttgactttaaacgcaaacttcgatgacgtcactccggagaattacgacgtcatcatcatcccaggaggccgattcacggagcttctcagcgccgacgagaaatgcgttgacctcgtggcgcgattcgccgaatccaagaagctcatcttcactagctgtcatagccaggttatgctgatggcggccggaatcctcgccggtggtgtgaaatgcacggcgtttgaaagcataaagcctttgatcgaactctccggcggtgagtggtggcaacagcctgggattcagagcatgttcgagatcaccgattgcgttaaagacgggaatttcatgagtacggttggttggccaacgcttggtcacggcattaagcttttgcttgaatctcttggtggcaaagtctgtagcttggagaagaagcaagcttctgtgcttttcctcattggggactatgtagaagattatgggatcaatgtaccgtttagagcactacaagctttaggttgtaaagtggatgctgtgacaccgaacaagaagaagggagaagtgtgtgcaacggcggtttatgaccttgaggatggacggcagattcctgcagagaagcgtggacataacttctttgtgactgcatcgtgggatgatatatgtgtggatgattatgactgtgtagtggttccaggagggagatcacctgagctattggtgatgaatgaaaaggctgttgctttggttaagagttttgcagagaaagataaggtgtttgcagctattggacaggggaaattgcttcttgcagccactggtgttcttaaggggaagcgatgcgcgagtgggaaagggatgaaggtgatggtgaaggtggctggaggtgaggctgtgatggaaaagggatgtgtaactgatgggaaggttgtgacggcagcatcagccacggatctgcctgcctttttgtttgatttatcaactgctcttggtctaactgtcatgttctaaaattttgcaactaaaaaacataaaagatagtttgagtaataaaatcatatcttcaatttgctcaattgaagtgaaaagaaaaacaaaagagctcgattgtagtgtctctgctttcatgagttcatggcactcctaacaaactatattgtagctgcttcttggaaataaaagcatgtagtttggtg

SEQ ID NO: 40376 - protein, 398 aa, Arabidopsis thaliana
  peptide (1)..(398): Ceres Seq. ID no. 12370865
FNAHKHLPKMASAVQKSALLLCGDYMEAYETIVPLYVLQSFGVSVHCVSPNRNAGDRCVMSAHDFLGLELTLNANFDDVTPENYDVIIIPGGRFTELLSADEKCVDLVARFAESKKLIFTSCHSQVMLMAAGILAGGVKCTAFESIKPLIELSGGEWWQQPGIQSMFEITDCVKDGNFMSTVGWPTLGHGIKLLLESLGGKVCSLEKKQASVLFLIGDYVEDYGINVPFRALQALGCKVDAVTPNKKKGEVCATAVYDLEDGRQIPAEKRGHNFFVTASWDDICVDDYDCVVVPGGRSPELLVMNEKAVALVKSFAEKDKVFAAIGQGKLLLAATGVLKGKRCASGKGMKVMVKVAGGEAVMEKGCVTDGKVVTAASATDLPAFLFDLSTALGLTVMF

SEQ ID NO: 40377 - protein, 389 aa, Arabidopsis thaliana
  peptide (1)..(389): Ceres Seq. ID no. 12370866
MASAVQKSALLLCGDYMEAYETIVPLYVLQSFGVSVHCVSPNRNAGDRCVMSAHDFLGLELTLNANFDDVTPENYDVIIIPGGRFTELLSADEKCVDLVARFAESKKLIFTSCHSQVMLMAAGILAGGVKCTAFESIKPLIELSGGEWWQQPGIQSMFEITDCVKDGNFMSTVGWPTLGHGIKLLLESLGGKVCSLEKKQASVLFLIGDYVEDYGINVPFRALQALGCKVDAVTPNKKKGEVCATAVYDLEDGRQIPAEKRGHNFFVTASWDDICVDDYDCVVVPGGRSPELLVMNEKAVALVKSFAEKDKVFAAIGQGKLLLAATGVLKGKRCASGKGMKVMVKVAGGEAVMEKGCVTDGKVVTAASATDLPAFLFDLSTALGLTVMF

SEQ ID NO: 40378 - protein, 373 aa, Arabidopsis thaliana
  peptide (1)..(373): Ceres Seq. ID no. 12370867
MEAYETIVPLYVLQSFGVSVHCVSPNRNAGDRCVMSAHDFLGLELTLNANFDDVTPENYDVIIIPGGRFTELLSADEKCVDLVARFAESKKLIFTSCHSQVMLMAAGILAGGVKCTAFESIKPLIELSGGEWWQQPGIQSMFEITDCVKDGNFMSTVGWPTLGHGIKLLLESLGGKVCSLEKKQASVLFLIGDYVEDYGINVPFRALQALGCKVDAVTPNKKKGEVCATAVYDLEDGRQIPAEKRGHNFFVTASWDDICVDDYDCVVVPGGRSPELLVMNEKAVALVKSFAEKDKVFAAIGQGKLLLAATGVLKGKRCASGKGMKVMVKVAGGEAVMEKGCVTDGKVVTAASATDLPAFLFDLSTALGLTVMF

SEQ ID NO: 40379 - DNA, 1903 bp, Arabidopsis thaliana
  misc_feature (1)..(1903): Ceres Seq. ID no. 12336176
  misc_feature (1)..(1903): Ortholog of  Ceres SEQ ID NO 13596319 as cited in SEQ ID NO 67933
acacaaaccgacccgacccgaatctggccggtgagaaaatggaggtccaaagcagcagcaacaatggtggtcactcttctttctccagtctccgcgtctacctcaactctctttccgcgacgccttctcgcttatcccgccgcgctatttccgtctccacctcttccgacgagatgagtcgcgtccgcgccgtctccggcgaacagatgcgccgtactctccggtggtacgatctcattggactcggaatcgggggaatggtcggcgccggtgtctttgtcaccaccggccgtgctagtcgtctcgacgccggtccttcaattgtcgtctcttacgccatcgccgggctctgcgctctcctctccgctttctgttacaccgaattcgccgtccatctcccggtcgccggcggtgccttcagctacatccgtatcacattcggtgaatttccagcatttttcaccggagcaaatcttgtaatggattacgtaatgtcaaacgcggccgtttcgagaagcttcaccgcttatttaggaacagctttcgggatctcaacttccaagtggcgattcgtcgtctccggtttaccgaaaggattcaacgagattgatccagtcgcagttctcgtcgtcctcgtaatcacagtcatcatctgttgcagtacaagagagagttccaaagtgaacatgataatgactgcatttcacatcgcattcatattcttcgtgatcgtgatgggattcataaaaggagattcaaagaatctatcctcaccggcgaatccagagcacccctcgggattttttccgttcggcgcggcgggagttttcaacggagctgccatggtttacttaagctacataggatacgacgccgtttcaaccatggcggaagaagttgaaaatccggtcaaagatatccccgtcggtgtttccggctccgtcgcaatcgtcaccgttctttactgtctcatggcagtctctatgtcaatgcttctgccatacgatctgatagatccggaggcgccgttttccgcggcgttcagaggatcgaacggctgggaatgggtgacgaaagtggtggggataggagcaagctttgggatattaacatcacttttggtggcaatgttaggtcaggctcgctacatgtgtgtcatcggacggtccagagtggtccccttttggttcgctaagattcatcccaaaacatctacgccagtcaacgcctccacttttcttggcattttcacggcggctcttgcgcttttcaccgacctaaacgtcctcctaaacctcgtatccattggaacactatttgtcttctacatggtcgcaaacgctctcatcttcagacgttacgtcccggttggacccaccaagccgtggcccacactctgcttcctcacactattctccataacctctctcgtcttcaccctcatctggaaacttgtgccggaaggtaagcctaaagctttcatgctcggtgccagtgcggtggtggctatagccatcgtgctgagctttcagtgcgtggttccccaggctaggaaacctgagttgtggggagtcccgttcatgccgtggaccccgtgcgtgtcgatattcttgaacatttttttgcttggttcgttggacgcaccctcttacgtccggtttggattcttctccggtttgatcgtgctcgtgtatttgttttatggcgttcatgcgagttctgatgctgaagcgaatggatcttttggtgtgaaagatggacaagtcatgaaagagctaattgaagtgtgaaaagtatttatttagtttagttttctaaagcatcatgaaccaaaatgtaattaaactctctaattttttttctacatgagggggtttgaaatattaatgagaaaatattaaat

SEQ ID NO: 40380 - protein, 595 aa, Arabidopsis thaliana
  peptide (1)..(595): Ceres Seq. ID no. 12336177
TNRPDPNLAGEKMEVQSSSNNGGHSSFSSLRVYLNSLSATPSRLSRRAISVSTSSDEMSRVRAVSGEQMRRTLRWYDLIGLGIGGMVGAGVFVTTGRASRLDAGPSIVVSYAIAGLCALLSAFCYTEFAVHLPVAGGAFSYIRITFGEFPAFFTGANLVMDYVMSNAAVSRSFTAYLGTAFGISTSKWRFVVSGLPKGFNEIDPVAVLVVLVITVIICCSTRESSKVNMIMTAFHIAFIFFVIVMGFIKGDSKNLSSPANPEHPSGFFPFGAAGVFNGAAMVYLSYIGYDAVSTMAEEVENPVKDIPVGVSGSVAIVTVLYCLMAVSMSMLLPYDLIDPEAPFSAAFRGSNGWEWVTKVVGIGASFGILTSLLVAMLGQARYMCVIGRSRVVPFWFAKIHPKTSTPVNASTFLGIFTAALALFTDLNVLLNLVSIGTLFVFYMVANALIFRRYVPVGPTKPWPTLCFLTLFSITSLVFTLIWKLVPEGKPKAFMLGASAVVAIAIVLSFQCVVPQARKPELWGVPFMPWTPCVSIFLNIFLLGSLDAPSYVRFGFFSGLIVLVYLFYGVHASSDAEANGSFGVKDGQVMKELIEV

SEQ ID NO: 40381 - protein, 583 aa, Arabidopsis thaliana
  peptide (1)..(583): Ceres Seq. ID no. 12336178
MEVQSSSNNGGHSSFSSLRVYLNSLSATPSRLSRRAISVSTSSDEMSRVRAVSGEQMRRTLRWYDLIGLGIGGMVGAGVFVTTGRASRLDAGPSIVVSYAIAGLCALLSAFCYTEFAVHLPVAGGAFSYIRITFGEFPAFFTGANLVMDYVMSNAAVSRSFTAYLGTAFGISTSKWRFVVSGLPKGFNEIDPVAVLVVLVITVIICCSTRESSKVNMIMTAFHIAFIFFVIVMGFIKGDSKNLSSPANPEHPSGFFPFGAAGVFNGAAMVYLSYIGYDAVSTMAEEVENPVKDIPVGVSGSVAIVTVLYCLMAVSMSMLLPYDLIDPEAPFSAAFRGSNGWEWVTKVVGIGASFGILTSLLVAMLGQARYMCVIGRSRVVPFWFAKIHPKTSTPVNASTFLGIFTAALALFTDLNVLLNLVSIGTLFVFYMVANALIFRRYVPVGPTKPWPTLCFLTLFSITSLVFTLIWKLVPEGKPKAFMLGASAVVAIAIVLSFQCVVPQARKPELWGVPFMPWTPCVSIFLNIFLLGSLDAPSYVRFGFFSGLIVLVYLFYGVHASSDAEANGSFGVKDGQVMKELIEV

SEQ ID NO: 40382 - protein, 538 aa, Arabidopsis thaliana
  peptide (1)..(538): Ceres Seq. ID no. 12336179
MSRVRAVSGEQMRRTLRWYDLIGLGIGGMVGAGVFVTTGRASRLDAGPSIVVSYAIAGLCALLSAFCYTEFAVHLPVAGGAFSYIRITFGEFPAFFTGANLVMDYVMSNAAVSRSFTAYLGTAFGISTSKWRFVVSGLPKGFNEIDPVAVLVVLVITVIICCSTRESSKVNMIMTAFHIAFIFFVIVMGFIKGDSKNLSSPANPEHPSGFFPFGAAGVFNGAAMVYLSYIGYDAVSTMAEEVENPVKDIPVGVSGSVAIVTVLYCLMAVSMSMLLPYDLIDPEAPFSAAFRGSNGWEWVTKVVGIGASFGILTSLLVAMLGQARYMCVIGRSRVVPFWFAKIHPKTSTPVNASTFLGIFTAALALFTDLNVLLNLVSIGTLFVFYMVANALIFRRYVPVGPTKPWPTLCFLTLFSITSLVFTLIWKLVPEGKPKAFMLGASAVVAIAIVLSFQCVVPQARKPELWGVPFMPWTPCVSIFLNIFLLGSLDAPSYVRFGFFSGLIVLVYLFYGVHASSDAEANGSFGVKDGQVMKELIEV

SEQ ID NO: 40383 - DNA, 1222 bp, Arabidopsis thaliana
  misc_feature (1)..(1222): Ceres Seq. ID no. 13488553
  misc_feature (1)..(1222): Ortholog of  Ceres SEQ ID NO 14308120 as cited in SEQ ID NO 58423
  misc_feature (1)..(1222): Ortholog of  Ceres SEQ ID NO 14307004 as cited in SEQ ID NO 59551
  misc_feature (1)..(1222): Ortholog of  Ceres SEQ ID NO 13661504 as cited in SEQ ID NO 61294
  misc_feature (1)..(1222): Ortholog of  Ceres SEQ ID NO 12617197 as cited in SEQ ID NO 63406
  misc_feature (1)..(1222): Ortholog of  Ceres SEQ ID NO 13597804 as cited in SEQ ID NO 64182
  misc_feature (1)..(1222): Ortholog of  Ceres SEQ ID NO 13598565 as cited in SEQ ID NO 65250
  misc_feature (1)..(1222): Ortholog of  Ceres SEQ ID NO 13598597 as cited in SEQ ID NO 65496
  misc_feature (1)..(1222): Ortholog of  Ceres SEQ ID NO 13596284 as cited in SEQ ID NO 68273
  misc_feature (1)..(1222): Ortholog of  Ceres SEQ ID NO 13596227 as cited in SEQ ID NO 68750
  misc_feature (1)..(1222): Ortholog of  Ceres SEQ ID NO 15178902 as cited in SEQ ID NO 0
aattttttacgtgtaagaaaaaaacaaaggatccttttttactggaaagatgtttttttttttcttatcttctgagataaattgcgatagagagagagaacaaaaaaattctcagtgagcgcttattgatcaacaatggcgaaagagacagtgtgtgtaaccggagctaatggtttcatcggatcttggataatccgaacgttaattgagaaaggatatactaaaatccacgcttcgatttacccaggatccgacccgactcatcttctgcaactacccggatccgattctaagatcaagatctttgaagcggatctcttagactctgatgcaatctccagagctattgatggatgtgcgggagtgttccacgtggcgtcaccttgtacgttggatccaccggtagatccagagaaggagctggtcgaaccggcggttaagggaacgatcaatgtgttggaagctgctaagaggtttaatgtgagacgcgtggtgatcacgtcatctatctccgcattggttcctaaccctaattggccggaaaaagttcccgtcgatgagtcgtcgtggtccgatcttgatttttgcaagtcgaggcagaaatggtatccaatttcgaagacattagctgagaaagcagcttgggaattttcggagaagcatggaaccaacattgtgacgattcatccatcaacatgtctcggaccgcttctgcaaccgaacctaaacgcaagctgtgctgttctgctacagcttttacaaggctcgaccgagacgcaagagcatcactggctcggtgtggttcacgtgaaagatgtggctaaaggtcatgtgatgctattcgaaacacctgacgcttctggacggtttttatgcactaatgggatttatcagttcagtgagtttgctgctcttgtgtctaagctcttccctgagtttgctgttcacaagtttgataaagagactcaacctgggcttacgtcgtgtaatgatgcggctaagcgattgattgagctcgggctggtttttactgcggttgaagatgcggttaaggagacggtccagagtcttagagacaaaggcttcctctgagaatgtatgatatatctttgcaaattttaaactctgtgagtaagatgtaactggtttatatgataaaagtagaggaactaagatgtaactggtttatatgatacatgtacgagtacaaggtattactctc

SEQ ID NO: 40384 - protein, 318 aa, Arabidopsis thaliana
  peptide (1)..(318): Ceres Seq. ID no. 13488554
MAKETVCVTGANGFIGSWIIRTLIEKGYTKIHASIYPGSDPTHLLQLPGSDSKIKIFEADLLDSDAISRAIDGCAGVFHVASPCTLDPPVDPEKELVEPAVKGTINVLEAAKRFNVRRVVITSSISALVPNPNWPEKVPVDESSWSDLDFCKSRQKWYPISKTLAEKAAWEFSEKHGTNIVTIHPSTCLGPLLQPNLNASCAVLLQLLQGSTETQEHHWLGVVHVKDVAKGHVMLFETPDASGRFLCTNGIYQFSEFAALVSKLFPEFAVHKFDKETQPGLTSCNDAAKRLIELGLVFTAVEDAVKETVQSLRDKGFL

SEQ ID NO: 40385 - DNA, 1801 bp, Arabidopsis thaliana
  misc_feature (1)..(1801): Ceres Seq. ID no. 13499856
  misc_feature (1)..(1801): Ortholog of  Ceres SEQ ID NO 12625335 as cited in SEQ ID NO 63326
ccgctttctctctctgtctttccttgttcaaccctcgagagattacggatagtgaaagagaagctacaaaatttcccaatttatcaaaaaatagaaatttcttacttttttcaaaattcatttctccccaaaaaaaatatcttgtgaaaactgcaactgtgatccatggcggaggatatggctgccgacgaagttacggctcctcctcgtaaggttcttatcatctccgctggtgctagccactccgtcgctcttctctctggtgacattgtttgttcttggggtcgaggagaggatggacagttaggtcatggcgatgcagaggatcgaccttctccgactcagcttagcgctttagatggccaccaaattgtttccgttacctgtggtgctgatcacactgttgcttattcacaatcaggcatggaagtctacagttggggatggggtgattttgggagattaggccatggtaactcaagcgacttgtttactccgctaccaatcaaagcattgcacggtattcggatcaagcagattgcttgtggggatagtcattgtttggctgtcactatggaaggagaggtccagagttggggccgcaaccagaatggtcaacttggtctgggggacaccgaagattctctagtgcctcagaagattcaagcctttgagggaataccaatcaaaatggttgctgctggtgcagaacacactgctgcagttacagaagatggtgacctctatggatggggctggggaagatacggaaatttgggattaggtgaccggactgaccgcttagttcctgaaagagttacctctactggtggtgagaaaatgtcaatggttgcttgtggatggcggcacacaatatcagtttcctactctggagcattgtatacttatggatggagcaaatatggacagctaggacatggagacttggaggatcaccttattcctcacaaactggaagcactgagcaacagttttatctcccagatttcgggaggttggagacatacaatggcattgacttcagatggaaaactatatggatggggttggaataagtttggacaagtaggagtcggcaataatttagatcagtgttctcctgtgcaagtgcgatttcccgatgatcagaaagtagttcaagtctcatgtggatggagacataccttggctgtcactgaaagaaataacgtgtttgcttggggtagaggtacaaatggacagctcggcattggagagtcggttgacaggaactttcccaagattatagaggcactgagcgtcgatggagcaagtggacaacatatagaatcttctaatatcgatccatcttcagggaaaagctgggtgtcgcctgcagagagatatgcagttgttcctgatgaaacgggcctaacggatggttcaagcaaaggtaatggaggtgatatcagtgttccacaaactgatgtcaagcgtgtacgaatttgagcctgagtcaattccgttttttttttacttccggttcttccgttggattcgaaggtttttcagtgatctcttttgggttgaggtttgtactaagagtacgtctgtctagtttgggattgtactttttgttgttgttgttagtttgtaacttgtgatgcttccctccccctagctctcttattacatgggcgttgtaaactgtgtgtactactactactagtctctagggtatgtactttttttttcctcaccataataataccttctggttctatatctttcatttcttaaaaagttttctgttttttccttc

SEQ ID NO: 40386 - protein, 440 aa, Arabidopsis thaliana
  peptide (1)..(440): Ceres Seq. ID no. 13499857
MAEDMAADEVTAPPRKVLIISAGASHSVALLSGDIVCSWGRGEDGQLGHGDAEDRPSPTQLSALDGHQIVSVTCGADHTVAYSQSGMEVYSWGWGDFGRLGHGNSSDLFTPLPIKALHGIRIKQIACGDSHCLAVTMEGEVQSWGRNQNGQLGLGDTEDSLVPQKIQAFEGIPIKMVAAGAEHTAAVTEDGDLYGWGWGRYGNLGLGDRTDRLVPERVTSTGGEKMSMVACGWRHTISVSYSGALYTYGWSKYGQLGHGDLEDHLIPHKLEALSNSFISQISGGWRHTMALTSDGKLYGWGWNKFGQVGVGNNLDQCSPVQVRFPDDQKVVQVSCGWRHTLAVTERNNVFAWGRGTNGQLGIGESVDRNFPKIIEALSVDGASGQHIESSNIDPSSGKSWVSPAERYAVVPDETGLTDGSSKGNGGDISVPQTDVKRVRI

SEQ ID NO: 40387 - protein, 436 aa, Arabidopsis thaliana
  peptide (1)..(436): Ceres Seq. ID no. 13499858
MAADEVTAPPRKVLIISAGASHSVALLSGDIVCSWGRGEDGQLGHGDAEDRPSPTQLSALDGHQIVSVTCGADHTVAYSQSGMEVYSWGWGDFGRLGHGNSSDLFTPLPIKALHGIRIKQIACGDSHCLAVTMEGEVQSWGRNQNGQLGLGDTEDSLVPQKIQAFEGIPIKMVAAGAEHTAAVTEDGDLYGWGWGRYGNLGLGDRTDRLVPERVTSTGGEKMSMVACGWRHTISVSYSGALYTYGWSKYGQLGHGDLEDHLIPHKLEALSNSFISQISGGWRHTMALTSDGKLYGWGWNKFGQVGVGNNLDQCSPVQVRFPDDQKVVQVSCGWRHTLAVTERNNVFAWGRGTNGQLGIGESVDRNFPKIIEALSVDGASGQHIESSNIDPSSGKSWVSPAERYAVVPDETGLTDGSSKGNGGDISVPQTDVKRVRI

SEQ ID NO: 40388 - protein, 354 aa, Arabidopsis thaliana
  peptide (1)..(354): Ceres Seq. ID no. 13499859
MEVYSWGWGDFGRLGHGNSSDLFTPLPIKALHGIRIKQIACGDSHCLAVTMEGEVQSWGRNQNGQLGLGDTEDSLVPQKIQAFEGIPIKMVAAGAEHTAAVTEDGDLYGWGWGRYGNLGLGDRTDRLVPERVTSTGGEKMSMVACGWRHTISVSYSGALYTYGWSKYGQLGHGDLEDHLIPHKLEALSNSFISQISGGWRHTMALTSDGKLYGWGWNKFGQVGVGNNLDQCSPVQVRFPDDQKVVQVSCGWRHTLAVTERNNVFAWGRGTNGQLGIGESVDRNFPKIIEALSVDGASGQHIESSNIDPSSGKSWVSPAERYAVVPDETGLTDGSSKGNGGDISVPQTDVKRVRI

SEQ ID NO: 40389 - DNA, 1303 bp, Arabidopsis thaliana
  misc_feature (1)..(1303): Ceres Seq. ID no. 13488578
  misc_feature (1)..(1303): Ortholog of  Ceres SEQ ID NO 13597533 as cited in SEQ ID NO 64942
attcattctcctttgtgttttctctttttggagattttaacttcagtttttgtctaattagggttttaatttaaattggagggaaattttagatgcagtgacgtagtttttgggtaaattttcgtcggattctgaattgtctccggcgacatggcttctaatctccccatgagccctcaattggagcagatccatggcgaaatccgtgaccatttccgagccctcgcgaatggtttccagaggttggataagattaaggattcaactagacaaagcaaacaacttgaagaacttactgacaagatgagagagtgtaaaagattggtcaaagagttcgaccgtgaactcaaggatgaggaagctagaaattctcctgaagtaaataagcaattgaacgatgagaaacaatctatgatcaaggagctcaattcttacgttgctctaagaaaaacgtatatgagtacccttggcaacaagaaagttgagctttttgatatgggagctggagttagtggcgaacctacagctgaggaaaatgttcaagtggcttcatctatgtcaaaccaggagcttgttgatgctggaatgaaaagaatggatgagactgatcaggccattgagcgctcaaaacaggttgtagaacaaacactcgaagttggaactcaaactgcagctaatttaaagggacagacggatcaaatgggacgcgtagttaaccacttggacactattcaattctcaatcaagaaggcctcccagctggtgaaagagatagggagacaggtggctaccgataaatgcataatggggttcctgtttctcattgtatgcggtgtagtagccataatcatagtgaagatcgtgaatccgaataacaaagacattagggacatcccaggattagctcctccagcgcaatcgaggaagctattgtacttgaggaatcaagactacatgtgagaatataaatctctatttgtatatttattcacgaggaatgaggaaattgcatcttgaggttcgatatttccttctaatttgttaacaatccatttcatggatgttagagagagggtttgtgcttgttggcattgtgtgctttgatagttgacgaggcttggggatgtttatcttcatgttcttttacttgttttaacccattcgtttgaatctgggtttgattggagggtgtgtatattttcagcttttgtctctatttctttttccttcttcttttttgtagcaacttatcacttcttttgtataaaattcagaccaatgttatactctctcacgttttcat

SEQ ID NO: 40390 - protein, 269 aa, Arabidopsis thaliana
  peptide (1)..(269): Ceres Seq. ID no. 13488579
MASNLPMSPQLEQIHGEIRDHFRALANGFQRLDKIKDSTRQSKQLEELTDKMRECKRLVKEFDRELKDEEARNSPEVNKQLNDEKQSMIKELNSYVALRKTYMSTLGNKKVELFDMGAGVSGEPTAEENVQVASSMSNQELVDAGMKRMDETDQAIERSKQVVEQTLEVGTQTAANLKGQTDQMGRVVNHLDTIQFSIKKASQLVKEIGRQVATDKCIMGFLFLIVCGVVAIIIVKIVNPNNKDIRDIPGLAPPAQSRKLLYLRNQDYM

SEQ ID NO: 40391 - protein, 263 aa, Arabidopsis thaliana
  peptide (1)..(263): Ceres Seq. ID no. 13488580
MSPQLEQIHGEIRDHFRALANGFQRLDKIKDSTRQSKQLEELTDKMRECKRLVKEFDRELKDEEARNSPEVNKQLNDEKQSMIKELNSYVALRKTYMSTLGNKKVELFDMGAGVSGEPTAEENVQVASSMSNQELVDAGMKRMDETDQAIERSKQVVEQTLEVGTQTAANLKGQTDQMGRVVNHLDTIQFSIKKASQLVKEIGRQVATDKCIMGFLFLIVCGVVAIIIVKIVNPNNKDIRDIPGLAPPAQSRKLLYLRNQDYM

SEQ ID NO: 40392 - protein, 218 aa, Arabidopsis thaliana
  peptide (1)..(218): Ceres Seq. ID no. 13488581
MRECKRLVKEFDRELKDEEARNSPEVNKQLNDEKQSMIKELNSYVALRKTYMSTLGNKKVELFDMGAGVSGEPTAEENVQVASSMSNQELVDAGMKRMDETDQAIERSKQVVEQTLEVGTQTAANLKGQTDQMGRVVNHLDTIQFSIKKASQLVKEIGRQVATDKCIMGFLFLIVCGVVAIIIVKIVNPNNKDIRDIPGLAPPAQSRKLLYLRNQDYM

SEQ ID NO: 40393 - DNA, 1515 bp, Arabidopsis thaliana
  misc_feature (1)..(1515): Ceres Seq. ID no. 13499906
  misc_feature (1)..(1515): Ortholog of  Ceres SEQ ID NO 13497992 as cited in SEQ ID NO 58175
aagatcacggaaccacgccaggatccttccgccgtcggcgacgtcgctcctgacgtcacctcaacacgtaaaccacacaattaagtttattcctctctctctccgtcaacttaaaccggtgtttgtatataaatctgattgatatagaaatcgaaactcaaattggagaacattcgagaagctttggatttttgaatcacgaagacatggaaaaaacagaatctgtatcaggaaaggggaagagagtgattgttatcggcggcggaatcgccggctctctcgcttcgaaatttcttcaattcgattccgatctcaccctcattgatccgaaggagtattttgagattatttgggcaagtttaaggtcaatggtagagccagcttttgctgaaagatcggtgataaaccacaagaagtatttacaaaatggtcgtgttgtgacttctccagcggttaatatcacagacaccgatgttttgaccgcggatggtcttgtctttgggtatgattatcttgttattgctactggtcacaatgatgtgcttcctaaaactaggcaagagaagttatctcaataccaaacagaacatgagaagatcaagtcatctgagtcgattctgattgttggtggaggtccgtcgggtgtggagctcgctgcggagatagctgtcgatttccctgagaaaaaggttactatagtacacaatggaccgagattgctggaatttgttggtcagaaagctgcagacaaggcattagactggatgaagtccaagagagttgaagtgatattgaaccaaagggttgatttgagttcagcttcagatgggagtaaaacgtaccgaacatcgggtggagagacgatacacgcggattgtcacttcctctgtactggaaaacctttgtcttcagaatggctaaaaggaactgttctgaaagataacttggatggcaaaggaaggcttatggtcgatgagtacttgagagttaagggtcgcaagaatgtattcgctattggtgatattactgatgtcccggagatgaaacaaggctacattgctgagaaacacgcctctgtagctacaaagaacataaagttgttgatgtctggtgggaacgagaagaagatgtcgacttacaagcctggtccggacattgccataatatctttaggaagaaaggactcggttgctcagttcccattcatgacagtctcgggttgcatacctggtttgatcaaatctaaggatctgtttgtcgggaagacgaggaaggcaagaggtctggatcctaaccttgtggagccttgagtgattgtgcttatcttcatgatgagattcttcttgtgcaggcgcatttcgtcgtttatttcatcacacgtttgttgtatgttgatttggtccactctcctgtttgtggattctcagagtggagtgttgtttgcttttgttgtaacatgatttgtaaagaatctgttcgatttctctaaaaggaaccaaagttgttcaataagcc

SEQ ID NO: 40394 - protein, 367 aa, Arabidopsis thaliana
  peptide (1)..(367): Ceres Seq. ID no. 13499907
MEKTESVSGKGKRVIVIGGGIAGSLASKFLQFDSDLTLIDPKEYFEIIWASLRSMVEPAFAERSVINHKKYLQNGRVVTSPAVNITDTDVLTADGLVFGYDYLVIATGHNDVLPKTRQEKLSQYQTEHEKIKSSESILIVGGGPSGVELAAEIAVDFPEKKVTIVHNGPRLLEFVGQKAADKALDWMKSKRVEVILNQRVDLSSASDGSKTYRTSGGETIHADCHFLCTGKPLSSEWLKGTVLKDNLDGKGRLMVDEYLRVKGRKNVFAIGDITDVPEMKQGYIAEKHASVATKNIKLLMSGGNEKKMSTYKPGPDIAIISLGRKDSVAQFPFMTVSGCIPGLIKSKDLFVGKTRKARGLDPNLVEP

SEQ ID NO: 40395 - protein, 313 aa, Arabidopsis thaliana
  peptide (1)..(313): Ceres Seq. ID no. 13499908
MVEPAFAERSVINHKKYLQNGRVVTSPAVNITDTDVLTADGLVFGYDYLVIATGHNDVLPKTRQEKLSQYQTEHEKIKSSESILIVGGGPSGVELAAEIAVDFPEKKVTIVHNGPRLLEFVGQKAADKALDWMKSKRVEVILNQRVDLSSASDGSKTYRTSGGETIHADCHFLCTGKPLSSEWLKGTVLKDNLDGKGRLMVDEYLRVKGRKNVFAIGDITDVPEMKQGYIAEKHASVATKNIKLLMSGGNEKKMSTYKPGPDIAIISLGRKDSVAQFPFMTVSGCIPGLIKSKDLFVGKTRKARGLDPNLVEP

SEQ ID NO: 40396 - DNA, 1596 bp, Arabidopsis thaliana
  misc_feature (1)..(1596): Ceres Seq. ID no. 12330270
  misc_feature (1)..(1596): Ortholog of  Ceres SEQ ID NO 15174752 as cited in SEQ ID NO 53279
  misc_feature (1)..(1596): Ortholog of  Ceres SEQ ID NO 14308389 as cited in SEQ ID NO 55226
  misc_feature (1)..(1596): Ortholog of  Ceres SEQ ID NO 15226087 as cited in SEQ ID NO 58655
  misc_feature (1)..(1596): Ortholog of  Ceres SEQ ID NO 13597162 as cited in SEQ ID NO 63955
  misc_feature (1)..(1596): Ortholog of  Ceres SEQ ID NO 14308049 as cited in SEQ ID NO 66203
  misc_feature (1)..(1596): Ortholog of  Ceres SEQ ID NO 14313292 as cited in SEQ ID NO 67393
  misc_feature (1)..(1596): Ortholog of  Ceres SEQ ID NO 14313567 as cited in SEQ ID NO 68074
aagatcaaactcaaaacaaaatttgtttgttcgtttgatctttcttaaaaatatgaaaattaacatcagagattccaccatggtccggcctgccaccgagacaccaatcactaatctttggaactccaacgttgatcttgtcatccccagattccatacccctagtgtctacttctacagacccaccggcgcttccaatttctttgaccctcaggtcatgaaggaagctctttccaaagcccttgtccctttttaccctatggctggtcgcttgaagagagacgatgatggtcgtattgagatcgattgtaacggtgccggtgttctcttcgttgttgctgatactccttctgttatcgatgattttggtgattttgctcctacccttaatctccgtcagcttattcccgaagttgatcactccaccggcattcactctttcccgcttctcgttttgcaggtgactttctttaaatgtgggggagcttcacttggggttgggatgcaacatcacgcggcagatggtttctctggtcttcattttatcaacacatggtctgatatggctcgtggtcttgacctaaccattccacctttcattgatcgaacactcctccgagctagggacccgccacagcctgcttttcatcatgttgaatatcagcctgcaccaagtatgaagatccctcttgatccatccaaatcaggacctgagaataccaccgtgtctatattcaaattaacacgagaccagcttgttgctctcaaagcgaaatccaaggaggatgggaacactgtcagctatagctcatatgagatgttggcaggccatgtgtggagatcagtgggaaaggcgcgagggcttccaaacgaccaagagacgaaactgtacattgcaactgatggaaggtctagactgcgtccgcagctgcctcctggttactttgggaatgtgatattcactgcaacaccattggctgttgcaggggatctgctatctaaaccaacatggtatgctgcaggacagattcatgatttcttggttcgtatggatgataactatctgaggtcagctcttgactacctggagatgcagcctgatctgtcagcccttgtccgcggtgcacatacctacaagtgtccaaatttaggaatcacaagctgggtcagattacctatttatgatgcagactttggttggggtcgtcctatctttatgggacctggtggaattccgtatgagggtttgtcgtttgtgctaccaagtcctactaatgatggcagcttatccgttgccattgccctccaatctgaacacatgaaactgtttgagaagtttttgtttgagatatgagagcgttaagccctcgtttttccctcagtaaatttgggcaaatttgcttcttgtcatcatcctgtgttttagagggtacaacaaatcataaggtgtgcttatggtctgtaactttggactatgtcgtataggaacttttgctttatgttaatacagatgataagtgttgttctatgacacatgccgtgattgctttgtgtttgatttgttatatccaccatgctgtatgattttcagcttcc

SEQ ID NO: 40397 - protein, 450 aa, Arabidopsis thaliana
  peptide (1)..(450): Ceres Seq. ID no. 12330271
RSNSKQNLFVRLIFLKNMKINIRDSTMVRPATETPITNLWNSNVDLVIPRFHTPSVYFYRPTGASNFFDPQVMKEALSKALVPFYPMAGRLKRDDDGRIEIDCNGAGVLFVVADTPSVIDDFGDFAPTLNLRQLIPEVDHSTGIHSFPLLVLQVTFFKCGGASLGVGMQHHAADGFSGLHFINTWSDMARGLDLTIPPFIDRTLLRARDPPQPAFHHVEYQPAPSMKIPLDPSKSGPENTTVSIFKLTRDQLVALKAKSKEDGNTVSYSSYEMLAGHVWRSVGKARGLPNDQETKLYIATDGRSRLRPQLPPGYFGNVIFTATPLAVAGDLLSKPTWYAAGQIHDFLVRMDDNYLRSALDYLEMQPDLSALVRGAHTYKCPNLGITSWVRLPIYDADFGWGRPIFMGPGGIPYEGLSFVLPSPTNDGSLSVAIALQSEHMKLFEKFLFEI

SEQ ID NO: 40398 - protein, 433 aa, Arabidopsis thaliana
  peptide (1)..(433): Ceres Seq. ID no. 12330272
MKINIRDSTMVRPATETPITNLWNSNVDLVIPRFHTPSVYFYRPTGASNFFDPQVMKEALSKALVPFYPMAGRLKRDDDGRIEIDCNGAGVLFVVADTPSVIDDFGDFAPTLNLRQLIPEVDHSTGIHSFPLLVLQVTFFKCGGASLGVGMQHHAADGFSGLHFINTWSDMARGLDLTIPPFIDRTLLRARDPPQPAFHHVEYQPAPSMKIPLDPSKSGPENTTVSIFKLTRDQLVALKAKSKEDGNTVSYSSYEMLAGHVWRSVGKARGLPNDQETKLYIATDGRSRLRPQLPPGYFGNVIFTATPLAVAGDLLSKPTWYAAGQIHDFLVRMDDNYLRSALDYLEMQPDLSALVRGAHTYKCPNLGITSWVRLPIYDADFGWGRPIFMGPGGIPYEGLSFVLPSPTNDGSLSVAIALQSEHMKLFEKFLFEI

SEQ ID NO: 40399 - protein, 424 aa, Arabidopsis thaliana
  peptide (1)..(424): Ceres Seq. ID no. 12330273
MVRPATETPITNLWNSNVDLVIPRFHTPSVYFYRPTGASNFFDPQVMKEALSKALVPFYPMAGRLKRDDDGRIEIDCNGAGVLFVVADTPSVIDDFGDFAPTLNLRQLIPEVDHSTGIHSFPLLVLQVTFFKCGGASLGVGMQHHAADGFSGLHFINTWSDMARGLDLTIPPFIDRTLLRARDPPQPAFHHVEYQPAPSMKIPLDPSKSGPENTTVSIFKLTRDQLVALKAKSKEDGNTVSYSSYEMLAGHVWRSVGKARGLPNDQETKLYIATDGRSRLRPQLPPGYFGNVIFTATPLAVAGDLLSKPTWYAAGQIHDFLVRMDDNYLRSALDYLEMQPDLSALVRGAHTYKCPNLGITSWVRLPIYDADFGWGRPIFMGPGGIPYEGLSFVLPSPTNDGSLSVAIALQSEHMKLFEKFLFEI

SEQ ID NO: 40400 - DNA, 1184 bp, Arabidopsis thaliana; identical to SEQ ID NO: 35315
  misc_feature (1)..(1184): Ceres Seq. ID no. 13488582
  misc_feature (1)..(1184): Ortholog of  Ceres SEQ ID NO 14314371 as cited in SEQ ID NO 52260

SEQ ID NO: 40401 - protein, 246 aa, Arabidopsis thaliana; identical to SEQ ID NO: 35316
  peptide (1)..(246): Ceres Seq. ID no. 13488583

SEQ ID NO: 40402 - protein, 191 aa, Arabidopsis thaliana; identical to SEQ ID NO: 35317
  peptide (1)..(191): Ceres Seq. ID no. 13488584

SEQ ID NO: 40403 - protein, 147 aa, Arabidopsis thaliana; identical to SEQ ID NO: 35318
  peptide (1)..(147): Ceres Seq. ID no. 13488585

SEQ ID NO: 40404 - DNA, 1506 bp, Arabidopsis thaliana
  misc_feature (1)..(1506): Ceres Seq. ID no. 12370848
  misc_feature (1)..(1506): Ortholog of  Ceres SEQ ID NO 14303790 as cited in SEQ ID NO 55525
agtagtggactagtgaattttatcagcatctatctactcgagaaaagaaaatggcagatgaagtagtagtgatctctaagagcattgttcgaccagagagctacaacgaggaatcggatcgggttaagatccatctcactccatgggatctcttctttcttcgatccgaatacccacaaagaggtcttctctttcctcaacccgacccggaaacccatataatctctcagttgaaatcatctctctctgtcgctttgaagatcttctacccattcgctggtcgtcttgtcaaggtcgagaacgaagatgctggaacggcgtcgttttacgtcgattgtgatggctcaggtgtcaaattcatccacgcttcagctaaatccgtttcggttagtgatgttttagaacctgttgatagtaatgtccctgagttcttgaatcgttttttcccggcgaatggtgttaggagctgtgaaggaatctcggagtcgttaattgcgtttcaagtaacggaattgaaagatggggtttttatagggtttggttataatcatattgttgcagatggatcttcgttttggagtttcttcaatacttggtcggagatttgctttaacgggtttgatgccgatcatcggagaaagtttcctcctttgcttctccgtggatggtttctcgacggtattgagtatccgattcgaattccgttaccggagacggagacaccgaaccgggttgttgttacttcatcgttattacaagagaagatttttcgagtcacgagtagaaacatctctgagcttaaagcgaaagctaacggcgaggttgactccgatgatcggaaaatatcgtcgcttcaagcggtttcagcgtatatgtggcgatcgataatcagaaacagtggtctgaatccggaagaagtgattcattgcaagttactggtggatatgagaggaagactaaaccctccgcttgagaaagagtgtttcggtaacgtggtcggattcgcgacggtgacgactactgtggcggagatgcttcacaatgggcttggttgggctgcattgcaaataaacaaaactgttgggtcacaaacgaatgaagagtttagagagtttgctgagaattgggtgaagaaaccgagtatattgaatgctaaggcttttagtaattctataacaattgctagctctcctcggttcaatgtgtatggaaacgatttcggttggggtaaaccaatagcggttcgagctggaccgggaaataccaccgatggtaaactcattgcttatccggggatcgaagaaggaaacatcgagtttcaaacgtgtttatcgtctagtgttttggaaaaattatcgactgatgaagagtttttgaagcatgtatgtgttgtataagtaaaatcaaccaaatcaaatgtacttttttgtgtgtgtcttgaataaagttgaagatgtgaaaacaatctttgtcaacagaaatctatttagatagttttccttcttt

SEQ ID NO: 40405 - protein, 448 aa, Arabidopsis thaliana
  peptide (1)..(448): Ceres Seq. ID no. 12370849
MADEVVVISKSIVRPESYNEESDRVKIHLTPWDLFFLRSEYPQRGLLFPQPDPETHIISQLKSSLSVALKIFYPFAGRLVKVENEDAGTASFYVDCDGSGVKFIHASAKSVSVSDVLEPVDSNVPEFLNRFFPANGVRSCEGISESLIAFQVTELKDGVFIGFGYNHIVADGSSFWSFFNTWSEICFNGFDADHRRKFPPLLLRGWFLDGIEYPIRIPLPETETPNRVVVTSSLLQEKIFRVTSRNISELKAKANGEVDSDDRKISSLQAVSAYMWRSIIRNSGLNPEEVIHCKLLVDMRGRLNPPLEKECFGNVVGFATVTTTVAEMLHNGLGWAALQINKTVGSQTNEEFREFAENWVKKPSILNAKAFSNSITIASSPRFNVYGNDFGWGKPIAVRAGPGNTTDGKLIAYPGIEEGNIEFQTCLSSSVLEKLSTDEEFLKHVCVV

SEQ ID NO: 40406 - DNA, 1126 bp, Arabidopsis thaliana
  misc_feature (1)..(1126): Ceres Seq. ID no. 13487406
  misc_feature (1)..(1126): Ortholog of  Ceres SEQ ID NO 14308120 as cited in SEQ ID NO 58423
  misc_feature (1)..(1126): Ortholog of  Ceres SEQ ID NO 15169380 as cited in SEQ ID NO 58483
  misc_feature (1)..(1126): Ortholog of  Ceres SEQ ID NO 15177787 as cited in SEQ ID NO 59431
  misc_feature (1)..(1126): Ortholog of  Ceres SEQ ID NO 13595647 as cited in SEQ ID NO 59884
  misc_feature (1)..(1126): Ortholog of  Ceres SEQ ID NO 12617197 as cited in SEQ ID NO 63406
  misc_feature (1)..(1126): Ortholog of  Ceres SEQ ID NO 13597804 as cited in SEQ ID NO 64182
  misc_feature (1)..(1126): Ortholog of  Ceres SEQ ID NO 13598565 as cited in SEQ ID NO 65250
  misc_feature (1)..(1126): Ortholog of  Ceres SEQ ID NO 13598597 as cited in SEQ ID NO 65496
  misc_feature (1)..(1126): Ortholog of  Ceres SEQ ID NO 13596284 as cited in SEQ ID NO 68273
accagaagagagagaaagagacagagagaaaatggtgagagaagaacaagaagaagatgacaacaacaacaacaacaacggaggaggagagagaaagctgcttgtggctgatgaaacggtgccgtctttgttggacgaaacggggttggtttgtgtaacgggaggttctggtttcgttgcttcttggctcatcatgcgtctccttcaacgtggctactccgttcgggccacggttcgaaccaactcagaagggaataagaaagatataagctacctaaccgagctaccatttgcatcggagaggcttcaaatattcaccgccgatctcaacgaaccggagagcttcaaaccggcaatcgaaggatgcaaagccgtattccacgtggcacatcctatggacccaaacagcaacgaaacagaagagaccgttacgaaacgtactgtgcaaggtctcatggggatactaaagtcgtgtttggacgctaaaaccgtgaaacgttttttctacacgtcaagcgccgtgactgttttctatagcggtggaaacggcggtggaggaggcgaagtagacgagagcgtttggagcgacgtcgaggtgtttaggaatcaaaaggagaagagggtgagtagctcttacgtcgtgtcgaaaatggcggcggagacggcggcgcttgagttcggtgggaagaatgggttagaggttgtgacgctcgttattcctctcgtcgtcggaccttttatatcttcgtcgttgccttcctccgtcttcatatctctcgccatgctctttggaaattacaaggagaagtatttgtttgatacttacaatatggtgcatattgatgatgtggcaagggcgatgatatttctattagaaaagccagttgcaaaaggtagatatatttgttcgtcggtggagatgaagatcgatgaggtctttgagtttttgtctacgaaatttcctcagtttcagctaccttcaatagatttgaataaatataaagtagagaagaggatgggtctttcatcgaagaagctgaaaagtgccgggttcgaattcaagtatggagccgaggaaatattcagtggagctataaggagctgtcaagcaaggggatttctttaa

SEQ ID NO: 40407 - protein, 374 aa, Arabidopsis thaliana
  peptide (1)..(374): Ceres Seq. ID no. 13487407
PEERERDREKMVREEQEEDDNNNNNNGGGERKLLVADETVPSLLDETGLVCVTGGSGFVASWLIMRLLQRGYSVRATVRTNSEGNKKDISYLTELPFASERLQIFTADLNEPESFKPAIEGCKAVFHVAHPMDPNSNETEETVTKRTVQGLMGILKSCLDAKTVKRFFYTSSAVTVFYSGGNGGGGGEVDESVWSDVEVFRNQKEKRVSSSYVVSKMAAETAALEFGGKNGLEVVTLVIPLVVGPFISSSLPSSVFISLAMLFGNYKEKYLFDTYNMVHIDDVARAMIFLLEKPVAKGRYICSSVEMKIDEVFEFLSTKFPQFQLPSIDLNKYKVEKRMGLSSKKLKSAGFEFKYGAEEIFSGAIRSCQARGFL

SEQ ID NO: 40408 - protein, 364 aa, Arabidopsis thaliana
  peptide (1)..(364): Ceres Seq. ID no. 13487408
MVREEQEEDDNNNNNNGGGERKLLVADETVPSLLDETGLVCVTGGSGFVASWLIMRLLQRGYSVRATVRTNSEGNKKDISYLTELPFASERLQIFTADLNEPESFKPAIEGCKAVFHVAHPMDPNSNETEETVTKRTVQGLMGILKSCLDAKTVKRFFYTSSAVTVFYSGGNGGGGGEVDESVWSDVEVFRNQKEKRVSSSYVVSKMAAETAALEFGGKNGLEVVTLVIPLVVGPFISSSLPSSVFISLAMLFGNYKEKYLFDTYNMVHIDDVARAMIFLLEKPVAKGRYICSSVEMKIDEVFEFLSTKFPQFQLPSIDLNKYKVEKRMGLSSKKLKSAGFEFKYGAEEIFSGAIRSCQARGFL

SEQ ID NO: 40409 - protein, 310 aa, Arabidopsis thaliana
  peptide (1)..(310): Ceres Seq. ID no. 13487409
MRLLQRGYSVRATVRTNSEGNKKDISYLTELPFASERLQIFTADLNEPESFKPAIEGCKAVFHVAHPMDPNSNETEETVTKRTVQGLMGILKSCLDAKTVKRFFYTSSAVTVFYSGGNGGGGGEVDESVWSDVEVFRNQKEKRVSSSYVVSKMAAETAALEFGGKNGLEVVTLVIPLVVGPFISSSLPSSVFISLAMLFGNYKEKYLFDTYNMVHIDDVARAMIFLLEKPVAKGRYICSSVEMKIDEVFEFLSTKFPQFQLPSIDLNKYKVEKRMGLSSKKLKSAGFEFKYGAEEIFSGAIRSCQARGFL

SEQ ID NO: 40410 - DNA, 1258 bp, Arabidopsis thaliana
  misc_feature (1)..(1258): Ceres Seq. ID no. 12328864
  misc_feature (1)..(1258): Ortholog of  Ceres SEQ ID NO 13590691 as cited in SEQ ID NO 66290
gagaaagatcttctttaacctctttgcaacaaatctactcaaaaccctaacccctttttcaaattacttccatctttagatcgaatcaaatcaatgtccgtcgacgatcttcctccgtcgtcggcctccgccgtaacgccactaggctcctccgtgattccgattgtgaacaagctccaagacatattcgctcagctaggaagtcaatcgacgatcgctcttccgcaagtagctgtcgtcggaagtcaaagcagtggcaaatccagcgttctagaagctctcgtcggccgtgactttcttcctcgtggcaatgatatttgcacgcgccgacctctccgtctccagcttgttcagacgaaacctagctctgatggtggatccgatgaagagtggggcgagtttcttcaccacgatcctgttagacgtatctacgatttctctgagattcgccgtgagattgaggcggagactaatagagtatcaggagagaacaaaggtgtatcagatattccgattggtttgaagatattttcacctaatgttttggatattagtcttgtggatcttcctggtatcactaaggttcctgttggtgatcagccaagtgatatcgaagcgcgtataagaacgatgatcttgacttacattaaggaacctagttgcttgatacttgctgttagccctgctaatactgatttagcaaattcagatgcattacaaatcgcaggaaatgctgatcctgatggtcatagaaccataggtgtaatcacaaagttggatattatggacagaggtactgatgctcggaatcaccttctgggaaaaacaattcctcttcgacttggatacgtgggagttgtaaatcgtagtcaagaggatattttgatgaaccgtagcatcaaagatgctcttgttgcagaggaaaagttctttcgtagtcgtccagtttacagcggtctcacagatcgtttgggtgtccctcaactggcaaagaaattaaatcaggtccttgttcaacacatcaaggcactgcttcctagtttaaagtcacgtatcaacaatgcattgtttgctacagcaaaggagtatgagagctatggggatataacagagtctagggtatgtgggttttggccagttttagccttatatataccatccattctcaatgatggcattgctatttgctttttttgcattgtatgatttcttgctcagttttcgtatttgaatataattgtattcatttttgtgatcc

SEQ ID NO: 40411 - protein, 370 aa, Arabidopsis thaliana
  peptide (1)..(370): Ceres Seq. ID no. 12328865
MSVDDLPPSSASAVTPLGSSVIPIVNKLQDIFAQLGSQSTIALPQVAVVGSQSSGKSSVLEALVGRDFLPRGNDICTRRPLRLQLVQTKPSSDGGSDEEWGEFLHHDPVRRIYDFSEIRREIEAETNRVSGENKGVSDIPIGLKIFSPNVLDISLVDLPGITKVPVGDQPSDIEARIRTMILTYIKEPSCLILAVSPANTDLANSDALQIAGNADPDGHRTIGVITKLDIMDRGTDARNHLLGKTIPLRLGYVGVVNRSQEDILMNRSIKDALVAEEKFFRSRPVYSGLTDRLGVPQLAKKLNQVLVQHIKALLPSLKSRINNALFATAKEYESYGDITESRVCGFWPVLALYIPSILNDGIAICFFCIV

SEQ ID NO: 40412 - protein, 191 aa, Arabidopsis thaliana
  peptide (1)..(191): Ceres Seq. ID no. 12328866
MILTYIKEPSCLILAVSPANTDLANSDALQIAGNADPDGHRTIGVITKLDIMDRGTDARNHLLGKTIPLRLGYVGVVNRSQEDILMNRSIKDALVAEEKFFRSRPVYSGLTDRLGVPQLAKKLNQVLVQHIKALLPSLKSRINNALFATAKEYESYGDITESRVCGFWPVLALYIPSILNDGIAICFFCIV

SEQ ID NO: 40413 - DNA, 1851 bp, Arabidopsis thaliana
  misc_feature (1)..(1851): Ceres Seq. ID no. 13499920
  misc_feature (1)..(1851): Ortholog of  Ceres SEQ ID NO 15225707 as cited in SEQ ID NO 54212
  misc_feature (1)..(1851): Ortholog of  Ceres SEQ ID NO 14308608 as cited in SEQ ID NO 58855
aagtctctttttttgtttaaagatgaacaaatttttgtgttcacattaataaaaactaaaaagaggattcccatgcacacgaaccaacaccaagagcctttttattgtattttaatttctttatttgagccaacaactatttattttcgttcttctttcacactagctctaaaaaccggtttaactaaaccagtcaaaaaccggacgtatgaaagcgttcactgtcttctctgacttacgcgttgaccaatgactacagtattttgaaaaaaccttcgtgtgatataaccggttactggaagtctgtaaccatccgtactgtatatttaacctgctattgccggtcaataaaaaaaaaatcaaggaccaccatttaacacagtgcggtgacaaatatcaaatccttgagtcattattatctctttcctctcttacgccatacatttcatctttcttctctctctatctctcctctttgaaccctaaaaactctttctttacaaggattgatctttttgtatttttgattttgacatttgctttgtgttcgatctctgttttgatgcgatttctctgtttttaaagccatttgatagattgtttccggtaaagctcagcgagagaagaagaagaacaacaatggagtttacagatttctcaaagacgagtttttactacccgtcgtcacaaagcgtttgggatttcggagatttagcggcggcggagaggcattctttagggttcatggagttattaagttctcagcagcatcaagactttgctactgtttctcctcattccttccttctccaaacgtctcaaccgcaaacgcaaacgcaaccatcggcgaagctgtcttcaagtatcattcaagctccaccgtcagagcaattagtgacgtcaaaggtggagtctttgtgttcggatcatttgttgataaacccaccggcgactcctaactcgtcatcgatttcgtctgcttcaagcgaggctctaaatgaagagaaaccgaaaacagaagacaatgaagaagaaggaggtgaagatcaacaagagaagagtcatactaagaaacagttgaaagcaaagaagaataatcagaagagacagagagaggcaagagtcgcattcatgacaaagagtgaagttgatcatctcgaagatggttatcgctggcgaaaatatggtcaaaaagctgtcaaaaacagtccttttcccaggagttactaccgttgcacaacggcttcatgtaacgtgaagaagagagtggagagatcattcagagatccaagcactgtggttacaacctacgaaggtcaacacactcacattagtccactcacgtctcgtcctatttccactggaggtttcttcggatcgtcaggagctgcttcgagtctcggtaatggttgctttgggtttcctattgatggctccacgttaatctctcctcagttccaacagcttgtccaataccatcaccaacagcagcaacaagaactcatgtcttgttttggaggagtcaacgagtaccttaatagccacgctaatgagtatggtgatgataatcgtgtgaagaagagtcgagttttggttaaagataatggacttctgcaagatgttgttccgtctcatatgttgaaggaagagtagtagtatatatatagtcttatagttttaatctagtttttttttgtataattgtctaaaagaaacggatcttttgttctgatgaagaagatgttttcttatggttctgaaatcgtaaggtaatgatgattgtaccaagccgagaaagtacttgtgattttcaccattgaatcactataaatgtaatttttatttactgcg

SEQ ID NO: 40414 - protein, 337 aa, Arabidopsis thaliana
  peptide (1)..(337): Ceres Seq. ID no. 13499921
MEFTDFSKTSFYYPSSQSVWDFGDLAAAERHSLGFMELLSSQQHQDFATVSPHSFLLQTSQPQTQTQPSAKLSSSIIQAPPSEQLVTSKVESLCSDHLLINPPATPNSSSISSASSEALNEEKPKTEDNEEEGGEDQQEKSHTKKQLKAKKNNQKRQREARVAFMTKSEVDHLEDGYRWRKYGQKAVKNSPFPRSYYRCTTASCNVKKRVERSFRDPSTVVTTYEGQHTHISPLTSRPISTGGFFGSSGAASSLGNGCFGFPIDGSTLISPQFQQLVQYHHQQQQQELMSCFGGVNEYLNSHANEYGDDNRVKKSRVLVKDNGLLQDVVPSHMLKEE

SEQ ID NO: 40415 - protein, 302 aa, Arabidopsis thaliana
  peptide (1)..(302): Ceres Seq. ID no. 13499922
MELLSSQQHQDFATVSPHSFLLQTSQPQTQTQPSAKLSSSIIQAPPSEQLVTSKVESLCSDHLLINPPATPNSSSISSASSEALNEEKPKTEDNEEEGGEDQQEKSHTKKQLKAKKNNQKRQREARVAFMTKSEVDHLEDGYRWRKYGQKAVKNSPFPRSYYRCTTASCNVKKRVERSFRDPSTVVTTYEGQHTHISPLTSRPISTGGFFGSSGAASSLGNGCFGFPIDGSTLISPQFQQLVQYHHQQQQQELMSCFGGVNEYLNSHANEYGDDNRVKKSRVLVKDNGLLQDVVPSHMLKEE

SEQ ID NO: 40416 - protein, 173 aa, Arabidopsis thaliana
  peptide (1)..(173): Ceres Seq. ID no. 13499923
MTKSEVDHLEDGYRWRKYGQKAVKNSPFPRSYYRCTTASCNVKKRVERSFRDPSTVVTTYEGQHTHISPLTSRPISTGGFFGSSGAASSLGNGCFGFPIDGSTLISPQFQQLVQYHHQQQQQELMSCFGGVNEYLNSHANEYGDDNRVKKSRVLVKDNGLLQDVVPSHMLKEE

SEQ ID NO: 40417 - DNA, 1516 bp, Arabidopsis thaliana
  misc_feature (1)..(1516): Ceres Seq. ID no. 12422112
  misc_feature (1)..(1516): Ortholog of  Ceres SEQ ID NO 13593955 as cited in SEQ ID NO 54278
  misc_feature (1)..(1516): Ortholog of  Ceres SEQ ID NO 13597380 as cited in SEQ ID NO 64054
attttcgatatgtttaggggaaaaatatttgtgttatcattattttctatttacgtcctctcatcagcggctgaaaaaaatacatcattttctgcgctttttgcttttggtgattcagtcttagatacgggaaacaataattttcttcttactcttctcaaaggaaattattggccatatggtttgagttttgactataaatttccgacgggaagattcggaaatggaagagttttcaccgatatagttgccgaaggtttacagatcaaaagacttgtaccagcttatagcaagattcgtcgcatcagttctgaagaccttaagactggcgtttgttttgcatcaggtggttcaggaattgacgatcttacatcccgaacactggtgaaagaaaaaaaaaacttaattgttatttcgataaacactatatattatatatctcaaacaatgttttcttataataattggatggttgtgggtggttttgtcagagagttttatcggcaggtgaccaagtaaaagactttaaagactatttgaagaaactaagaagagtagtgaaacgtaagaaaaaagtaaaataaatagtttcaaacgctgtgtttcttatttctgaaggaaataatgatcttggatactttgtcgctcccgctcttcttcgattacagtccacaacaacatacaccagtaaaatggttgtttggaccagaaagtttctaaaagatttatatgatcttggagcgagaaaatttgcggtgatgggagtgatgcctgtgggatgtttgcctatccatcgagcctcattcggtggggtattcggatggtgtaacttcctctttaatagagttacggaggacttcaacatgaaattgcagaaaggtcttacaagttacgcagtagaatatgatttcaaagatgcaaagtttgtttacgtcgacatatacggtactcttatggatcttgtcaaaaatcctatggcctatggtacgtatatacacactccctatataaatatatgcatgacgtaaccaagtgatagtaatatgtcatttgttttatcttttaaaggattgtgcatcctaacaattaatgttttttttttctttctttgtgatcaaatttatatccgaatcataacactataagatgatcaagatcatgattctaattacaacaatacatatacttgcagggtttacagaagcgaaaaaagcttgttgttgtatgccgaatgcaataataccatgcttccatccagataaatacgtcttctatgactttgctcacccttcccagaaagcctacgaagtaatatctaaacctattgtctatcagatagcgaaaggccttgcctagctaattccttatttcctacaatgttttattataatctttgaaaattatcaccatatcgataaatatatgtaaatgtataagattcatgacaatctattcgtttttcttattgtaaacaatgtataattcaaattacaggcttttaaatattgtccatttt

SEQ ID NO: 40418 - protein, 172 aa, Arabidopsis thaliana
  peptide (1)..(172): Ceres Seq. ID no. 12422113
IFDMFRGKIFVLSLFSIYVLSSAAEKNTSFSALFAFGDSVLDTGNNNFLLTLLKGNYWPYGLSFDYKFPTGRFGNGRVFTDIVAEGLQIKRLVPAYSKIRRISSEDLKTGVCFASGGSGIDDLTSRTLVKEKKNLIVISINTIYYISQTMFSYNNWMVVGGFVREFYRQVTK

SEQ ID NO: 40419 - protein, 169 aa, Arabidopsis thaliana
  peptide (1)..(169): Ceres Seq. ID no. 12422114
MFRGKIFVLSLFSIYVLSSAAEKNTSFSALFAFGDSVLDTGNNNFLLTLLKGNYWPYGLSFDYKFPTGRFGNGRVFTDIVAEGLQIKRLVPAYSKIRRISSEDLKTGVCFASGGSGIDDLTSRTLVKEKKNLIVISINTIYYISQTMFSYNNWMVVGGFVREFYRQVTK

SEQ ID NO: 40420 - protein, 111 aa, Arabidopsis thaliana
  peptide (1)..(111): Ceres Seq. ID no. 12422115
MVVWTRKFLKDLYDLGARKFAVMGVMPVGCLPIHRASFGGVFGWCNFLFNRVTEDFNMKLQKGLTSYAVEYDFKDAKFVYVDIYGTLMDLVKNPMAYGTYIHTPYINICMT

SEQ ID NO: 40421 - DNA, 1435 bp, Arabidopsis thaliana; identical to SEQ ID NO: 39473
  misc_feature (1)..(1435): Ceres Seq. ID no. 12562265
  misc_feature (1)..(1435): Ortholog of  Ceres SEQ ID NO 14314404 as cited in SEQ ID NO 57421
  misc_feature (1)..(1435): Ortholog of  Ceres SEQ ID NO 13493536 as cited in SEQ ID NO 58515
  misc_feature (1)..(1435): Ortholog of  Ceres SEQ ID NO 15225741 as cited in SEQ ID NO 59606
  misc_feature (1)..(1435): Ortholog of  Ceres SEQ ID NO 12618461 as cited in SEQ ID NO 64349

SEQ ID NO: 40422 - protein, 424 aa, Arabidopsis thaliana; identical to SEQ ID NO: 39474
  peptide (1)..(424): Ceres Seq. ID no. 12562266

SEQ ID NO: 40423 - protein, 285 aa, Arabidopsis thaliana; identical to SEQ ID NO: 39475
  peptide (1)..(285): Ceres Seq. ID no. 12562267

SEQ ID NO: 40424 - protein, 220 aa, Arabidopsis thaliana; identical to SEQ ID NO: 39476
  peptide (1)..(220): Ceres Seq. ID no. 12562268

SEQ ID NO: 40425 - DNA, 958 bp, Arabidopsis thaliana; identical to SEQ ID NO: 27259
  misc_feature (1)..(958): Ceres Seq. ID no. 13575744
  misc_feature (1)..(958): Ortholog of  Ceres SEQ ID NO 13502973 as cited in SEQ ID NO 68052

SEQ ID NO: 40426 - protein, 158 aa, Arabidopsis thaliana; identical to SEQ ID NO: 27260
  peptide (1)..(158): Ceres Seq. ID no. 13575745

SEQ ID NO: 40427 - protein, 144 aa, Arabidopsis thaliana; identical to SEQ ID NO: 27261
  peptide (1)..(144): Ceres Seq. ID no. 13575746

SEQ ID NO: 40428 - protein, 86 aa, Arabidopsis thaliana; identical to SEQ ID NO: 27262
  peptide (1)..(86): Ceres Seq. ID no. 13575747

SEQ ID NO: 40429 - DNA, 1499 bp, Arabidopsis thaliana
  misc_feature (1)..(1499): Ceres Seq. ID no. 12394534
  misc_feature (1)..(1499): Ortholog of  Ceres SEQ ID NO 13660287 as cited in SEQ ID NO 67316
  misc_feature (1)..(1499): Ortholog of  Ceres SEQ ID NO 14307892 as cited in SEQ ID NO 67490
agtatataaagtatagggttgattcggagaaagaggttaaagtattagattgaaacaacaaatctcaggggaagaagaagagagaatggattcggcggagaagggcttgcttgttgtgagcgacagagaagaagtaaacaagaaagatggctttttgtgggaaacgaagaaacttagttacatcgccggtccgatgattgcagtgaactcgtctatgtatgttcttcaggtgatatctataatgatggctggtcatctcggtgagcttttcctctctagcaccgccattgctgtttctttctgcagcgtcaccggtttcagcgtcgtttttggattggctagtgcgttggagactttatgtggtcaagctaatggagctaagcaatacgagaagcttggtgttcaaacttacacaggaattgtctctttgtttcttgtgtgtattcctctctctgttctctggagctacattggtgatatactttctcttattggacaagatgctatggttgctcaagaagctgggaagtttgcaacttggctcatacccgcgctctttggttacgctactttgcagccgcttgttcggtttttccaagcacagtctctgattttgcctttggttatgagttcagtctcttctctctgtgtccacattgtcctctgttggagcttggtctttaagttcggtcttggaagcctcggtgcagctattgcgatcggcgtttcttactggctaaacgtgactgttcttggattgtacatgacgttttcttctagctgtaggaagagtcgtgcacctatctccatgagtttgtttgaaggaatgggagagtttttccggtttggaatcccatctgcgtctatgatttgcctcgagtggtggtcattcgaatttctagtcctgctctctgggatttttgccaaatcccgaagctagaagcctctgttcnntcagtctgtctttcaacacaatcctccttgtaccaaatcccagagagtctcggcgcagcagcaagtacaagagttgcaaacgagttaggagctggaaacccgaaacaagctcgaatggcggtttacacagcgatggttataacaggtgtagaatcaataatggtgggtgcaatagtctttggtgcaagaaatgtatttggttacctattcagttctgaaactgaagttgtagactatgtaaaatcaatggctccactgcttttctttatcggtcatattcgatgcccttcacgcagctctctcgggtgtggctagaggatcagggaggcaagatattggggcatacgtaaacctagcagcatactatctctttggaataccaactgctatactattagctttttgggtttaaaatgagaggaagaggactctggattggaatcacagttgggtcatgtgtacaagctgnttttgctcggtcttatcgttaatcctcactaaattggaaaaaaacaggcgagaaaggctagagaaagagtgatggg

SEQ ID NO: 40430 - protein, 284 aa, Arabidopsis thaliana
  peptide (1)..(284): Ceres Seq. ID no. 12394535
MDSAEKGLLVVSDREEVNKKDGFLWETKKLSYIAGPMIAVNSSMYVLQVISIMMAGHLGELFLSSTAIAVSFCSVTGFSVVFGLASALETLCGQANGAKQYEKLGVQTYTGIVSLFLVCIPLSVLWSYIGDILSLIGQDAMVAQEAGKFATWLIPALFGYATLQPLVRFFQAQSLILPLVMSSVSSLCVHIVLCWSLVFKFGLGSLGAAIAIGVSYWLNVTVLGLYMTFSSSCRKSRAPISMSLFEGMGEFFRFGIPSASMICLEWWSFEFLVLLSGIFAKSRS

SEQ ID NO: 40431 - protein, 248 aa, Arabidopsis thaliana
  peptide (1)..(248): Ceres Seq. ID no. 12394536
MIAVNSSMYVLQVISIMMAGHLGELFLSSTAIAVSFCSVTGFSVVFGLASALETLCGQANGAKQYEKLGVQTYTGIVSLFLVCIPLSVLWSYIGDILSLIGQDAMVAQEAGKFATWLIPALFGYATLQPLVRFFQAQSLILPLVMSSVSSLCVHIVLCWSLVFKFGLGSLGAAIAIGVSYWLNVTVLGLYMTFSSSCRKSRAPISMSLFEGMGEFFRFGIPSASMICLEWWSFEFLVLLSGIFAKSRS

SEQ ID NO: 40432 - protein, 241 aa, Arabidopsis thaliana
  peptide (1)..(241): Ceres Seq. ID no. 12394537
MYVLQVISIMMAGHLGELFLSSTAIAVSFCSVTGFSVVFGLASALETLCGQANGAKQYEKLGVQTYTGIVSLFLVCIPLSVLWSYIGDILSLIGQDAMVAQEAGKFATWLIPALFGYATLQPLVRFFQAQSLILPLVMSSVSSLCVHIVLCWSLVFKFGLGSLGAAIAIGVSYWLNVTVLGLYMTFSSSCRKSRAPISMSLFEGMGEFFRFGIPSASMICLEWWSFEFLVLLSGIFAKSRS

SEQ ID NO: 40433 - DNA, 2338 bp, Arabidopsis thaliana; identical to SEQ ID NO: 29542
  misc_feature (1)..(2338): Ceres Seq. ID no. 13497306
  misc_feature (1)..(2338): Ortholog of  Ceres SEQ ID NO 13623192 as cited in SEQ ID NO 1286
  misc_feature (1)..(2338): Ortholog of  Ceres SEQ ID NO 13594171 as cited in SEQ ID NO 60359
  misc_feature (1)..(2338): Ortholog of  Ceres SEQ ID NO 14301866 as cited in SEQ ID NO 60955
  misc_feature (1)..(2338): Ortholog of  Ceres SEQ ID NO 13590645 as cited in SEQ ID NO 62109

SEQ ID NO: 40434 - protein, 627 aa, Arabidopsis thaliana; identical to SEQ ID NO: 29543
  peptide (1)..(627): Ceres Seq. ID no. 13497307

SEQ ID NO: 40435 - protein, 595 aa, Arabidopsis thaliana; identical to SEQ ID NO: 29544
  peptide (1)..(595): Ceres Seq. ID no. 13497308

SEQ ID NO: 40436 - protein, 508 aa, Arabidopsis thaliana; identical to SEQ ID NO: 29545
  peptide (1)..(508): Ceres Seq. ID no. 13497309

SEQ ID NO: 40437 - DNA, 1153 bp, Arabidopsis thaliana
  misc_feature (1)..(1153): Ceres Seq. ID no. 12482574
  misc_feature (1)..(1153): Ortholog of  Ceres SEQ ID NO 15170578 as cited in SEQ ID NO 52951
aacaatatttattataaagaaggctgagatgcagaccccatcgatggctgcctccactacttcctactacccaatccccaaaagcttccttctttctcctcctcgtcacaaacgaaaccctaatctcatctcctgctccaccaaacccatttgctctcctcctcctccttcgtcttcttcttcgtctcctctgcaaacgacgacaacccatcgaagccaaaagcagaatctgcgtctacccacgtttgaagattcgtttcttctttaccaatttagctctcccaccgaagacccaggattctctaaccggatcccggaacaattcgacggagagccacgcgaattggtgttgccgagagtagaagacaacaacaaagggttggcaatttcgtcgaacatgtggtgggcagatctgaaagcggctcttgggcaacgaatcaatattgagggtatcgtttcttcggtctccgttgttgttaaagatcgtcaatttgttcttccgcatgtttctgtgaaagatttaagatacattgattgggaagtgctgaagagaaagggcttcaaaggtgtagtgtttgataaagataacactcttacggctccttattctctagcgatttggccaccattacgtccttccattgagcggtgtaaagccgtttttggccatgacatcgccgtgtttagcaattccgctgggctcacggaatacgatcatgatgattcgaaagctaaagcattggaggctgaaataggaattagagtgttgaggcatagagtgaagaagcctgcaggaactgctgaagaagttgagaaacactttggttgcacatcttcagagctaatcatggtgggtgatcgacctttcacagatatcgtttacgggaacagaaacggatttctaaccgtattaaccgagcctttgagtcgagctgaggagcctttcattgttagacaggtgaggagattagagttggccttgttgaaacgttggttgagaaaaggtttgaagcctgtggatcatagtttggtatcagatataacacagtttgttaaagttccatcagatttgtaagaaggattctcattttgctattgcaacaacaactttgttccttgttttttttttgtaattgaaattttgagtttgggt

SEQ ID NO: 40438 - protein, 357 aa, Arabidopsis thaliana
  peptide (1)..(357): Ceres Seq. ID no. 12482575
TIFIIKKAEMQTPSMAASTTSYYPIPKSFLLSPPRHKRNPNLISCSTKPICSPPPPSSSSSSPLQTTTTHRSQKQNLRLPTFEDSFLLYQFSSPTEDPGFSNRIPEQFDGEPRELVLPRVEDNNKGLAISSNMWWADLKAALGQRINIEGIVSSVSVVVKDRQFVLPHVSVKDLRYIDWEVLKRKGFKGVVFDKDNTLTAPYSLAIWPPLRPSIERCKAVFGHDIAVFSNSAGLTEYDHDDSKAKALEAEIGIRVLRHRVKKPAGTAEEVEKHFGCTSSELIMVGDRPFTDIVYGNRNGFLTVLTEPLSRAEEPFIVRQVRRLELALLKRWLRKGLKPVDHSLVSDITQFVKVPSDL

SEQ ID NO: 40439 - protein, 348 aa, Arabidopsis thaliana
  peptide (1)..(348): Ceres Seq. ID no. 12482576
MQTPSMAASTTSYYPIPKSFLLSPPRHKRNPNLISCSTKPICSPPPPSSSSSSPLQTTTTHRSQKQNLRLPTFEDSFLLYQFSSPTEDPGFSNRIPEQFDGEPRELVLPRVEDNNKGLAISSNMWWADLKAALGQRINIEGIVSSVSVVVKDRQFVLPHVSVKDLRYIDWEVLKRKGFKGVVFDKDNTLTAPYSLAIWPPLRPSIERCKAVFGHDIAVFSNSAGLTEYDHDDSKAKALEAEIGIRVLRHRVKKPAGTAEEVEKHFGCTSSELIMVGDRPFTDIVYGNRNGFLTVLTEPLSRAEEPFIVRQVRRLELALLKRWLRKGLKPVDHSLVSDITQFVKVPSDL

SEQ ID NO: 40440 - protein, 343 aa, Arabidopsis thaliana
  peptide (1)..(343): Ceres Seq. ID no. 12482577
MAASTTSYYPIPKSFLLSPPRHKRNPNLISCSTKPICSPPPPSSSSSSPLQTTTTHRSQKQNLRLPTFEDSFLLYQFSSPTEDPGFSNRIPEQFDGEPRELVLPRVEDNNKGLAISSNMWWADLKAALGQRINIEGIVSSVSVVVKDRQFVLPHVSVKDLRYIDWEVLKRKGFKGVVFDKDNTLTAPYSLAIWPPLRPSIERCKAVFGHDIAVFSNSAGLTEYDHDDSKAKALEAEIGIRVLRHRVKKPAGTAEEVEKHFGCTSSELIMVGDRPFTDIVYGNRNGFLTVLTEPLSRAEEPFIVRQVRRLELALLKRWLRKGLKPVDHSLVSDITQFVKVPSDL

SEQ ID NO: 40441 - DNA, 1227 bp, Arabidopsis thaliana
  misc_feature (1)..(1227): Ceres Seq. ID no. 12395366
  misc_feature (1)..(1227): Ortholog of  Ceres SEQ ID NO 13639514 as cited in SEQ ID NO 55736
  misc_feature (1)..(1227): Ortholog of  Ceres SEQ ID NO 14312254 as cited in SEQ ID NO 59148
  misc_feature (1)..(1227): Ortholog of  Ceres SEQ ID NO 13662804 as cited in SEQ ID NO 65394
  misc_feature (1)..(1227): Ortholog of  Ceres SEQ ID NO 13656519 as cited in SEQ ID NO 69226
atgtgaattataaaacgtattgagtattatcgtgaccgacttcaaaaaacaagaaaaacctcaacttctctttttcagctatagccgccgcctcctcccactaaactcaaatcctctcatagtcttttcaatcaaatctgctcttcttcactgttgaagctggctatcaaaactcacaataactatgggaccgatgatgatgagagcagaagaagataactacaatctaaatcctccaccatggctaatcccaatgctaagagcaaactacttcatcccttgttcaatccacgccgcttccaacaaaagcgagtgcaacatgttctgtcttgactgttcttctgaggccttttgctcttactgtttgctcaatcacagaaaccatcgtgtccttcagatacgaagatcgtcgtaccacaacgttgtgagagtaaacgagattcagaagttcatagacatctcttgtgttcaaacatacataatcaacagcgcaaggatcgtgttcttgaacgaacgtcctcagccaagaatcggcaaaggagtcaccaatacttgtgaaatctgttgcagaagccttcttgattctttccgtttctgctctctcggttgcaaacttggaggaatgaagcgtgatccaagtctaaccttctctttgagagggaagcatggaagagagtacgaaggtgagtgggaatctgatgaagcgactacaccaactaagatacgcaagacatgtgctttcaaccgtctgatgagtggtctttccatctccaccgttaaatgtgattacttgtcaggagatcaaccgtcttcgagctccggtgatgagagcggttttaaactttctccggggacaccgccgatatataatcaccggaattcaagtagacggaagggcgtcccacaccgtgctcctttctaaaattaatactaacggaagctaattatatagtgtagattatagaaaatgtggttgttatgttgtaactaaatggttagtagtttttaaccttttgagctaggaatatacatattgtaagacatattacttacaggtattgtttggtttttctttttatagtacatatagaaattaggtatatactgtactcaaagggattgaaatatgttttcatatagtttttttgctgtaaatatacgtttgaaggaggtatgtttcttcaacttgtttgtatcgtatactgtgtactatcttcacaataaaat

SEQ ID NO: 40442 - protein, 245 aa, Arabidopsis thaliana
  peptide (1)..(245): Ceres Seq. ID no. 12395367
MGPMMMRAEEDNYNLNPPPWLIPMLRANYFIPCSIHAASNKSECNMFCLDCSSEAFCSYCLLNHRNHRVLQIRRSSYHNVVRVNEIQKFIDISCVQTYIINSARIVFLNERPQPRIGKGVTNTCEICCRSLLDSFRFCSLGCKLGGMKRDPSLTFSLRGKHGREYEGEWESDEATTPTKIRKTCAFNRLMSGLSISTVKCDYLSGDQPSSSSGDESGFKLSPGTPPIYNHRNSSRRKGVPHRAPF

SEQ ID NO: 40443 - protein, 242 aa, Arabidopsis thaliana
  peptide (1)..(242): Ceres Seq. ID no. 12395368
MMMRAEEDNYNLNPPPWLIPMLRANYFIPCSIHAASNKSECNMFCLDCSSEAFCSYCLLNHRNHRVLQIRRSSYHNVVRVNEIQKFIDISCVQTYIINSARIVFLNERPQPRIGKGVTNTCEICCRSLLDSFRFCSLGCKLGGMKRDPSLTFSLRGKHGREYEGEWESDEATTPTKIRKTCAFNRLMSGLSISTVKCDYLSGDQPSSSSGDESGFKLSPGTPPIYNHRNSSRRKGVPHRAPF

SEQ ID NO: 40444 - protein, 241 aa, Arabidopsis thaliana
  peptide (1)..(241): Ceres Seq. ID no. 12395369
MMRAEEDNYNLNPPPWLIPMLRANYFIPCSIHAASNKSECNMFCLDCSSEAFCSYCLLNHRNHRVLQIRRSSYHNVVRVNEIQKFIDISCVQTYIINSARIVFLNERPQPRIGKGVTNTCEICCRSLLDSFRFCSLGCKLGGMKRDPSLTFSLRGKHGREYEGEWESDEATTPTKIRKTCAFNRLMSGLSISTVKCDYLSGDQPSSSSGDESGFKLSPGTPPIYNHRNSSRRKGVPHRAPF

SEQ ID NO: 40445 - DNA, 2001 bp, Arabidopsis thaliana; identical to SEQ ID NO: 38975
  misc_feature (1)..(2001): Ceres Seq. ID no. 13591393
  misc_feature (1)..(2001): Ortholog of  Ceres SEQ ID NO 14308723 as cited in SEQ ID NO 58758

SEQ ID NO: 40446 - protein, 543 aa, Arabidopsis thaliana; identical to SEQ ID NO: 38976
  peptide (1)..(543): Ceres Seq. ID no. 13591394

SEQ ID NO: 40447 - protein, 384 aa, Arabidopsis thaliana; identical to SEQ ID NO: 38977
  peptide (1)..(384): Ceres Seq. ID no. 13591395

SEQ ID NO: 40448 - protein, 374 aa, Arabidopsis thaliana; identical to SEQ ID NO: 38978
  peptide (1)..(374): Ceres Seq. ID no. 13591396

SEQ ID NO: 40449 - DNA, 619 bp, Arabidopsis thaliana
  misc_feature (1)..(619): Ceres Seq. ID no. 12439760
  misc_feature (1)..(619): Ortholog of  Ceres SEQ ID NO 13597375 as cited in SEQ ID NO 63986
tgtttttgataacaaagtggagtggggaatcgacttggcctcagagcatgaaagatacttgacagaggttgagtttgatcaaaagccaataattgtgtataactacccgaaaggaatcaaagctttttacatgagacttaacgatgatgagaagacagttgctgccatggatgtccttgttccaaagattaattaggttggagaactcattggtggaagccaaagggaagaacgatatgatgttatcaaacagaggatcgaggagatgtgtctaccaatggagccatatgagtggtacctagacttgcgtcgttatggaacagtgaagcattgtggatttggacttggcttcgaacgtatgattcagttcgctacaggaattgataacatcagagatgttattcctttccctcgctatcctggaaaagctgatctctgattcctctctagacacacaattctggtctggtctcgacatggttttagtttccttttaaattggttaaatgaaaattgtattgatttttatctatactctgtttctcaagctgtgagagctaatatgaagggaaacaaagttatatgaagggaaacaaagttatacttttgggttagcttc

SEQ ID NO: 40450 - protein, 64 aa, Arabidopsis thaliana
  peptide (1)..(64): Ceres Seq. ID no. 12439761
VFDNKVEWGIDLASEHERYLTEVEFDQKPIIVYNYPKGIKAFYMRLNDDEKTVAAMDVLVPKIN

SEQ ID NO: 40451 - protein, 57 aa, Arabidopsis thaliana
  peptide (1)..(57): Ceres Seq. ID no. 12439762
MCLPMEPYEWYLDLRRYGTVKHCGFGLGFERMIQFATGIDNIRDVIPFPRYPGKADL

SEQ ID NO: 40452 - protein, 53 aa, Arabidopsis thaliana
  peptide (1)..(53): Ceres Seq. ID no. 12439763
MEPYEWYLDLRRYGTVKHCGFGLGFERMIQFATGIDNIRDVIPFPRYPGKADL

SEQ ID NO: 40453 - DNA, 1235 bp, Arabidopsis thaliana
  misc_feature (1)..(1235): Ceres Seq. ID no. 12340437
  misc_feature (1)..(1235): Ortholog of  Ceres SEQ ID NO 13504028 as cited in SEQ ID NO 56107
aaaaaaccatttccatcatcggtttcctccgatacatctcctcgtcgccgttcttcggattttcactcttctgctcgaaagggcagtgcttgagaatcattgaagaaggtgatcgctggtgctgttttgataactcaaagccgttttgctgaaagagggttaccaaagttagaagctcaagaacttggagctgtgtcttctttttgtatcatgccatattttattcagaggcttttcaatacttgcaagtcatctctctcacctaatggtcctgtgtctgaggaggccttagacaaggttcgcaatgtcttggagaaaatcaagccgtctgatgttggtctcgaacaggaagctcaattggtgcgtaattggcctggtcctgggaacgagcgtaatggaaaccatcattctctgccagcaataaaataccttcagttacatgagtgtgacagcttctcgattggaattttctgcatgccacctgggtctatcataccacttcataatcatccaggcatgacagtgctaagcaagcttgtttatggttcaatgcacgttaagtcatatgattgggctgagcctgaccaatcagagctagacgatccattacaagcaagacccgcgaagctggtcaaggatattgatatgacttcccctagcccagcaaccactctatatccaacaaccggtggcaacattcattgtttcaaagccattactcattgtgcaatcttcgacatcttatctcctccatactcttctactcatggcagacactgcaactacttccgaaaatccccaatgctagacttacctggtgagattgaagtgatgaatggagaagtgatctcaaatgtgacatggcttgaagagtatcaacctccagataactttgtgatatggagagttccgtacagaggtccagtgattagaaaatgagaaatacaaaaaggattaaacatattaaaaaagagcagaaagagaaaggtgcttatgatcaggagaataattggtaaaccattcagaggctggctgcataatggtcgaggttcttacataattgtgaccacattaagttccagcctatgtcgttgtatgataatgtttactacatacaactttatgattacttcactagtttaatattataattttttccccctatttttatatgcagctacacaaaaaattgctcataaacagtgttctatttagttatcataaattttgtttcc

SEQ ID NO: 40454 - protein, 242 aa, Arabidopsis thaliana
  peptide (1)..(242): Ceres Seq. ID no. 12340438
MPYFIQRLFNTCKSSLSPNGPVSEEALDKVRNVLEKIKPSDVGLEQEAQLVRNWPGPGNERNGNHHSLPAIKYLQLHECDSFSIGIFCMPPGSIIPLHNHPGMTVLSKLVYGSMHVKSYDWAEPDQSELDDPLQARPAKLVKDIDMTSPSPATTLYPTTGGNIHCFKAITHCAIFDILSPPYSSTHGRHCNYFRKSPMLDLPGEIEVMNGEVISNVTWLEEYQPPDNFVIWRVPYRGPVIRK

SEQ ID NO: 40455 - protein, 154 aa, Arabidopsis thaliana
  peptide (1)..(154): Ceres Seq. ID no. 12340439
MPPGSIIPLHNHPGMTVLSKLVYGSMHVKSYDWAEPDQSELDDPLQARPAKLVKDIDMTSPSPATTLYPTTGGNIHCFKAITHCAIFDILSPPYSSTHGRHCNYFRKSPMLDLPGEIEVMNGEVISNVTWLEEYQPPDNFVIWRVPYRGPVIRK

SEQ ID NO: 40456 - protein, 140 aa, Arabidopsis thaliana
  peptide (1)..(140): Ceres Seq. ID no. 12340440
MTVLSKLVYGSMHVKSYDWAEPDQSELDDPLQARPAKLVKDIDMTSPSPATTLYPTTGGNIHCFKAITHCAIFDILSPPYSSTHGRHCNYFRKSPMLDLPGEIEVMNGEVISNVTWLEEYQPPDNFVIWRVPYRGPVIRK

SEQ ID NO: 40457 - DNA, 1214 bp, Arabidopsis thaliana
  misc_feature (1)..(1214): Ceres Seq. ID no. 12370965
  misc_feature (1)..(1214): Ortholog of  Ceres SEQ ID NO 13648488 as cited in SEQ ID NO 20419
  misc_feature (1)..(1214): Ortholog of  Ceres SEQ ID NO 15171378 as cited in SEQ ID NO 51582
atcttcctcattcatagatccaaaaacccaaatcgaaaaatcgattctttagtcagaaaaaatgaggaccaaatctccatcttctcttaatctcaaggtcatattcataggttcctcaatcttgatcttgatcatcatctacttagcaagatcaaacatctcttcttcctcttcaaagccaatctccaaaacaaatctctcccaagaagaagaagaaactcagcataaacaagaaggatgtccaacaacacaacaatgcacaaagatgccactttctttatccgatgcattggttcattacgtcactagtaacgtcactccacaacaaacatttgatgaagtctctgtctcaaagagagtcttggacaagaagtctccttgtaacttccttgtctttggcttaggtcacgacagtttaatgtgggcatctcttaaccatggtggtcgtaccttgtttattgaagaagaccaagcttggattgcgatagtaactaagaagttcccaaacttagaatcttaccacgtagtttacgacacaaaagtcaaagattcagacaagctgatggaactaggaagatcagaagagtgtagatctgtgtctgatccgagaaactccaaatgtgatcttgcgttgaaagatttcccggcggacttttacgagacgaaatgggatctgatcatggttgatgcaccaactggttaccatgaagaagctccggggaggatgagtgctatttacacggcggggcttttggctcgtaaccgtgaagatggtgaaactgacgtttttgttcacgacgttaaccgtccggtggaagatgagttctcggcgactttcttgtgtaaaggttatatgagggagcaaaatgggagacttagacattttactattcctagtcatcgggctcgtgctggacgacctttttgtccggtggaagttgatcgccgccgttaattttgtggtgggagatttatttagttcaccgtcgttggtcggtcaacggactcagggctggtaaattgttttacctagtggacattgaaggacttgcttagctggcattttgtatttgttttgttttgtttttgcttgatttaaatacgtttttcaagattttagtgcatttactgaaatcgatacatactagtattcgcatgattatttgtgatttcattatcccttttgattaatgaatacaaataaggaatttatc

SEQ ID NO: 40458 - protein, 297 aa, Arabidopsis thaliana
  peptide (1)..(297): Ceres Seq. ID no. 12370966
MRTKSPSSLNLKVIFIGSSILILIIIYLARSNISSSSSKPISKTNLSQEEEETQHKQEGCPTTQQCTKMPLSLSDALVHYVTSNVTPQQTFDEVSVSKRVLDKKSPCNFLVFGLGHDSLMWASLNHGGRTLFIEEDQAWIAIVTKKFPNLESYHVVYDTKVKDSDKLMELGRSEECRSVSDPRNSKCDLALKDFPADFYETKWDLIMVDAPTGYHEEAPGRMSAIYTAGLLARNREDGETDVFVHDVNRPVEDEFSATFLCKGYMREQNGRLRHFTIPSHRARAGRPFCPVEVDRRR

SEQ ID NO: 40459 - protein, 229 aa, Arabidopsis thaliana
  peptide (1)..(229): Ceres Seq. ID no. 12370967
MPLSLSDALVHYVTSNVTPQQTFDEVSVSKRVLDKKSPCNFLVFGLGHDSLMWASLNHGGRTLFIEEDQAWIAIVTKKFPNLESYHVVYDTKVKDSDKLMELGRSEECRSVSDPRNSKCDLALKDFPADFYETKWDLIMVDAPTGYHEEAPGRMSAIYTAGLLARNREDGETDVFVHDVNRPVEDEFSATFLCKGYMREQNGRLRHFTIPSHRARAGRPFCPVEVDRRR

SEQ ID NO: 40460 - protein, 178 aa, Arabidopsis thaliana
  peptide (1)..(178): Ceres Seq. ID no. 12370968
MWASLNHGGRTLFIEEDQAWIAIVTKKFPNLESYHVVYDTKVKDSDKLMELGRSEECRSVSDPRNSKCDLALKDFPADFYETKWDLIMVDAPTGYHEEAPGRMSAIYTAGLLARNREDGETDVFVHDVNRPVEDEFSATFLCKGYMREQNGRLRHFTIPSHRARAGRPFCPVEVDRRR

SEQ ID NO: 40461 - DNA, 1128 bp, Arabidopsis thaliana
  misc_feature (1)..(1128): Ceres Seq. ID no. 12323867
  misc_feature (1)..(1128): Ortholog of  Ceres SEQ ID NO 14310520 as cited in SEQ ID NO 58736
acaacaatctcactttgtctttttttctctctctctctctctctcatagaaaaggaagtggtggaagatgccgaggccagggccaagaccgtacgactgtatcagaagagcttggcatagtgacagacaccaacccatgaggggtttgctcatccaagagattttcaggtcatcatcatcatctctctctcactttggatatctatctgtgtatctataggtttgtgtgtgtgcatgtctttctttagctcaattgttctttgaactatttgtaggattgtttatgagattcacagccaatccaccaggaaaaacacagaatggcaagagaagctccctgttgttgtcttgagagctgaagaaatcatgtattccaaagccaattctgaggctgagtatatggacatgaagacccttttagaccgtacaaacgacgccatcaacacaatcatacgacttgatgagaccaccgaaacaggggaatttcttcagccttgtattgaagctgcattgcatttggggtgcacaccaaggagagcttcaaggagccaacggaacattaacccgagatgttatcttagccaagactcaactaacttggacaacatgttgtcccaagtattcatgaaaccaaacaactttgctccaaagaatcttgcagtagcacaagagaattgccctgtctccaagtactctgcctaccctttatgctattcattccggccaatcagtgactcgtgtaagtccaagaacagtagaccggcgagtctcattgacgcaacaaatggcattacctttggtgggtgtgaatgtgatctatctctgcgcttaggtcctcttggacctcctactcaaaaacgaagtaagataagcagcaacaataacaactgaaaaggagagcaagattgggttttgattagcaagtcttgtgttagaagaatgtgtgcttagttaggccttttagtctcctctctagaccctaggtttaggtttgtgaacatgtaaatagagagacgaagtaacaaaacaggagatgaagtcgttttcttctacctgcatcaatctcgaatcatcagacttcacgaatgtatttttacattgcaacactgttcgagaaatatccattcc

SEQ ID NO: 40462 - protein, 174 aa, Arabidopsis thaliana
  peptide (1)..(174): Ceres Seq. ID no. 12323868
MYSKANSEAEYMDMKTLLDRTNDAINTIIRLDETTETGEFLQPCIEAALHLGCTPRRASRSQRNINPRCYLSQDSTNLDNMLSQVFMKPNNFAPKNLAVAQENCPVSKYSAYPLCYSFRPISDSCKSKNSRPASLIDATNGITFGGCECDLSLRLGPLGPPTQKRSKISSNNNN

SEQ ID NO: 40463 - protein, 163 aa, Arabidopsis thaliana
  peptide (1)..(163): Ceres Seq. ID no. 12323869
MDMKTLLDRTNDAINTIIRLDETTETGEFLQPCIEAALHLGCTPRRASRSQRNINPRCYLSQDSTNLDNMLSQVFMKPNNFAPKNLAVAQENCPVSKYSAYPLCYSFRPISDSCKSKNSRPASLIDATNGITFGGCECDLSLRLGPLGPPTQKRSKISSNNNN

SEQ ID NO: 40464 - protein, 161 aa, Arabidopsis thaliana
  peptide (1)..(161): Ceres Seq. ID no. 12323870
MKTLLDRTNDAINTIIRLDETTETGEFLQPCIEAALHLGCTPRRASRSQRNINPRCYLSQDSTNLDNMLSQVFMKPNNFAPKNLAVAQENCPVSKYSAYPLCYSFRPISDSCKSKNSRPASLIDATNGITFGGCECDLSLRLGPLGPPTQKRSKISSNNNN

SEQ ID NO: 40465 - DNA, 1737 bp, Arabidopsis thaliana
  misc_feature (1)..(1737): Ceres Seq. ID no. 13491401
  misc_feature (1)..(1737): Ortholog of  Ceres SEQ ID NO 13494050 as cited in SEQ ID NO 20553
  misc_feature (1)..(1737): Ortholog of  Ceres SEQ ID NO 15177308 as cited in SEQ ID NO 52713
  misc_feature (1)..(1737): Ortholog of  Ceres SEQ ID NO 13595821 as cited in SEQ ID NO 56524
  misc_feature (1)..(1737): Ortholog of  Ceres SEQ ID NO 12784729 as cited in SEQ ID NO 61383
  misc_feature (1)..(1737): Ortholog of  Ceres SEQ ID NO 15174365 as cited in SEQ ID NO 0
aaagctccgttattcaagattattccgataatgcagtcactctccaccccacacaccatctctcttcttctccccagaacctctccgtctcgtctttctccctctcttcactcccttgctttccccactcgattacggtctctttcctattcttctcaaacgtcgatcctccccgatgccggcgatgatttcattgtcggtgactgtctcgtctacgaggacggcgtcttcgaagacccttaccttgataaggaggtcactcaggttgcgaagcaggagcgcaagaagaatcggcgtggcggggctaagagattagatgaatccgagattgagcccgagaacctcgtgccagaggaatggagggatattcaggcggaggtgaatctgacgaagaaggacaagcgcaaaatagcgcaggagatggagttcggggttcgggtggagaagaagaggcaagggctaattccgctgaggaaagttgacttgaatgactttctcacgtacaaggaagccaagttggctcaattgaggcctgtcattctcgataaaccgggaaatttctccgacgacagtggagcgtcaagcgatggagagaccgctgtatcatctcccagcgagcgagtggctcctaagaaccctagatgggcagtttacggaaagggattcgaccacgttgccaagttcttcaatagcgacaagtacgatcccagcgacaagaaatccgacggccctcgaaagctgctttcaaaagaagagaagtttatgctcaatagccggaatcctgacctagccgttgccacatcaaaaaaatggcttcctcttcacacagttaattaaattaatccccccccccccccgctccacacttcacccaaaactccagaaccctagaattcgaaatctccaaagaacccgacaaagcgccatgtcgctcactatcccggcgaatctcgttctcaacccgagatctaacaaatctctcactcaatccgtacctaaatcctccgcaagattcgtctgctccgatgacaaatcctcctcctccacacctcaatccatgaaagctttctccgccgccgtcgccctctcttccatcctcctctctgctcctatgccagctgtcgctgatatctcaggtttgactccttgcaaggactcaaaacagttcgctaaaagagagaagcaacagatcaagaagcttgaatcttctcttaagctctacgctcctgaatctgcccctgctcttgctctcaatgctcagatcgagaaaaccaaacgcaggttcgacaactacgggaagtacggattgttatgcgggtcagacggtttaccgcacttgatagtgaacggagaccagcggcattggggagagttcattactccagggattcttttcctctacattgctggatggatcgggtgggttggaagaagctacttaatagctattagtggtgagaagaaacccgcgatgaaagagatcatcatcgatgttcctttggctagtcggatcatcttccgtggtttcatttggcccgttgctgcctacagagagtttctcaatggtgatctcattgctaaggatgtttaaaaagggaacttgttttctgcttttgtgttactctctctaatctctttgttttccattgtacttattgaaaaacaatgcattgtcgaaaaccttataaaatttggattgcgcaagtagaaagaattatggctaaaatggtgattgac

SEQ ID NO: 40466 - protein, 278 aa, Arabidopsis thaliana
  peptide (1)..(278): Ceres Seq. ID no. 13491402
KAPLFKIIPIMQSLSTPHTISLLLPRTSPSRLSPSLHSLAFPTRLRSLSYSSQTSILPDAGDDFIVGDCLVYEDGVFEDPYLDKEVTQVAKQERKKNRRGGAKRLDESEIEPENLVPEEWRDIQAEVNLTKKDKRKIAQEMEFGVRVEKKRQGLIPLRKVDLNDFLTYKEAKLAQLRPVILDKPGNFSDDSGASSDGETAVSSPSERVAPKNPRWAVYGKGFDHVAKFFNSDKYDPSDKKSDGPRKLLSKEEKFMLNSRNPDLAVATSKKWLPLHTVN

SEQ ID NO: 40467 - protein, 268 aa, Arabidopsis thaliana
  peptide (1)..(268): Ceres Seq. ID no. 13491403
MQSLSTPHTISLLLPRTSPSRLSPSLHSLAFPTRLRSLSYSSQTSILPDAGDDFIVGDCLVYEDGVFEDPYLDKEVTQVAKQERKKNRRGGAKRLDESEIEPENLVPEEWRDIQAEVNLTKKDKRKIAQEMEFGVRVEKKRQGLIPLRKVDLNDFLTYKEAKLAQLRPVILDKPGNFSDDSGASSDGETAVSSPSERVAPKNPRWAVYGKGFDHVAKFFNSDKYDPSDKKSDGPRKLLSKEEKFMLNSRNPDLAVATSKKWLPLHTVN

SEQ ID NO: 40468 - protein, 221 aa, Arabidopsis thaliana
  peptide (1)..(221): Ceres Seq. ID no. 13491404
MSLTIPANLVLNPRSNKSLTQSVPKSSARFVCSDDKSSSSTPQSMKAFSAAVALSSILLSAPMPAVADISGLTPCKDSKQFAKREKQQIKKLESSLKLYAPESAPALALNAQIEKTKRRFDNYGKYGLLCGSDGLPHLIVNGDQRHWGEFITPGILFLYIAGWIGWVGRSYLIAISGEKKPAMKEIIIDVPLASRIIFRGFIWPVAAYREFLNGDLIAKDV

SEQ ID NO: 40469 - DNA, 1224 bp, Arabidopsis thaliana
  misc_feature (1)..(1224): Ceres Seq. ID no. 12327591
  misc_feature (1)..(1224): Ortholog of  Ceres SEQ ID NO 13593932 as cited in SEQ ID NO 54078
  misc_feature (1)..(1224): Ortholog of  Ceres SEQ ID NO 12635231 as cited in SEQ ID NO 0
aacaaaactctcaaagtcgcaacagaaaagaaacgagagagatatggtggtaggcggcggaggagaaggagatcagaagagaagcagcggagaaatgatggcgatggcgagtttattcaacgatcagcagaatccaattcaacagtttcaggttaaattcaaagaagtagaaactaatttcaagacatggttgtcgaaacagtcgattccggtggaagccgccgtcgtatccaccatgagcggtgtacaaggagctttcattggtggtctcatgggaacactctctcctgaaatgcctcaagccggcgttgaccctcaagccatagcttcgatgaaacaagctcaggtttcaactctatataaaccctatcctcattcaaatgtttgtaaaattgaggtatgagaattagggtttttgaatctgtaggctcttgtgggtggtccttgggtccaagctcggaattttgctgcaattactggtgtgaatgctggaattgcttctgttatgaagcggattagaggcaaagaggatattgaatctgcagtggtggcagcgttaggatctggatttgcatactcattggtgagccaaggattgcaaggacaacctatgaatgcaatcactactgctgctggttttgctgtttttcaaggagtgttttttaaattggagaaagattctctaaaccgagtactgaagatccatttttcacaagaggaaggacaatgctagtaaagctaggtttggagaaatacgagaagaacttcaagaaaggacttttaactgatcccacattgccattgctcactgatagcgcgctgaaagatgcgaacatcccaccagggccaagacttatgatactagatcatatccagagggacccggagataaagggcaaacgaaagtaggagccatgttgtttaatcaaatatgttttgatggtaacgatcttcaaacacatatgtaatgccttttacttttagctgctattgccatgaagagctcttgttagatacttctgtttctattaccaatgtttgattctctttaaaaaattgagtagttcgtctcaaatcaaattggatataggttctgaataaaacgaaaatgaaatatgctttgtatgagaataagatgtttatattatgtatagttgattgacttaagatcaagactcgataaaattttggttcatacaattggccaatcaccaaagtgattcg

SEQ ID NO: 40470 - protein, 133 aa, Arabidopsis thaliana
  peptide (1)..(133): Ceres Seq. ID no. 12327592
TKLSKSQQKRNERDMVVGGGGEGDQKRSSGEMMAMASLFNDQQNPIQQFQVKFKEVETNFKTWLSKQSIPVEAAVVSTMSGVQGAFIGGLMGTLSPEMPQAGVDPQAIASMKQAQVSTLYKPYPHSNVCKIEV

SEQ ID NO: 40471 - protein, 119 aa, Arabidopsis thaliana
  peptide (1)..(119): Ceres Seq. ID no. 12327593
MVVGGGGEGDQKRSSGEMMAMASLFNDQQNPIQQFQVKFKEVETNFKTWLSKQSIPVEAAVVSTMSGVQGAFIGGLMGTLSPEMPQAGVDPQAIASMKQAQVSTLYKPYPHSNVCKIEV

SEQ ID NO: 40472 - protein, 102 aa, Arabidopsis thaliana
  peptide (1)..(102): Ceres Seq. ID no. 12327594
MMAMASLFNDQQNPIQQFQVKFKEVETNFKTWLSKQSIPVEAAVVSTMSGVQGAFIGGLMGTLSPEMPQAGVDPQAIASMKQAQVSTLYKPYPHSNVCKIEV

SEQ ID NO: 40473 - DNA, 1400 bp, Arabidopsis thaliana
  misc_feature (1)..(1400): Ceres Seq. ID no. 12422192
  misc_feature (1)..(1400): Ortholog of  Ceres SEQ ID NO 15226533 as cited in SEQ ID NO 59723
atctgtcgtgttctgtttgttctcacttctcacttctcagatttttataaacatgaatgaaacctgaattgttccactaactctcagcaaaaatgcgatcactttacttaatcgtcttcatcgttattagtcttgttaaagcttcgaaaagcgatgatgggttttgttcagcgccttcgattgttgaatcggatgagaagacgaaacccatttattggaaagccacgaatccaacactctctccttcacacctccaagacttgcctggtttcacacgaagtgtatacaaacgagatcatgcgttaataacaccggaaagtcatgtatacagccctttacctgactggacaaacacattaggggcgtatttgatcacaccggcaacgggttcccattttgtcatgtacttggcgaaaatgaaagaaatgtcaagttcaggtttgcctccacaagacatagagcggtattattacttatatgagctctatctttaacatatgcttgcacttatgatctataatctgctttttaactcctttcaatattctgaatctttttcaagtcttatattcgtggtcgagggtgctgtgacactcactaacacatccagttcttcaaaaaaattgacggtatgatttgtacaaaggaaaatttaccacagtattcttctggttacatcacgttctgcccagatttgatggtgaaatggttgcaagatttctccattagttttatcattttctgctgataatccatttttcctgtaggttgattcatatgcgtacctacctccaaactttcaccattccttggactgtgttgagtctgcaacacttgttgtcttcgagcggaggtatgaatatctaggaagtcacaccacagagcttattgttggctccacagacaagcaaccactactcgagactcctggtgaggtttttgaactgcggaaacttcttccgatgtccgttgcttatgacttcaacatccatattatggattttcagcctggagagtttctgaatgttaaggaagttcattataaccagcatggtttgttgcttctggaggggcaaggcatttatcgcttgggtgataactggtatccagttcaggctggtgatgtcatatggatggctccttttgtccctcaatggtatgctgcactcggaaagactaggtctcggtatttgttgtacaaagatgtgaatcgaaatccattgtgatcaaagattgatatgactttgcagtaaaagtcagaatcttgttgttcagcttcttgtcttataaacgccatgtccactctaagcactagctacgtgagacttagttgtatgaatcttataacaattgtgaaaagaaacacattgataaatgatgaaatgactctctctctctcc

SEQ ID NO: 40474 - protein, 133 aa, Arabidopsis thaliana
  peptide (1)..(133): Ceres Seq. ID no. 12422193
MRSLYLIVFIVISLVKASKSDDGFCSAPSIVESDEKTKPIYWKATNPTLSPSHLQDLPGFTRSVYKRDHALITPESHVYSPLPDWTNTLGAYLITPATGSHFVMYLAKMKEMSSSGLPPQDIERYYYLYELYL

SEQ ID NO: 40475 - protein, 87 aa, Arabidopsis thaliana
  peptide (1)..(87): Ceres Seq. ID no. 12422194
MSVAYDFNIHIMDFQPGEFLNVKEVHYNQHGLLLLEGQGIYRLGDNWYPVQAGDVIWMAPFVPQWYAALGKTRSRYLLYKDVNRNPL

SEQ ID NO: 40476 - protein, 76 aa, Arabidopsis thaliana
  peptide (1)..(76): Ceres Seq. ID no. 12422195
MDFQPGEFLNVKEVHYNQHGLLLLEGQGIYRLGDNWYPVQAGDVIWMAPFVPQWYAALGKTRSRYLLYKDVNRNPL

SEQ ID NO: 40477 - DNA, 2154 bp, Arabidopsis thaliana
  misc_feature (1)..(2154): Ceres Seq. ID no. 13499967
  misc_feature (1)..(2154): Ortholog of  Ceres SEQ ID NO 14306375 as cited in SEQ ID NO 59766
  misc_feature (1)..(2154): Ortholog of  Ceres SEQ ID NO 13599322 as cited in SEQ ID NO 0
gagacaaaaaggaaaaaaacaaaattaaaattaggaaagttaaaataattttcctgcaaatttcttctttctcagaaatctaaaaaaaaacaatgaagaaaacaccgtaacgaatcataaaatttctcaaaatccaaactctgttttttgttcttcctcttccagatttggtttctttttttgaaaaactctctagcttcagttttttttttctctctctctctctctctaggaatgtttttgttcgtggatactggaatcatgagaataagattttgaaggagaaagcaagatccatgttctttgtcggagaatttagggctaatatgtggatttgagcttctttgattcccaatttgtgaaagttttgaaatttttgggaaagagagaatgtttaagcagtttctgagtaaacttccgaggaagtcttcaaaatctgattcaggagagctgaatcgttcgagttcgggtccggtatcgtctccggttcagagatccggtactagtggtggtggttcgggtccggttcgatctaactcagggaagcgtatgtcatctgctgtgttcccagctagtgttgttgctggtattgagcctttggtaccgtttaaggatgtaccaagctctgagaagttgaatctctttgtgagtaaagttagtctctgttgtgtgacatttgatttctctgaccctggtaaaaactctatagagaaagatgttaaaaggcagacattgttggagcttttggattttgtagcttcagggtctgttaagttcactgagccagctattcttgcaatgtgtagaatgtgtgctgttaatctctttagggtctttcctccgaattatcggtctagttctggtggcgaaaacgatgatgatgaaccgatgtttgaccctgcttggcctcatttgcagattgtgtatgatttgttgcttaagtttatcacttctccgtgtcttgatgctaaagtggcaaaaaagtatttagatcatgctttcattgtgaggttgcttgacttgtttgattcggaggatcctagagaacgggagtgtttgaagacgattctgcatcgggtatatgggaagttcatggttcataggccatttgtacgcaagtccatgagcaatatattctaccggtttgtgtttgagacagagaagcatagcggaatcgctgagcttttggagattttcgggagtatagtgagtggatttgcgttgcctttgaaagaagagcataagatcttcttgtggagagtgttgattccattgcacaagcctaaatctgttggaaactactttcagcagctttcttattgtatcactcagttcatagataaagagccgaaactaggcagtgttgtgataaagggtttgttgaagttctggcctatcacgaatagtcagaaggaagtgatgtttctcggggaggtcgaagaaattgtagaagcaatgagtgtgatggagtttcaaaagatcatggtccctttgttcttgcggattgcttgttgtgtcaccagttcccactttcaggtttctgaaagagctttattcttgtggaacaacgatcaaattgtaaacttgattggacataaccggcaagccatcctaccaatcatgttcactgctttagaaaagaatgctcagaaccactggaaccaatccgtgctaaacttaaccttaaacgtacgaaaaatgttctgcgaaatggacgaggctctgttcatgtcttgccacgcccgctttaaggaggacgaagcaaagcaatgttctgctgcggaaaagaggaaagaagtatgggcaaggctagagaatgcagcaagtatgaagccgataacaggaaagactgctgttctggtaactcctcgagcaacctccatcgcctgctaaatagcgtttaaaccaattcacagacagtttatccaaagcaacaacatcgagaagatgatggagtggctgttgcttaagctatagtcttgggaacttttcatcgaggttgatctctgtaatattatataactttgatgttgttagctgtgtgggttttaatgctaattctattgctttcttttaaagcaatgaaaccatgctgcagatttttatcaaactctttgtatcaatcaattaagtttatatatcctttttctttcg

SEQ ID NO: 40478 - protein, 500 aa, Arabidopsis thaliana
  peptide (1)..(500): Ceres Seq. ID no. 13499968
MFKQFLSKLPRKSSKSDSGELNRSSSGPVSSPVQRSGTSGGGSGPVRSNSGKRMSSAVFPASVVAGIEPLVPFKDVPSSEKLNLFVSKVSLCCVTFDFSDPGKNSIEKDVKRQTLLELLDFVASGSVKFTEPAILAMCRMCAVNLFRVFPPNYRSSSGGENDDDEPMFDPAWPHLQIVYDLLLKFITSPCLDAKVAKKYLDHAFIVRLLDLFDSEDPRERECLKTILHRVYGKFMVHRPFVRKSMSNIFYRFVFETEKHSGIAELLEIFGSIVSGFALPLKEEHKIFLWRVLIPLHKPKSVGNYFQQLSYCITQFIDKEPKLGSVVIKGLLKFWPITNSQKEVMFLGEVEEIVEAMSVMEFQKIMVPLFLRIACCVTSSHFQVSERALFLWNNDQIVNLIGHNRQAILPIMFTALEKNAQNHWNQSVLNLTLNVRKMFCEMDEALFMSCHARFKEDEAKQCSAAEKRKEVWARLENAASMKPITGKTAVLVTPRATSIAC

SEQ ID NO: 40479 - protein, 447 aa, Arabidopsis thaliana
  peptide (1)..(447): Ceres Seq. ID no. 13499969
MSSAVFPASVVAGIEPLVPFKDVPSSEKLNLFVSKVSLCCVTFDFSDPGKNSIEKDVKRQTLLELLDFVASGSVKFTEPAILAMCRMCAVNLFRVFPPNYRSSSGGENDDDEPMFDPAWPHLQIVYDLLLKFITSPCLDAKVAKKYLDHAFIVRLLDLFDSEDPRERECLKTILHRVYGKFMVHRPFVRKSMSNIFYRFVFETEKHSGIAELLEIFGSIVSGFALPLKEEHKIFLWRVLIPLHKPKSVGNYFQQLSYCITQFIDKEPKLGSVVIKGLLKFWPITNSQKEVMFLGEVEEIVEAMSVMEFQKIMVPLFLRIACCVTSSHFQVSERALFLWNNDQIVNLIGHNRQAILPIMFTALEKNAQNHWNQSVLNLTLNVRKMFCEMDEALFMSCHARFKEDEAKQCSAAEKRKEVWARLENAASMKPITGKTAVLVTPRATSIAC

SEQ ID NO: 40480 - protein, 364 aa, Arabidopsis thaliana
  peptide (1)..(364): Ceres Seq. ID no. 13499970
MCRMCAVNLFRVFPPNYRSSSGGENDDDEPMFDPAWPHLQIVYDLLLKFITSPCLDAKVAKKYLDHAFIVRLLDLFDSEDPRERECLKTILHRVYGKFMVHRPFVRKSMSNIFYRFVFETEKHSGIAELLEIFGSIVSGFALPLKEEHKIFLWRVLIPLHKPKSVGNYFQQLSYCITQFIDKEPKLGSVVIKGLLKFWPITNSQKEVMFLGEVEEIVEAMSVMEFQKIMVPLFLRIACCVTSSHFQVSERALFLWNNDQIVNLIGHNRQAILPIMFTALEKNAQNHWNQSVLNLTLNVRKMFCEMDEALFMSCHARFKEDEAKQCSAAEKRKEVWARLENAASMKPITGKTAVLVTPRATSIAC

SEQ ID NO: 40481 - DNA, 1761 bp, Arabidopsis thaliana
  misc_feature (1)..(1761): Ceres Seq. ID no. 13488981
  misc_feature (1)..(1761): Ortholog of  Ceres SEQ ID NO 14307257 as cited in SEQ ID NO 54628
gcagcagcaaatactatcatcacccatctccttagttctattttataattcctcttctttttgttcatagctttgtaattatagtcttatttctctttaaggctcaataagaggagatgggtgaaaccgctgccgccaataaccaccgtcaccaccaccatcacggccaccaggtctttgacgtggccagccacgatttcgtccctccacaaccggcttttaaatgcttcgatgatgatggccgcctcaaaagaactgggactgtttggaccgcgagcgctcatataataactgcggttatcggatccggcgttttgtcattggcgtgggcgattgcacagctcggatggatcgctggccctgctgtgatgctattgttctctcttgttactctttactcctccacacttcttagcgactgctacagaaccggcgatgcagtgtctggcaagagaaactacacttacatggatgccgttcgatcaattctcggtgggttcaagttcaagatttgtgggttgattcaatacttgaatctctttggtatcgcaattggatacacgatagcagcttccataagcatgatggcgatcaagagatccaactgcttccacaagagtggaggaaaagacccatgtcacatgtccagtaatccttacatgatcgtatttggtgtggcagagatcttgctctctcaggttcctgatttcgatcagatttggtggatctccattgttgcagctgttatgtccttcacttactctgccattggtctagctcttggaatcgttcaagttgcagcgaatggagttttcaaaggaagtctcactggaataagcatcggaacagtgactcaaacacagaagatatggagaaccttccaagcacttggagacattgcctttgcgtactcatactctgttgtcctaatcgagattcaggatactgtaagatccccaccggcggaatcgaaaacgatgaagaaagcaacaaaaatcagtattgccgtcacaactatcttctacatgctatgtggctcaatgggttatgccgcttttggagatgcagcaccgggaaacctcctcaccggttttggattctacaacccgttttggctccttgacatagctaacgccgccattgttgtccacctcgttggagcttaccaagtctttgctcagcccatctttgcctttattgaaaaatcagtcgcagagagatatccagacaatgacttcctcagcaaggaatttgaaatcagaatccccggatttaagtctccttacaaagtaaacgttttcaggatggtttacaggagtggctttgtcgttacaaccaccgtgatatcgatgctgatgccgttttttaacgacgtggtcgggatcttaggggcgttagggttttggcccttgacggtttattttccggtggagatgtatattaagcagaggaaggttgagaaatggagcacgagatgggtgtgtttacagatgcttagtgttgcttgtcttgtgatctcggtggtcgccggggttggatcaatcgccggagtgatgcttgatcttaaggtctataagccattcaagtctacatattgatgattatggaccatgaacaacagagagagttggtgtgtaaagtttaccatttcaaagaaaactccaaaaatgtgtatattgtatgttgttctcatttcgtatggtctcatctttgtaataaaatttaaaacttatgttataaattataaaaccgtgtgtttcc

SEQ ID NO: 40482 - protein, 493 aa, Arabidopsis thaliana
  peptide (1)..(493): Ceres Seq. ID no. 13488982
MGETAAANNHRHHHHHGHQVFDVASHDFVPPQPAFKCFDDDGRLKRTGTVWTASAHIITAVIGSGVLSLAWAIAQLGWIAGPAVMLLFSLVTLYSSTLLSDCYRTGDAVSGKRNYTYMDAVRSILGGFKFKICGLIQYLNLFGIAIGYTIAASISMMAIKRSNCFHKSGGKDPCHMSSNPYMIVFGVAEILLSQVPDFDQIWWISIVAAVMSFTYSAIGLALGIVQVAANGVFKGSLTGISIGTVTQTQKIWRTFQALGDIAFAYSYSVVLIEIQDTVRSPPAESKTMKKATKISIAVTTIFYMLCGSMGYAAFGDAAPGNLLTGFGFYNPFWLLDIANAAIVVHLVGAYQVFAQPIFAFIEKSVAERYPDNDFLSKEFEIRIPGFKSPYKVNVFRMVYRSGFVVTTTVISMLMPFFNDVVGILGALGFWPLTVYFPVEMYIKQRKVEKWSTRWVCLQMLSVACLVISVVAGVGSIAGVMLDLKVYKPFKSTY

SEQ ID NO: 40483 - protein, 409 aa, Arabidopsis thaliana
  peptide (1)..(409): Ceres Seq. ID no. 13488983
MLLFSLVTLYSSTLLSDCYRTGDAVSGKRNYTYMDAVRSILGGFKFKICGLIQYLNLFGIAIGYTIAASISMMAIKRSNCFHKSGGKDPCHMSSNPYMIVFGVAEILLSQVPDFDQIWWISIVAAVMSFTYSAIGLALGIVQVAANGVFKGSLTGISIGTVTQTQKIWRTFQALGDIAFAYSYSVVLIEIQDTVRSPPAESKTMKKATKISIAVTTIFYMLCGSMGYAAFGDAAPGNLLTGFGFYNPFWLLDIANAAIVVHLVGAYQVFAQPIFAFIEKSVAERYPDNDFLSKEFEIRIPGFKSPYKVNVFRMVYRSGFVVTTTVISMLMPFFNDVVGILGALGFWPLTVYFPVEMYIKQRKVEKWSTRWVCLQMLSVACLVISVVAGVGSIAGVMLDLKVYKPFKSTY

SEQ ID NO: 40484 - protein, 376 aa, Arabidopsis thaliana
  peptide (1)..(376): Ceres Seq. ID no. 13488984
MDAVRSILGGFKFKICGLIQYLNLFGIAIGYTIAASISMMAIKRSNCFHKSGGKDPCHMSSNPYMIVFGVAEILLSQVPDFDQIWWISIVAAVMSFTYSAIGLALGIVQVAANGVFKGSLTGISIGTVTQTQKIWRTFQALGDIAFAYSYSVVLIEIQDTVRSPPAESKTMKKATKISIAVTTIFYMLCGSMGYAAFGDAAPGNLLTGFGFYNPFWLLDIANAAIVVHLVGAYQVFAQPIFAFIEKSVAERYPDNDFLSKEFEIRIPGFKSPYKVNVFRMVYRSGFVVTTTVISMLMPFFNDVVGILGALGFWPLTVYFPVEMYIKQRKVEKWSTRWVCLQMLSVACLVISVVAGVGSIAGVMLDLKVYKPFKSTY

SEQ ID NO: 40485 - DNA, 1270 bp, Arabidopsis thaliana
  misc_feature (1)..(1270): Ceres Seq. ID no. 13488957
  misc_feature (1)..(1270): Ortholog of  Ceres SEQ ID NO 15224330 as cited in SEQ ID NO 58808
gagtgagagagagagagagagagaagatgggggttgatttctataaggttcttgaagttgatcgaagtgctaatgacgacgagcttaagaaagcttatcgcaaactcgccatgaaatggcatcctgataagaaccctaacaacaaaaaagaagccgaagctaaattcaagcagatctctgaagcttacgatgttttgagtgatcctcagaaacgagcaatctacgagcaatacggagaagaaggtttaaaccaagccccacctcccggcgccggtggtggctatcctggaggatcagacgccggagcttctttccggttcaatcccagaagcgctgatgatatcttctccgagttctttggtttcacgaggccttcttttggtacgggaagcgactcacgcgcaggaccttctggctttaggtatggcgatgatatcttcgcttccttcagggctgctactaccggaggagaagcctccattccttctaggaaatctgctcctattgagagacaattgccttgtagcttggaggatttgtataaaggtgtctccaagaagatgaagatctctcgtgatgttcttgactcttccgggaggccaacaccggttgaggagatcttgacgatagaaattaaacccggttggaaaaaaggaacaaagataaccttcctggaaaaaggtaatgagcatcgtggagtcataccatccgatctcgttttcatcgtagacgagaaaccgcatcccgttttcaaacgagacgggaatgatcttgtggtaatgcaaaagatttctctagtggatgctctcacaggttacaccgcacaggtcactactcttgacggaagaaccttaacagttccggtaaacaatgtgatcagtccgtcgtacgaagaggtggtgaaaggagaaggcatgccgatccctaaagatccgtcaagaaaaggaaacttgagaatcagattcatcatcaagttcccttcgaagctaaccactgagcagaaatcagggatcaagcggatgttatcaccttgaatgtccaaagattgaagcatctcgtttcagttttttcaatctgctagcttttttggaatcttttagaagcagaatatgtgcttatggtttttttaatttattttggttgcattttggtaaggtttttaagggaaatacataccaccaaatgatgccggtttagttagtaatgactgacgactagtgaagtaaagtctctccttatatctctttgctaaaagcttcaatatttgttc

SEQ ID NO: 40486 - protein, 343 aa, Arabidopsis thaliana
  peptide (1)..(343): Ceres Seq. ID no. 13488958
VREREREKMGVDFYKVLEVDRSANDDELKKAYRKLAMKWHPDKNPNNKKEAEAKFKQISEAYDVLSDPQKRAIYEQYGEEGLNQAPPPGAGGGYPGGSDAGASFRFNPRSADDIFSEFFGFTRPSFGTGSDSRAGPSGFRYGDDIFASFRAATTGGEASIPSRKSAPIERQLPCSLEDLYKGVSKKMKISRDVLDSSGRPTPVEEILTIEIKPGWKKGTKITFLEKGNEHRGVIPSDLVFIVDEKPHPVFKRDGNDLVVMQKISLVDALTGYTAQVTTLDGRTLTVPVNNVISPSYEEVVKGEGMPIPKDPSRKGNLRIRFIIKFPSKLTTEQKSGIKRMLSP

SEQ ID NO: 40487 - protein, 335 aa, Arabidopsis thaliana
  peptide (1)..(335): Ceres Seq. ID no. 13488959
MGVDFYKVLEVDRSANDDELKKAYRKLAMKWHPDKNPNNKKEAEAKFKQISEAYDVLSDPQKRAIYEQYGEEGLNQAPPPGAGGGYPGGSDAGASFRFNPRSADDIFSEFFGFTRPSFGTGSDSRAGPSGFRYGDDIFASFRAATTGGEASIPSRKSAPIERQLPCSLEDLYKGVSKKMKISRDVLDSSGRPTPVEEILTIEIKPGWKKGTKITFLEKGNEHRGVIPSDLVFIVDEKPHPVFKRDGNDLVVMQKISLVDALTGYTAQVTTLDGRTLTVPVNNVISPSYEEVVKGEGMPIPKDPSRKGNLRIRFIIKFPSKLTTEQKSGIKRMLSP

SEQ ID NO: 40488 - protein, 307 aa, Arabidopsis thaliana
  peptide (1)..(307): Ceres Seq. ID no. 13488960
MKWHPDKNPNNKKEAEAKFKQISEAYDVLSDPQKRAIYEQYGEEGLNQAPPPGAGGGYPGGSDAGASFRFNPRSADDIFSEFFGFTRPSFGTGSDSRAGPSGFRYGDDIFASFRAATTGGEASIPSRKSAPIERQLPCSLEDLYKGVSKKMKISRDVLDSSGRPTPVEEILTIEIKPGWKKGTKITFLEKGNEHRGVIPSDLVFIVDEKPHPVFKRDGNDLVVMQKISLVDALTGYTAQVTTLDGRTLTVPVNNVISPSYEEVVKGEGMPIPKDPSRKGNLRIRFIIKFPSKLTTEQKSGIKRMLSP

SEQ ID NO: 40489 - DNA, 1267 bp, Arabidopsis thaliana
  misc_feature (1)..(1267): Ceres Seq. ID no. 12323871
  misc_feature (1)..(1267): Ortholog of  Ceres SEQ ID NO 14314643 as cited in SEQ ID NO 56903
aaaataagctctctttctactatttctctttctctttctactatttctctcctgtggagaaactcaggagatagagagagagagagagaagagaagagagcatgtatgtttggttttataatctctctactcataccaaagatttgtctcagacccaccacttggacagagagaacccaagctcctttctctctttttctcgatctactccttcttaatctccttttttgaaacttgaagccactttcaacatcatccttaaacttttgttcccttattcacaatctcctgccacctctcatttctctagctacatatatgggttctattagaggaaacattgaagagcctatatctcagtcattaacgaggcagaactctctctatagcttaaagctccatgaggttcaaacccacttaggaagttctggaaaaccactaggaagcatgaaccttgatgagcttctcaagactgtcttgccaccagctgaggaagggcttgttcgtcagggaagcttgacgttacctcgagatctcagtaaaaagacagttgatgaggtctggagagatatccaacaggacaagaatggaaacggtactagtactactactactcataagcagcctacactcggtgaaataacacttgaggatttgttgttgagagctggtgtagtgactgagacagtagtccctcaagaaaatgttgttaacatagcttcaaatgggcaatgggttgagtatcatcatcagcctcaacaacaacaagggtttatgacatatccggtttgcgagatgcaagatatggtgatgatgggtggattatcggatacaccacaagcgcctgggaggaaaagagtagctggagagattgtggagaagactgttgagaggagacagaagaggatgatcaagaacagagaatctgcagcacgttcacgagctaggaaacaggcttatacacatgaattagagatcaaggtttcaaggttagaagaagaaaacgaaaaacttcggaggctaaaggaggtggagaagatcctaccaagtgaaccaccaccagatcctaagtggaagctccggcgaacaaactctgcttctctctgatcctaaagactcttctttctttcttcttctttgtgttggtttatatcagaccgctttgttctttgtatattgtgtagactttattgactttgaacagcatgtctttataaacatttcttgagtgtattcctcttttgcagctagttcaaactttttgagt

SEQ ID NO: 40490 - protein, 262 aa, Arabidopsis thaliana
  peptide (1)..(262): Ceres Seq. ID no. 12323872
MGSIRGNIEEPISQSLTRQNSLYSLKLHEVQTHLGSSGKPLGSMNLDELLKTVLPPAEEGLVRQGSLTLPRDLSKKTVDEVWRDIQQDKNGNGTSTTTTHKQPTLGEITLEDLLLRAGVVTETVVPQENVVNIASNGQWVEYHHQPQQQQGFMTYPVCEMQDMVMMGGLSDTPQAPGRKRVAGEIVEKTVERRQKRMIKNRESAARSRARKQAYTHELEIKVSRLEEENEKLRRLKEVEKILPSEPPPDPKWKLRRTNSASL

SEQ ID NO: 40491 - protein, 219 aa, Arabidopsis thaliana
  peptide (1)..(219): Ceres Seq. ID no. 12323873
MNLDELLKTVLPPAEEGLVRQGSLTLPRDLSKKTVDEVWRDIQQDKNGNGTSTTTTHKQPTLGEITLEDLLLRAGVVTETVVPQENVVNIASNGQWVEYHHQPQQQQGFMTYPVCEMQDMVMMGGLSDTPQAPGRKRVAGEIVEKTVERRQKRMIKNRESAARSRARKQAYTHELEIKVSRLEEENEKLRRLKEVEKILPSEPPPDPKWKLRRTNSASL

SEQ ID NO: 40492 - DNA, 1353 bp, Arabidopsis thaliana
  misc_feature (1)..(1353): Ceres Seq. ID no. 13494668
  misc_feature (1)..(1353): Ortholog of  Ceres SEQ ID NO 13582619 as cited in SEQ ID NO 56520
  misc_feature (1)..(1353): Ortholog of  Ceres SEQ ID NO 14314632 as cited in SEQ ID NO 59923
  misc_feature (1)..(1353): Ortholog of  Ceres SEQ ID NO 13660872 as cited in SEQ ID NO 60830
  misc_feature (1)..(1353): Ortholog of  Ceres SEQ ID NO 12616221 as cited in SEQ ID NO 63291
ctaacttctctgttcatctttttctctctttatttataaatttatctgcatagtactctctgaatctatatcttcaaaaaaaaaaaacgtccaagatcaaatcaagaaacccattaaaaaaaaaaatcaggttttggtttcagttttaagggtttaaggtttcttggggaagaaacgatggagactttttgtgggtttcaaaaggaggaagagcagatggatttacctcctgggttcaggtttcatccaacagatgaagaactcataactcactatctccataagaaggttcttgacaccagcttctcagctaaagctatcggtgaagttgatttaaacaaatcagagccatgggagttaccatggatggcaaaaatgggtgagaaagaatggtattttttctgtgtgagagacagaaagtatcccaccggtttaagaactaaccgagcaactgaagccggttattggaaggcgaccgggaaggataaagagatataccgaggcaaatcacttgttgggatgaagaagacacttgttttctatagaggaagagctcctaaaggtcagaaaaccaactgggtgatgcatgagtacaggcttgaaggaaaattctctgcccataacttgccgaaaaccgcaaagaatgaatgggtgatatgcagggtgttccaaaagagtgctggagggaagaagatcccgatttcgagtctaatccgaatcggttcactcggaaccgactttaacccttcgcttttgccctctttaaccgattcttcgccttacaacgataaaaccaaaacagaaccggtctacgtgccctgcttctccaaccaaacggatcaaaaccaaggaaccacactcaattgcttcagcagccctgttcttaactcgatccaagccgacatttttcacaggattccactctatcaaactcagtccctccaggtttctatgaatctacagagcccggttctcacgcaagaacactcagttctacatgctatgatcgagaacaacagaagacaaagtctcaaaacgatgagtgtctcacaagaaaccggagtttcaactgacatgaacactgatatctcatcggattttgaatttggtaagagacggtttgattctcaagaagatccgtcttcctctactggaccggttgatcttgaacctttctggaattactgaagatgattcaagattctcatgtccattaatttactgtggtgtgttaaagtttgtataggctattgtcatatactctcatatcaacttccactatatattataacaatttaaagaaacttaaaaatatgatttgatatatgactaaagtattataatacaattttg

SEQ ID NO: 40493 - protein, 336 aa, Arabidopsis thaliana; identical to SEQ ID NO: 29064
  peptide (1)..(336): Ceres Seq. ID no. 13494669

SEQ ID NO: 40494 - protein, 323 aa, Arabidopsis thaliana; identical to SEQ ID NO: 29065
  peptide (1)..(323): Ceres Seq. ID no. 13494670

SEQ ID NO: 40495 - protein, 273 aa, Arabidopsis thaliana
  peptide (1)..(273): Ceres Seq. ID no. 13494671
MAKMGEKEWYFFCVRDRKYPTGLRTNRATEAGYWKATGKDKEIYRGKSLVGMKKTLVFYRGRAPKGQKTNWVMHEYRLEGKFSAHNLPKTAKNEWVICRVFQKSAGGKKIPISSLIRIGSLGTDFNPSLLPSLTDSSPYNDKTKTEPVYVPCFSNQTDQNQGTTLNCFSSPVLNSIQADIFHRIPLYQTQSLQVSMNLQSPVLTQEHSVLHAMIENNRRQSLKTMSVSQETGVSTDMNTDISSDFEFGKRRFDSQEDPSSSTGPVDLEPFWNY

SEQ ID NO: 40496 - DNA, 2730 bp, Arabidopsis thaliana
  misc_feature (1)..(2730): Ceres Seq. ID no. 12323874
  misc_feature (1)..(2730): Ortholog of  Ceres SEQ ID NO 14316324 as cited in SEQ ID NO 55612
  misc_feature (1)..(2730): Ortholog of  Ceres SEQ ID NO 14316378 as cited in SEQ ID NO 57746
  misc_feature (1)..(2730): Ortholog of  Ceres SEQ ID NO 15226540 as cited in SEQ ID NO 58479
  misc_feature (1)..(2730): Ortholog of  Ceres SEQ ID NO 13596689 as cited in SEQ ID NO 62728
  misc_feature (1)..(2730): Ortholog of  Ceres SEQ ID NO 13596097 as cited in SEQ ID NO 68421
  misc_feature (1)..(2730): Ortholog of  Ceres SEQ ID NO 13598439 as cited in SEQ ID NO 69016
  misc_feature (1)..(2730): Ortholog of  Ceres SEQ ID NO 13599524 as cited in SEQ ID NO 0
ctctgtttctttctccactctctctctctctcgttgcaagcaacttgttttctgaatccaaagaagacgataacgatgaatggagctataggaggtgaccttttgctcaattttcctgacatgtcggtcctagagcgccaaagggctcacctcaagtacctcaatcccacctttgattctcctctcgccggcttctttgccgattcttcaatgattaccggcggcgagatggacagctatctttcgactgccggtttgaatcttccgatgatgtacggtgagacgacggtggaaggtgattcaagactctcaatttcgccggaaacgacgcttgggactggaaatttcaagaaacggaagtttgatacagagactaaggattgtaatgagaagaagaagaagatgacgatgaacagagatgacctagtagaagaaggagaagaagagaagtcgaaaataacagagcaaaacaatgggagcacaaaaagcatcaagaagatgaaacacaaagccaagaaagaagagaacaatttctctaatgattcatctaaagtgacgaaggaattggagaaaacggattatattcatgttcgtgcacgacgaggccaagccactgatagtcacagcatagcagaacgagttagaagagaaaagatcagtgagagaatgaagtttctacaagatttggttcctggatgcgacaagatcacaggcaaagcagggatgcttgatgaaatcattaactatgttcagtctcttcagagacaaatcgagttcttatcgatgaaactagcaattgtgaatccaaggccggattttgatatggatgacatttttgccaaagaggttgcctcaactccaatgactgtggtgccatctcctgaaatggttctttccggttattctcatgagatggttcactctggttattctagtgagatggttaactccggttaccttcatgtcaatccaatgcagcaagtgaataccagttctgatccattgtcatgcttcaacaatggcgaagctccttcgatgtgggactctcatgtgcagaatctctatggcaatttaggagtttgattaagaaaccaatccacaacataacaatgttccctaattcaaattattcatcggaagagagagcaaaccagtagctgttatttactaattccactagattattgacttgagatcccccgcccattagttgatgtatcaaagagtgtagacattattgtgtataatttgcaaaccagtccagtaatatatttcttatcggtggacttgtgtctttaattcaaggtgtgttctcatcttcttgtggtgaatgatcatccattagtatttttttttttagtatacaatgccacaagtcatgcgaccatgaaatcaagaaacaagacaccagtcgtttaacgttatgttttacatcttatcactaacaatcttctaatctatgttttggttactttgaaaaagcgggactaatcccaaatttaaagcaattgaataaacaacacctgttaagcgtggcggacaaaacgacgacaatgtaagagaactgagtcagagattaaaacctatgaccaacccattggaactaaactatcctaattctctatacggagagtatatataaatggaggaggagaagaagaagagcagagttttgatcatcggagcaacaggaagattagggaactatttgacccgtttcagcatcgaatcgggtcacccgactttcgctctcatcagaaacaccactctctccgataagctgaaatctctctccgacgccggcgttaccctcctcaaaggttcattggaggatgaaggaagcttagcagaagcagtgagtaaagtagatgtggtgatctctgcaattccatcaaaacatgttcttgatcagaaactcctcgtcagagttatcaaacaagctggttccatcaagaggtttattcctgctgaatatggagcaaatcctgataaaactcaagtctcggatcttgatcatgacttctattcgaagaaatcagagattaggcatatgatagaatcagaggggattccatatacatacatttgctgcggactgttcatgagagttctacttccatcgcttgtgcaaccggggcttcaatctcctccaacagataaagtcacagtttttggagatggaaacgttaaagctgttttcgtgaatgatgtcgatgttgcagcatttactatcaagacgatagatgatcctcgaacactgaataagaccttgtaccttagcccgcccggaaacatatgttccatgaatgatcttgtcgagctctgggagggcaagattgagaagaagcttgagaaaacgtttgctacagagaatcaacttctcaagaagatcaaagaaactccatatccggataacatggagatggtattcatatactctgtctttatcaaaggagatcacacatacttcgacatcgagtcttgtggtggagtgaatggtactgagctttaccctgatgtcaaatacatgaccgtgagcgagtttcttgatactcttctctagaattataaaccaaacagcaaagggatcactctcatttttcagagtttaccttttacacttccaaaatttctctgtttttgagggctgaatcaatctatctcatgtagcactatctttaccctattgatctgagtttcgaccttaatcgtgtaacacattacttctgc

SEQ ID NO: 40497 - protein, 360 aa, Arabidopsis thaliana
  peptide (1)..(360): Ceres Seq. ID no. 12323875
LCFFLHSLSLSLQATCFLNPKKTITMNGAIGGDLLLNFPDMSVLERQRAHLKYLNPTFDSPLAGFFADSSMITGGEMDSYLSTAGLNLPMMYGETTVEGDSRLSISPETTLGTGNFKKRKFDTETKDCNEKKKKMTMNRDDLVEEGEEEKSKITEQNNGSTKSIKKMKHKAKKEENNFSNDSSKVTKELEKTDYIHVRARRGQATDSHSIAERVRREKISERMKFLQDLVPGCDKITGKAGMLDEIINYVQSLQRQIEFLSMKLAIVNPRPDFDMDDIFAKEVASTPMTVVPSPEMVLSGYSHEMVHSGYSSEMVNSGYLHVNPMQQVNTSSDPLSCFNNGEAPSMWDSHVQNLYGNLGV

SEQ ID NO: 40498 - protein, 335 aa, Arabidopsis thaliana
  peptide (1)..(335): Ceres Seq. ID no. 12323876
MNGAIGGDLLLNFPDMSVLERQRAHLKYLNPTFDSPLAGFFADSSMITGGEMDSYLSTAGLNLPMMYGETTVEGDSRLSISPETTLGTGNFKKRKFDTETKDCNEKKKKMTMNRDDLVEEGEEEKSKITEQNNGSTKSIKKMKHKAKKEENNFSNDSSKVTKELEKTDYIHVRARRGQATDSHSIAERVRREKISERMKFLQDLVPGCDKITGKAGMLDEIINYVQSLQRQIEFLSMKLAIVNPRPDFDMDDIFAKEVASTPMTVVPSPEMVLSGYSHEMVHSGYSSEMVNSGYLHVNPMQQVNTSSDPLSCFNNGEAPSMWDSHVQNLYGNLGV

SEQ ID NO: 40499 - protein, 320 aa, Arabidopsis thaliana
  peptide (1)..(320): Ceres Seq. ID no. 12323877
MSVLERQRAHLKYLNPTFDSPLAGFFADSSMITGGEMDSYLSTAGLNLPMMYGETTVEGDSRLSISPETTLGTGNFKKRKFDTETKDCNEKKKKMTMNRDDLVEEGEEEKSKITEQNNGSTKSIKKMKHKAKKEENNFSNDSSKVTKELEKTDYIHVRARRGQATDSHSIAERVRREKISERMKFLQDLVPGCDKITGKAGMLDEIINYVQSLQRQIEFLSMKLAIVNPRPDFDMDDIFAKEVASTPMTVVPSPEMVLSGYSHEMVHSGYSSEMVNSGYLHVNPMQQVNTSSDPLSCFNNGEAPSMWDSHVQNLYGNLGV

SEQ ID NO: 40500 - DNA, 1746 bp, Arabidopsis thaliana
  misc_feature (1)..(1746): Ceres Seq. ID no. 12328914
  misc_feature (1)..(1746): Ortholog of  Ceres SEQ ID NO 15224473 as cited in SEQ ID NO 66479
aaaataaatttttagaaaccaaaaaaaaaattgtagagagagaaaaaaaaaactcagaggagagaaagagaagacgacgaagacgaccattttttttttttttgtcaagagagaagacggagacaacaatggcggaagcgaaggaggagaatagggagaaaaacgaagaagaagagagcgtaaagcttttcgtcggacaaattccgaaacatatgtcggaatctcaactcttaacattgtttcaagagttcgctgtcgttgacgaggtcaatatcatcaaggacaagattacacgcgcctctcgaggatgttgttttctgctatgtccatcgagagaagaagcagataagttggtcaatgcttgccataacaagaagacattgcctggggctaacagtctattgcaagtaaagtatgcagatggcgaattagaaaggctagagcataagctatttgttggtatgcttccaaagaatgtctctgaagctgaagttcaatctttattctccaagtacgggaccataaaggatctacagattctaagaggtgctcaacaaacgagcaaaggctgtgcatttctgaagtatgagacaaaagaacaagctgtttccgccatggaatctatcaacggaaaacataaaatggagggttcaactgttcctttagttgtcaaatgggcagacacagaacgagaaagacacacaagaagacttcaaaaggctcaatctcacatcgcccgactagggaacggtgatccaacaaatccctcattgtttggagcattacctatgggttatgtaccaccatataatggatatggttatcatcagcctcctggaacttatggttacatgctaccaccaattcagaaccaagctgcattttccaatatgattgcacaaccaaaccaaggtaataacaatgcattgcaaggaacatcgcctgactctgtgccgcctcgtttggcccgtagaaactttcctatgcctcctggaaactacatgggatctggttatcctgctatgcgaggtcatccttttccatttgcttatcccagaggaattgttagtcctcgccctctaagtagctctcctggatctatatcacctggcatgtcaacacctttaggcattggtttgagttctgtggttcaaaccgaaggtccagaaggtgcaaatctgtttatctataacatacctcgggagttcggggatcaagaactcgcggctgcatttcaatctttcggtattgttctgagtgccaaggtttttgtagacaaagccactggtgtaagcaaatgtttcggttttgttagctatgactcacaagccgcggcgcagaacgctattgacatgatgaatggtcgccatttaggcggtaagaaattgaaagtccagcttaagagagacagcaacaatggccaaccgagtagtaatccttccttaatctcctgaaagtgctaaaactcctcctctcttcaacttgaaagttcataacagaaaaaaacaaaaaacatattcgggcttatgggtcgacccggttcaaagatttggaccgatcttgaatggatgcatctgtatagatccaaatctcattgtgggtcaaaatgtcccatcaactcaaaagctccaaactggatcatctcttttcttttttttttttaatctgcaaataacaatttgtaatttatgtttattattgaaactcatgtagaaattttatgatttattaacattaaattcattg

SEQ ID NO: 40501 - protein, 483 aa, Arabidopsis thaliana
  peptide (1)..(483): Ceres Seq. ID no. 12328915
NKFLETKKKIVEREKKNSEERKRRRRRRPFFFFLSREKTETTMAEAKEENREKNEEEESVKLFVGQIPKHMSESQLLTLFQEFAVVDEVNIIKDKITRASRGCCFLLCPSREEADKLVNACHNKKTLPGANSLLQVKYADGELERLEHKLFVGMLPKNVSEAEVQSLFSKYGTIKDLQILRGAQQTSKGCAFLKYETKEQAVSAMESINGKHKMEGSTVPLVVKWADTERERHTRRLQKAQSHIARLGNGDPTNPSLFGALPMGYVPPYNGYGYHQPPGTYGYMLPPIQNQAAFSNMIAQPNQGNNNALQGTSPDSVPPRLARRNFPMPPGNYMGSGYPAMRGHPFPFAYPRGIVSPRPLSSSPGSISPGMSTPLGIGLSSVVQTEGPEGANLFIYNIPREFGDQELAAAFQSFGIVLSAKVFVDKATGVSKCFGFVSYDSQAAAQNAIDMMNGRHLGGKKLKVQLKRDSNNGQPSSNPSLIS

SEQ ID NO: 40502 - protein, 441 aa, Arabidopsis thaliana
  peptide (1)..(441): Ceres Seq. ID no. 12328916
MAEAKEENREKNEEEESVKLFVGQIPKHMSESQLLTLFQEFAVVDEVNIIKDKITRASRGCCFLLCPSREEADKLVNACHNKKTLPGANSLLQVKYADGELERLEHKLFVGMLPKNVSEAEVQSLFSKYGTIKDLQILRGAQQTSKGCAFLKYETKEQAVSAMESINGKHKMEGSTVPLVVKWADTERERHTRRLQKAQSHIARLGNGDPTNPSLFGALPMGYVPPYNGYGYHQPPGTYGYMLPPIQNQAAFSNMIAQPNQGNNNALQGTSPDSVPPRLARRNFPMPPGNYMGSGYPAMRGHPFPFAYPRGIVSPRPLSSSPGSISPGMSTPLGIGLSSVVQTEGPEGANLFIYNIPREFGDQELAAAFQSFGIVLSAKVFVDKATGVSKCFGFVSYDSQAAAQNAIDMMNGRHLGGKKLKVQLKRDSNNGQPSSNPSLIS

SEQ ID NO: 40503 - protein, 413 aa, Arabidopsis thaliana
  peptide (1)..(413): Ceres Seq. ID no. 12328917
MSESQLLTLFQEFAVVDEVNIIKDKITRASRGCCFLLCPSREEADKLVNACHNKKTLPGANSLLQVKYADGELERLEHKLFVGMLPKNVSEAEVQSLFSKYGTIKDLQILRGAQQTSKGCAFLKYETKEQAVSAMESINGKHKMEGSTVPLVVKWADTERERHTRRLQKAQSHIARLGNGDPTNPSLFGALPMGYVPPYNGYGYHQPPGTYGYMLPPIQNQAAFSNMIAQPNQGNNNALQGTSPDSVPPRLARRNFPMPPGNYMGSGYPAMRGHPFPFAYPRGIVSPRPLSSSPGSISPGMSTPLGIGLSSVVQTEGPEGANLFIYNIPREFGDQELAAAFQSFGIVLSAKVFVDKATGVSKCFGFVSYDSQAAAQNAIDMMNGRHLGGKKLKVQLKRDSNNGQPSSNPSLIS

SEQ ID NO: 40504 - DNA, 1268 bp, Arabidopsis thaliana
  misc_feature (1)..(1268): Ceres Seq. ID no. 12482111
  misc_feature (1)..(1268): Ortholog of  Ceres SEQ ID NO 13598741 as cited in SEQ ID NO 62749
  misc_feature (1)..(1268): Ortholog of  Ceres SEQ ID NO 12587535 as cited in SEQ ID NO 64020
  misc_feature (1)..(1268): Ortholog of  Ceres SEQ ID NO 15176854 as cited in SEQ ID NO 64525
  misc_feature (1)..(1268): Ortholog of  Ceres SEQ ID NO 12586366 as cited in SEQ ID NO 68983
  misc_feature (1)..(1268): Ortholog of  Ceres SEQ ID NO 15178891 as cited in SEQ ID NO 0
acattttacactcatctcgttctctcttccgtcaatatggaaggcgtcaccgtcgtgtctttcttccttcttttcatcgccaccgccatggccgccaagtccaccgtctccttccgtgacggcatgttaccaaacggagacttcgagctaggaccaaaaccatcagacatgaaaggaacagaaatactaaacaaactagcaataccaaactgggaagtcacaggattcgtcgaatacattaaatcaggacataaacaaggagacatgcttctcgttgttcccgccggtaaattcgctgtaagacttgggaacgaagcatcgatcaaacaaagacttaaagtggttaaaggaatgtattactcactcacttttagtgctgctagaacttgtgcacaagacgagagacttaacatatctgtgattccgattcagacggtttatagtagtagtggttgggatttatatgcttgggcgtttcaagctgagagtgatgttgctgaagttgtgattcataatcctggtgttgaggaagatccagcttgtggtccacttattgatggtgttgctatgagatctctttaccctcctagaccaactaataagaacattttgaaaaacggaggatttgaagaaggtccattagtattacccggctcgacaactggagttttgatcccaccgtttatagaagacgaccactctcctttacctggatggatggtggagtctctcaaagctgtcaagtacttagacgttgaacatttctcagtcccacagggtcgcagagctattgagcttgtagcgggtaaagagagtgccatcgctcaagtggttcggactgtcattgggaagacttacgtgctgtcttttgcggttggagacgccaacaatgcttgcaaaggatcaatggtggttgaggcttttgcaggaaaagatacacttaaggtcccttacgagtcgaaaggcacaggagggtttaaacgagcttctattcgatttgtggcggtttcgacccgatcaagaattatgttctacagcactttctatgccatgaggagcgatgatttctcgtcattgtgtgggcctgtgatcgatgatgtcaagcttataagcgttcgtaaaccatagatgaatcaccaatcctattacaagaaaatgcatcgtgtggtcttcttttattttccttaaactgtctttggtgtgtgttggattttattgaaacgagaaggtgaaaaaaacagagttttatttacgagagttagggtttt

SEQ ID NO: 40505 - protein, 375 aa, Arabidopsis thaliana
  peptide (1)..(375): Ceres Seq. ID no. 12482112
TFYTHLVLSSVNMEGVTVVSFFLLFIATAMAAKSTVSFRDGMLPNGDFELGPKPSDMKGTEILNKLAIPNWEVTGFVEYIKSGHKQGDMLLVVPAGKFAVRLGNEASIKQRLKVVKGMYYSLTFSAARTCAQDERLNISVIPIQTVYSSSGWDLYAWAFQAESDVAEVVIHNPGVEEDPACGPLIDGVAMRSLYPPRPTNKNILKNGGFEEGPLVLPGSTTGVLIPPFIEDDHSPLPGWMVESLKAVKYLDVEHFSVPQGRRAIELVAGKESAIAQVVRTVIGKTYVLSFAVGDANNACKGSMVVEAFAGKDTLKVPYESKGTGGFKRASIRFVAVSTRSRIMFYSTFYAMRSDDFSSLCGPVIDDVKLISVRKP

SEQ ID NO: 40506 - protein, 363 aa, Arabidopsis thaliana
  peptide (1)..(363): Ceres Seq. ID no. 12482113
MEGVTVVSFFLLFIATAMAAKSTVSFRDGMLPNGDFELGPKPSDMKGTEILNKLAIPNWEVTGFVEYIKSGHKQGDMLLVVPAGKFAVRLGNEASIKQRLKVVKGMYYSLTFSAARTCAQDERLNISVIPIQTVYSSSGWDLYAWAFQAESDVAEVVIHNPGVEEDPACGPLIDGVAMRSLYPPRPTNKNILKNGGFEEGPLVLPGSTTGVLIPPFIEDDHSPLPGWMVESLKAVKYLDVEHFSVPQGRRAIELVAGKESAIAQVVRTVIGKTYVLSFAVGDANNACKGSMVVEAFAGKDTLKVPYESKGTGGFKRASIRFVAVSTRSRIMFYSTFYAMRSDDFSSLCGPVIDDVKLISVRKP

SEQ ID NO: 40507 - protein, 346 aa, Arabidopsis thaliana
  peptide (1)..(346): Ceres Seq. ID no. 12482114
MAAKSTVSFRDGMLPNGDFELGPKPSDMKGTEILNKLAIPNWEVTGFVEYIKSGHKQGDMLLVVPAGKFAVRLGNEASIKQRLKVVKGMYYSLTFSAARTCAQDERLNISVIPIQTVYSSSGWDLYAWAFQAESDVAEVVIHNPGVEEDPACGPLIDGVAMRSLYPPRPTNKNILKNGGFEEGPLVLPGSTTGVLIPPFIEDDHSPLPGWMVESLKAVKYLDVEHFSVPQGRRAIELVAGKESAIAQVVRTVIGKTYVLSFAVGDANNACKGSMVVEAFAGKDTLKVPYESKGTGGFKRASIRFVAVSTRSRIMFYSTFYAMRSDDFSSLCGPVIDDVKLISVRKP

SEQ ID NO: 40508 - DNA, 1250 bp, Arabidopsis thaliana
  misc_feature (1)..(1250): Ceres Seq. ID no. 13491571
  misc_feature (1)..(1250): Ortholog of  Ceres SEQ ID NO 12608620 as cited in SEQ ID NO 60192
  misc_feature (1)..(1250): Ortholog of  Ceres SEQ ID NO 13662898 as cited in SEQ ID NO 66199
  misc_feature (1)..(1250): Ortholog of  Ceres SEQ ID NO 14313358 as cited in SEQ ID NO 67347
  misc_feature (1)..(1250): Ortholog of  Ceres SEQ ID NO 13654314 as cited in SEQ ID NO 67914
gtatcatacattgaacataattctcagtatgatcctgtagagtttactcgttcattcacttgtattctctttcatagaggaagagagagggagagagtttctaattaattagaagatttttctttctttattttctaaacaagtattagactactttgagagagatataaaaatggcaatttcacaagccgtcttggctactgtctttggcatcctagggaatatcatctcctttttcgtctgccttgccccaataccgacgttcgttcgtatatacaagaggaagtcatctgaagggtatcagtcgatcccttacgtgatttctctgttcagcgcgatgctatggatgtactacgcaatgatcaagaaagatgctatgatgttgatcactatcaactcctttgcctttgtcgtacaaatcgtctacatctccttattcttcttctacgctcctaagaaggaaaagactctaacggtgaagttcgtcctctttgtggatgttttgggtttcggcgcaatcttcgtgttgacatactttataattcatgccaataaacgtgttcaagttcttggatacatttgtatggtctttgctctatctgtttttgttgctccccttggcataattaggaaagtgatcaaaacgaagagcgccgagttcatgccattcggtctctccttcttcctcaccttatcggctgtcatgtggtttttctacggacttctccttaaagacatgaacattgccctgccaaatgttttgggtttcatctttggagtacttcagatgattcttttcttgatctacaagaaaccagggactaaagtcttggagccaccagggattaagcttcaggacatatctgagcatgtagtcgatgttgtgaggctaagtacgatggtttgcaactcacagatgagaactttggtgccacaagacagtgccgatatggaagcaaccattgatatagatgagaagatcaaaggagatattgagaagaataaggatgaaaaagaagtatttctcatttctaagaattaattagcttttaactatcaaatgtcgatgtgtgtgggtgtgtgtctcagtttgcttgcatgttaagatagggtttaatgtttttatttgggtctgatcagcgtcatcgtggatctctccctcttatctgtgatctttgtctctccctctctcatctcgaatgtaagatatgtgttgttaaattaataaatgattatgtcgtttgtctatt

SEQ ID NO: 40509 - protein, 289 aa, Arabidopsis thaliana
  peptide (1)..(289): Ceres Seq. ID no. 13491572
MAISQAVLATVFGILGNIISFFVCLAPIPTFVRIYKRKSSEGYQSIPYVISLFSAMLWMYYAMIKKDAMMLITINSFAFVVQIVYISLFFFYAPKKEKTLTVKFVLFVDVLGFGAIFVLTYFIIHANKRVQVLGYICMVFALSVFVAPLGIIRKVIKTKSAEFMPFGLSFFLTLSAVMWFFYGLLLKDMNIALPNVLGFIFGVLQMILFLIYKKPGTKVLEPPGIKLQDISEHVVDVVRLSTMVCNSQMRTLVPQDSADMEATIDIDEKIKGDIEKNKDEKEVFLISKN

SEQ ID NO: 40510 - protein, 234 aa, Arabidopsis thaliana
  peptide (1)..(234): Ceres Seq. ID no. 13491573
MLWMYYAMIKKDAMMLITINSFAFVVQIVYISLFFFYAPKKEKTLTVKFVLFVDVLGFGAIFVLTYFIIHANKRVQVLGYICMVFALSVFVAPLGIIRKVIKTKSAEFMPFGLSFFLTLSAVMWFFYGLLLKDMNIALPNVLGFIFGVLQMILFLIYKKPGTKVLEPPGIKLQDISEHVVDVVRLSTMVCNSQMRTLVPQDSADMEATIDIDEKIKGDIEKNKDEKEVFLISKN

SEQ ID NO: 40511 - protein, 231 aa, Arabidopsis thaliana
  peptide (1)..(231): Ceres Seq. ID no. 13491574
MYYAMIKKDAMMLITINSFAFVVQIVYISLFFFYAPKKEKTLTVKFVLFVDVLGFGAIFVLTYFIIHANKRVQVLGYICMVFALSVFVAPLGIIRKVIKTKSAEFMPFGLSFFLTLSAVMWFFYGLLLKDMNIALPNVLGFIFGVLQMILFLIYKKPGTKVLEPPGIKLQDISEHVVDVVRLSTMVCNSQMRTLVPQDSADMEATIDIDEKIKGDIEKNKDEKEVFLISKN

SEQ ID NO: 40512 - DNA, 891 bp, Arabidopsis thaliana
  misc_feature (1)..(891): Ceres Seq. ID no. 13487410
  misc_feature (1)..(891): Ortholog of  Ceres SEQ ID NO 15172893 as cited in SEQ ID NO 51869
  misc_feature (1)..(891): Ortholog of  Ceres SEQ ID NO 12610734 as cited in SEQ ID NO 56268
  misc_feature (1)..(891): Ortholog of  Ceres SEQ ID NO 13655072 as cited in SEQ ID NO 62639
agggttttcgtctctttcactcgtaaccggaagagaggacaagatcctccactaatttcacaaaaagctcatctttttattcgttttcgaatcgattcgttatctgggttcaagtatcaaattctctggtttcgtttttcgtttttgatttgttctctctctttcggaaaaagtttggttttttttttttgtttgaaacaatgggaagaggcaagttcaagggtaaacctaccggccaacgccgattctctagtgctgctgatattcttgctggcacatctgctgcacgtcctcgatcattcaaacagaaagaagctgagtacgaagaagatgttgaagaagagtcagaggaggaatctgaagaagaatccgaagatgaagctgatgtgaagaagaaaggagctgaagctgttatcgaagttgataaccctaacagagtaagacaaaagaccttgaaagcaaaagacctcgatgctagtaaaaccactgaactctcaaggcgtgaaagagaggagctagagaagcagcgagctcatgagcgatacatgaggttgcaagagcaaggcaaaaccgaacaagcaaggaaggacttggatcgtttggctctgattcgccaacagagagaagaagctgccaagaagcgagaagaggaaaaagccgcaagagacgctaagaaagtcgaagggcgcaaatgagaagtgatcacactcaaaagacctgcctactatgcgattaagatgtgttgtttttactttgttctttttcgattgataaaagataaaacctctgctatttactctgttatctctcgattttaagttcggtttaaaaggattggatgtagttcaaaatataaactcgtttaagatttatgcgtggaagcttcctcag

SEQ ID NO: 40513 - protein, 164 aa, Arabidopsis thaliana
  peptide (1)..(164): Ceres Seq. ID no. 13487411
MGRGKFKGKPTGQRRFSSAADILAGTSAARPRSFKQKEAEYEEDVEEESEEESEEESEDEADVKKKGAEAVIEVDNPNRVRQKTLKAKDLDASKTTELSRREREELEKQRAHERYMRLQEQGKTEQARKDLDRLALIRQQREEAAKKREEEKAARDAKKVEGRK

SEQ ID NO: 40514 - protein, 129 aa, Arabidopsis thaliana
  peptide (1)..(129): Ceres Seq. ID no. 13487412
RVFVSFTRNRKRGQDPPLISQKAHLFIRFRIDSLSGFKYQILWFRFSFLICSLSFGKSLVFFFCLKQWEEASSRVNLPANADSLVLLIFLLAHLLHVLDHSNRKKLSTKKMLKKSQRRNLKKNPKMKLM

SEQ ID NO: 40515 - DNA, 1686 bp, Arabidopsis thaliana
  misc_feature (1)..(1686): Ceres Seq. ID no. 13575082
  misc_feature (1)..(1686): Ortholog of  Ceres SEQ ID NO 14311001 as cited in SEQ ID NO 53717
  misc_feature (1)..(1686): Ortholog of  Ceres SEQ ID NO 14314945 as cited in SEQ ID NO 58031
  misc_feature (1)..(1686): Ortholog of  Ceres SEQ ID NO 13595833 as cited in SEQ ID NO 59877
  misc_feature (1)..(1686): Ortholog of  Ceres SEQ ID NO 13654452 as cited in SEQ ID NO 65792
  misc_feature (1)..(1686): Ortholog of  Ceres SEQ ID NO 13573778 as cited in SEQ ID NO 0
aatctcatcgtcacagtcacggaaatggcggaacacgcaaaacgacgcgttttaagagcatattacctactcatccatgatgatgatctgttattcacactacagctgatttagatctatttcgtaagtgggtctttcaaagtcgtctcctttgatctactttgattcaggggtcgttgatttggtgataagtcagtagaaatggataaggagaaatctccagcacctccttgtggaggtcttcctcctccatctccatcaggtcgatgctctgcattctcagaagctggtcccattggtcatggttcagatgctaatcgaatgagtcatgatattagccgtatgcttgataacccacctaagaagattggacatcggcgagctcattctgaaatacttactctccctgatgatttgagctttgatagtgatcttggtgtggttggtaatgctgctgatggagcttctttctctgatgagactgaagaagatttgctctctatgtatcttgatatggataagtttaattcttctgctacatcttctgcccaagttggtgagccatcaggaactgcttggaaaaatgagacaatgatgcagacaggcacaggctcaacttccaatcctcagaatacggttaatagtcttggcgaaaggccaagaatcaggcatcaacatagccaatctatggatggttcaatgaatatcaatgagatgcttatgtcgggaaatgaagatgattctgctattgatgctaagaagtctatgtctgctactaaacttgctgagcttgctctcattgatcctaaacgtgctaagaggatatgggcaaacaggcagtccgcagcacgatcaaaagaaaggaagacgagatacatatttgagcttgagagaaaagtacagactttgcaaacagaggctacaactctctcagcccagttgaccctcttacagagagacacaaatggcttgactgttgaaaacaatgagctgaagctgcggttacaaacaatggagcagcaggttcacttgcaggatgaactaaacgaagcactaaaggaggaaatccagcatctgaaggtgttgactggccaagttgctccatcagcgttgaactatgggtcgtttggatcaaaccagcagcaattctattccaacaatcagtcaatgcaaacaatcttagctgcaaaacagttccagcaacttcagattcattcacagaagcagcaacaacaacaacaacaacaacaacagcaacaccaacagcagcagcagcaacagcaacagtatcagtttcaacagcaacagatgcaacagcttatgcagcagcggcttcaacagcaagaacaacaaaatggagtaagactcaagccttcacaagcccagaaagagaactgaggaatatgaatatgtcccacggtattggcgttttggtacgtagaagaaaccttttggtaaggtcattgaagataaacatttgggtaagcccaaagaaacagagttccgtgcattgcaaatatgcaatgcactgcaattattagttgtttggatttgatatagagactgagtctcgaaaccatagtatgtaaaaatataatcacgttcaaaagctgttaatttgttataatcttataacaattgtgttttaagatacaaacctactttgtgttatgatatttgttcact

SEQ ID NO: 40516 - protein, 398 aa, Arabidopsis thaliana
  peptide (1)..(398): Ceres Seq. ID no. 13575083
MDKEKSPAPPCGGLPPPSPSGRCSAFSEAGPIGHGSDANRMSHDISRMLDNPPKKIGHRRAHSEILTLPDDLSFDSDLGVVGNAADGASFSDETEEDLLSMYLDMDKFNSSATSSAQVGEPSGTAWKNETMMQTGTGSTSNPQNTVNSLGERPRIRHQHSQSMDGSMNINEMLMSGNEDDSAIDAKKSMSATKLAELALIDPKRAKRIWANRQSAARSKERKTRYIFELERKVQTLQTEATTLSAQLTLLQRDTNGLTVENNELKLRLQTMEQQVHLQDELNEALKEEIQHLKVLTGQVAPSALNYGSFGSNQQQFYSNNQSMQTILAAKQFQQLQIHSQKQQQQQQQQQQQHQQQQQQQQQYQFQQQQMQQLMQQRLQQQEQQNGVRLKPSQAQKEN

SEQ ID NO: 40517 - protein, 358 aa, Arabidopsis thaliana
  peptide (1)..(358): Ceres Seq. ID no. 13575084
MSHDISRMLDNPPKKIGHRRAHSEILTLPDDLSFDSDLGVVGNAADGASFSDETEEDLLSMYLDMDKFNSSATSSAQVGEPSGTAWKNETMMQTGTGSTSNPQNTVNSLGERPRIRHQHSQSMDGSMNINEMLMSGNEDDSAIDAKKSMSATKLAELALIDPKRAKRIWANRQSAARSKERKTRYIFELERKVQTLQTEATTLSAQLTLLQRDTNGLTVENNELKLRLQTMEQQVHLQDELNEALKEEIQHLKVLTGQVAPSALNYGSFGSNQQQFYSNNQSMQTILAAKQFQQLQIHSQKQQQQQQQQQQQHQQQQQQQQQYQFQQQQMQQLMQQRLQQQEQQNGVRLKPSQAQKEN

SEQ ID NO: 40518 - protein, 351 aa, Arabidopsis thaliana
  peptide (1)..(351): Ceres Seq. ID no. 13575085
MLDNPPKKIGHRRAHSEILTLPDDLSFDSDLGVVGNAADGASFSDETEEDLLSMYLDMDKFNSSATSSAQVGEPSGTAWKNETMMQTGTGSTSNPQNTVNSLGERPRIRHQHSQSMDGSMNINEMLMSGNEDDSAIDAKKSMSATKLAELALIDPKRAKRIWANRQSAARSKERKTRYIFELERKVQTLQTEATTLSAQLTLLQRDTNGLTVENNELKLRLQTMEQQVHLQDELNEALKEEIQHLKVLTGQVAPSALNYGSFGSNQQQFYSNNQSMQTILAAKQFQQLQIHSQKQQQQQQQQQQQHQQQQQQQQQYQFQQQQMQQLMQQRLQQQEQQNGVRLKPSQAQKEN

SEQ ID NO: 40519 - DNA, 1853 bp, Arabidopsis thaliana
  misc_feature (1)..(1853): Ceres Seq. ID no. 12385130
  misc_feature (1)..(1853): Ortholog of  Ceres SEQ ID NO 15176822 as cited in SEQ ID NO 1160
  misc_feature (1)..(1853): Ortholog of  Ceres SEQ ID NO 13593889 as cited in SEQ ID NO 53305
atttctcgataagcaacgcgctagagacggatctcacataatcaccagatcaattttctcgagaaaaagaaaatgtgattatccattcgattttttcgcagaagaagacgaaagagagaagaagagaaagagatttgaaatcatggcgaatgtagtgggacagctaaaacgaggaatctcgagacaattctcaactggatcgcttcgtcgtacgcttagtcgtcaattcacgcgtcaagcttcacatgatcctcgccggaacaatatgcgatttagttttggtcgacaatcgtctttagatccgattcgtcggagtcctgatggttctaacggtccgcagcttgctgtaccggataatctcgacgctactatgcagcttctatttgtggcttgtagaggtgatgttgaaggtgttcaggatctgcttgatgaaggtattgatgttaatagtatcgatcttgatggtcgtacggctcttcatatcgctgcttgtgaaggtcatgtcgatgttgtcaagcttcttcttactaggaaggctaatattgatgctcgtgatcgttggggaagcacggcagctgctgatgctaagtattatggtaacatggatgttttcaacattttgaaagcccgtggagctaaagttccgaaaaccaaaaggacacccatggttgtggcgaatcctcgtgaagttcctgagtacgagttaaatccgcaggaacttcaagttcggaaagctgatggtatctcaaagggaatatatcaagtggctaaatggaatgggactaaggtttctgtaaagatacttgataaggatctctacaaggattctgacactataaatgccttcaaacacgaacttactttattcgagaaggtacgtcatcctaatgttgtgcaatttgttggagctgttactcaaaatgtccccatgatgattgtgtccgagtatcatcctaaaggggaccttgggagctatcttcaaaaaaaaggtcgtctttctccagccaaagttctaagatttgccctcgatatagccaggggaatgaattatcttcacgagtgtaaaccagaaccagtaatccactgtgatctaaaacccaaaaatattatgctcgatagtggaggacatctgaaggtggcgggatttggtttgataagttttgcaaagttatcatctgataaatcaaaaatccttaatcacggggcccatatagatccttcaaattactgtatggcacctgaggtttacaaagatgaaatatttgacaggagtgtggattcttactcttttggtgtcgtattatatgagatgattgaaggagtacaacctttccatcctaaacccccagaagaggcagtgaagctaatgtgtttagaaggaagaagaccttcgtttaaagccaagtccaaaagttgtccccaagagatgagagaattgattgaggaatgctgggatacggaaacttttgttagaccaacattttctgagatcatagttcgattggacaagatctttgtacactgctcaaaacagggatggtggaaagatacattcaagttcccttggaaatagtacataagaacgtgagaggtttactcaggaacacgagaaactccacaattcaagagctctcttctcatgtttacaataaactcgatacaaagaatacaaaaagaaacggccctctccgatttgtcattgtcttatcgtgtaacagtgtacaatgtaaaccccaaaaagtactttcatcgagctatatagacttctctactgcacagaactgagcattttgagatacaatgtatcatatttatataagtatcaagaaagctctttattcttgttatgcttc

SEQ ID NO: 40520 - protein, 523 aa, Arabidopsis thaliana
  peptide (1)..(523): Ceres Seq. ID no. 12385131
FLDKQRARDGSHIITRSIFSRKRKCDYPFDFFAEEDEREKKRKRFEIMANVVGQLKRGISRQFSTGSLRRTLSRQFTRQASHDPRRNNMRFSFGRQSSLDPIRRSPDGSNGPQLAVPDNLDATMQLLFVACRGDVEGVQDLLDEGIDVNSIDLDGRTALHIAACEGHVDVVKLLLTRKANIDARDRWGSTAAADAKYYGNMDVFNILKARGAKVPKTKRTPMVVANPREVPEYELNPQELQVRKADGISKGIYQVAKWNGTKVSVKILDKDLYKDSDTINAFKHELTLFEKVRHPNVVQFVGAVTQNVPMMIVSEYHPKGDLGSYLQKKGRLSPAKVLRFALDIARGMNYLHECKPEPVIHCDLKPKNIMLDSGGHLKVAGFGLISFAKLSSDKSKILNHGAHIDPSNYCMAPEVYKDEIFDRSVDSYSFGVVLYEMIEGVQPFHPKPPEEAVKLMCLEGRRPSFKAKSKSCPQEMRELIEECWDTETFVRPTFSEIIVRLDKIFVHCSKQGWWKDTFKFPWK

SEQ ID NO: 40521 - protein, 476 aa, Arabidopsis thaliana
  peptide (1)..(476): Ceres Seq. ID no. 12385132
MANVVGQLKRGISRQFSTGSLRRTLSRQFTRQASHDPRRNNMRFSFGRQSSLDPIRRSPDGSNGPQLAVPDNLDATMQLLFVACRGDVEGVQDLLDEGIDVNSIDLDGRTALHIAACEGHVDVVKLLLTRKANIDARDRWGSTAAADAKYYGNMDVFNILKARGAKVPKTKRTPMVVANPREVPEYELNPQELQVRKADGISKGIYQVAKWNGTKVSVKILDKDLYKDSDTINAFKHELTLFEKVRHPNVVQFVGAVTQNVPMMIVSEYHPKGDLGSYLQKKGRLSPAKVLRFALDIARGMNYLHECKPEPVIHCDLKPKNIMLDSGGHLKVAGFGLISFAKLSSDKSKILNHGAHIDPSNYCMAPEVYKDEIFDRSVDSYSFGVVLYEMIEGVQPFHPKPPEEAVKLMCLEGRRPSFKAKSKSCPQEMRELIEECWDTETFVRPTFSEIIVRLDKIFVHCSKQGWWKDTFKFPWK

SEQ ID NO: 40522 - protein, 435 aa, Arabidopsis thaliana
  peptide (1)..(435): Ceres Seq. ID no. 12385133
MRFSFGRQSSLDPIRRSPDGSNGPQLAVPDNLDATMQLLFVACRGDVEGVQDLLDEGIDVNSIDLDGRTALHIAACEGHVDVVKLLLTRKANIDARDRWGSTAAADAKYYGNMDVFNILKARGAKVPKTKRTPMVVANPREVPEYELNPQELQVRKADGISKGIYQVAKWNGTKVSVKILDKDLYKDSDTINAFKHELTLFEKVRHPNVVQFVGAVTQNVPMMIVSEYHPKGDLGSYLQKKGRLSPAKVLRFALDIARGMNYLHECKPEPVIHCDLKPKNIMLDSGGHLKVAGFGLISFAKLSSDKSKILNHGAHIDPSNYCMAPEVYKDEIFDRSVDSYSFGVVLYEMIEGVQPFHPKPPEEAVKLMCLEGRRPSFKAKSKSCPQEMRELIEECWDTETFVRPTFSEIIVRLDKIFVHCSKQGWWKDTFKFPWK

SEQ ID NO: 40523 - DNA, 1449 bp, Arabidopsis thaliana
  misc_feature (1)..(1449): Ceres Seq. ID no. 13488687
  misc_feature (1)..(1449): Ortholog of  Ceres SEQ ID NO 14312769 as cited in SEQ ID NO 55493
  misc_feature (1)..(1449): Ortholog of  Ceres SEQ ID NO 13639300 as cited in SEQ ID NO 56701
aacaaacatttttggacatgaattgaaaattattataattaccagattttttatctatcgtcgaacttgggactgagaaagtagcagcttcgtttgcttcctctgatatttttctacactctctgtctctctctaaagatgaattgtcttcagaatcttcccagatgttcagtctcacctctgctgggattcgggtgcattcaaagagatcattcttcttcttcttcttctttgaagatgctaatatcgcctccgatcaaagccaatgatccaaaatctcgacttgttttacatgcagtatcagagtcaaaatccagctcagagatgagtggtgttgcaaaggatgaagagaaatctgatgaatatagccaagacatgactcaagctatgggtgctgttctaacttacaggcacgagttaggaatgaactacaactttattcgtccagatctaattgttggatcctgcttacagacccctgaagatgttgacaagcttcgtaaaattggagttaaaaccatattttgcttgcaacaagatccagacctggaatattttggagtagacataagcagcatccaagcctatgctaagaaatatagtgatattcagcatattcgctgtgaaattagagactttgatgcatttgatttgagaatgcgtcttccagccgtggttggtactctttacaaagctgttaagcgaaatggaggagttacatatgtgcactgcactgctggaatgggaagggctcctgctgttgcgttgacatacatgttctgggtgcaaggctataagcttatggaagctcataaattacttatgagcaaaaggtcgtgctttccgaagctggatgctatcagaaatgcaacaattgatattcttacaggactcaagaggaagactgttactctgacactgaaagataaggggttctccagagtagaaatttctggccttgacattggatggggacagaggatacctctaacactggacaagggaacaggattctggatcctaaagagagaactgcctgaaggacagtttgaatataaatacatcatagatggtgaatggacacacaatgaggccgaaccgtttataggacctaacaaagacggccataccaacaattacgctaaagtagtggacgatccaacaagtgtggatggtacaactcgggagagactatcgagcgaagaccctgagctgttggaggaagaacgctcgaaactaatccagttcttggagacttgttctgaggcagaagtttgagagttgagagcatccgactagactatgtgaatgtacaacttactagtaacaataaaatgcttcatgttagtaatacatacagttacgcttatagcagcaaaagaaaaaaacatgaagttagtagtactatgttcaagtataatatatagtttaaaatctttgttttttctt

SEQ ID NO: 40524 - protein, 379 aa, Arabidopsis thaliana
  peptide (1)..(379): Ceres Seq. ID no. 13488688
MNCLQNLPRCSVSPLLGFGCIQRDHSSSSSSLKMLISPPIKANDPKSRLVLHAVSESKSSSEMSGVAKDEEKSDEYSQDMTQAMGAVLTYRHELGMNYNFIRPDLIVGSCLQTPEDVDKLRKIGVKTIFCLQQDPDLEYFGVDISSIQAYAKKYSDIQHIRCEIRDFDAFDLRMRLPAVVGTLYKAVKRNGGVTYVHCTAGMGRAPAVALTYMFWVQGYKLMEAHKLLMSKRSCFPKLDAIRNATIDILTGLKRKTVTLTLKDKGFSRVEISGLDIGWGQRIPLTLDKGTGFWILKRELPEGQFEYKYIIDGEWTHNEAEPFIGPNKDGHTNNYAKVVDDPTSVDGTTRERLSSEDPELLEEERSKLIQFLETCSEAEV

SEQ ID NO: 40525 - protein, 346 aa, Arabidopsis thaliana
  peptide (1)..(346): Ceres Seq. ID no. 13488689
MLISPPIKANDPKSRLVLHAVSESKSSSEMSGVAKDEEKSDEYSQDMTQAMGAVLTYRHELGMNYNFIRPDLIVGSCLQTPEDVDKLRKIGVKTIFCLQQDPDLEYFGVDISSIQAYAKKYSDIQHIRCEIRDFDAFDLRMRLPAVVGTLYKAVKRNGGVTYVHCTAGMGRAPAVALTYMFWVQGYKLMEAHKLLMSKRSCFPKLDAIRNATIDILTGLKRKTVTLTLKDKGFSRVEISGLDIGWGQRIPLTLDKGTGFWILKRELPEGQFEYKYIIDGEWTHNEAEPFIGPNKDGHTNNYAKVVDDPTSVDGTTRERLSSEDPELLEEERSKLIQFLETCSEAEV

SEQ ID NO: 40526 - protein, 317 aa, Arabidopsis thaliana
  peptide (1)..(317): Ceres Seq. ID no. 13488690
MSGVAKDEEKSDEYSQDMTQAMGAVLTYRHELGMNYNFIRPDLIVGSCLQTPEDVDKLRKIGVKTIFCLQQDPDLEYFGVDISSIQAYAKKYSDIQHIRCEIRDFDAFDLRMRLPAVVGTLYKAVKRNGGVTYVHCTAGMGRAPAVALTYMFWVQGYKLMEAHKLLMSKRSCFPKLDAIRNATIDILTGLKRKTVTLTLKDKGFSRVEISGLDIGWGQRIPLTLDKGTGFWILKRELPEGQFEYKYIIDGEWTHNEAEPFIGPNKDGHTNNYAKVVDDPTSVDGTTRERLSSEDPELLEEERSKLIQFLETCSEAEV

SEQ ID NO: 40527 - DNA, 1882 bp, Arabidopsis thaliana
  misc_feature (1)..(1882): Ceres Seq. ID no. 13497318
  misc_feature (1)..(1882): Ortholog of  Ceres SEQ ID NO 15170811 as cited in SEQ ID NO 52649
  misc_feature (1)..(1882): Ortholog of  Ceres SEQ ID NO 13638331 as cited in SEQ ID NO 58047
  misc_feature (1)..(1882): Ortholog of  Ceres SEQ ID NO 15225845 as cited in SEQ ID NO 65125
  misc_feature (1)..(1882): Ortholog of  Ceres SEQ ID NO 15170135 as cited in SEQ ID NO 67647
tggcttctgatctcactagtgttcgtcatctttgttcgattgaagtttgggaagtggtgatggtaataggagcagcagcgcgtgtagccatcggcggttgtcgaaagctcatctcgtcacatacctccctcctcctcgtctcttctcagtgtcgccagatgagtatggacgcacaaagcgtttctgaaaagcttaggagttctggtctattacgaactcaaggtctaattggaggcaagtggcttgactcgtatgacaataagacaatcaaggttaacaatccagcaaccggtgaaattatagctgatgttgcatgtatgggaacaaaagagacaaatgatgctattgcttcttcttatgaagcatttacttcttggagcagattgactgctggagagaggagtaaagttttacggagatggtatgacctcctgattgcacacaaggaagaacttggacaacttataactttggagcaaggaaaaccactcaaggaagccatcggagaggtagcatatggggcaagttttattgagtactatgcggaggaggcaaaacgtgtatatggtgatataattcctccgaatctgtctgatcgccgactgttggttctaaaacagcctgtcggtgttgttggtgcaattaccccttggaacttccccttagccatgattactcggaaggtcggccctgctcttgcttctggatgcacggtggttgttaaaccatctgaacttacgcccctaacagcacttgctgcggctgaacttgcacttcaagctggagttcctccgggggcacttaatgtggtcatgggaaatgctcctgaaattggggatgctttgcttacgagtccacaggtgagaaaaatcacgttcacgggatcaacagcagttgggaagaagttgatggcagctgctgcacctaccgtcaagaaggtttctctagaacttggcggcaacgcaccctctatagtatttgatgatgcagacctggatgtagctgtaaaaggaacgcttgcagcgaaatttaggaatagtggtcagacatgtgtttgtgcgaacagagtacttgtgcaagatggtatctatgataaatttgctgaggccttttctgaagcggttcaaaaattagaagtaggagatgggtttagggatgggacaacccagggtccacttataaatgatgcagcagtgcaaaaggtagagacatttgtacaagatgctgtttctaagggagcaaaaatcatcattggtggcaaaaggcacagtctagggatgactttctatgagcctactgttatccgcgatgtttcggataacatgatcatgtctaaggaggagatttttggacctgtagctccccttattcggttcaaaaccgaggaggacgctatcagaattgctaatgacacaattgcaggacttgctgcttatatattcacaaacagtgtccaaagatcttggcgtgtatttgaagcacttgaatatggacttgtaggggtgaacgaaggactcatatcaacagaggtggctccattcgggggagtgaagcagtctggtcttggaagggaaggatccaagtatggtatggacgaataccttgagatcaaatacgtatgcttgggagatatgaatagacactgatttggtttgtttgaaaagctttagaaattgtaagtttttctcctccactcgtatccttctaataaaagcttactgtggaacataataaggattcggaggatacttcttaagaaataaagatttggtctacgaccaattgttagcatgatttttaagtaataatttggggtttccattttatttatctttgtttacgttatttttttctttgttttacgttaatttttgtaattcgg

SEQ ID NO: 40528 - protein, 547 aa, Arabidopsis thaliana
  peptide (1)..(547): Ceres Seq. ID no. 13497319
ASDLTSVRHLCSIEVWEVVMVIGAAARVAIGGCRKLISSHTSLLLVSSQCRQMSMDAQSVSEKLRSSGLLRTQGLIGGKWLDSYDNKTIKVNNPATGEIIADVACMGTKETNDAIASSYEAFTSWSRLTAGERSKVLRRWYDLLIAHKEELGQLITLEQGKPLKEAIGEVAYGASFIEYYAEEAKRVYGDIIPPNLSDRRLLVLKQPVGVVGAITPWNFPLAMITRKVGPALASGCTVVVKPSELTPLTALAAAELALQAGVPPGALNVVMGNAPEIGDALLTSPQVRKITFTGSTAVGKKLMAAAAPTVKKVSLELGGNAPSIVFDDADLDVAVKGTLAAKFRNSGQTCVCANRVLVQDGIYDKFAEAFSEAVQKLEVGDGFRDGTTQGPLINDAAVQKVETFVQDAVSKGAKIIIGGKRHSLGMTFYEPTVIRDVSDNMIMSKEEIFGPVAPLIRFKTEEDAIRIANDTIAGLAAYIFTNSVQRSWRVFEALEYGLVGVNEGLISTEVAPFGGVKQSGLGREGSKYGMDEYLEIKYVCLGDMNRH

SEQ ID NO: 40529 - protein, 528 aa, Arabidopsis thaliana
  peptide (1)..(528): Ceres Seq. ID no. 13497320
MVIGAAARVAIGGCRKLISSHTSLLLVSSQCRQMSMDAQSVSEKLRSSGLLRTQGLIGGKWLDSYDNKTIKVNNPATGEIIADVACMGTKETNDAIASSYEAFTSWSRLTAGERSKVLRRWYDLLIAHKEELGQLITLEQGKPLKEAIGEVAYGASFIEYYAEEAKRVYGDIIPPNLSDRRLLVLKQPVGVVGAITPWNFPLAMITRKVGPALASGCTVVVKPSELTPLTALAAAELALQAGVPPGALNVVMGNAPEIGDALLTSPQVRKITFTGSTAVGKKLMAAAAPTVKKVSLELGGNAPSIVFDDADLDVAVKGTLAAKFRNSGQTCVCANRVLVQDGIYDKFAEAFSEAVQKLEVGDGFRDGTTQGPLINDAAVQKVETFVQDAVSKGAKIIIGGKRHSLGMTFYEPTVIRDVSDNMIMSKEEIFGPVAPLIRFKTEEDAIRIANDTIAGLAAYIFTNSVQRSWRVFEALEYGLVGVNEGLISTEVAPFGGVKQSGLGREGSKYGMDEYLEIKYVCLGDMNRH

SEQ ID NO: 40530 - protein, 495 aa, Arabidopsis thaliana
  peptide (1)..(495): Ceres Seq. ID no. 13497321
MSMDAQSVSEKLRSSGLLRTQGLIGGKWLDSYDNKTIKVNNPATGEIIADVACMGTKETNDAIASSYEAFTSWSRLTAGERSKVLRRWYDLLIAHKEELGQLITLEQGKPLKEAIGEVAYGASFIEYYAEEAKRVYGDIIPPNLSDRRLLVLKQPVGVVGAITPWNFPLAMITRKVGPALASGCTVVVKPSELTPLTALAAAELALQAGVPPGALNVVMGNAPEIGDALLTSPQVRKITFTGSTAVGKKLMAAAAPTVKKVSLELGGNAPSIVFDDADLDVAVKGTLAAKFRNSGQTCVCANRVLVQDGIYDKFAEAFSEAVQKLEVGDGFRDGTTQGPLINDAAVQKVETFVQDAVSKGAKIIIGGKRHSLGMTFYEPTVIRDVSDNMIMSKEEIFGPVAPLIRFKTEEDAIRIANDTIAGLAAYIFTNSVQRSWRVFEALEYGLVGVNEGLISTEVAPFGGVKQSGLGREGSKYGMDEYLEIKYVCLGDMNRH

SEQ ID NO: 40531 - DNA, 668 bp, Arabidopsis thaliana
  misc_feature (1)..(668): Ceres Seq. ID no. 12338625
  misc_feature (1)..(668): Ortholog of  Ceres SEQ ID NO 12563124 as cited in SEQ ID NO 57104
  misc_feature (1)..(668): Ortholog of  Ceres SEQ ID NO 12617639 as cited in SEQ ID NO 65219
acataagtctctctcttacattttgaaaccctaatttctcaaaaaaaatgtctgaagttgagtaccggtgctttgtcggcggccttgcctgggccaccaatgatgaagatcttcaaaggacgttctcacagttcggcgacgttatcgattctaagatcattaacgaccgcgagagtggaagatcaaggggattcggattcgtcaccttcaaggacgagaaagccatgagggatgcgattgaagagatgaacgataaagagctcgatggacgtgtcatcaccgtgaacgaggctcagtcgagaggtagcggcggtggcggaggaggccgtggtggaagcggtggtggttaccgcagcggaggttacggatctggtggaggcggtggtggccgaggatacggtggtggtggacgccgtgagggaggtggctacggaggcggtgatggtggaagttacggcggcggtggtggcggctggtaatcaaagatagagttgtttgcgtgctgctgctctgtttttggtttagatttggatttgtgtcaccacttctggtttggttatcgttcgtttggtttacttttttgatgaaacagtttcgtttaagtcttctttgtctggatcgaaatgttaattcgcgtgttgtttactaaatttataacgtttcctttt

SEQ ID NO: 40532 - protein, 143 aa, Arabidopsis thaliana
  peptide (1)..(143): Ceres Seq. ID no. 12338626
MSEVEYRCFVGGLAWATNDEDLQRTFSQFGDVIDSKIINDRESGRSRGFGFVTFKDEKAMRDAIEEMNDKELDGRVITVNEAQSRGSGGGGGGRGGSGGGYRSGGYGSGGGGGGRGYGGGGRREGGGYGGGDGGSYGGGGGGW

SEQ ID NO: 40533 - protein, 84 aa, Arabidopsis thaliana
  peptide (1)..(84): Ceres Seq. ID no. 12338627
MRDAIEEMNDKELDGRVITVNEAQSRGSGGGGGGRGGSGGGYRSGGYGSGGGGGGRGYGGGGRREGGGYGGGDGGSYGGGGGGW

SEQ ID NO: 40534 - protein, 77 aa, Arabidopsis thaliana
  peptide (1)..(77): Ceres Seq. ID no. 12338628
MNDKELDGRVITVNEAQSRGSGGGGGGRGGSGGGYRSGGYGSGGGGGGRGYGGGGRREGGGYGGGDGGSYGGGGGGW

SEQ ID NO: 40535 - DNA, 1195 bp, Arabidopsis thaliana
  misc_feature (1)..(1195): Ceres Seq. ID no. 12328712
  misc_feature (1)..(1195): Ortholog of  Ceres SEQ ID NO 14313893 as cited in SEQ ID NO 54646
  misc_feature (1)..(1195): Ortholog of  Ceres SEQ ID NO 13656797 as cited in SEQ ID NO 65756
  misc_feature (1)..(1195): Ortholog of  Ceres SEQ ID NO 13658498 as cited in SEQ ID NO 66557
  misc_feature (1)..(1195): Ortholog of  Ceres SEQ ID NO 15227053 as cited in SEQ ID NO 0
gaagaaaaaacacttccaaacaaaataatgagttcttcgtcttcctcatcctcttcttcttcttcttctcgcagtaaatgtatggattcaggatttataatcgggcgaaaagaactaacaagaattttgatactgtttcttggtttaaccgcttcatgtctggttttatacaaaacagcttatcctctgcaacgacttaatgtcagcaatctaacctctctccaagcttctccatctccactattaccaaacctcaactcatcagagatttctccagaaacgacaaaaccaaagttgagtttcaaggagattttggagaacgcatcaacgaagaacaatacagtgattataacgacattgaatcaagcttgggcagaaccaaactctttgtttgatctcttcttagagagttttcgtattggacgaggaacacaacaacttctgaaacatgtagtagtggtttgcttggatatcaaggcgtttcaacgatgctcacaacttcatactaattgctaccatattgaaacatcagaaactgatttctctggcgagaaagtttacaacactcctgattatcttaagatgatgtgggccagaatcgagcttcttacacaagttcttcagatgggttttaacttcatcttcacggacgcagatataatgtggcttagagatccatttcctcggttatatccagatggagacttccaaatggcgtgtgacagattctttggaaatccttatgattcagacaattgggtcaatggtggtttcacatacgtgagatcaaacaatcgaagcattgagttttacaaattttggcacaaatctcgtctagattatcctgacttgcatgatcaagatgtgttcaacagaatcaagcatgagccttttatctcagagattggaatccaaatgagattctttgatacagtttactttggtgggttttgtcaaacgagcagagacataaacttggtttgcacaatgcatgctaattgttgtattggtttggacaagaagcttcatgatctgaatcttgtccttgatgattggagaaagtacctgtctttgtcagaaccagtgctgaacacgacgtggagtgttcctatgaagtgtttggaagattgagatttccttctttctttgttttgttgagatttggatgaaaagtatatttaaaaatgaagagttt

SEQ ID NO: 40536 - protein, 376 aa, Arabidopsis thaliana
  peptide (1)..(376): Ceres Seq. ID no. 12328713
EEKTLPNKIMSSSSSSSSSSSSSRSKCMDSGFIIGRKELTRILILFLGLTASCLVLYKTAYPLQRLNVSNLTSLQASPSPLLPNLNSSEISPETTKPKLSFKEILENASTKNNTVIITTLNQAWAEPNSLFDLFLESFRIGRGTQQLLKHVVVVCLDIKAFQRCSQLHTNCYHIETSETDFSGEKVYNTPDYLKMMWARIELLTQVLQMGFNFIFTDADIMWLRDPFPRLYPDGDFQMACDRFFGNPYDSDNWVNGGFTYVRSNNRSIEFYKFWHKSRLDYPDLHDQDVFNRIKHEPFISEIGIQMRFFDTVYFGGFCQTSRDINLVCTMHANCCIGLDKKLHDLNLVLDDWRKYLSLSEPVLNTTWSVPMKCLED

SEQ ID NO: 40537 - protein, 367 aa, Arabidopsis thaliana
  peptide (1)..(367): Ceres Seq. ID no. 12328714
MSSSSSSSSSSSSSRSKCMDSGFIIGRKELTRILILFLGLTASCLVLYKTAYPLQRLNVSNLTSLQASPSPLLPNLNSSEISPETTKPKLSFKEILENASTKNNTVIITTLNQAWAEPNSLFDLFLESFRIGRGTQQLLKHVVVVCLDIKAFQRCSQLHTNCYHIETSETDFSGEKVYNTPDYLKMMWARIELLTQVLQMGFNFIFTDADIMWLRDPFPRLYPDGDFQMACDRFFGNPYDSDNWVNGGFTYVRSNNRSIEFYKFWHKSRLDYPDLHDQDVFNRIKHEPFISEIGIQMRFFDTVYFGGFCQTSRDINLVCTMHANCCIGLDKKLHDLNLVLDDWRKYLSLSEPVLNTTWSVPMKCLED

SEQ ID NO: 40538 - protein, 349 aa, Arabidopsis thaliana
  peptide (1)..(349): Ceres Seq. ID no. 12328715
MDSGFIIGRKELTRILILFLGLTASCLVLYKTAYPLQRLNVSNLTSLQASPSPLLPNLNSSEISPETTKPKLSFKEILENASTKNNTVIITTLNQAWAEPNSLFDLFLESFRIGRGTQQLLKHVVVVCLDIKAFQRCSQLHTNCYHIETSETDFSGEKVYNTPDYLKMMWARIELLTQVLQMGFNFIFTDADIMWLRDPFPRLYPDGDFQMACDRFFGNPYDSDNWVNGGFTYVRSNNRSIEFYKFWHKSRLDYPDLHDQDVFNRIKHEPFISEIGIQMRFFDTVYFGGFCQTSRDINLVCTMHANCCIGLDKKLHDLNLVLDDWRKYLSLSEPVLNTTWSVPMKCLED

SEQ ID NO: 40539 - DNA, 1358 bp, Arabidopsis thaliana
  misc_feature (1)..(1358): Ceres Seq. ID no. 12337026
  misc_feature (1)..(1358): Ortholog of  Ceres SEQ ID NO 13582619 as cited in SEQ ID NO 56520
  misc_feature (1)..(1358): Ortholog of  Ceres SEQ ID NO 14314632 as cited in SEQ ID NO 59923
  misc_feature (1)..(1358): Ortholog of  Ceres SEQ ID NO 13660872 as cited in SEQ ID NO 60830
  misc_feature (1)..(1358): Ortholog of  Ceres SEQ ID NO 12616221 as cited in SEQ ID NO 63291
ctaacttctctgttcatctttttctctctttatttataaatttatctgcatagtactctctgaatctatatcttcaaaaaaaaaaaacgtccaagatcaaatcaagaaacccattaaaaaaaaaaatcaggttttggtttcagttttaagggtttaaggtttcttggggaagaaacgatggagactttttgtgggtttcaaaaggaggaagagcagatggatttacctcctgggttcaggtttcatccaacagatgaagaactcataactcactatctccataagaaggttcttgacaccagcttctcagctaaagctatcggtgaagttgatttaaacaaatcagagccatgggagttaccatggatggcaaaaatgggtgagaaagaatggtattttttctgtgtgagagacagaaagtatcccaccggtttaagaactaaccgagcaactgaagccggttattggaaggcgaccgggaaggataaagagatataccgaggcaaatcacttgttgggatgaagaagacacttgttttctatagaggaagagctcctaaaggtcagaaaaccaactgggtgatgcatgagtacaggcttgaaaaaaattctctgcccataacttgccgaaaaccgcaaagaatgaatgggtgatatgcagggtgttccaaaagagtgctggagggaagaagatcccgatttcgagtctaatccgaatcggttcactcggaaccgactttaacccttcgcttttgccctctttaaccgattcttcgccttacaacgataaaaccaaaacagaaccggtctacgtgccctgcttctccaaccaaacggatcaaaaccaaggaaccacactcaattgcttcagcagccctgttcttaactcgatccaagccgacatttttcacaggattccactctatcaaactcagtccctccaggtttctatgaatctacagagcccggttctcacgcaagaacactcagttctacatgctatgatcgagaacaacagaagacaaagtctcaaaacgatgagtgtctcacaagaaaccggagtttcaactgacatgaacactgatatctcatcggattttgaatttggtaagaggcggtttgattctcaagaagatccgtcttcctctactggaccggttgatcttgaacctttctggaattactgaagatgattcaagattctcatgtccattaatttactgtggtgtgttaaagtttgtataggctattgtcatatactctcatatcaacttccactatatattataacaatttaaagaaacttaaaaatatgatttgatatatgactaaagtattataatacaattttgtacccc

SEQ ID NO: 40540 - protein, 158 aa, Arabidopsis thaliana
  peptide (1)..(158): Ceres Seq. ID no. 12337027
METFCGFQKEEEQMDLPPGFRFHPTDEELITHYLHKKVLDTSFSAKAIGEVDLNKSEPWELPWMAKMGEKEWYFFCVRDRKYPTGLRTNRATEAGYWKATGKDKEIYRGKSLVGMKKTLVFYRGRAPKGQKTNWVMHEYRLEKNSLPITCRKPQRMNG

SEQ ID NO: 40541 - protein, 145 aa, Arabidopsis thaliana
  peptide (1)..(145): Ceres Seq. ID no. 12337028
MDLPPGFRFHPTDEELITHYLHKKVLDTSFSAKAIGEVDLNKSEPWELPWMAKMGEKEWYFFCVRDRKYPTGLRTNRATEAGYWKATGKDKEIYRGKSLVGMKKTLVFYRGRAPKGQKTNWVMHEYRLEKNSLPITCRKPQRMNG

SEQ ID NO: 40542 - protein, 95 aa, Arabidopsis thaliana
  peptide (1)..(95): Ceres Seq. ID no. 12337029
MAKMGEKEWYFFCVRDRKYPTGLRTNRATEAGYWKATGKDKEIYRGKSLVGMKKTLVFYRGRAPKGQKTNWVMHEYRLEKNSLPITCRKPQRMNG

SEQ ID NO: 40543 - DNA, 1202 bp, Arabidopsis thaliana
  misc_feature (1)..(1202): Ceres Seq. ID no. 12384778
  misc_feature (1)..(1202): Ortholog of  Ceres SEQ ID NO 14301430 as cited in SEQ ID NO 56553
  misc_feature (1)..(1202): Ortholog of  Ceres SEQ ID NO 15175700 as cited in SEQ ID NO 58584
  misc_feature (1)..(1202): Ortholog of  Ceres SEQ ID NO 13598714 as cited in SEQ ID NO 62656
  misc_feature (1)..(1202): Ortholog of  Ceres SEQ ID NO 13596969 as cited in SEQ ID NO 63375
  misc_feature (1)..(1202): Ortholog of  Ceres SEQ ID NO 13597519 as cited in SEQ ID NO 64759
  misc_feature (1)..(1202): Ortholog of  Ceres SEQ ID NO 13597870 as cited in SEQ ID NO 64982
  misc_feature (1)..(1202): Ortholog of  Ceres SEQ ID NO 13656123 as cited in SEQ ID NO 65212
  misc_feature (1)..(1202): Ortholog of  Ceres SEQ ID NO 15170183 as cited in SEQ ID NO 65667
  misc_feature (1)..(1202): Ortholog of  Ceres SEQ ID NO 13595926 as cited in SEQ ID NO 67778
  misc_feature (1)..(1202): Ortholog of  Ceres SEQ ID NO 13662323 as cited in SEQ ID NO 68305
acacaacataatcctcccaaacagagagagtctcaaaaattaaaccaacaaatttaaagatgaattgcttgatagctatagctctttcagtctctttctttcttgtgggaattgttggaccgatccaagctcaattgcagatgaatttctatgccaattcttgtcctaatgctgaaaagattgttcaagattttgtttcaaaccacgtttctaatgctccttctcttgctgctgctctcattagaatgcatttccatgactgttttgtccgaggttgtgatggatcagtgcttataaactcaacgtcaggaaacgcagagagagacgcgactcctaacctaacggttcgagggtttggcttcatcgacgcaattaaatctgtgcttgaagctcaatgccctggaattgtctcttgcgctgatattatcgctctagcttctcgcgacgctgtcgttttcaccggaggaccgaattggagtgtaccgaccggaagaagagacgggaggatatcaaacgcagcggaggcattagccaacattcctcctccaaccagtaatatcaccaatcttcagacactctttgcaaaccaaggacttgatcttaaggacctcgttttactatccggggctcacactattggtgtatctcactgctcgtctttcacaaaccgtctctacaattttacgggtcgtggaggccaagatccggctttggacagcgagtacgcagccaatctcaagtctagaaaatgtcctagcctcaacgataacaagaccatcgtagagatggatccagggagccgcaaaacatttgatctaagttattaccagctcgtactcaagcgtagaggtctgtttcaatcagactctgctctcaccactaaccccacaacactttcaaacataaaccggatcttgacgggttcggtggggagtttcttctctgagtttgccaagtcaatggagaaaatgggtcggatcaatgtcaagactggttcagctggagtggttaggaggcaatgttccgttgcaaatagttaaggggtggaaatgtaaaagatttgggagcttgtgggggtagttgtgataataattaataaggatgattgtgaatttatgatgtggccttttgggatttgtgtgtatggattttgttacagacttcgtcaataaagaaataaaaagattttactgctttttttt

SEQ ID NO: 40544 - protein, 326 aa, Arabidopsis thaliana
  peptide (1)..(326): Ceres Seq. ID no. 12384779
MNCLIAIALSVSFFLVGIVGPIQAQLQMNFYANSCPNAEKIVQDFVSNHVSNAPSLAAALIRMHFHDCFVRGCDGSVLINSTSGNAERDATPNLTVRGFGFIDAIKSVLEAQCPGIVSCADIIALASRDAVVFTGGPNWSVPTGRRDGRISNAAEALANIPPPTSNITNLQTLFANQGLDLKDLVLLSGAHTIGVSHCSSFTNRLYNFTGRGGQDPALDSEYAANLKSRKCPSLNDNKTIVEMDPGSRKTFDLSYYQLVLKRRGLFQSDSALTTNPTTLSNINRILTGSVGSFFSEFAKSMEKMGRINVKTGSAGVVRRQCSVANS

SEQ ID NO: 40545 - protein, 299 aa, Arabidopsis thaliana
  peptide (1)..(299): Ceres Seq. ID no. 12384780
MNFYANSCPNAEKIVQDFVSNHVSNAPSLAAALIRMHFHDCFVRGCDGSVLINSTSGNAERDATPNLTVRGFGFIDAIKSVLEAQCPGIVSCADIIALASRDAVVFTGGPNWSVPTGRRDGRISNAAEALANIPPPTSNITNLQTLFANQGLDLKDLVLLSGAHTIGVSHCSSFTNRLYNFTGRGGQDPALDSEYAANLKSRKCPSLNDNKTIVEMDPGSRKTFDLSYYQLVLKRRGLFQSDSALTTNPTTLSNINRILTGSVGSFFSEFAKSMEKMGRINVKTGSAGVVRRQCSVANS

SEQ ID NO: 40546 - protein, 264 aa, Arabidopsis thaliana
  peptide (1)..(264): Ceres Seq. ID no. 12384781
MHFHDCFVRGCDGSVLINSTSGNAERDATPNLTVRGFGFIDAIKSVLEAQCPGIVSCADIIALASRDAVVFTGGPNWSVPTGRRDGRISNAAEALANIPPPTSNITNLQTLFANQGLDLKDLVLLSGAHTIGVSHCSSFTNRLYNFTGRGGQDPALDSEYAANLKSRKCPSLNDNKTIVEMDPGSRKTFDLSYYQLVLKRRGLFQSDSALTTNPTTLSNINRILTGSVGSFFSEFAKSMEKMGRINVKTGSAGVVRRQCSVANS

SEQ ID NO: 40547 - DNA, 1700 bp, Arabidopsis thaliana
  misc_feature (1)..(1700): Ceres Seq. ID no. 12395249
  misc_feature (1)..(1700): Ortholog of  Ceres SEQ ID NO 13596816 as cited in SEQ ID NO 62287
aagacacgaaaaagaattttaccgactggaagaagaaaaaacatcaaccagacaaaagaaaagaaaacaaaaacacatcttcgagatcaaacaaaccctaattatcatccatcgtcgccttctcaatatatattgccggaagagcagcgatgctcgttaacgtcgggacggttataatgaccgttttgaccctggctagtttggtcggaggcttcggtgtgaattggggcaatatcgcatcacatccgttgaatcccaacattgttgttcagatgcttaaggacaataagatcaataaagtgaagctttttgacgctgattcatggacgatgaatgctttggctggtacgggcatggaggttatggttggaatccctaataaccttcttgagtctctcgcagatgattacgataatgctaaagattgggttaaagaaaacgtgacccagtatattcgtaagggtggcgtcgacatcaagtacgtagccgtggggaacgagccgtttttgtctgcatacaacggatcgttcttgaagacaacatttccagcgttaaagaacattcacaaggcgttaaaagaagctggacacaccaatataatgaaagccacgatcccacaaaacgcagaagtttaccaatcagccaacgacaagccatcagaaggtgatttccgcaaggatgtcaaacaaacgatgcttgatatcgtcaatttcttccacgaaaacgacttacctttcaccgtcaacatttaccctttccttagtctttacctaaacgagcattttcccgttgagttcgcttttcttgacggtgatggtcagacaatgactgacaaaggaaagaattatgataacgtgtttgacgccaattacgacacacttgtttacgcgttgaagaaggctgggattcacgatatgaagattatcgttggagaggttggatggccaacggatggtcacaaatatgcatcgccgaagctagcggagaaattctatgcagggcttatgaaaagacttgctaaggacggtgggactccaacgaggcctgaaagattagaggtctatctcttcggtttcctcgacgaagacatgaagagtattcttccagggccttttgagagacattggggaatctttagatacgatgggacaccaaagtttatgctagatttcacgggacaaggacgccaaatggtgcccgttgcagctaaaggtgtgcagtacttggaaaaacaatggtgcgtagtgaacaaagacacggtcaatctagacgaagttggtcctgatctagactatgcgtgttaccacggggactgcaccgcgatggaagccgggtcaacttgtagtaagctaaccaaagtccaaaacatatcatacgcatttaacatgtatttccagatacaagaccaagacgttagggcttgcgatttcaaaggagctgcaatgatcaccaaggtcaatgcatccgtgggaagttgcttgttccctgttcagatcgttagtggaagtgatgatttcaggatcaactttgtgttcggaagattcgtcgtctttggacttgttcttcttggattgctcacggttatataatttgtttttctgttgttgtttggttttctttttgcaatttggagggatttattcgacacgattaattgttatttgttattcgttttaaaaatgtttactttgagttagttc

SEQ ID NO: 40548 - protein, 479 aa, Arabidopsis thaliana
  peptide (1)..(479): Ceres Seq. ID no. 12395250
MLVNVGTVIMTVLTLASLVGGFGVNWGNIASHPLNPNIVVQMLKDNKINKVKLFDADSWTMNALAGTGMEVMVGIPNNLLESLADDYDNAKDWVKENVTQYIRKGGVDIKYVAVGNEPFLSAYNGSFLKTTFPALKNIHKALKEAGHTNIMKATIPQNAEVYQSANDKPSEGDFRKDVKQTMLDIVNFFHENDLPFTVNIYPFLSLYLNEHFPVEFAFLDGDGQTMTDKGKNYDNVFDANYDTLVYALKKAGIHDMKIIVGEVGWPTDGHKYASPKLAEKFYAGLMKRLAKDGGTPTRPERLEVYLFGFLDEDMKSILPGPFERHWGIFRYDGTPKFMLDFTGQGRQMVPVAAKGVQYLEKQWCVVNKDTVNLDEVGPDLDYACYHGDCTAMEAGSTCSKLTKVQNISYAFNMYFQIQDQDVRACDFKGAAMITKVNASVGSCLFPVQIVSGSDDFRINFVFGRFVVFGLVLLGLLTVI

SEQ ID NO: 40549 - protein, 470 aa, Arabidopsis thaliana
  peptide (1)..(470): Ceres Seq. ID no. 12395251
MTVLTLASLVGGFGVNWGNIASHPLNPNIVVQMLKDNKINKVKLFDADSWTMNALAGTGMEVMVGIPNNLLESLADDYDNAKDWVKENVTQYIRKGGVDIKYVAVGNEPFLSAYNGSFLKTTFPALKNIHKALKEAGHTNIMKATIPQNAEVYQSANDKPSEGDFRKDVKQTMLDIVNFFHENDLPFTVNIYPFLSLYLNEHFPVEFAFLDGDGQTMTDKGKNYDNVFDANYDTLVYALKKAGIHDMKIIVGEVGWPTDGHKYASPKLAEKFYAGLMKRLAKDGGTPTRPERLEVYLFGFLDEDMKSILPGPFERHWGIFRYDGTPKFMLDFTGQGRQMVPVAAKGVQYLEKQWCVVNKDTVNLDEVGPDLDYACYHGDCTAMEAGSTCSKLTKVQNISYAFNMYFQIQDQDVRACDFKGAAMITKVNASVGSCLFPVQIVSGSDDFRINFVFGRFVVFGLVLLGLLTVI

SEQ ID NO: 40550 - protein, 438 aa, Arabidopsis thaliana
  peptide (1)..(438): Ceres Seq. ID no. 12395252
MLKDNKINKVKLFDADSWTMNALAGTGMEVMVGIPNNLLESLADDYDNAKDWVKENVTQYIRKGGVDIKYVAVGNEPFLSAYNGSFLKTTFPALKNIHKALKEAGHTNIMKATIPQNAEVYQSANDKPSEGDFRKDVKQTMLDIVNFFHENDLPFTVNIYPFLSLYLNEHFPVEFAFLDGDGQTMTDKGKNYDNVFDANYDTLVYALKKAGIHDMKIIVGEVGWPTDGHKYASPKLAEKFYAGLMKRLAKDGGTPTRPERLEVYLFGFLDEDMKSILPGPFERHWGIFRYDGTPKFMLDFTGQGRQMVPVAAKGVQYLEKQWCVVNKDTVNLDEVGPDLDYACYHGDCTAMEAGSTCSKLTKVQNISYAFNMYFQIQDQDVRACDFKGAAMITKVNASVGSCLFPVQIVSGSDDFRINFVFGRFVVFGLVLLGLLTVI

SEQ ID NO: 40551 - DNA, 1068 bp, Arabidopsis thaliana
  misc_feature (1)..(1068): Ceres Seq. ID no. 12328716
  misc_feature (1)..(1068): Ortholog of  Ceres SEQ ID NO 13596358 as cited in SEQ ID NO 68333
ggaaggcttttaaaaccctagctggtaccaatcttaaacccctctccgattttgatttctgcttgaaattgttttccccgagatctcaatttcgataatcggaaaacgaaaaagatggtttggtttcaatgcgaagactgtggagagagtctgaagaagccaaaggtcccgtctcacttcaagatgtgcatagccaacaagttatcgtgcatcgattgtggagaaatgtttgggagagatactgtgcaaggacataaccaatgcattactgaagctgagaagtatggtccaaaagggcagtcaaagtcagctaatggaacacctgcaaagccaaaggacatctctaagcaagagcctgactttgatattaatgtcggcttatcaaaccgatatccatggttttgcagtttatgtaacacaaaggctactagccagcagactttgcttgcccatgcggatgggaagaagcaccgaggaaaagctaaagccttccatgctaggcaacaacaagaacaatccacgactttggataacaaggatggaagtgaaaatgcgtctaatgttgattcagaacagaagaaagtagatttacctgcctcctcaggtgttgcgaatggagaatcgcatcctgagaaaaagagaaagctagagactttggatgaaacgagtgaaggcgaagaagcaaaaggaagtgatctaaagaaagcaaagaagcaggaccatgagaagaaaatcaattggaagaagttgatcacatcggctttgaagtctaacgaagataaaactttgaagatgaagaaactgaagaagctcgttctggaatctattgtggattcaggccgagacaaatctgagcttaaggcagagctagaactaaaggtgaatttgagctccagattcacagttgatgggaagtatgtgaaacttgtggctaaagattgaatctaattcttgagtccagcaacagtatcatgtctccgactgtcacagttttggcatatgattcattactattaatgtctgtaccaaatttggaattttggaatctcatcaaacattattcgtagc

SEQ ID NO: 40552 - protein, 275 aa, Arabidopsis thaliana
  peptide (1)..(275): Ceres Seq. ID no. 12328717
MVWFQCEDCGESLKKPKVPSHFKMCIANKLSCIDCGEMFGRDTVQGHNQCITEAEKYGPKGQSKSANGTPAKPKDISKQEPDFDINVGLSNRYPWFCSLCNTKATSQQTLLAHADGKKHRGKAKAFHARQQQEQSTTLDNKDGSENASNVDSEQKKVDLPASSGVANGESHPEKKRKLETLDETSEGEEAKGSDLKKAKKQDHEKKINWKKLITSALKSNEDKTLKMKKLKKLVLESIVDSGRDKSELKAELELKVNLSSRFTVDGKYVKLVAKD

SEQ ID NO: 40553 - protein, 252 aa, Arabidopsis thaliana
  peptide (1)..(252): Ceres Seq. ID no. 12328718
MCIANKLSCIDCGEMFGRDTVQGHNQCITEAEKYGPKGQSKSANGTPAKPKDISKQEPDFDINVGLSNRYPWFCSLCNTKATSQQTLLAHADGKKHRGKAKAFHARQQQEQSTTLDNKDGSENASNVDSEQKKVDLPASSGVANGESHPEKKRKLETLDETSEGEEAKGSDLKKAKKQDHEKKINWKKLITSALKSNEDKTLKMKKLKKLVLESIVDSGRDKSELKAELELKVNLSSRFTVDGKYVKLVAKD

SEQ ID NO: 40554 - protein, 238 aa, Arabidopsis thaliana
  peptide (1)..(238): Ceres Seq. ID no. 12328719
MFGRDTVQGHNQCITEAEKYGPKGQSKSANGTPAKPKDISKQEPDFDINVGLSNRYPWFCSLCNTKATSQQTLLAHADGKKHRGKAKAFHARQQQEQSTTLDNKDGSENASNVDSEQKKVDLPASSGVANGESHPEKKRKLETLDETSEGEEAKGSDLKKAKKQDHEKKINWKKLITSALKSNEDKTLKMKKLKKLVLESIVDSGRDKSELKAELELKVNLSSRFTVDGKYVKLVAKD

SEQ ID NO: 40555 - DNA, 1210 bp, Arabidopsis thaliana
  misc_feature (1)..(1210): Ceres Seq. ID no. 12328172
  misc_feature (1)..(1210): Ortholog of  Ceres SEQ ID NO 14307053 as cited in SEQ ID NO 54262
aatcacagatttggacttttcttggttatattaaagttttttttgtccctatattcaatgaccaatctagaactcatctgtttttgaactaacccggccaacactcagaaatagatccaaaggcctctctcctctctctcttttttctcatatggttcttgataataatttgaaagaaagatgtcaatgatgagcagaactcgaagcagcatcgccatgggaacaccatctttccttgagttgaagaaacaagcttcatttttcttcaaagagaagcttaaaacggcgcgtttagctctcaccgatgttactcctcttcaactaatgactgaggaagctacggatggtgagtcatgtggaccaaatacacaaaccttagggtccatttcaaaggctgcttttgagtttgaagattacttggcgattgttgaagtcttgcacaaaagattggcaaagttcgataagagaaactggaggatggcttataactcactaatagttgttgagcatttactcactcatggaccagagagtgtttccgatgagtttcaaggtgatatagatgttatctcccaaatgcaaaccttccaacagattgacgagaaagggtttaattggggattagctgttagaaagaaagcagagaaggttttaaagctacttgagaaaggggaattacttaaggaagaaaggaagcgagctcgtgagctgtctcgagggattcaaggtttcggtagctttaaccacaagtcttcatctcattctttgtcagagcatgaagtcttacaagaatctacagtctataggaaatgtaattccaattttaccaagaattacgatgaggatgaccaagagaacactatggtttctcctaatgacgccaacctttttcctcagccgctggtagctgacccgagcgaggaatctaggacgggtatgaaagaaaatatggatcctgaagatgatgagaacacagaggtaaacccacttttgggttttagtaaaaaggagggtcaagaactagccggagaagacgagaaccatccatttacggatggcgagagtaagcatacagtagtcttgcttgatgagaacacagattaaattttaattacgtgatatcgcaatctgtataagagaaaaaacacgagaagaagataatgtgtgtataccaatatgtatacatatctacaataataacacttctgtt

SEQ ID NO: 40556 - protein, 307 aa, Arabidopsis thaliana
  peptide (1)..(307): Ceres Seq. ID no. 12328173
MSMMSRTRSSIAMGTPSFLELKKQASFFFKEKLKTARLALTDVTPLQLMTEEATDGESCGPNTQTLGSISKAAFEFEDYLAIVEVLHKRLAKFDKRNWRMAYNSLIVVEHLLTHGPESVSDEFQGDIDVISQMQTFQQIDEKGFNWGLAVRKKAEKVLKLLEKGELLKEERKRARELSRGIQGFGSFNHKSSSHSLSEHEVLQESTVYRKCNSNFTKNYDEDDQENTMVSPNDANLFPQPLVADPSEESRTGMKENMDPEDDENTEVNPLLGFSKKEGQELAGEDENHPFTDGESKHTVVLLDENTD

SEQ ID NO: 40557 - protein, 305 aa, Arabidopsis thaliana
  peptide (1)..(305): Ceres Seq. ID no. 12328174
MMSRTRSSIAMGTPSFLELKKQASFFFKEKLKTARLALTDVTPLQLMTEEATDGESCGPNTQTLGSISKAAFEFEDYLAIVEVLHKRLAKFDKRNWRMAYNSLIVVEHLLTHGPESVSDEFQGDIDVISQMQTFQQIDEKGFNWGLAVRKKAEKVLKLLEKGELLKEERKRARELSRGIQGFGSFNHKSSSHSLSEHEVLQESTVYRKCNSNFTKNYDEDDQENTMVSPNDANLFPQPLVADPSEESRTGMKENMDPEDDENTEVNPLLGFSKKEGQELAGEDENHPFTDGESKHTVVLLDENTD

SEQ ID NO: 40558 - protein, 304 aa, Arabidopsis thaliana
  peptide (1)..(304): Ceres Seq. ID no. 12328175
MSRTRSSIAMGTPSFLELKKQASFFFKEKLKTARLALTDVTPLQLMTEEATDGESCGPNTQTLGSISKAAFEFEDYLAIVEVLHKRLAKFDKRNWRMAYNSLIVVEHLLTHGPESVSDEFQGDIDVISQMQTFQQIDEKGFNWGLAVRKKAEKVLKLLEKGELLKEERKRARELSRGIQGFGSFNHKSSSHSLSEHEVLQESTVYRKCNSNFTKNYDEDDQENTMVSPNDANLFPQPLVADPSEESRTGMKENMDPEDDENTEVNPLLGFSKKEGQELAGEDENHPFTDGESKHTVVLLDENTD

SEQ ID NO: 40559 - DNA, 1515 bp, Arabidopsis thaliana
  misc_feature (1)..(1515): Ceres Seq. ID no. 4908834
  misc_feature (1)..(1515): Ortholog of  Ceres SEQ ID NO 15226870 as cited in SEQ ID NO 58831
  misc_feature (1)..(1515): Ortholog of  Ceres SEQ ID NO 15224334 as cited in SEQ ID NO 0
atgtcagcaaaaacgacatcgtttaagctcgacctgttcgtctcgatgtttacgctttgattagttactatttttctgcaattctgtttcttctctgtacatcaccaacaacatttaaattccaatggcgcattttaaatgtcaataataaatcgagatccgtaatttcgaagctacaagcaaaccttcttgtgcttctctaatcattgcgttttccttttaaagagtttctcaaagttttcccttttttttgggcataaaattgtttccttttcctcctatcagtgtgtctgaaaaaaattcaatgtctttatgttctgttcttttctgatctctctgaatctctctctatcgcgacagccatggccgaagacccttctttcctccccaaggatggttttgtcttgaagcttcctaaaaagtcatcacttgtattgagaatggtcgttctcctctttgtaatggtctgtgctgtgtacatttgctccatttgtcttaagcaaataggagttagtccaaactatggtttcttgaacgttgaagtgtttgagaggccttgtcctgagcctaacatcgaaccgtgggacattccttttgtgcattaccctaaaccaaagacatataacagggatgaatgttcttgccacccggttaggtactttgcgattctatcgatgcagagatctggtagtggctggtttgagactttgttaaacaatcatactaacataagctccaacggggagatattttctgtgaaagataggagggctaatgtttccaccattttcgagactcttgacaaagtctataatctagactggttgagtagtgcctctaagaacgagtgcacttccgctgttggcttcaagtggatgcttaatcagggtctaatgaaacatcatgaagaaatagtagaatacttcaaaacccgaggcgtctctgcgattttcctattcagaaaaaacctattgcgccgcatgatatcagtactcgcaaactcttatgacagagatgctaagctactaaacgggactcacaagtctcacacccattcggccaaagaagctgagatattagcaggttacaaaccaatgatcaacacaacacttttaataaatgagctgagacagattcaagaaatgactttgaaagctttgacttacttcaataccactcgacatatccttgtctactacgaagatgttgtcaagaacctcacgagactagacgatgtacaggagtttctaaaggtaccaaaacgtaagttaaagagtaggcaagtgaagattcatggaggttcattgtcaaaacatgtacagaattgggaagaggtcatgaccacacttaaaggaaccaatttcgaaaatttcttacaccaagaattttaatttttttttgtatatatcagaccaaacaaacccttgtaggaaagttttgtttcacttgccttttttcttttttgctgtttgctgtagggtttggcattaattctcttaaatatgaagaagattt

SEQ ID NO: 40560 - protein, 342 aa, Arabidopsis thaliana
  peptide (1)..(342): Ceres Seq. ID no. 4908835
MAEDPSFLPKDGFVLKLPKKSSLVLRMVVLLFVMVCAVYICSICLKQIGVSPNYGFLNVEVFERPCPEPNIEPWDIPFVHYPKPKTYNRDECSCHPVRYFAILSMQRSGSGWFETLLNNHTNISSNGEIFSVKDRRANVSTIFETLDKVYNLDWLSSASKNECTSAVGFKWMLNQGLMKHHEEIVEYFKTRGVSAIFLFRKNLLRRMISVLANSYDRDAKLLNGTHKSHTHSAKEAEILAGYKPMINTTLLINELRQIQEMTLKALTYFNTTRHILVYYEDVVKNLTRLDDVQEFLKVPKRKLKSRQVKIHGGSLSKHVQNWEEVMTTLKGTNFENFLHQEF

SEQ ID NO: 40561 - protein, 316 aa, Arabidopsis thaliana
  peptide (1)..(316): Ceres Seq. ID no. 4908836
MVVLLFVMVCAVYICSICLKQIGVSPNYGFLNVEVFERPCPEPNIEPWDIPFVHYPKPKTYNRDECSCHPVRYFAILSMQRSGSGWFETLLNNHTNISSNGEIFSVKDRRANVSTIFETLDKVYNLDWLSSASKNECTSAVGFKWMLNQGLMKHHEEIVEYFKTRGVSAIFLFRKNLLRRMISVLANSYDRDAKLLNGTHKSHTHSAKEAEILAGYKPMINTTLLINELRQIQEMTLKALTYFNTTRHILVYYEDVVKNLTRLDDVQEFLKVPKRKLKSRQVKIHGGSLSKHVQNWEEVMTTLKGTNFENFLHQEF

SEQ ID NO: 40562 - protein, 309 aa, Arabidopsis thaliana
  peptide (1)..(309): Ceres Seq. ID no. 4908837
MVCAVYICSICLKQIGVSPNYGFLNVEVFERPCPEPNIEPWDIPFVHYPKPKTYNRDECSCHPVRYFAILSMQRSGSGWFETLLNNHTNISSNGEIFSVKDRRANVSTIFETLDKVYNLDWLSSASKNECTSAVGFKWMLNQGLMKHHEEIVEYFKTRGVSAIFLFRKNLLRRMISVLANSYDRDAKLLNGTHKSHTHSAKEAEILAGYKPMINTTLLINELRQIQEMTLKALTYFNTTRHILVYYEDVVKNLTRLDDVQEFLKVPKRKLKSRQVKIHGGSLSKHVQNWEEVMTTLKGTNFENFLHQEF

SEQ ID NO: 40563 - DNA, 1076 bp, Arabidopsis thaliana
  misc_feature (1)..(1076): Ceres Seq. ID no. 12327653
  misc_feature (1)..(1076): Ortholog of  Ceres SEQ ID NO 13594176 as cited in SEQ ID NO 59144
gctttttcgttgctctttctcataaattcgtggagtttttgttatgtgtgttgatcttctttctgaggttgtagctggatcggcagcgtggttaggccgtggcctttcctgtgtttgtgttcagggtagagacggtgaccctcgtccttcatttgatctaacgcctgctcaggaggaatgcctgcagaggttgcaaagccgcattgatgttgcctatgacagctcaatacctcagcatcaggaagctctaaaggatctttggaaacttgcatttcctgaagaagagctacacggaattgtatctgatcagtggaaggaaatgggttggcagggaaaagatccatcgacagattttaggggtggtggttttatttctctcgaaaacttgttgtacttcgctaggaaattcccgaaatctttccacggccttctgcggaaacaggttggggatcgttctgtgtgggaatacccctttgctgttgctggcatcaatataacattcatgctcatccagatgcttgaccttgaagcagtgaaaccacgaagtattgttggggaaacatttctaagattcctttcggtgaacgagtctgcgtttgaccttctttattgcattgccttcaagctaatggatcagcaatggctatccatgcgtgcttcatacatggagtttaacactgtgatgaaatcaacaaggcggcaactggagagagagattatggttgaagacattacaagtctcgaagatttgccatcatacagtcttctcagtcaatagcaaatagcttaccaaaaactactttgtaagtagaaagatctaacacctcagaaaccctatatcaaagctaaaacaacaacagagcaagtaagcaagcaaaaaagaagacaaggtttctctctctctcgctcttcactccatcttcctcgatattagtgttggttccatgaaatttgggttgttatttctatgaaaccagggtcagattttgtttcttatggggtcagattttctaacttgtggtgcttgtaaaacgttgttggttagttggtgttttgggctaataaatcatttgggt

SEQ ID NO: 40564 - protein, 244 aa, Arabidopsis thaliana
  peptide (1)..(244): Ceres Seq. ID no. 12327654
MCVDLLSEVVAGSAAWLGRGLSCVCVQGRDGDPRPSFDLTPAQEECLQRLQSRIDVAYDSSIPQHQEALKDLWKLAFPEEELHGIVSDQWKEMGWQGKDPSTDFRGGGFISLENLLYFARKFPKSFHGLLRKQVGDRSVWEYPFAVAGINITFMLIQMLDLEAVKPRSIVGETFLRFLSVNESAFDLLYCIAFKLMDQQWLSMRASYMEFNTVMKSTRRQLEREIMVEDITSLEDLPSYSLLSQ

SEQ ID NO: 40565 - protein, 152 aa, Arabidopsis thaliana
  peptide (1)..(152): Ceres Seq. ID no. 12327655
MGWQGKDPSTDFRGGGFISLENLLYFARKFPKSFHGLLRKQVGDRSVWEYPFAVAGINITFMLIQMLDLEAVKPRSIVGETFLRFLSVNESAFDLLYCIAFKLMDQQWLSMRASYMEFNTVMKSTRRQLEREIMVEDITSLEDLPSYSLLSQ

SEQ ID NO: 40566 - DNA, 1767 bp, Arabidopsis thaliana
  misc_feature (1)..(1767): Ceres Seq. ID no. 12370985
  misc_feature (1)..(1767): Ortholog of  Ceres SEQ ID NO 13594193 as cited in SEQ ID NO 58558
ataagctcaaagactaaccaaacccatcatcttcattccaacttcttttctctttttattcacaaccttagctttgagaatcagtctttgttcagtgttaacgtaggcatatctctctatgtgtgttttgtctttgctttttataagattcggtttctgagtttggtttttatttcgtaaggtggctatctttcttgttcttcttcttaaaacgtagtaacagctttataaaaatctttcaaagcatgtaaatttaagtcctagctccattttcgttttcttcttctcaaaaaaaaaaaacaaaaaaaaaagtttttgatcgattgatgagttttctcatttattgatctctctagttttaacttgtgtttggtgaaaccggtactggcgaagtttaaaacacaagtgtaaaatcaaatttataaaaacttcaaatcatgtaaatttcatctctatcaatttatttcccctcaccaaaaaaaaaacaaaaaaaaattagaatttagtacttttattttaaacaaaaaccaaaaaaaaaaccaaaaaaaaaaacgttggaaatggctccaccggaggctgaggtgggtgcggtaatggtgatggctcctccaacgccggggacaccgggaacaccgggaggaccgttgatcacggggatgagagtggattcaatgtcgtttgatcatcggaaaccaacgcctcgatgcaaatgcttgccggtgatgggatcaacttggggtcaacatgacacatgcttcaccgattttccctctcctgatgtctccctcactcgcaagcttggagccgagttcgtgggaacattcatcttgatattcaccgcgacagccggtccaatcgtgaaccagaaatacgatggagcagaaaccctaatcggtaacgctgcatgcgcaggactcgcagtgatgatcataatactctcaacaggtcatatctcaggggctcacctaaacccatcactgaccatagcattcgctgctctaaggcacttcccttgggcacacgtccctgcttacatagcggctcaagtctcagcttccatttgcgcttcattcgcacttaaaggagtgttccatccttttatgtccggtggtgtcactattccatctgttagccttggacaagcctttgctcttgagttcatcatcactttcattctcctctttgttgtaactgccgtcgctaccgacactcgtgccgttggagaattggcaggtatagccgttggagccacggtcatgctcaatattctagtcgcagggccatcgactggtggatcaatgaatcctgtgagaactctaggaccagccgttgcatcaggaaactataggtcactatgggtgtatctggtggctcctacacttggtgccatatctggtgcagcggtctacacaggtgttaagcttaacgatagcgtgactgacccgcctcgtccggttaggagctttcgtcgttaattgagtgagagacttgtttacaagtcttttgctttgtataattttactgtatgattatgtaatgatatgaaaaagctttggaagcttgtgtgaagaataaaaggcgatgtgactataagtccacgcatggcatcggtctatataaacctgatgcgaacttgtctcgtcattgtcaaattgtgtctgtgtaataatacacttttatgtgtggtttgggtttctttgttggtttgctgttgtatgttacctcggagacgaggctgtttttattaataaaatctatggcatgtgc

SEQ ID NO: 40567 - protein, 304 aa, Arabidopsis thaliana; identical to SEQ ID NO: 23583
  peptide (1)..(304): Ceres Seq. ID no. 12370986

SEQ ID NO: 40568 - protein, 293 aa, Arabidopsis thaliana; identical to SEQ ID NO: 23584
  peptide (1)..(293): Ceres Seq. ID no. 12370987

SEQ ID NO: 40569 - protein, 291 aa, Arabidopsis thaliana; identical to SEQ ID NO: 23585
  peptide (1)..(291): Ceres Seq. ID no. 12370988

SEQ ID NO: 40570 - DNA, 1741 bp, Arabidopsis thaliana
  misc_feature (1)..(1741): Ceres Seq. ID no. 12327913
  misc_feature (1)..(1741): Ortholog of  Ceres SEQ ID NO 13597407 as cited in SEQ ID NO 64106
ccccgagtgggctcaacgttgtcattagctatattctaatttaatggttatcatcagaaaatctgaaatcaaatttttggattgtaatccatggctgctcttggtaaaggacataaaacagctttcatctcttgaatggcttcgtctcttttgcaatttttgagttagccaagtgctcaagggagatacataatacctgaagatgtccaaggcaagtgatgccgtcagagaaccattggtggacaagaatatggctggatcaaaaccagaccagccgtggatggtttatctcagcacattcgttgcggtctgtggttcttttgcgttcggttcttgtgcgggatactcttcacctgctcaggctgcaattaggaatgacctttcattgactatagctgagttttcactctttggttctttactaacttttggcgcaatgatcggtgctataacaagcgggcctatagctgatttagttggaagaaagggggcgatgagagtttcctctgcattttgtgtagtcgggtggctagcaatcatctttgccaagggagtagtggctctggaccttggaagactggcaacgggatatggaatgggagcattttcctatgtggtgccaatctttatagcagaaattgcacctaaaactttcagaggggctctaaccacactgaaccagattctgatctgcactggagtgtcggtttccttcatcataggcacactagtgacgtggagagtcttggcattaataggaatcatcccatgcgctgcctccttccttggcctcttttttatccctgagtctccaagatggctggcaaaagtggggcgtgatacggagtttgaagctgcactgaggaagctccgtgggaagaaggctgatatttcggaggaggcagcagagatccaggattatatcgaaactctggaaaggctaccgaaagccaagatgctggatttgtttcagaggagatacatacgctctgttcttatagctttcgggttgatggtgtttcagcagtttggaggaatcaacggaatatgtttctacacaagctcgatatttgagcaagcaggttttcccacaagacttgggatgataatatatgctgttcttcaggtggtaatcactgcgcttaatgcaccgatagttgacagagccggaagaaaaccattgctactggtttctgcaacagggttagtgataggctgtttgatagcagcggtttctttctatctcaaggttcacgacatggcgcacgaagcagtcccagtcctggctgttgttggtataatggtgtacataggatcgttttcagcaggaatgggagcaatgccgtgggtggtcatgtctgagatatttcccataaacataaaaggagtagcaggaggcatggcgacgctggtgaactggtttggagcgtgggctgtttcttacactttcaacttcctcatgtcctggagctcttacggaactttcctcatttacgctgccatcaacgcgctggccattgtcttcgtcattgccatcgtgcctgagacaaaagggaagacattggagcagatccaagctatagtcaatccatagctcaaacacttcctagatgttcgtttctattagccagctgggacataaattgcaatcttggatctctttgcttttatgattctttactgagttcaattgttatcactctctctatttctaatctcttcttaatgaactttggacttc

SEQ ID NO: 40571 - protein, 463 aa, Arabidopsis thaliana
  peptide (1)..(463): Ceres Seq. ID no. 12327914
MSKASDAVREPLVDKNMAGSKPDQPWMVYLSTFVAVCGSFAFGSCAGYSSPAQAAIRNDLSLTIAEFSLFGSLLTFGAMIGAITSGPIADLVGRKGAMRVSSAFCVVGWLAIIFAKGVVALDLGRLATGYGMGAFSYVVPIFIAEIAPKTFRGALTTLNQILICTGVSVSFIIGTLVTWRVLALIGIIPCAASFLGLFFIPESPRWLAKVGRDTEFEAALRKLRGKKADISEEAAEIQDYIETLERLPKAKMLDLFQRRYIRSVLIAFGLMVFQQFGGINGICFYTSSIFEQAGFPTRLGMIIYAVLQVVITALNAPIVDRAGRKPLLLVSATGLVIGCLIAAVSFYLKVHDMAHEAVPVLAVVGIMVYIGSFSAGMGAMPWVVMSEIFPINIKGVAGGMATLVNWFGAWAVSYTFNFLMSWSSYGTFLIYAAINALAIVFVIAIVPETKGKTLEQIQAIVNP

SEQ ID NO: 40572 - protein, 447 aa, Arabidopsis thaliana
  peptide (1)..(447): Ceres Seq. ID no. 12327915
MAGSKPDQPWMVYLSTFVAVCGSFAFGSCAGYSSPAQAAIRNDLSLTIAEFSLFGSLLTFGAMIGAITSGPIADLVGRKGAMRVSSAFCVVGWLAIIFAKGVVALDLGRLATGYGMGAFSYVVPIFIAEIAPKTFRGALTTLNQILICTGVSVSFIIGTLVTWRVLALIGIIPCAASFLGLFFIPESPRWLAKVGRDTEFEAALRKLRGKKADISEEAAEIQDYIETLERLPKAKMLDLFQRRYIRSVLIAFGLMVFQQFGGINGICFYTSSIFEQAGFPTRLGMIIYAVLQVVITALNAPIVDRAGRKPLLLVSATGLVIGCLIAAVSFYLKVHDMAHEAVPVLAVVGIMVYIGSFSAGMGAMPWVVMSEIFPINIKGVAGGMATLVNWFGAWAVSYTFNFLMSWSSYGTFLIYAAINALAIVFVIAIVPETKGKTLEQIQAIVNP

SEQ ID NO: 40573 - protein, 437 aa, Arabidopsis thaliana
  peptide (1)..(437): Ceres Seq. ID no. 12327916
MVYLSTFVAVCGSFAFGSCAGYSSPAQAAIRNDLSLTIAEFSLFGSLLTFGAMIGAITSGPIADLVGRKGAMRVSSAFCVVGWLAIIFAKGVVALDLGRLATGYGMGAFSYVVPIFIAEIAPKTFRGALTTLNQILICTGVSVSFIIGTLVTWRVLALIGIIPCAASFLGLFFIPESPRWLAKVGRDTEFEAALRKLRGKKADISEEAAEIQDYIETLERLPKAKMLDLFQRRYIRSVLIAFGLMVFQQFGGINGICFYTSSIFEQAGFPTRLGMIIYAVLQVVITALNAPIVDRAGRKPLLLVSATGLVIGCLIAAVSFYLKVHDMAHEAVPVLAVVGIMVYIGSFSAGMGAMPWVVMSEIFPINIKGVAGGMATLVNWFGAWAVSYTFNFLMSWSSYGTFLIYAAINALAIVFVIAIVPETKGKTLEQIQAIVNP

SEQ ID NO: 40574 - DNA, 859 bp, Arabidopsis thaliana
  misc_feature (1)..(859): Ceres Seq. ID no. 12337622
  misc_feature (1)..(859): Ortholog of  Ceres SEQ ID NO 13594418 as cited in SEQ ID NO 60153
ccgatggaccgccatagtcaccgactaaaaaaaccagcgaccacgtaaatctttgacgacgaggaggaggaggaggagaagaataaacggaagaaactaagagatgaatagtccaccggagaacgatctttgttcgatatgtcattcccacttcaccgctccttgtcaagccaattgttcccattggttctgcgggaactgcattatgctggtgtggaggcatggatctacattacagccatgtaaatgccctttgtgtcgtcgtcatattagtttgttggttccttcagaggacacaatcagagaccgtaatgacgctacagttaaggaggttcttggtaatcttgaaacttacaaccgactctttggcgggcgttcaagtagtttagttcagaggatgcaagacctgcccttcttactacggaggttgttgcgggaaatgatggatccacaaagaacgcttccacttgtcattagggctcgggtttatatcgcaatgattctcagtgctgtttacataatcagtccaatagatatcattccagaaggagttctgggggtagtcggtttgcttgatgatctactcatagcactgatttgtttcctccatgttgctgctctgtaccgctcggttctctatttccgtcatgccggttcgtgaatcaatgagtgtctttgacattatacgttgcagttcaagaactagagatgtgtgcttaccttttcttctgtctttgatcctttccctttacaaatacacaattgttctgtttagctaaggaaaactgaaatgtgtgatgataaagatcacagcacaaaaagcttggaagtacatatcaatcatcttcctaccactttc

SEQ ID NO: 40575 - protein, 185 aa, Arabidopsis thaliana
  peptide (1)..(185): Ceres Seq. ID no. 12337623
MNSPPENDLCSICHSHFTAPCQANCSHWFCGNCIMLVWRHGSTLQPCKCPLCRRHISLLVPSEDTIRDRNDATVKEVLGNLETYNRLFGGRSSSLVQRMQDLPFLLRRLLREMMDPQRTLPLVIRARVYIAMILSAVYIISPIDIIPEGVLGVVGLLDDLLIALICFLHVAALYRSVLYFRHAGS

SEQ ID NO: 40576 - protein, 151 aa, Arabidopsis thaliana
  peptide (1)..(151): Ceres Seq. ID no. 12337624
MLVWRHGSTLQPCKCPLCRRHISLLVPSEDTIRDRNDATVKEVLGNLETYNRLFGGRSSSLVQRMQDLPFLLRRLLREMMDPQRTLPLVIRARVYIAMILSAVYIISPIDIIPEGVLGVVGLLDDLLIALICFLHVAALYRSVLYFRHAGS

SEQ ID NO: 40577 - DNA, 1371 bp, Arabidopsis thaliana
  misc_feature (1)..(1371): Ceres Seq. ID no. 12366986
  misc_feature (1)..(1371): Ortholog of  Ceres SEQ ID NO 14310687 as cited in SEQ ID NO 52933
ctccttaaatcacttcgatcaaaacttatctctctctatcgtcttttgttttgatttaaatgcctcaagtcgttgcttcagcatgtaccggtgggtctgaccggaaaatctcatgtgaaactctggccgacgataacgaagactcacctcataactcgaagatccgacccgtatccatctccgccgtcgattttccaccggaatcttactctttatcaaaagaagctcagctcgaatggctaaacgacaacgccttcttcgaacgcaaagaatcacaaaaaggaaactcttctgctccaatttcgaatcccaatacaaaccctaattcgagctctcatcgaatctcactcaaatcaaaagcgtcgatcatcagattaccgaaaccgcagaagacgtgtttcaacgaagcgaagaaacggagaaattgcagaatcgcgaggactttgatgattccgaaacggatcgggtcgagattgaaatcggatcctacgttatcggagccatgttctcccaaggtttcttgtatcggaagggttagatctaaacgtgatcgtagccgacgaatgcagagacaaaaatccggtcgaaccaattcgtttaaggataaaccggttccggttaagaagcctggttttttcgctagcttcagagctattttcagaaccggtggcggttgcaaagacttatctgcgagtggagctcacgcgcctcggagggatgtcgtagtctctccgccgagagtttcggtgagaagatcgacggatattagaggacggcttccgccgggagacgtcgggaaatcctcgccgcagaggaatagtaccggttcgaggagatcaattgacggcggtgaaccggttctgcctggtttaggtgggatgactcggtttacttcagggagaagaccggatttgttggttgaagtttgacgtggcgtgacgtacggcgttttactgtgagtggtggggtccagtcccgagaaaaaacaaggatcgtgattggttagttggctatatggggcccagaagcgtgtgtatatttgaaaagtcgttgtgatgacatggcgagtggtttaacggagttaggaacacggcacagatagaaaaacgcggacgcttttggattgatttcttacgtctcaaccactttcaccgttttattatatagcttttggtgcgttttttcttctttttaagacttttgatatttgaattagtttcgctttttgtcctttttattattttccttgttttgggttgtacataggtattgttatttctttgtgtacatgtgtttttttttttgcttagaaaggaatagtagaatgtaaaagatacttgtgatgatcagtcaataatgtgttagacaccc

SEQ ID NO: 40578 - protein, 289 aa, Arabidopsis thaliana
  peptide (1)..(289): Ceres Seq. ID no. 12366987
MPQVVASACTGGSDRKISCETLADDNEDSPHNSKIRPVSISAVDFPPESYSLSKEAQLEWLNDNAFFERKESQKGNSSAPISNPNTNPNSSSHRISLKSKASIIRLPKPQKTCFNEAKKRRNCRIARTLMIPKRIGSRLKSDPTLSEPCSPKVSCIGRVRSKRDRSRRMQRQKSGRTNSFKDKPVPVKKPGFFASFRAIFRTGGGCKDLSASGAHAPRRDVVVSPPRVSVRRSTDIRGRLPPGDVGKSSPQRNSTGSRRSIDGGEPVLPGLGGMTRFTSGRRPDLLVEV

SEQ ID NO: 40579 - protein, 160 aa, Arabidopsis thaliana
  peptide (1)..(160): Ceres Seq. ID no. 12366988
MIPKRIGSRLKSDPTLSEPCSPKVSCIGRVRSKRDRSRRMQRQKSGRTNSFKDKPVPVKKPGFFASFRAIFRTGGGCKDLSASGAHAPRRDVVVSPPRVSVRRSTDIRGRLPPGDVGKSSPQRNSTGSRRSIDGGEPVLPGLGGMTRFTSGRRPDLLVEV

SEQ ID NO: 40580 - DNA, 1831 bp, Arabidopsis thaliana
  misc_feature (1)..(1831): Ceres Seq. ID no. 12397190
  misc_feature (1)..(1831): Ortholog of  Ceres SEQ ID NO 13639120 as cited in SEQ ID NO 56708
ttttcctccgacaatatatttttaagtaatgacaatgtttccgcattattgggtttaattccatttttaaattagggttcttcagatcgacaaatctttctctttctctttccccgatcggaatcatgctaaagatctgaactttttctcagatccgtgaataagtaagtacggagagacagaaacatactcagactgatctgaggaaaacaaagttgatggtcgcaaacctgtaagtgaaatctatagagagagacgttgaagaagaaaatgggtcaagatggttcgccggcgcataaaagaccatccggaagcggcggaggacttccgacgacgacgttaaccaacggtggaggaagaggtggtcgtggtggtttgttacctcgaggtagacagatgcagaagacgtttaacaacatcaagatcacaattctctgtggtttcgtcacaattctcgtcttacgtggcactatcggtgttggtaacctaggaagctcaagcgccgatgcagttaaccagaacatcattgaggagactaaccggattctagctgagatccgatctgattcggatccaaccgacttggatgagcctcaggaaggtgatatgaatcccaatgcgacgtatgttctaggtcctaagatcacggattgggatagtcaacgtaaggtatggttgaatcagaatcctgagtttcctagtactgtcaatggcaaagctcgaatcttgcttttaacaggatctcctcctaagccttgtgataaccccattggtgatcattatcttttgaaatctgtgaagaacaagattgattattgtaggcttcatggaattgagattgtgtataacatggctcatttggataaggaactcgctggctattgggcaaaattaccaatgattaggaggttgatgttgtctcatccagaagttgagtggatctggtggatggatagtgatgctttgttcactgatatactgtttcagatccctttggctaggtatcagaagcataatctagtgattcatggttatccggacttgttgttcgatcagaagtcgtggattgctttgaacacaggtagttttctgctgaggaattgtcagtggtcgttggatttgttagatgcttgggcgcctatgggacctaaagggccaattcgtgatgaggccgggaaggtattgacggcttatctgaaaggtagaccagcttttgaggcagatgatcagtcagcattgatctatctcctgctttctcagaaagatacatggatggagaaagtgtttgtggagaatcaatactatttgcacgggttttgggaaggtttggttgataggtatgaggagatgatagagaagtatcacccgggattgggtgatgagagatggccatttgtgacccatttcgttgggtgtaaaccgtgtggtagctatgctgattatgcagtcgagaggtgcttgaagagtatggagagggcctttaattttgcagacaatcaagtgctcaagctgtatggttttagccataggggattgttgagccccaagattaagaggatcagaaatgagacagtctctcctttggagtttgtagacaagtttgatattcgcagaacgccagtggaaaccaaaccacagaactagaggaacacaaggagaggataggctcagctctcatgagattgtggacacgtataggtaaattatatgacactcacaaatgcaaagcaaatttgtttgcctgtacttgctactttactgtttcttctgcttctcttttttttgtttgttgttgttgcaagaatattttagatgcaaattctttttccat

SEQ ID NO: 40581 - protein, 457 aa, Arabidopsis thaliana
  peptide (1)..(457): Ceres Seq. ID no. 12397191
MGQDGSPAHKRPSGSGGGLPTTTLTNGGGRGGRGGLLPRGRQMQKTFNNIKITILCGFVTILVLRGTIGVGNLGSSSADAVNQNIIEETNRILAEIRSDSDPTDLDEPQEGDMNPNATYVLGPKITDWDSQRKVWLNQNPEFPSTVNGKARILLLTGSPPKPCDNPIGDHYLLKSVKNKIDYCRLHGIEIVYNMAHLDKELAGYWAKLPMIRRLMLSHPEVEWIWWMDSDALFTDILFQIPLARYQKHNLVIHGYPDLLFDQKSWIALNTGSFLLRNCQWSLDLLDAWAPMGPKGPIRDEAGKVLTAYLKGRPAFEADDQSALIYLLLSQKDTWMEKVFVENQYYLHGFWEGLVDRYEEMIEKYHPGLGDERWPFVTHFVGCKPCGSYADYAVERCLKSMERAFNFADNQVLKLYGFSHRGLLSPKIKRIRNETVSPLEFVDKFDIRRTPVETKPQN

SEQ ID NO: 40582 - protein, 415 aa, Arabidopsis thaliana
  peptide (1)..(415): Ceres Seq. ID no. 12397192
MQKTFNNIKITILCGFVTILVLRGTIGVGNLGSSSADAVNQNIIEETNRILAEIRSDSDPTDLDEPQEGDMNPNATYVLGPKITDWDSQRKVWLNQNPEFPSTVNGKARILLLTGSPPKPCDNPIGDHYLLKSVKNKIDYCRLHGIEIVYNMAHLDKELAGYWAKLPMIRRLMLSHPEVEWIWWMDSDALFTDILFQIPLARYQKHNLVIHGYPDLLFDQKSWIALNTGSFLLRNCQWSLDLLDAWAPMGPKGPIRDEAGKVLTAYLKGRPAFEADDQSALIYLLLSQKDTWMEKVFVENQYYLHGFWEGLVDRYEEMIEKYHPGLGDERWPFVTHFVGCKPCGSYADYAVERCLKSMERAFNFADNQVLKLYGFSHRGLLSPKIKRIRNETVSPLEFVDKFDIRRTPVETKPQN

SEQ ID NO: 40583 - protein, 345 aa, Arabidopsis thaliana
  peptide (1)..(345): Ceres Seq. ID no. 12397193
MNPNATYVLGPKITDWDSQRKVWLNQNPEFPSTVNGKARILLLTGSPPKPCDNPIGDHYLLKSVKNKIDYCRLHGIEIVYNMAHLDKELAGYWAKLPMIRRLMLSHPEVEWIWWMDSDALFTDILFQIPLARYQKHNLVIHGYPDLLFDQKSWIALNTGSFLLRNCQWSLDLLDAWAPMGPKGPIRDEAGKVLTAYLKGRPAFEADDQSALIYLLLSQKDTWMEKVFVENQYYLHGFWEGLVDRYEEMIEKYHPGLGDERWPFVTHFVGCKPCGSYADYAVERCLKSMERAFNFADNQVLKLYGFSHRGLLSPKIKRIRNETVSPLEFVDKFDIRRTPVETKPQN

SEQ ID NO: 40584 - DNA, 1603 bp, Arabidopsis thaliana
  misc_feature (1)..(1603): Ceres Seq. ID no. 12327728
  misc_feature (1)..(1603): Ortholog of  Ceres SEQ ID NO 13594345 as cited in SEQ ID NO 58043
  misc_feature (1)..(1603): Ortholog of  Ceres SEQ ID NO 12614112 as cited in SEQ ID NO 60891
  misc_feature (1)..(1603): Ortholog of  Ceres SEQ ID NO 13597574 as cited in SEQ ID NO 64677
  misc_feature (1)..(1603): Ortholog of  Ceres SEQ ID NO 14302832 as cited in SEQ ID NO 64926
  misc_feature (1)..(1603): Ortholog of  Ceres SEQ ID NO 13662880 as cited in SEQ ID NO 65422
  misc_feature (1)..(1603): Ortholog of  Ceres SEQ ID NO 12779098 as cited in SEQ ID NO 67698
  misc_feature (1)..(1603): Ortholog of  Ceres SEQ ID NO 13596180 as cited in SEQ ID NO 67941
  misc_feature (1)..(1603): Ortholog of  Ceres SEQ ID NO 13591190 as cited in SEQ ID NO 68044
  misc_feature (1)..(1603): Ortholog of  Ceres SEQ ID NO 13596089 as cited in SEQ ID NO 68373
  misc_feature (1)..(1603): Ortholog of  Ceres SEQ ID NO 14313563 as cited in SEQ ID NO 68700
atatatccgataaatacttccgtcataacagagtaagagtttgtatgtaacaaatttcaacaaaaagaagagaaaaacaatgggagagaaagcgaaagcaaatgtgttagtcttctcatttccgatacaaggtcacataaaccctctcctccaattctcaaaacgcctactctctaaaaacgtcaacgtcacattcctcaccacttcctccacccacaactccatcctccgccgtgccatcaccggcggagccactgctcttcctctctcttttgtccccattgacgatggattcgaggaagatcacccatctacggacacatctcccgactacttcgcaaagttccaagaaaacgtatctcgaagcctctcagagcttatctcctcgatggacccaaaaccaaacgccgtcgtttacgactcgtgcctgccttatgtcctcgacgtttgccggaaacatcctggcgttgctgcggcgtcgtttttcactcagtcctccaccgtgaacgcgacctatattcatttcttgcgtggagagtttaaggagtttcaaaatgatgtcgttttgcctgcaatgcctccgctgaagggtaatgacttaccggtgtttctttacgataacaatctctgccggccgttgtttgagctcattagtagccagttcgtgaatgttgacgacattgacttcttcttggttaactctttcgacgaactcgaagtcgaggtgctacaatggatgaaaaaccaatggccggtcaagaacataggaccgatgattccatcaatgtacttagacaaacgattagcaggtgacaaagactacggaatcaacctcttcaatgcccaagtcaacgaatgccttgattggcttgactcaaaaccgcccggttcagtgatctacgtgtcttttggaagcttggccgtcttaaaagacgatcaaatgatagaagtcgcggctggtctaaaacaaactggccataacttcttatgggttgttagagaaactgaaacaaagaagcttccaagcaattacatagaggacatttgtgacaagggattgatagtgaattggagtcctcaattacaagttcttgcacataaatcaatcggttgtttcatgactcattgcgggtggaattcgactttagaggcattgagcttaggagttgctttgataggaatgccggcttatagcgaccagccgactaatgctaagtttattgaagatgtgtggaaggttggggttagggttaaggcagatcaaaatgggtttgttccgaaggaagagattgtgagatgtgttggagaagttatggaagatatgtcggagaaagggaaggagattagaaaaaatgctcggaggttgatggagtttgcaagggaagctttgtctgatggaggaaattctgataagaatattgatgagtttgttgctaaaattgtgaggtaaagtgactgtatgattaatctttgatgcttaattaataatgtgtttttaagagttttcaaaggacgaaatgtttagaatgtaacttgttggtttctttcaaagttatttatgatgtgaacaatgtgatctaaaatggtgttgaacttgggaaag

SEQ ID NO: 40585 - protein, 456 aa, Arabidopsis thaliana
  peptide (1)..(456): Ceres Seq. ID no. 12327729
MGEKAKANVLVFSFPIQGHINPLLQFSKRLLSKNVNVTFLTTSSTHNSILRRAITGGATALPLSFVPIDDGFEEDHPSTDTSPDYFAKFQENVSRSLSELISSMDPKPNAVVYDSCLPYVLDVCRKHPGVAAASFFTQSSTVNATYIHFLRGEFKEFQNDVVLPAMPPLKGNDLPVFLYDNNLCRPLFELISSQFVNVDDIDFFLVNSFDELEVEVLQWMKNQWPVKNIGPMIPSMYLDKRLAGDKDYGINLFNAQVNECLDWLDSKPPGSVIYVSFGSLAVLKDDQMIEVAAGLKQTGHNFLWVVRETETKKLPSNYIEDICDKGLIVNWSPQLQVLAHKSIGCFMTHCGWNSTLEALSLGVALIGMPAYSDQPTNAKFIEDVWKVGVRVKADQNGFVPKEEIVRCVGEVMEDMSEKGKEIRKNARRLMEFAREALSDGGNSDKNIDEFVAKIVR

SEQ ID NO: 40586 - protein, 353 aa, Arabidopsis thaliana
  peptide (1)..(353): Ceres Seq. ID no. 12327730
MDPKPNAVVYDSCLPYVLDVCRKHPGVAAASFFTQSSTVNATYIHFLRGEFKEFQNDVVLPAMPPLKGNDLPVFLYDNNLCRPLFELISSQFVNVDDIDFFLVNSFDELEVEVLQWMKNQWPVKNIGPMIPSMYLDKRLAGDKDYGINLFNAQVNECLDWLDSKPPGSVIYVSFGSLAVLKDDQMIEVAAGLKQTGHNFLWVVRETETKKLPSNYIEDICDKGLIVNWSPQLQVLAHKSIGCFMTHCGWNSTLEALSLGVALIGMPAYSDQPTNAKFIEDVWKVGVRVKADQNGFVPKEEIVRCVGEVMEDMSEKGKEIRKNARRLMEFAREALSDGGNSDKNIDEFVAKIVR

SEQ ID NO: 40587 - protein, 291 aa, Arabidopsis thaliana
  peptide (1)..(291): Ceres Seq. ID no. 12327731
MPPLKGNDLPVFLYDNNLCRPLFELISSQFVNVDDIDFFLVNSFDELEVEVLQWMKNQWPVKNIGPMIPSMYLDKRLAGDKDYGINLFNAQVNECLDWLDSKPPGSVIYVSFGSLAVLKDDQMIEVAAGLKQTGHNFLWVVRETETKKLPSNYIEDICDKGLIVNWSPQLQVLAHKSIGCFMTHCGWNSTLEALSLGVALIGMPAYSDQPTNAKFIEDVWKVGVRVKADQNGFVPKEEIVRCVGEVMEDMSEKGKEIRKNARRLMEFAREALSDGGNSDKNIDEFVAKIVR

SEQ ID NO: 40588 - DNA, 1199 bp, Arabidopsis thaliana
  misc_feature (1)..(1199): Ceres Seq. ID no. 12738353
  misc_feature (1)..(1199): Ortholog of  Ceres SEQ ID NO 14302351 as cited in SEQ ID NO 66690
cttcttccttgcacgaccctctccttgatggtcttcctacttctcctcgtcttttcaaagatattcaggaagaatcgtgccgagaggatggcatcaatgtgtccaattttggtgccacggaacagcaagatgttggtggaaacggccaatttggtgtagtgttggtccatggatttggcggaggagtgttttcttggagacatgtgatgagttctcttgcccatcaacttggctgtgttgtcactgcatttgataggcctggttggggattaaccgccagacctcataaaaaggatttggaagaaagagagatgccaaacccttacactctggataatcaggtagacatgcttcttgccttttgccacgaaatgggatttgcttctgtagtcttggttggccatgatgatggaggtttgcttgctctcaaggctgcacaaagattgctagaaacaaaagatcccatcaaagtcaaaggagtggttttgcttaatgtaagcttgacgagggaaatagtgccagcttttgcaagaatacttctgcacacatcactaggaaagaaacaccttgttcgtccgcttttacgcactgaaatagctcaggtggtgaatcgcagagcttggtatgatcctgccaagatgacaaccgatgtcttaaggctatacaaggcaccacttcatgtggaaggctgggatgaggcacttcacgagataggcatactctcatccgagatggtgcttccaactcaaaatgcattgtcacttctcaaggcagtggaaaacttaccagtattagtcgttgctggagccgaagacgcacttgttcccctcaagtcctcccaagtcatggcttcaaaactcgaaaactctaggctagtagcaatctcaggatgcggacatctgccacatgaggagtgtcccaaggcacttcttgcagccatgtgcccattcataagcagacttgtatttagtgaggactgagtgactgagtgatcactgtacttagtgaggagtgagtgactgagtgatcacttctagttgtcttcttagctcacaatcgattagtgtttgcgagttttttttgtctgccccaaaaggaaagaagttggggtgattgaggtcttagtaagtctgtattcattataagcagagttattgtaacattctctgtttttctcatcagagtttttaatggtttgg

SEQ ID NO: 40589 - protein, 325 aa, Arabidopsis thaliana
  peptide (1)..(325): Ceres Seq. ID no. 12738354
SSLHDPLLDGLPTSPRLFKDIQEESCREDGINVSNFGATEQQDVGGNGQFGVVLVHGFGGGVFSWRHVMSSLAHQLGCVVTAFDRPGWGLTARPHKKDLEEREMPNPYTLDNQVDMLLAFCHEMGFASVVLVGHDDGGLLALKAAQRLLETKDPIKVKGVVLLNVSLTREIVPAFARILLHTSLGKKHLVRPLLRTEIAQVVNRRAWYDPAKMTTDVLRLYKAPLHVEGWDEALHEIGILSSEMVLPTQNALSLLKAVENLPVLVVAGAEDALVPLKSSQVMASKLENSRLVAISGCGHLPHEECPKALLAAMCPFISRLVFSED

SEQ ID NO: 40590 - protein, 257 aa, Arabidopsis thaliana
  peptide (1)..(257): Ceres Seq. ID no. 12738355
MSSLAHQLGCVVTAFDRPGWGLTARPHKKDLEEREMPNPYTLDNQVDMLLAFCHEMGFASVVLVGHDDGGLLALKAAQRLLETKDPIKVKGVVLLNVSLTREIVPAFARILLHTSLGKKHLVRPLLRTEIAQVVNRRAWYDPAKMTTDVLRLYKAPLHVEGWDEALHEIGILSSEMVLPTQNALSLLKAVENLPVLVVAGAEDALVPLKSSQVMASKLENSRLVAISGCGHLPHEECPKALLAAMCPFISRLVFSED

SEQ ID NO: 40591 - protein, 222 aa, Arabidopsis thaliana
  peptide (1)..(222): Ceres Seq. ID no. 12738356
MPNPYTLDNQVDMLLAFCHEMGFASVVLVGHDDGGLLALKAAQRLLETKDPIKVKGVVLLNVSLTREIVPAFARILLHTSLGKKHLVRPLLRTEIAQVVNRRAWYDPAKMTTDVLRLYKAPLHVEGWDEALHEIGILSSEMVLPTQNALSLLKAVENLPVLVVAGAEDALVPLKSSQVMASKLENSRLVAISGCGHLPHEECPKALLAAMCPFISRLVFSED

SEQ ID NO: 40592 - DNA, 1172 bp, Arabidopsis thaliana
  misc_feature (1)..(1172): Ceres Seq. ID no. 12395194
  misc_feature (1)..(1172): Ortholog of  Ceres SEQ ID NO 15178884 as cited in SEQ ID NO 0
aacgcatttaaattaatatttatggataatatggttaataaataaggaacttctatttatatcacaaaaggtcactggtcttcttcgtgtgacttcaccactttctcatctcccacaaaaatggctctctcacttctttcagtctttatctttttccatgtctttaccaatgttgtttttgctgcttcaaatgaggaatccaacgccttagtttctttaccaacgccaacacttccatcgccatctccggctaccaaaccgccgtcgccagctctcaaaccgccgacgccgtcgtacaagccacccacgctgccaactactcctattaaaccacccaccacaaaacctccggtcaaacctccaactattccggttacaccagtaaaacctccggtttcaactcctccgatcaaactaccgccggtacaaccacctacgtacaaacccccaacgccaacagttaaaccaccgtccgtccaaccacctacgtacaaacccccaactccaacggttaaaccacccactacatcaccggttaaaccacccactacgccaccagttcaatcaccgccggtccaaccacctacgtacaaacccccaacgtcaccggttaaaccacccaccacaactccaccggttaaaccccccaccacgacgccaccggtccaaccacctacgtacaatcccccaactacaccggttaaaccacctacagcgccgcctgtcaaacctccaacaccacctcccgtaagaactcggatagattgcgtgcctttatgtgggacgaggtgtgggcaacactcgaggaagaacgtatgtatgagagcgtgcgtcacgtgctgctaccgctgcaagtgtgttcccccaggcacctacggtaataaggagaagtgtggatcttgttacgccaacatgaagacacgtggtggaaaatccaaatgtccttgaacctttatatgacgatggttgttaaacgaaataatttaaatcaatggagtttttataagtttgcaatgcgtttgtttttgttattagaatattgagttggatctttgtttacgggacgtacaatactaaataatgaaaaaaaccttctcgatgaattaagggttgtatgacattcgttttgtattgaataatactacgggatggataacagttttattacttct

SEQ ID NO: 40593 - protein, 275 aa, Arabidopsis thaliana
  peptide (1)..(275): Ceres Seq. ID no. 12395195
MALSLLSVFIFFHVFTNVVFAASNEESNALVSLPTPTLPSPSPATKPPSPALKPPTPSYKPPTLPTTPIKPPTTKPPVKPPTIPVTPVKPPVSTPPIKLPPVQPPTYKPPTPTVKPPSVQPPTYKPPTPTVKPPTTSPVKPPTTPPVQSPPVQPPTYKPPTSPVKPPTTTPPVKPPTTTPPVQPPTYNPPTTPVKPPTAPPVKPPTPPPVRTRIDCVPLCGTRCGQHSRKNVCMRACVTCCYRCKCVPPGTYGNKEKCGSCYANMKTRGGKSKCP

SEQ ID NO: 40594 - DNA, 1094 bp, Arabidopsis thaliana
  misc_feature (1)..(1094): Ceres Seq. ID no. 12558445
  misc_feature (1)..(1094): Ortholog of  Ceres SEQ ID NO 13595341 as cited in SEQ ID NO 56398
  misc_feature (1)..(1094): Ortholog of  Ceres SEQ ID NO 15173764 as cited in SEQ ID NO 57550
  misc_feature (1)..(1094): Ortholog of  Ceres SEQ ID NO 15227118 as cited in SEQ ID NO 59038
  misc_feature (1)..(1094): Ortholog of  Ceres SEQ ID NO 13597299 as cited in SEQ ID NO 63785
  misc_feature (1)..(1094): Ortholog of  Ceres SEQ ID NO 13663895 as cited in SEQ ID NO 66923
cttagaattttccgacgaggaaagttcttcaaattcgctgttgaattttgtttctcggagaaattatcaaaaccctagacgatcacattatcgcttctgagatcaaagacgatgcagcaattactgttcgctgttgttctcttcgaggttgttgtgataatggcgctttccttcaagacgccgattaggaagctgttgattatgagcttggatcgttccaagcgtggtcgtggaccggtggtgattcagacggtttctgcgacggttattgtgcttctggtgacgagcgtgtacaatatgatggggatccagaagcgttggatcgaagatggtgtagtgaatcctacagatgaggttatcatggctaagcatctccttgaatcgactcttatgggtggttttctattccttgggctaatgatagacaggctgcatcattacatgagggagctacgcataagaaggaagaacatggaagttataaagaaggaaggagcattattggaaggtgttaaggccagaggtttagatgaagttaaaaacttgatggaagaaattacgtcccttcggaaaaggcaagagcagctggactctgagcttgaggcaaggtctaaagaaatccgtaccgagaaaactagtgcggttgctctacagaagcaatctgaagggttccttattgagtttaaccggttgcttgaggaaaaccaggtgctgcgagaccaattgcacactgtggattcgaaactttcgcgttcaagcagcaaaaagaatacttgagagaccttattccaacacttgaaacttctttgcgattctgccgtctgaatatatatgtttcgagtttgatatcaggagcttgtggtttggtgttatcgcatcttgttaacatggaagatgattgggaaagatcagagaatacaaaacaagtataggtttgcttcttgtttaagtgtttagctaaggtagaaattaatcaattcttctgctataggaaactgtaactcgttgtaacttgttcatttcgcaacaaaaacttctcgaattggttcttatttccttccatatacgtatacagtcgctgcaagtgggttgtc

SEQ ID NO: 40595 - protein, 221 aa, Arabidopsis thaliana
  peptide (1)..(221): Ceres Seq. ID no. 12558446
MQQLLFAVVLFEVVVIMALSFKTPIRKLLIMSLDRSKRGRGPVVIQTVSATVIVLLVTSVYNMMGIQKRWIEDGVVNPTDEVIMAKHLLESTLMGGFLFLGLMIDRLHHYMRELRIRRKNMEVIKKEGALLEGVKARGLDEVKNLMEEITSLRKRQEQLDSELEARSKEIRTEKTSAVALQKQSEGFLIEFNRLLEENQVLRDQLHTVDSKLSRSSSKKNT

SEQ ID NO: 40596 - protein, 205 aa, Arabidopsis thaliana
  peptide (1)..(205): Ceres Seq. ID no. 12558447
MALSFKTPIRKLLIMSLDRSKRGRGPVVIQTVSATVIVLLVTSVYNMMGIQKRWIEDGVVNPTDEVIMAKHLLESTLMGGFLFLGLMIDRLHHYMRELRIRRKNMEVIKKEGALLEGVKARGLDEVKNLMEEITSLRKRQEQLDSELEARSKEIRTEKTSAVALQKQSEGFLIEFNRLLEENQVLRDQLHTVDSKLSRSSSKKNT

SEQ ID NO: 40597 - protein, 191 aa, Arabidopsis thaliana
  peptide (1)..(191): Ceres Seq. ID no. 12558448
MSLDRSKRGRGPVVIQTVSATVIVLLVTSVYNMMGIQKRWIEDGVVNPTDEVIMAKHLLESTLMGGFLFLGLMIDRLHHYMRELRIRRKNMEVIKKEGALLEGVKARGLDEVKNLMEEITSLRKRQEQLDSELEARSKEIRTEKTSAVALQKQSEGFLIEFNRLLEENQVLRDQLHTVDSKLSRSSSKKNT

SEQ ID NO: 40598 - DNA, 2289 bp, Arabidopsis thaliana
  misc_feature (1)..(2289): Ceres Seq. ID no. 13492421
  misc_feature (1)..(2289): Ortholog of  Ceres SEQ ID NO 15169439 as cited in SEQ ID NO 55062
tcccccgacgggacactagagaagggagggcagagagcgattttgttctctctctacttctcggtcgtcttcttcgtctccactctagggttttactctatcttcttcttcatcatcatcttctacaccaatctctagcgttaatctgtttctgctggagaagatttacgcttgttcctcggttctcttacttctgctccggttcgatcgcttgctaagtgtttcgagttggttcgcacttcggtgggcgatatcatgactgtgaggaacggtggtttcccaggagattataatcgtaacagttttgactctcccggcggctgtgatgatagccccaatgcttccaaggatgatgaaacttttggtgtcccgagaatagttttacccttgtctgacttgtcatcatcagaaaggagaaagtggattcatacgcttcgtcaggagctggaacaactacggtcctttcagaagagtgttggggaccttcttcctatatctaagattgttactagtacacctgcaagtaatgtgtctcgccccaagagttttggaatgtcacgatgctctactggccctggaaaaagggtgctccccttcacagcaaccaaaccagagccagtcaccacttccactatgcttcggatgaagcaatgtgagagcctccttaaacgattgatgtcgcagcagcattgttggctctttaatacccctgtggacgtcgtcaagctcaacattcctgattatttcaccattatcaaacatcctatggatttaggaactgttaaaagcaagttaacttccggcacgtattcaagcccttcagagttttctgctgatgtccgtcttactttccgcaatgctatgacttataacccgtcagataataatgtgtatcgcttcgctgatactctcagcaagttttttgaagtgagatggaaaactatcgagaagaagtcatccggaaccaaatctgaaccaagtaacttggctactcttgctcacaaagatattgcgatacctgagcctgtggctaagaagagaaagatgaatgctgtgaaacgtaacagcctcttagagcctgctaagcgggttatgacagatgaggatagagtaaagcttggcagagatttggggtccttgacagaattccctgtacagataataaatttcctgagagatcacagctccaaggaagagagatctggagatgatgagatagagattgacatcaatgatctcagtcatgatgccttgttccagttgcgggatctctttgatgagtttctgcgagaaaatcaaaagaaagattcaaacggtgaaccctgtgtgttagagcttttacatgggtcagggccaggaaattcattgacgcaacactgtgatgggagtgaattggaggacgaggatgttgacattggtaattatgagcaccctatatctcacatctcaactgtcagaacagaaaaagattccgtcggtggattgaatcagatggaagatgcatccagagggaagctaagtcttattgagggggcagatggtcatcaagatggaaatagtgctccaaaagagaaggaactacctccagaaaagcgttacagggctgctctattgaaaaatcgatttgcggatataatcttgaaggctcaagagataactcttaatcagaatgagaaacgagacccagagacactgcaacgtgagaaggaagaactggaattgcaaaagaagaaagaaaaagcacggttacaagcagaagccaaggaagctgaagaagctcgtagaaaagctgaggcacaagaggctaagaggaaactggaacttgaaagagaagcagcccggcaggcattgcttgagatggagaagtcggttgaaataaatgagaacacaaggtttctcaaggacctagaactgctcaaaacggttaacacggaccagttacgaaatctaagagatgttggctctgagtctgatgggttggctgtatttgggtttggaggaagtaatcctctagagcagctggggctatttatgaaacatgaggaggatgaagatgaatccgacatgcttgcgtttccagatcccggcaatgaagtagaagagggtgaaatcgactgagattcatgagtgttgtgtcttggataacagcagtcaagtgtacatgagttgttgtaaaaaatgatagttagattgatatttaaccaatgcgatggcattttatccgagtaaacaatcaataacactttgtgtagtgagtaaaattttggttaattcaataaaccaatgacc

SEQ ID NO: 40599 - protein, 620 aa, Arabidopsis thaliana
  peptide (1)..(620): Ceres Seq. ID no. 13492422
MTVRNGGFPGDYNRNSFDSPGGCDDSPNASKDDETFGVPRIVLPLSDLSSSERRKWIHTLRQELEQLRSFQKSVGDLLPISKIVTSTPASNVSRPKSFGMSRCSTGPGKRVLPFTATKPEPVTTSTMLRMKQCESLLKRLMSQQHCWLFNTPVDVVKLNIPDYFTIIKHPMDLGTVKSKLTSGTYSSPSEFSADVRLTFRNAMTYNPSDNNVYRFADTLSKFFEVRWKTIEKKSSGTKSEPSNLATLAHKDIAIPEPVAKKRKMNAVKRNSLLEPAKRVMTDEDRVKLGRDLGSLTEFPVQIINFLRDHSSKEERSGDDEIEIDINDLSHDALFQLRDLFDEFLRENQKKDSNGEPCVLELLHGSGPGNSLTQHCDGSELEDEDVDIGNYEHPISHISTVRTEKDSVGGLNQMEDASRGKLSLIEGADGHQDGNSAPKEKELPPEKRYRAALLKNRFADIILKAQEITLNQNEKRDPETLQREKEELELQKKKEKARLQAEAKEAEEARRKAEAQEAKRKLELEREAARQALLEMEKSVEINENTRFLKDLELLKTVNTDQLRNLRDVGSESDGLAVFGFGGSNPLEQLGLFMKHEEDEDESDMLAFPDPGNEVEEGEID

SEQ ID NO: 40600 - protein, 521 aa, Arabidopsis thaliana
  peptide (1)..(521): Ceres Seq. ID no. 13492423
MSRCSTGPGKRVLPFTATKPEPVTTSTMLRMKQCESLLKRLMSQQHCWLFNTPVDVVKLNIPDYFTIIKHPMDLGTVKSKLTSGTYSSPSEFSADVRLTFRNAMTYNPSDNNVYRFADTLSKFFEVRWKTIEKKSSGTKSEPSNLATLAHKDIAIPEPVAKKRKMNAVKRNSLLEPAKRVMTDEDRVKLGRDLGSLTEFPVQIINFLRDHSSKEERSGDDEIEIDINDLSHDALFQLRDLFDEFLRENQKKDSNGEPCVLELLHGSGPGNSLTQHCDGSELEDEDVDIGNYEHPISHISTVRTEKDSVGGLNQMEDASRGKLSLIEGADGHQDGNSAPKEKELPPEKRYRAALLKNRFADIILKAQEITLNQNEKRDPETLQREKEELELQKKKEKARLQAEAKEAEEARRKAEAQEAKRKLELEREAARQALLEMEKSVEINENTRFLKDLELLKTVNTDQLRNLRDVGSESDGLAVFGFGGSNPLEQLGLFMKHEEDEDESDMLAFPDPGNEVEEGEID

SEQ ID NO: 40601 - protein, 494 aa, Arabidopsis thaliana
  peptide (1)..(494): Ceres Seq. ID no. 13492424
MLRMKQCESLLKRLMSQQHCWLFNTPVDVVKLNIPDYFTIIKHPMDLGTVKSKLTSGTYSSPSEFSADVRLTFRNAMTYNPSDNNVYRFADTLSKFFEVRWKTIEKKSSGTKSEPSNLATLAHKDIAIPEPVAKKRKMNAVKRNSLLEPAKRVMTDEDRVKLGRDLGSLTEFPVQIINFLRDHSSKEERSGDDEIEIDINDLSHDALFQLRDLFDEFLRENQKKDSNGEPCVLELLHGSGPGNSLTQHCDGSELEDEDVDIGNYEHPISHISTVRTEKDSVGGLNQMEDASRGKLSLIEGADGHQDGNSAPKEKELPPEKRYRAALLKNRFADIILKAQEITLNQNEKRDPETLQREKEELELQKKKEKARLQAEAKEAEEARRKAEAQEAKRKLELEREAARQALLEMEKSVEINENTRFLKDLELLKTVNTDQLRNLRDVGSESDGLAVFGFGGSNPLEQLGLFMKHEEDEDESDMLAFPDPGNEVEEGEID

SEQ ID NO: 40602 - DNA, 2086 bp, Arabidopsis thaliana
  misc_feature (1)..(2086): Ceres Seq. ID no. 13488656
  misc_feature (1)..(2086): Ortholog of  Ceres SEQ ID NO 15171181 as cited in SEQ ID NO 56848
ggattttctatctctctctctctctctctctctcttcttcacacacacagagacatcatcctcttcacacccttttcttttgcacaatcgcattcactatctcttctctctcttttgtgtcacatccttctcttctcttctaagttctaatcttgtactatcttgttctaccatggcttcttctgaaacaagaatgaacaaggcaagagaaaaagaagaagccatagcaaatggagtgaagttgagagcacttcaagcgagtcttatgcagatgaagtcaagcccatcttccaattacagtctcagaaacccttcttcctcttctgctgcttcacctgcttctcgtcctctccctaacctctctgctcatgattaccctgttttcactcctagctatgaagatgagcctgtgtctgcatttcatcacaagaatctcactttatctgagacttgggatgaagatggtgttggtttagtagatggagatacttatctctctgattcttacaaaacctcaacttcaagaaagactgtgatgatgcctcatcaagattctcatcatcatgtttacactatgtcggacgctctcagatctccaccgttacatttttatacaaccggtagaagcaactgtggctcggtcgactttagatcggtctcttcttgcaatgactacaataaacaaaaaggtttcgacacgaagagcttgaagagctctaatcttgttgtgcccttgacggattcgcactctgctgttgtttcttctcagccaagaaaccgtggaggtagagtaatgtcttggttattccctaagttaaagaagaaacaaaagagtaattcgatctttaattcacctagtataactgagaagtcagaggaagtttctgaggtgttgaaggattctggttctggtgttgagaagttgaagagagaattgatggaagcaaacagaagtagggatgctgcgttaacacaagtctcagagatgaaatcttcattgggagagttaagtgagaagcttcagtacttggaaagttactgtgacaatttaaagaaagctttgagagaagcaacagaagtagtgtcacaggagaatagtggtggaagaagctcagggaaaaagaactcagagatgccagtgagtgaagaagtgatggttgaagggttcttgcagattgtatcagaagcaagattatcgataaagcagttcttgaaaacattagtttcagagattgatgaagaagactcgactctaattggtaacatcaacactctccttcaacctcacaacttatcattcacttctaagtactccaagatcattcagtaccacttagaagcaatcataagccaatcagtataccaagactttgagaactgcgtattccagaagaacggtaagccgaaactgcttgatccggaacaagatcgacaagcgaacttctcgtcctttgcttccttgagaaacttgagctggaacgaggtattgaaaaagggtacaaaatactacagtgatgagttcagtagattctgcgatgagaagatgagtttgatcattacaacattgaattggacaagaccttggtcagaacaaatgcttcaagcattctttgtggctgcaaaatgtgtatggttgcttcatttgcttgccttctcgttcaatccagcgttagggatattgagagttgaggagaacagagagtttgaatcaagttttatggaagatatgggtgcagataggcagagatcagcattgtcccgtggaccggcacgggttaaggttatggtaatgcctgggttttatgttttagatagggttttgagatgtaaggttctttgcaggtacaagtcattgggctgaactgaagagagtcacactcactctagtctaatcaaaattgattggttcttaattaacttttcttattgttaatctcttgtgtttcttctacctaggcttttttttactggtctttttacactttgttaagaattattataggtttttaaatattgtcaaatactacttgtcaaggagattttgtatttttacatttttgtattgatggaaaagtattgaatatgt

SEQ ID NO: 40603 - protein, 619 aa, Arabidopsis thaliana
  peptide (1)..(619): Ceres Seq. ID no. 13488657
DFLSLSLSLSLFFTHTETSSSSHPFLLHNRIHYLFSLFCVTSFSSLLSSNLVLSCSTMASSETRMNKAREKEEAIANGVKLRALQASLMQMKSSPSSNYSLRNPSSSSAASPASRPLPNLSAHDYPVFTPSYEDEPVSAFHHKNLTLSETWDEDGVGLVDGDTYLSDSYKTSTSRKTVMMPHQDSHHHVYTMSDALRSPPLHFYTTGRSNCGSVDFRSVSSCNDYNKQKGFDTKSLKSSNLVVPLTDSHSAVVSSQPRNRGGRVMSWLFPKLKKKQKSNSIFNSPSITEKSEEVSEVLKDSGSGVEKLKRELMEANRSRDAALTQVSEMKSSLGELSEKLQYLESYCDNLKKALREATEVVSQENSGGRSSGKKNSEMPVSEEVMVEGFLQIVSEARLSIKQFLKTLVSEIDEEDSTLIGNINTLLQPHNLSFTSKYSKIIQYHLEAIISQSVYQDFENCVFQKNGKPKLLDPEQDRQANFSSFASLRNLSWNEVLKKGTKYYSDEFSRFCDEKMSLIITTLNWTRPWSEQMLQAFFVAAKCVWLLHLLAFSFNPALGILRVEENREFESSFMEDMGADRQRSALSRGPARVKVMVMPGFYVLDRVLRCKVLCRYKSLG

SEQ ID NO: 40604 - protein, 562 aa, Arabidopsis thaliana
  peptide (1)..(562): Ceres Seq. ID no. 13488658
MASSETRMNKAREKEEAIANGVKLRALQASLMQMKSSPSSNYSLRNPSSSSAASPASRPLPNLSAHDYPVFTPSYEDEPVSAFHHKNLTLSETWDEDGVGLVDGDTYLSDSYKTSTSRKTVMMPHQDSHHHVYTMSDALRSPPLHFYTTGRSNCGSVDFRSVSSCNDYNKQKGFDTKSLKSSNLVVPLTDSHSAVVSSQPRNRGGRVMSWLFPKLKKKQKSNSIFNSPSITEKSEEVSEVLKDSGSGVEKLKRELMEANRSRDAALTQVSEMKSSLGELSEKLQYLESYCDNLKKALREATEVVSQENSGGRSSGKKNSEMPVSEEVMVEGFLQIVSEARLSIKQFLKTLVSEIDEEDSTLIGNINTLLQPHNLSFTSKYSKIIQYHLEAIISQSVYQDFENCVFQKNGKPKLLDPEQDRQANFSSFASLRNLSWNEVLKKGTKYYSDEFSRFCDEKMSLIITTLNWTRPWSEQMLQAFFVAAKCVWLLHLLAFSFNPALGILRVEENREFESSFMEDMGADRQRSALSRGPARVKVMVMPGFYVLDRVLRCKVLCRYKSLG

SEQ ID NO: 40605 - protein, 555 aa, Arabidopsis thaliana
  peptide (1)..(555): Ceres Seq. ID no. 13488659
MNKAREKEEAIANGVKLRALQASLMQMKSSPSSNYSLRNPSSSSAASPASRPLPNLSAHDYPVFTPSYEDEPVSAFHHKNLTLSETWDEDGVGLVDGDTYLSDSYKTSTSRKTVMMPHQDSHHHVYTMSDALRSPPLHFYTTGRSNCGSVDFRSVSSCNDYNKQKGFDTKSLKSSNLVVPLTDSHSAVVSSQPRNRGGRVMSWLFPKLKKKQKSNSIFNSPSITEKSEEVSEVLKDSGSGVEKLKRELMEANRSRDAALTQVSEMKSSLGELSEKLQYLESYCDNLKKALREATEVVSQENSGGRSSGKKNSEMPVSEEVMVEGFLQIVSEARLSIKQFLKTLVSEIDEEDSTLIGNINTLLQPHNLSFTSKYSKIIQYHLEAIISQSVYQDFENCVFQKNGKPKLLDPEQDRQANFSSFASLRNLSWNEVLKKGTKYYSDEFSRFCDEKMSLIITTLNWTRPWSEQMLQAFFVAAKCVWLLHLLAFSFNPALGILRVEENREFESSFMEDMGADRQRSALSRGPARVKVMVMPGFYVLDRVLRCKVLCRYKSLG

SEQ ID NO: 40606 - DNA, 896 bp, Arabidopsis thaliana
  misc_feature (1)..(896): Ceres Seq. ID no. 13488033
  misc_feature (1)..(896): Ortholog of  Ceres SEQ ID NO 13660094 as cited in SEQ ID NO 60820
aatcgtttagtattttttgtaaatcgcctctccaccttgcccctggagaaccatcaccaaaaaacagagccaaacaaacaaaaaaaaaatctaaaagcatcaatggcttctcggcggcgagtgcttctgaaggttataattctcggagacagtggggttgggaagacatccttgatgaatcagtttgtgaatcgaaaattcagtaatcagtataaagctaccattggagctgatttcttgaccaaagaggtccaaattgatgacagaatcttcactttgcagatttgggatactgcagggcaagagaggttccaaagtttgggtgttgctttctaccgaggagcggactgttgtgttcttgtgaatgatgtcaatgttatgaaatcctttgaaaatcttaacaactggagggaagagttcctgatccaggctagtccttcagatcctgaaaacttccccttcgttgtcttggggaacaagacagatgttgacggtggaaagagtcgagtggttactgagaagaaagcaaaatcttggtgtgcatccaagggaaacattccttacttcgagacttcggccaaagatggagtcaatgttgatgcagctttcgaatgcatagccaaaaatgctctcaagaatgaacctgaagaagaagtgtaccttccggacaccattgatgtagctggggctcggcaacaaagatcaactgggtgtgaatgctaaccaactttgttgcatggtttattagaaagaacatgtgttttaaggagagacctttttagttctttggcattattgtgatgtgtatcaattagcatacgcacctttgttttggattacagaatcaaaaacgaattttggtcacctgttcattcttaatctcttcagcttgtcgc

SEQ ID NO: 40607 - protein, 240 aa, Arabidopsis thaliana
  peptide (1)..(240): Ceres Seq. ID no. 13488034
NRLVFFVNRLSTLPLENHHQKTEPNKQKKNLKASMASRRRVLLKVIILGDSGVGKTSLMNQFVNRKFSNQYKATIGADFLTKEVQIDDRIFTLQIWDTAGQERFQSLGVAFYRGADCCVLVNDVNVMKSFENLNNWREEFLIQASPSDPENFPFVVLGNKTDVDGGKSRVVTEKKAKSWCASKGNIPYFETSAKDGVNVDAAFECIAKNALKNEPEEEVYLPDTIDVAGARQQRSTGCEC

SEQ ID NO: 40608 - protein, 206 aa, Arabidopsis thaliana
  peptide (1)..(206): Ceres Seq. ID no. 13488035
MASRRRVLLKVIILGDSGVGKTSLMNQFVNRKFSNQYKATIGADFLTKEVQIDDRIFTLQIWDTAGQERFQSLGVAFYRGADCCVLVNDVNVMKSFENLNNWREEFLIQASPSDPENFPFVVLGNKTDVDGGKSRVVTEKKAKSWCASKGNIPYFETSAKDGVNVDAAFECIAKNALKNEPEEEVYLPDTIDVAGARQQRSTGCEC

SEQ ID NO: 40609 - protein, 182 aa, Arabidopsis thaliana
  peptide (1)..(182): Ceres Seq. ID no. 13488036
MNQFVNRKFSNQYKATIGADFLTKEVQIDDRIFTLQIWDTAGQERFQSLGVAFYRGADCCVLVNDVNVMKSFENLNNWREEFLIQASPSDPENFPFVVLGNKTDVDGGKSRVVTEKKAKSWCASKGNIPYFETSAKDGVNVDAAFECIAKNALKNEPEEEVYLPDTIDVAGARQQRSTGCEC

SEQ ID NO: 40610 - DNA, 1218 bp, Arabidopsis thaliana
  misc_feature (1)..(1218): Ceres Seq. ID no. 12328663
  misc_feature (1)..(1218): Ortholog of  Ceres SEQ ID NO 15172553 as cited in SEQ ID NO 57496
atcagtttcagcgaaacgatggagcttctctgctcaccaacgtctctttcctcctccttcgctctctcttctgctcttttagtccctcgttcgttctccatgccagggacaaggagattcatggttctgtgtagttcccagaaggaaagtcagatgacagtgtcagtaactggagcaactggattcatagggagacgattggttcagagacttcgtgctgataaccacgctatccgggtcttaacacgctctaaatccaaagctgagcaaatatttcctgccaaggacttcccaggtattgtgattgcagaagaatcggagtggaagaactgtgtacaaggctctactgctgttgtgaacttggcaggactgcctattagtacaaggtggtctcccgagatcaagaaagagattaagggcagccggatccgtgtcacctccaaagttgttgacttaatcaataattcaccagcagaagctaggcctaccgttctagttagcgccacggctgttggttactatggtactagtgagacaggagtattcgacgaaaatagtccatcagggaaggactatcttgcagaggtttgcagagaatgggaaggaactgcattgaaagcaaataaggatgttagagtggcacttatccgcattggtgttgttcttggcaaagacggtggagctttggccatgatgataccctttttccaaatgtttgctggaggacctctgggttccggacaacaatggttctcttggattcacgtggatgacttggtgaacttaatttacgaggccctcactaatccatcttataaaggagttattaatgggactgcgccgaatccggttaggcttggggaaatgtgccagcagctaggcagtgttcttagccgaccatcgtggctaccagttcctgactttgcactcaaagctttgctcggagaaggtgccactgtagttctggagggacagaaggtattacctgtaagagccaaagagcttggttttgaattcaagtataaatacgtgaaggatgcactcagagccattatgcaataaggtgacacacataagcatctttgtaaaattggttttgatcacagaaaatcaagatatccttttcttttcgtttctatatctttctttttgagtaaaactcgagatatgtatttatggtaaaaagtgttttcggtgatatctcagaaaccagagatc

SEQ ID NO: 40611 - protein, 353 aa, Arabidopsis thaliana
  peptide (1)..(353): Ceres Seq. ID no. 12328664
ISFSETMELLCSPTSLSSSFALSSALLVPRSFSMPGTRRFMVLCSSQKESQMTVSVTGATGFIGRRLVQRLRADNHAIRVLTRSKSKAEQIFPAKDFPGIVIAEESEWKNCVQGSTAVVNLAGLPISTRWSPEIKKEIKGSRIRVTSKVVDLINNSPAEARPTVLVSATAVGYYGTSETGVFDENSPSGKDYLAEVCREWEGTALKANKDVRVALIRIGVVLGKDGGALAMMIPFFQMFAGGPLGSGQQWFSWIHVDDLVNLIYEALTNPSYKGVINGTAPNPVRLGEMCQQLGSVLSRPSWLPVPDFALKALLGEGATVVLEGQKVLPVRAKELGFEFKYKYVKDALRAIMQ

SEQ ID NO: 40612 - protein, 347 aa, Arabidopsis thaliana
  peptide (1)..(347): Ceres Seq. ID no. 12328665
MELLCSPTSLSSSFALSSALLVPRSFSMPGTRRFMVLCSSQKESQMTVSVTGATGFIGRRLVQRLRADNHAIRVLTRSKSKAEQIFPAKDFPGIVIAEESEWKNCVQGSTAVVNLAGLPISTRWSPEIKKEIKGSRIRVTSKVVDLINNSPAEARPTVLVSATAVGYYGTSETGVFDENSPSGKDYLAEVCREWEGTALKANKDVRVALIRIGVVLGKDGGALAMMIPFFQMFAGGPLGSGQQWFSWIHVDDLVNLIYEALTNPSYKGVINGTAPNPVRLGEMCQQLGSVLSRPSWLPVPDFALKALLGEGATVVLEGQKVLPVRAKELGFEFKYKYVKDALRAIMQ

SEQ ID NO: 40613 - protein, 320 aa, Arabidopsis thaliana
  peptide (1)..(320): Ceres Seq. ID no. 12328666
MPGTRRFMVLCSSQKESQMTVSVTGATGFIGRRLVQRLRADNHAIRVLTRSKSKAEQIFPAKDFPGIVIAEESEWKNCVQGSTAVVNLAGLPISTRWSPEIKKEIKGSRIRVTSKVVDLINNSPAEARPTVLVSATAVGYYGTSETGVFDENSPSGKDYLAEVCREWEGTALKANKDVRVALIRIGVVLGKDGGALAMMIPFFQMFAGGPLGSGQQWFSWIHVDDLVNLIYEALTNPSYKGVINGTAPNPVRLGEMCQQLGSVLSRPSWLPVPDFALKALLGEGATVVLEGQKVLPVRAKELGFEFKYKYVKDALRAIMQ

SEQ ID NO: 40614 - DNA, 2082 bp, Arabidopsis thaliana
  misc_feature (1)..(2082): Ceres Seq. ID no. 12370850
  misc_feature (1)..(2082): Ortholog of  Ceres SEQ ID NO 15176223 as cited in SEQ ID NO 51535
  misc_feature (1)..(2082): Ortholog of  Ceres SEQ ID NO 15171193 as cited in SEQ ID NO 59370
  misc_feature (1)..(2082): Ortholog of  Ceres SEQ ID NO 13597198 as cited in SEQ ID NO 63665
accggaatctctctctttctccgccgaacttcttcgaatcaagtttccgtttatcactctaatattgttaaagtttccactgataccaccgctctagtcatggctgaagctgaagatcagcaaaatttcgttgcacacaatggagatcaggtaccagatcaagggtcagatgagttgcataatgggttaccgtaccaggttcatgatgagacccttgttcaccaaccatacgaggttgaagatccgattcttgaacctcagcagtacgaggtaccagatccgactcttgaaccacagcagtacgaggtaccagatcagactcttgaacctcagcagtacgaggttgatgatcagttagagtatcatcaataccagttgcaggaccaggctaatgaagatgtccaagatcattcgcaagatgacctacaatatcagccacaaaatcaggagcagtttcagttacaagacgaggctcatgatcaggctcagtatcaggcgcaaggtgatgtacaagatcacaatggtgatgaagtgcaagataaagtagaagatgaggaaggaattcctgagcatcttgagtctctacagaaatcagagcctgaagaagatgcgacagttggaggtgaggagaagaggtggccgggatggcccggagagacggtattccgtatgctggttcctgcacagaaagtgggtagcatcattggtcgcaaaggtgatgtcattaagaaaatagttgaggagacaagggctcgaataaagattctcgatggtcctccaggcacaacagaaagagctgttatggtttctggtaaagaagagcccgaatcatctctaccaccttctatggatggccttcttagagtccacatgcggatagttgatggtttggatggtgaagcttctcaagcccctccgccttcaaaggtgtcaacaagattactagtcccagcatctcaggctggaagtttgattggaaaacagggaggaacagttaaagctattcaagaagcatccgcttgtatagtcagagttcttggatcagaggatttacctgtttttgctcttcaagacgatagggttgttgaagttgtgggggaaccaacaagtgttcatagagccttggagctgattgcgtcacatctcagaaagttcttggttgatcgtagcatcatcccattctttgaaaatcagatgcaaaagccaactcgccaaatggaccatatgccaccaccacaccagtcatggggtcctcctcaaggtcatgccccaagtgttggtggaggaggctatggtcacaacccacctccatatatgcaaccacctcctagacatgatagttactatcctcctcctgagatgcgtcaacctccaatggagaaacagcctcatcaaggtatatctgcatatggtagagagcctcctatgaatgtgcacgtatcatcagccccaccaatggtcgctcagcaagttacgcagcaaatgcagattccactgtcttatgctgatgctgtaattgggacgtcgggttcaaacataagctacactagacgtcttagtggagcaacagtaactattcaggagaccaggggagtacctggtgaaatgactgttgaggttagcggaactggctcacaagtccaaactgccgtgcagcttattcagaacttcatggctgaagctggagcgccggcaccagcacagcctcaaactgtagcaccagagcagcaaggctataacccatacgcaacacacggctcagtttacgcagcggctccaacaaacccgcctggaggatacgctacggattacagctcaggctacggttactgatgaaagattttaagtttctttagaatgttttactagtagttgcaagcaagagtggaaacgctagatgcctaatcgagtatatgttgttattagcgagcactctgtgtactgacaatcaattattatatcacttgttttgagacttcttcatttgtgtactattcataacattgatctaaccggaaatcttctttatattcaaaaaaagtaaaaaaaaaaaaaaatgtatggttcattatcgtgtccttc

SEQ ID NO: 40615 - protein, 610 aa, Arabidopsis thaliana
  peptide (1)..(610): Ceres Seq. ID no. 12370851
TGISLFLRRTSSNQVSVYHSNIVKVSTDTTALVMAEAEDQQNFVAHNGDQVPDQGSDELHNGLPYQVHDETLVHQPYEVEDPILEPQQYEVPDPTLEPQQYEVPDQTLEPQQYEVDDQLEYHQYQLQDQANEDVQDHSQDDLQYQPQNQEQFQLQDEAHDQAQYQAQGDVQDHNGDEVQDKVEDEEGIPEHLESLQKSEPEEDATVGGEEKRWPGWPGETVFRMLVPAQKVGSIIGRKGDVIKKIVEETRARIKILDGPPGTTERAVMVSGKEEPESSLPPSMDGLLRVHMRIVDGLDGEASQAPPPSKVSTRLLVPASQAGSLIGKQGGTVKAIQEASACIVRVLGSEDLPVFALQDDRVVEVVGEPTSVHRALELIASHLRKFLVDRSIIPFFENQMQKPTRQMDHMPPPHQSWGPPQGHAPSVGGGGYGHNPPPYMQPPPRHDSYYPPPEMRQPPMEKQPHQGISAYGREPPMNVHVSSAPPMVAQQVTQQMQIPLSYADAVIGTSGSNISYTRRLSGATVTIQETRGVPGEMTVEVSGTGSQVQTAVQLIQNFMAEAGAPAPAQPQTVAPEQQGYNPYATHGSVYAAAPTNPPGGYATDYSSGYGY

SEQ ID NO: 40616 - protein, 577 aa, Arabidopsis thaliana
  peptide (1)..(577): Ceres Seq. ID no. 12370852
MAEAEDQQNFVAHNGDQVPDQGSDELHNGLPYQVHDETLVHQPYEVEDPILEPQQYEVPDPTLEPQQYEVPDQTLEPQQYEVDDQLEYHQYQLQDQANEDVQDHSQDDLQYQPQNQEQFQLQDEAHDQAQYQAQGDVQDHNGDEVQDKVEDEEGIPEHLESLQKSEPEEDATVGGEEKRWPGWPGETVFRMLVPAQKVGSIIGRKGDVIKKIVEETRARIKILDGPPGTTERAVMVSGKEEPESSLPPSMDGLLRVHMRIVDGLDGEASQAPPPSKVSTRLLVPASQAGSLIGKQGGTVKAIQEASACIVRVLGSEDLPVFALQDDRVVEVVGEPTSVHRALELIASHLRKFLVDRSIIPFFENQMQKPTRQMDHMPPPHQSWGPPQGHAPSVGGGGYGHNPPPYMQPPPRHDSYYPPPEMRQPPMEKQPHQGISAYGREPPMNVHVSSAPPMVAQQVTQQMQIPLSYADAVIGTSGSNISYTRRLSGATVTIQETRGVPGEMTVEVSGTGSQVQTAVQLIQNFMAEAGAPAPAQPQTVAPEQQGYNPYATHGSVYAAAPTNPPGGYATDYSSGYGY

SEQ ID NO: 40617 - protein, 387 aa, Arabidopsis thaliana
  peptide (1)..(387): Ceres Seq. ID no. 12370853
MLVPAQKVGSIIGRKGDVIKKIVEETRARIKILDGPPGTTERAVMVSGKEEPESSLPPSMDGLLRVHMRIVDGLDGEASQAPPPSKVSTRLLVPASQAGSLIGKQGGTVKAIQEASACIVRVLGSEDLPVFALQDDRVVEVVGEPTSVHRALELIASHLRKFLVDRSIIPFFENQMQKPTRQMDHMPPPHQSWGPPQGHAPSVGGGGYGHNPPPYMQPPPRHDSYYPPPEMRQPPMEKQPHQGISAYGREPPMNVHVSSAPPMVAQQVTQQMQIPLSYADAVIGTSGSNISYTRRLSGATVTIQETRGVPGEMTVEVSGTGSQVQTAVQLIQNFMAEAGAPAPAQPQTVAPEQQGYNPYATHGSVYAAAPTNPPGGYATDYSSGYGY

SEQ ID NO: 40618 - DNA, 613 bp, Arabidopsis thaliana
  misc_feature (1)..(613): Ceres Seq. ID no. 12738839
  misc_feature (1)..(613): Ortholog of  Ceres SEQ ID NO 14308128 as cited in SEQ ID NO 51081
  misc_feature (1)..(613): Ortholog of  Ceres SEQ ID NO 15171088 as cited in SEQ ID NO 54178
caatgttccaaaggctgttgttctctgtcaagtggagaaatccaaggaagacatgctgaatcagctatacagctctatcagcgcaattggtaatgagaggattgaatcattgattcaagaggatcagaacgtcaaaagacgaagagaccgttaccagaaacagtcctctcttctctcaaagctcactaggcagcttagcattcacgataaccgagcagctgctgcttcaagctggtctgacaatagtggcactgaaagcagcccgagaaccaatggagggtcatcaggagaggactggatgaatgcgtttaacgcagctgctagtggacctgactcattgaagagatatggatctggcggccatagccgtcgttacagtgatccagcacagaatggtgaggattcttctggatctggtggcagctcccgtcgcaccacaccaaaccggctcccaccagctccgccacagtctggatcatcttacaggtattagaaacctgtttggtttccaggattgttattgaacgaaccataaaacacattcttttctttctttttctgccctttcggattggtccccctgtttctgggactatttttcttatgtctcact

SEQ ID NO: 40619 - protein, 163 aa, Arabidopsis thaliana
  peptide (1)..(163): Ceres Seq. ID no. 12738840
NVPKAVVLCQVEKSKEDMLNQLYSSISAIGNERIESLIQEDQNVKRRRDRYQKQSSLLSKLTRQLSIHDNRAAAASSWSDNSGTESSPRTNGGSSGEDWMNAFNAAASGPDSLKRYGSGGHSRRYSDPAQNGEDSSGSGGSSRRTTPNRLPPAPPQSGSSYRY

SEQ ID NO: 40620 - protein, 146 aa, Arabidopsis thaliana
  peptide (1)..(146): Ceres Seq. ID no. 12738841
MLNQLYSSISAIGNERIESLIQEDQNVKRRRDRYQKQSSLLSKLTRQLSIHDNRAAAASSWSDNSGTESSPRTNGGSSGEDWMNAFNAAASGPDSLKRYGSGGHSRRYSDPAQNGEDSSGSGGSSRRTTPNRLPPAPPQSGSSYRY

SEQ ID NO: 40621 - DNA, 1815 bp, Arabidopsis thaliana
  misc_feature (1)..(1815): Ceres Seq. ID no. 13622016
  misc_feature (1)..(1815): Ortholog of  Ceres SEQ ID NO 14316344 as cited in SEQ ID NO 60120
gtttactctctctctctctcacattttctcattctctcctacaacaagtttccgccgctaagccactcactacgcagccatggcaaatcctgaccatgtttcagatgtgctacataatttgtcgattgatccaacaaccaaggctttagctcctgattctgaaacaaagttgcagggggcttatggcggaaacggtaatgacttcttgctcaatgatgagttagtggaggctaccaaaattggtaaacctagtcttttgtctaaagatggaggtgtgaccaaagacaagggatccaaccttaagaaactcgggtaccaaagtgcagcttataacgcaaagggttcatatgggaagggtgcctatgcttatgggtactatcccccagcatatcagtacccaagacatggttacactgggagctatgcttcagggaaaaccaatcttcagtatcagtacctgactcagcagggaagatcagctggtaatggtcaatcttatggaggatacatggacaacatttactccaattatgggatgtgtggaccttacacgaatggctatgggtatggctcttacggttatgactcatggaaatacatgcccaattggtatgcggttaacaatacctacaagccaagaaacgggtatcatggatatggcaaagaaaacattgaggggttaaatgagatgaatagaggtccacgagctaagggtttcaacagccaagatggttccaaggtgatggctgtgtctttgaaggagcagagagtgactgagactgagaaactcagtgaagatgtgtctcttttagatcccaaggactacaataagatagatttccctgagacctacacagaagcaaagttttatgtaatcaaatcgtacagtgaagatgatattcataaaagtatcaaatacagtgtttggtccagcactcctaatggtaacaagaagctggatgcctcatataacgaggcaaaacagaagtcagatggctgtcccgtgtttctacttttctctgtaaacactagtggacaatttgttggtttagccgagatggtaggccctgttgatttcaataagactgttgaatactggcaacaggacaaatggattggttgcttccctgttaagtggcatttcgttaaagatatccctaatagctccttgaggcatataactctggagaacaatgagaacaagccggttactaatagcagagacacacaggaagtaaagctcgagcaaggcattaaagtcatcaagattttcaaggaccacgcaagcaagacatgcatcctcgatgattttgagttctatgagaatcgtcaaaagattatccaagaaaggaaaagcaaacacctgcagatcaaaaaacagacattggtggccaatgcagacaaaggtgtaatgtcaaaaattaatcttgtgaaacctcaagagtctactacagcctcagaagatgcagcagcactaggagttgcggctgaagtgactaaagaatcgaaagtggtgaaagagaccgagttacctgtggagaaaaatgctgttgctactgcctgctgaaccaacctttggttttaagtgggaactgagtgggctgttttaggctatttagagcgtttctctagttttgtttccattcctgaatttgcagacttttttttttttttttttggaaccgagttgagagggtagtggcttagtagatgaagttttggcatgagcattcatcatcttgcagttattctctatccctttagtaatggtccaacatatgaggatatgggtaaaagattggtattgaatcagct

SEQ ID NO: 40622 - protein, 495 aa, Arabidopsis thaliana
  peptide (1)..(495): Ceres Seq. ID no. 15219327
MANPDHVSDVLHNLSIDPTTKALAPDSETKLQGAYGGNGNDFLLNDELVEATKIGKPSLLSKDGGVTKDKGSNLKKLGYQSAAYNAKGSYGKGAYAYGYYPPAYQYPRHGYTGSYASGKTNLQYQYLTQQGRSAGNGQSYGGYMDNIYSNYGMCGPYTNGYGYGSYGYDSWKYMPNWYAVNNTYKPRNGYHGYGKENIEGLNEMNRGPRAKGFNSQDGSKVMAVSLKEQRVTETEKLSEDVSLLDPKDYNKIDFPETYTEAKFYVIKSYSEDDIHKSIKYSVWSSTPNGNKKLDASYNEAKQKSDGCPVFLLFSVNTSGQFVGLAEMVGPVDFNKTVEYWQQDKWIGCFPVKWHFVKDIPNSSLRHITLENNENKPVTNSRDTQEVKLEQGIKVIKIFKDHASKTCILDDFEFYENRQKIIQERKSKHLQIKKQTLVANADKGVMSKINLVKPQESTTASEDAAALGVAAEVTKESKVVKETELPVEKNAVATAC

SEQ ID NO: 40623 - protein, 352 aa, Arabidopsis thaliana
  peptide (1)..(352): Ceres Seq. ID no. 15219328
MDNIYSNYGMCGPYTNGYGYGSYGYDSWKYMPNWYAVNNTYKPRNGYHGYGKENIEGLNEMNRGPRAKGFNSQDGSKVMAVSLKEQRVTETEKLSEDVSLLDPKDYNKIDFPETYTEAKFYVIKSYSEDDIHKSIKYSVWSSTPNGNKKLDASYNEAKQKSDGCPVFLLFSVNTSGQFVGLAEMVGPVDFNKTVEYWQQDKWIGCFPVKWHFVKDIPNSSLRHITLENNENKPVTNSRDTQEVKLEQGIKVIKIFKDHASKTCILDDFEFYENRQKIIQERKSKHLQIKKQTLVANADKGVMSKINLVKPQESTTASEDAAALGVAAEVTKESKVVKETELPVEKNAVATAC

SEQ ID NO: 40624 - protein, 343 aa, Arabidopsis thaliana
  peptide (1)..(343): Ceres Seq. ID no. 15219329
MCGPYTNGYGYGSYGYDSWKYMPNWYAVNNTYKPRNGYHGYGKENIEGLNEMNRGPRAKGFNSQDGSKVMAVSLKEQRVTETEKLSEDVSLLDPKDYNKIDFPETYTEAKFYVIKSYSEDDIHKSIKYSVWSSTPNGNKKLDASYNEAKQKSDGCPVFLLFSVNTSGQFVGLAEMVGPVDFNKTVEYWQQDKWIGCFPVKWHFVKDIPNSSLRHITLENNENKPVTNSRDTQEVKLEQGIKVIKIFKDHASKTCILDDFEFYENRQKIIQERKSKHLQIKKQTLVANADKGVMSKINLVKPQESTTASEDAAALGVAAEVTKESKVVKETELPVEKNAVATAC

SEQ ID NO: 40625 - DNA, 1187 bp, Arabidopsis thaliana
  misc_feature (1)..(1187): Ceres Seq. ID no. 12738589
  misc_feature (1)..(1187): Ortholog of  Ceres SEQ ID NO 14312594 as cited in SEQ ID NO 58686
tccacgagtttacgacaaactatatgccggtataatgcaaaaaatatcagctagtggcttgatacgcaagaaactgtttgattttgcttataactacaaattgggaaatatgagaaaaggattctctcaagaagaagcttctcctcgtctagacagacttatgttcgataagataaaagaagcattaggaggaagagctcatatgttgttatcaggagcagcgcctctacctcgtcatgtagaggagttcttgagaatcattcctgcctctaatctctctcaaggttatggattgactgagagttgtgggggaagcttcacgaccttagccggagtattttctatggtggggacagtgggtgtgccaatgcccacggtggaggcaaggctagtgtccgtaccagagatgggttacgacgccttttccgctgacgtgccgagaggagagatttgtcttagaggaaattcaatgttttctggttaccataaaagacaagatctaactgatcaagtcctaatcgatggatggttccacacaggagatattggagaatggcaagaagatggatcaatgaagatcatcgataggaagaagaacatcttcaagttgtctcaaggtgaatatgttgctgttgaaaacctcgaaaacacttactcaagatgtcccctcattgctcagatatgggtctatggcaacagcttcgagtcatttttggtaggtgtggttgtacctgatagaaaagctattgaagattgggctaaactcaattaccaatctcccaatgatttcgaatctctatgtcaaaatctcaaagctcaaaaatacttcttggatgagcttaactctaccgcaaagcaatatcaacttaaaggatttgaaatgttaaaagctattcatttagaaccaaacccttttgatattgaaagagatcttattactccaactttcaagctgaaaaggccacagctcctccaacattacaagggcatagttgatcaactttattcagaagcaaagaggtccatggcatagataattagataccgatcggctattcattttctgatgctatttgggtttgtatgatagtatgttacaaaattgtgttcggatcctctcatcatgtgattcttgttacactaaatttatagtttggaaactatatatatactattaagcaacgttt

SEQ ID NO: 40626 - protein, 343 aa, Arabidopsis thaliana
  peptide (1)..(343): Ceres Seq. ID no. 12738590
PRVYDKLYAGIMQKISASGLIRKKLFDFAYNYKLGNMRKGFSQEEASPRLDRLMFDKIKEALGGRAHMLLSGAAPLPRHVEEFLRIIPASNLSQGYGLTESCGGSFTTLAGVFSMVGTVGVPMPTVEARLVSVPEMGYDAFSADVPRGEICLRGNSMFSGYHKRQDLTDQVLIDGWFHTGDIGEWQEDGSMKIIDRKKNIFKLSQGEYVAVENLENTYSRCPLIAQIWVYGNSFESFLVGVVVPDRKAIEDWAKLNYQSPNDFESLCQNLKAQKYFLDELNSTAKQYQLKGFEMLKAIHLEPNPFDIERDLITPTFKLKRPQLLQHYKGIVDQLYSEAKRSMA

SEQ ID NO: 40627 - protein, 332 aa, Arabidopsis thaliana
  peptide (1)..(332): Ceres Seq. ID no. 12738591
MQKISASGLIRKKLFDFAYNYKLGNMRKGFSQEEASPRLDRLMFDKIKEALGGRAHMLLSGAAPLPRHVEEFLRIIPASNLSQGYGLTESCGGSFTTLAGVFSMVGTVGVPMPTVEARLVSVPEMGYDAFSADVPRGEICLRGNSMFSGYHKRQDLTDQVLIDGWFHTGDIGEWQEDGSMKIIDRKKNIFKLSQGEYVAVENLENTYSRCPLIAQIWVYGNSFESFLVGVVVPDRKAIEDWAKLNYQSPNDFESLCQNLKAQKYFLDELNSTAKQYQLKGFEMLKAIHLEPNPFDIERDLITPTFKLKRPQLLQHYKGIVDQLYSEAKRSMA

SEQ ID NO: 40628 - protein, 307 aa, Arabidopsis thaliana; identical to SEQ ID NO: 25258
  peptide (1)..(307): Ceres Seq. ID no. 12738592

SEQ ID NO: 40629 - DNA, 1385 bp, Arabidopsis thaliana
  misc_feature (1)..(1385): Ceres Seq. ID no. 12421894
  misc_feature (1)..(1385): Ortholog of  Ceres SEQ ID NO 15175597 as cited in SEQ ID NO 58317
aaacctttctcttctctgctaacgagaaaacaaaagctatcgtctttgctactactactactgctattattacattgaatcctttgtgttcttcttcttcagctgctactttgttcgagtgctttcttacatgccgtcggagattgttgacaggaaaaggaagtctcgtggaacacgagatgtagctgagattctaaggcaatggagagagtacaatgagcagattgaggcagaatcttgtatcgatggtggtggtccaaaatcaatccgaaagcctcctccaaaaggttcgaggaagggttgtatgaaaggtaaaggtggacctgaaaacgggatttgtgactatagagaagttagacagaggagatggggtaaatgggttgctgagatccgtgagccagacggaggtgctaggttgtggctcggtactttctccagttcatatgaagctgcattggcttatgacgaggcggccaaagctatatatggtcagtctgccagactcaatcttcccgagatcacaaatcgctcttcttcgactgctgccactgccactgtgtcaggctcggttactgcattttctgatgaatctgaagtttgtgcacgtgaggatacaaatgcaagttcaggttttggtcaggtgaaactagaggattgtagcgatgaatatgttctcttagatagttctcagtgtattaaagaggagctgaaaggaaaagaggaagtgagggaagaacataacttggctgttggttttggaattggacaggactcgaaaagggagactttggatgcttggttgatgggaaatggcaatgaacaagaaccattggagtttggtgtggatgaaacgtttgatattaatgagctattgggtatattaaacgacaacaatgtgtctggtcaagagacaatgcagtatcaagtggatagacacccaaatttcagttaccaaacgcagtttccaaattctaacttgctcgggagcctcaaccctatggagattgctcaaccaggagttgattatggatgtccttatgtgcagcccagtgatatggagaactatggtattgatttagaccatcgcaggttcaatgatcttgacatacaggacttggattttggaggagacaaagatgttcatggatctacataagatttcaaatttcgtttgactgtcctaagtttgtgattctgctccgagacggtgtagctgttactagctagaagctgcccttctttgaagctactgatactttctgatattaatggttgtgagacgtagtacatgtagttaggtaatgtaggacaagttcaaatatgattccttctttctttttcttgtgaatacatatgacatatgaagaagttcaaacgttgggtcc

SEQ ID NO: 40630 - protein, 341 aa, Arabidopsis thaliana
  peptide (1)..(341): Ceres Seq. ID no. 12421895
MPSEIVDRKRKSRGTRDVAEILRQWREYNEQIEAESCIDGGGPKSIRKPPPKGSRKGCMKGKGGPENGICDYREVRQRRWGKWVAEIREPDGGARLWLGTFSSSYEAALAYDEAAKAIYGQSARLNLPEITNRSSSTAATATVSGSVTAFSDESEVCAREDTNASSGFGQVKLEDCSDEYVLLDSSQCIKEELKGKEEVREEHNLAVGFGIGQDSKRETLDAWLMGNGNEQEPLEFGVDETFDINELLGILNDNNVSGQETMQYQVDRHPNFSYQTQFPNSNLLGSLNPMEIAQPGVDYGCPYVQPSDMENYGIDLDHRRFNDLDIQDLDFGGDKDVHGST

SEQ ID NO: 40631 - protein, 283 aa, Arabidopsis thaliana
  peptide (1)..(283): Ceres Seq. ID no. 12421896
MKGKGGPENGICDYREVRQRRWGKWVAEIREPDGGARLWLGTFSSSYEAALAYDEAAKAIYGQSARLNLPEITNRSSSTAATATVSGSVTAFSDESEVCAREDTNASSGFGQVKLEDCSDEYVLLDSSQCIKEELKGKEEVREEHNLAVGFGIGQDSKRETLDAWLMGNGNEQEPLEFGVDETFDINELLGILNDNNVSGQETMQYQVDRHPNFSYQTQFPNSNLLGSLNPMEIAQPGVDYGCPYVQPSDMENYGIDLDHRRFNDLDIQDLDFGGDKDVHGST

SEQ ID NO: 40632 - DNA, 1712 bp, Arabidopsis thaliana; identical to SEQ ID NO: 24119
  misc_feature (1)..(1712): Ceres Seq. ID no. 12337203
  misc_feature (1)..(1712): Ortholog of  Ceres SEQ ID NO 15174513 as cited in SEQ ID NO 58979
  misc_feature (1)..(1712): Ortholog of  Ceres SEQ ID NO 13584616 as cited in SEQ ID NO 65234
  misc_feature (1)..(1712): Ortholog of  Ceres SEQ ID NO 15178939 as cited in SEQ ID NO 0

SEQ ID NO: 40633 - protein, 427 aa, Arabidopsis thaliana; identical to SEQ ID NO: 24120
  peptide (1)..(427): Ceres Seq. ID no. 12337204

SEQ ID NO: 40634 - protein, 410 aa, Arabidopsis thaliana; identical to SEQ ID NO: 24121
  peptide (1)..(410): Ceres Seq. ID no. 12337205

SEQ ID NO: 40635 - protein, 409 aa, Arabidopsis thaliana; identical to SEQ ID NO: 24122
  peptide (1)..(409): Ceres Seq. ID no. 12337206

SEQ ID NO: 40636 - DNA, 2252 bp, Arabidopsis thaliana
  misc_feature (1)..(2252): Ceres Seq. ID no. 13489083
  misc_feature (1)..(2252): Ortholog of  Ceres SEQ ID NO 14314319 as cited in SEQ ID NO 57500
gatgaaggtaagagagaaacaaacaaacaaaagagagagtacgggtttcttcttcgtcattctcacgaattcgtgaatttatttttgatttcgtcatctgggttttctcaaattctcttccttttttatcttttgagattttctggtattgaaagttcaaacctttgtactgggttcgttgatttttttttggtttccttctcattattcttcatgattcctccttttttctgtttctcgaaatttgtggttataaaattcacatttttttttgggagcagttgggtttcaatcatgtgtttatgatgttatattattaacaagagttgaatgaatcttctttttgaccgttgaaaagagaaaaactaaattaaagcaaagaggaaaaagaagaagaagaagattgtgttgttgttgttgttttaacgcttctttctgagataaagacatgcgtttctttttcagctcacattattttcccaaatgttgtgagtttgagaagaaaagtctgtttttttattgagatttttttgtttctatagattctatcgaaatgccgatgtttcagccgttaaagagagatgggttaataggatttgaaggtggtggtgagggcaagtcttagatctggatactgcagtgaaagatggagttctcggtggtgttaatggtggtggtgttggagttgttgatgagaaattggatctgaagaagatgataaaggagctagatttacaagatataccttctgttttcatttgtcctatctccttagagccgatgcaagatcctgtgactttgtgtactggtcaaacctatgaaaggttaaacattcacaaatggtttaacctaggtcacttgacttgtcctactacaatgcaagagctttgggatgatacggtaactcctaataaaactcttcatcatttgatctatacttggttctctcagaagtatgtgttgatgaagaaacgttctgaggatgttcaaggacgagctattgagattttggggactttgaagaaagctaaatgtcaagctagggttcatgctttgagtgagcttaaacagattgttattgctcatcttatggcgaggaagactgttgttgaagaaggtggtgtctctgtgatctcttctcttttgggtccttttacttctcatgctgttggatctgaggttgttgctattcttgtgagtcttgatcttgattctgattcgaaatccggcttgatgcaaccagctaaggtttctttgattgttgatatgttgaatgatggatctaatgagactaagatcaattgtgctagattgattagaggattggtggaagagaaagggtttagagcagagcttgtttcaagtcatagtttgcttgttgggttaatgagattggttaaggataagagacatagaaatggagtatctcctgcacttcggttgcttaaaccgatttcggttcataaacaagttcgaagcttgatggttagcattggagcagtgcctcaattagttgatatcttaccgtctttagacccggaatgtttggagttagctctgtttgttcttgatgctttgtgtacagacgtggaaggaagagttgctgtcaaagactctgcaaacacaataccttatacagttagggtgctgatgagggtgtctgagaattgcactaactacgcgctgtcgattctttggtctgtctgcaaattagctccagaagaatgttcaccacttgctgttgaggttggtcttgctgcaaagctgttactcgtgatccagagcgggtgtgatgcagcgttgaagcagcggtcagcagagctacttaagctttgtagtctacattattcagacaccatgtttatttccaaatgcaaactcacaaggacaatccaatagcattggcactgattgatcacaggattcagcgggttatccatgaaacggtaaatgtgaattgcattacgaatctgcctttgccctgatgtatatatagatgatgagtttgaagattgagctattggttttggtggtaacaattcaaaggaagaggcaatcagctgatggaaacatggggaagacgaagaaaccgggtggttgagggatcggtatgtaatgttaccatattggttcgttttgcaataagcattgggaattagaaaaaaactgtgtaaagttaccgcctctggctcaaatcaatttcagaagaacaaagaaaaagaagaatttgaagaaaggaaccatattaagtt

SEQ ID NO: 40637 - protein, 394 aa, Arabidopsis thaliana
  peptide (1)..(394): Ceres Seq. ID no. 13489084
MIKELDLQDIPSVFICPISLEPMQDPVTLCTGQTYERLNIHKWFNLGHLTCPTTMQELWDDTVTPNKTLHHLIYTWFSQKYVLMKKRSEDVQGRAIEILGTLKKAKCQARVHALSELKQIVIAHLMARKTVVEEGGVSVISSLLGPFTSHAVGSEVVAILVSLDLDSDSKSGLMQPAKVSLIVDMLNDGSNETKINCARLIRGLVEEKGFRAELVSSHSLLVGLMRLVKDKRHRNGVSPALRLLKPISVHKQVRSLMVSIGAVPQLVDILPSLDPECLELALFVLDALCTDVEGRVAVKDSANTIPYTVRVLMRVSENCTNYALSILWSVCKLAPEECSPLAVEVGLAAKLLLVIQSGCDAALKQRSAELLKLCSLHYSDTMFISKCKLTRTIQ

SEQ ID NO: 40638 - protein, 372 aa, Arabidopsis thaliana
  peptide (1)..(372): Ceres Seq. ID no. 13489085
MQDPVTLCTGQTYERLNIHKWFNLGHLTCPTTMQELWDDTVTPNKTLHHLIYTWFSQKYVLMKKRSEDVQGRAIEILGTLKKAKCQARVHALSELKQIVIAHLMARKTVVEEGGVSVISSLLGPFTSHAVGSEVVAILVSLDLDSDSKSGLMQPAKVSLIVDMLNDGSNETKINCARLIRGLVEEKGFRAELVSSHSLLVGLMRLVKDKRHRNGVSPALRLLKPISVHKQVRSLMVSIGAVPQLVDILPSLDPECLELALFVLDALCTDVEGRVAVKDSANTIPYTVRVLMRVSENCTNYALSILWSVCKLAPEECSPLAVEVGLAAKLLLVIQSGCDAALKQRSAELLKLCSLHYSDTMFISKCKLTRTIQ

SEQ ID NO: 40639 - protein, 340 aa, Arabidopsis thaliana
  peptide (1)..(340): Ceres Seq. ID no. 13489086
MQELWDDTVTPNKTLHHLIYTWFSQKYVLMKKRSEDVQGRAIEILGTLKKAKCQARVHALSELKQIVIAHLMARKTVVEEGGVSVISSLLGPFTSHAVGSEVVAILVSLDLDSDSKSGLMQPAKVSLIVDMLNDGSNETKINCARLIRGLVEEKGFRAELVSSHSLLVGLMRLVKDKRHRNGVSPALRLLKPISVHKQVRSLMVSIGAVPQLVDILPSLDPECLELALFVLDALCTDVEGRVAVKDSANTIPYTVRVLMRVSENCTNYALSILWSVCKLAPEECSPLAVEVGLAAKLLLVIQSGCDAALKQRSAELLKLCSLHYSDTMFISKCKLTRTIQ

SEQ ID NO: 40640 - DNA, 1594 bp, Arabidopsis thaliana
  misc_feature (1)..(1594): Ceres Seq. ID no. 12439707
  misc_feature (1)..(1594): Ortholog of  Ceres SEQ ID NO 15172560 as cited in SEQ ID NO 57325
  misc_feature (1)..(1594): Ortholog of  Ceres SEQ ID NO 13655716 as cited in SEQ ID NO 68965
ataacgagaaccctttaccataaaaatctcaactttatcccttattcttatctgcaaaattcgttctcgtcccttggattatggttttttttgttcctcgagaaagttgattgctttcttggaatccatgcgtgccctttctctttgttgttttaaaggatgcgtctgcgttagattgttttagtaactttgtgaattgattaagcacttcttcaccataatcaagtttatagcttttgcttctgatcagatcctgttatggaatctccacattctgaggcatcaatcgtgaatggtagtatccatttgaatggcagtggtgaaaccaaaacaaagaatatagtcatgtcgtctgattcagacagtttcatcggtgtgcttgaggtttttgttcaccaagctagggacatccacaacatctgtatctatcataagcaagatgtgtatgctaagctttgtctcacaaatgatcccgaaaactccttgtccacaaagatcatcaatggtggagggcaaaaccctgtcttcgacgatacccttcagttcgacgttaagaacctggattgttcgcttaagtgtgagatatttatgatgagccgcgtgaagaattatcttgaggatcagttacttggattctctcttgtacctttgtctgaagtgattgtgaggaatgggaaattggagaaagagttctccctttcttcaaccgatttgtatcactctcctgcaggttttgtcgagttgtctctctcgtacgcaggagattcgcctgacgtgatgcatattcctgcggttccaactgcggatgagaccgagttggctcctatcgagtttgatgagagtgagtttttggatccaaagattgtctgtgaaaacaatcaaatggtgtctaagtacttctccactacgtgttctgattctgatgattttgcaagctctgaaactggctttgtggaagtaaacagcatcctgtctgcagttgttgaaactgctgttgacgaagcagcaccggccaatactgtctcaacaaatggaatctcatctccatcaactgcagttagctctggctcctcgggaactcatgatgtttcaaagcaatctagtgaaggaaacaactcagattcagaacaagaagcgaagaagccaacagatatcatcaagagtggtgatttagataagactgatgaagaagcagttgtgaaaccggttctgacagtgcacattgaaccagagcaaaaggtagtgcaacaagatattgttgacatgtacacaaaaagcttgcagcaattcactgagtcactggctaagatgaaacttcctttggacatcgatagcccaacccaatcagagaactcaagctcgtcccagcagacgccaaagagtgctagctcccgtgttttctacgggagtagagccttcttctgaagctcagaaatcatctcaagtttggcatcagaagtagcgagcatgtagtgaaagtgtaataagttaaaagtcgacactatctaaaatgtgtaactatcttcctttgaagcctttagcttttcttgttatctgcaacttttccaatttagtactaaagtttcataatccc

SEQ ID NO: 40641 - protein, 388 aa, Arabidopsis thaliana
  peptide (1)..(388): Ceres Seq. ID no. 12439708
MESPHSEASIVNGSIHLNGSGETKTKNIVMSSDSDSFIGVLEVFVHQARDIHNICIYHKQDVYAKLCLTNDPENSLSTKIINGGGQNPVFDDTLQFDVKNLDCSLKCEIFMMSRVKNYLEDQLLGFSLVPLSEVIVRNGKLEKEFSLSSTDLYHSPAGFVELSLSYAGDSPDVMHIPAVPTADETELAPIEFDESEFLDPKIVCENNQMVSKYFSTTCSDSDDFASSETGFVEVNSILSAVVETAVDEAAPANTVSTNGISSPSTAVSSGSSGTHDVSKQSSEGNNSDSEQEAKKPTDIIKSGDLDKTDEEAVVKPVLTVHIEPEQKVVQQDIVDMYTKSLQQFTESLAKMKLPLDIDSPTQSENSSSSQQTPKSASSRVFYGSRAFF

SEQ ID NO: 40642 - protein, 359 aa, Arabidopsis thaliana
  peptide (1)..(359): Ceres Seq. ID no. 12439709
MSSDSDSFIGVLEVFVHQARDIHNICIYHKQDVYAKLCLTNDPENSLSTKIINGGGQNPVFDDTLQFDVKNLDCSLKCEIFMMSRVKNYLEDQLLGFSLVPLSEVIVRNGKLEKEFSLSSTDLYHSPAGFVELSLSYAGDSPDVMHIPAVPTADETELAPIEFDESEFLDPKIVCENNQMVSKYFSTTCSDSDDFASSETGFVEVNSILSAVVETAVDEAAPANTVSTNGISSPSTAVSSGSSGTHDVSKQSSEGNNSDSEQEAKKPTDIIKSGDLDKTDEEAVVKPVLTVHIEPEQKVVQQDIVDMYTKSLQQFTESLAKMKLPLDIDSPTQSENSSSSQQTPKSASSRVFYGSRAFF

SEQ ID NO: 40643 - protein, 278 aa, Arabidopsis thaliana
  peptide (1)..(278): Ceres Seq. ID no. 12439710
MMSRVKNYLEDQLLGFSLVPLSEVIVRNGKLEKEFSLSSTDLYHSPAGFVELSLSYAGDSPDVMHIPAVPTADETELAPIEFDESEFLDPKIVCENNQMVSKYFSTTCSDSDDFASSETGFVEVNSILSAVVETAVDEAAPANTVSTNGISSPSTAVSSGSSGTHDVSKQSSEGNNSDSEQEAKKPTDIIKSGDLDKTDEEAVVKPVLTVHIEPEQKVVQQDIVDMYTKSLQQFTESLAKMKLPLDIDSPTQSENSSSSQQTPKSASSRVFYGSRAFF

SEQ ID NO: 40644 - DNA, 1529 bp, Arabidopsis thaliana
  misc_feature (1)..(1529): Ceres Seq. ID no. 13500021
  misc_feature (1)..(1529): Ortholog of  Ceres SEQ ID NO 14307123 as cited in SEQ ID NO 54182
atcaaaaacccaaatctctctgttcgcagagaggatcaattcgtgattcagagaatcaaacttactgtgagagagagataacgaagatggacgctatgaggaagcaactcgatgtgctcatgggagctaacagaaacggcgatgtcactgaggtcaatcgcaaatactacgaccgcgatgtttgccgtctttacctctctggtctctgccctcacgagcttttccaattgacgaaaatggatatgggtccttgcccaaaggtgcactctttgcagctgaggaaagaatataaagatgcaaaggcaaaaggtgttgacaactatgatagggaattggaagatgcgatagataggcttattgttgagtgtgataggaagattggtagggctcttaatcgtcttcaagaagaggatgccaaagctgccattgcaatttctgtcacagaatttactcagtcacctgaaattcttgaattatcgaagcaaatcaaagaaaagatgaaggaagcagacctgcacgatcttgaaggcaaaacagatctgaagattagagctcttgagttagttgaagagatgaggacgaagagagctgacctacaggctgtgctactgttggatgcctttaacaaagataggacatccttgcaacaggcagttccagctcagcaaccagctgcaactttacctccgcccgatcctcgtactcaagaaatgatcaatgaaaaactaaagaaagcagaagagcttggtgaacaagggatggttgatgaagcgcagaaagcactagaagaggcggaagctcttaagaagcttactgctagacaagaacctgtagtggattcaaccaagtacactgctgctgacgtgcgcattacagaccagaagctgcgtctatgtgacatatgcggagcatttttgagcgtctatgacagtgatcgtcggttagctgatcattttggagggaagcttcacttgggttacatgctgatccgcgacaaattggcagagcttcaggaggagaagaacaaagttcacaaggaacgggtcgaagaaaggagatcaaaggagaggagtagagagcgagaatcaagtaaagacagagacggaggagataaccgtgaccgaggaagagatgttgaccgcaggagtagagatcgtgacaggcaccatgaccaccgagaacatgacagaaactataatcagtcacgtggctatgactcaagaagccggcgcagttcacggtcccggtctagggaaagaccgagggatcatgatcgccgcagacgccatgaccgctactaaaaccctgccaaagatggttgcacctggtttaagaggttcttacagatgcgtttaggatctatttggagttacaaacactttcttttttctttgctcaagtgttttaaggatttttgagattgtaacttactttaagtttgtaagaggagcttcttcagatatctttaatttgttttttatgttgttgacatcaaagacttgcgagtagaaagaagattttgttgatcc

SEQ ID NO: 40645 - protein, 432 aa, Arabidopsis thaliana
  peptide (1)..(432): Ceres Seq. ID no. 13500022
QKPKSLCSQRGSIRDSENQTYCEREITKMDAMRKQLDVLMGANRNGDVTEVNRKYYDRDVCRLYLSGLCPHELFQLTKMDMGPCPKVHSLQLRKEYKDAKAKGVDNYDRELEDAIDRLIVECDRKIGRALNRLQEEDAKAAIAISVTEFTQSPEILELSKQIKEKMKEADLHDLEGKTDLKIRALELVEEMRTKRADLQAVLLLDAFNKDRTSLQQAVPAQQPAATLPPPDPRTQEMINEKLKKAEELGEQGMVDEAQKALEEAEALKKLTARQEPVVDSTKYTAADVRITDQKLRLCDICGAFLSVYDSDRRLADHFGGKLHLGYMLIRDKLAELQEEKNKVHKERVEERRSKERSRERESSKDRDGGDNRDRGRDVDRRSRDRDRHHDHREHDRNYNQSRGYDSRSRRSSRSRSRERPRDHDRRRRHDRY

SEQ ID NO: 40646 - protein, 404 aa, Arabidopsis thaliana
  peptide (1)..(404): Ceres Seq. ID no. 13500023
MDAMRKQLDVLMGANRNGDVTEVNRKYYDRDVCRLYLSGLCPHELFQLTKMDMGPCPKVHSLQLRKEYKDAKAKGVDNYDRELEDAIDRLIVECDRKIGRALNRLQEEDAKAAIAISVTEFTQSPEILELSKQIKEKMKEADLHDLEGKTDLKIRALELVEEMRTKRADLQAVLLLDAFNKDRTSLQQAVPAQQPAATLPPPDPRTQEMINEKLKKAEELGEQGMVDEAQKALEEAEALKKLTARQEPVVDSTKYTAADVRITDQKLRLCDICGAFLSVYDSDRRLADHFGGKLHLGYMLIRDKLAELQEEKNKVHKERVEERRSKERSRERESSKDRDGGDNRDRGRDVDRRSRDRDRHHDHREHDRNYNQSRGYDSRSRRSSRSRSRERPRDHDRRRRHDRY

SEQ ID NO: 40647 - protein, 401 aa, Arabidopsis thaliana
  peptide (1)..(401): Ceres Seq. ID no. 13500024
MRKQLDVLMGANRNGDVTEVNRKYYDRDVCRLYLSGLCPHELFQLTKMDMGPCPKVHSLQLRKEYKDAKAKGVDNYDRELEDAIDRLIVECDRKIGRALNRLQEEDAKAAIAISVTEFTQSPEILELSKQIKEKMKEADLHDLEGKTDLKIRALELVEEMRTKRADLQAVLLLDAFNKDRTSLQQAVPAQQPAATLPPPDPRTQEMINEKLKKAEELGEQGMVDEAQKALEEAEALKKLTARQEPVVDSTKYTAADVRITDQKLRLCDICGAFLSVYDSDRRLADHFGGKLHLGYMLIRDKLAELQEEKNKVHKERVEERRSKERSRERESSKDRDGGDNRDRGRDVDRRSRDRDRHHDHREHDRNYNQSRGYDSRSRRSSRSRSRERPRDHDRRRRHDRY

SEQ ID NO: 40648 - DNA, 1531 bp, Arabidopsis thaliana
  misc_feature (1)..(1531): Ceres Seq. ID no. 13504905
  misc_feature (1)..(1531): Ortholog of  Ceres SEQ ID NO 15177854 as cited in SEQ ID NO 51851
  misc_feature (1)..(1531): Ortholog of  Ceres SEQ ID NO 15177087 as cited in SEQ ID NO 51932
  misc_feature (1)..(1531): Ortholog of  Ceres SEQ ID NO 13662937 as cited in SEQ ID NO 64415
  misc_feature (1)..(1531): Ortholog of  Ceres SEQ ID NO 13595984 as cited in SEQ ID NO 68340
  misc_feature (1)..(1531): Ortholog of  Ceres SEQ ID NO 12635014 as cited in SEQ ID NO 0
aattgtcaaaaactcacaaggcattatcatgtggacatgcaaccttttttttctatacgcattacagaaatgaaaacaatgattaggatcgcatgcacgtcaagaaaacaacctatagctgtactttgatatactaactcaaatcatgtcttggctcaagcacacaagcttctagctagatacaactgcaaacatatatgatggctttgtctaataagaagacgacgacttgggcaccgctttgaccagtcaatacaccaaatctgtatgtatcatttatataaatattatctttccacagttgttgaagaatcacatagacagcacacacggattccatggagactaaacagagtatccctctcctcatgccctataagatgggacccttcaatctttctcacagggttgttttggcgccattgactagatcgagatcgtatggtaacattcctcagcctaatgccaaattatattacactcagagaacaacacctggtggtcttcttatttccgaatcctgtgtagtctccgagacatcattgggctatccggatttacctggattatggaacagagaccaagtggaggcatggaagcccatcgtggatgcggttcattcgaaaggcggtatcttcttctgccagatttggcatggtggcagagtttttcatcaagaccagccaaatggggaagcacccgtctcctctacagacaagccattgatgtgcaagaacatgtatggaggtcagtttaagcctccacggcggttaaggagcgacgagcttcccgccattgtcaacgactttagaatcgctgcacgaaacgcgatcgaagctggcttcgatggagtggaggttcacggcgcacatggttacctgatcgatcagttcctgaaagacaaagtgaatgacagaagtgaccaatatggtgggtcattagagaaccgctgtagatttgctcttgaagtaatcgaagcagtggtgaacgagatcggttcagatcgtgttggaatcagactctcgccatttgcagattacatggagtcaggagactcgaatccagaagcattagggctctacctggtgcaagctatgaacaagcatggcatggagtcgtctacggtcacatggttgaacctagaatgaaaacccttgaaggaatcttcgaatgcacggaatcgcttacgcccatgcgaaaagccttcaaaggtacgttcatagtagcaggaggatattctagagaagacgggaacaaggcggtggaagagggaagaaccgatcttgtggcttatggacggccgttcttggcgaatccggatctgacgaggagattcgaactcaatgagccgttgaataggtacgatagatcaacgttctacacttcagatcctgtagtgggctatacagactaccctttcctcgagaccacagatacaacaactgcttaaggggtttattcagatgcattattagcaaaacatatttttcaatcacataaggctaaaagcttgcctcaaacaagcttcggc

SEQ ID NO: 40649 - protein, 269 aa, Arabidopsis thaliana
  peptide (1)..(269): Ceres Seq. ID no. 13504906
METKQSIPLLMPYKMGPFNLSHRVVLAPLTRSRSYGNIPQPNAKLYYTQRTTPGGLLISESCVVSETSLGYPDLPGLWNRDQVEAWKPIVDAVHSKGGIFFCQIWHGGRVFHQDQPNGEAPVSSTDKPLMCKNMYGGQFKPPRRLRSDELPAIVNDFRIAARNAIEAGFDGVEVHGAHGYLIDQFLKDKVNDRSDQYGGSLENRCRFALEVIEAVVNEIGSDRVGIRLSPFADYMESGDSNPEALGLYLVQAMNKHGMESSTVTWLNLE

SEQ ID NO: 40650 - protein, 259 aa, Arabidopsis thaliana
  peptide (1)..(259): Ceres Seq. ID no. 13504907
MPYKMGPFNLSHRVVLAPLTRSRSYGNIPQPNAKLYYTQRTTPGGLLISESCVVSETSLGYPDLPGLWNRDQVEAWKPIVDAVHSKGGIFFCQIWHGGRVFHQDQPNGEAPVSSTDKPLMCKNMYGGQFKPPRRLRSDELPAIVNDFRIAARNAIEAGFDGVEVHGAHGYLIDQFLKDKVNDRSDQYGGSLENRCRFALEVIEAVVNEIGSDRVGIRLSPFADYMESGDSNPEALGLYLVQAMNKHGMESSTVTWLNLE

SEQ ID NO: 40651 - protein, 255 aa, Arabidopsis thaliana
  peptide (1)..(255): Ceres Seq. ID no. 13504908
MGPFNLSHRVVLAPLTRSRSYGNIPQPNAKLYYTQRTTPGGLLISESCVVSETSLGYPDLPGLWNRDQVEAWKPIVDAVHSKGGIFFCQIWHGGRVFHQDQPNGEAPVSSTDKPLMCKNMYGGQFKPPRRLRSDELPAIVNDFRIAARNAIEAGFDGVEVHGAHGYLIDQFLKDKVNDRSDQYGGSLENRCRFALEVIEAVVNEIGSDRVGIRLSPFADYMESGDSNPEALGLYLVQAMNKHGMESSTVTWLNLE

SEQ ID NO: 40652 - DNA, 1374 bp, Arabidopsis thaliana
  misc_feature (1)..(1374): Ceres Seq. ID no. 12397166
  misc_feature (1)..(1374): Ortholog of  Ceres SEQ ID NO 14312216 as cited in SEQ ID NO 53930
  misc_feature (1)..(1374): Ortholog of  Ceres SEQ ID NO 13656404 as cited in SEQ ID NO 65806
  misc_feature (1)..(1374): Ortholog of  Ceres SEQ ID NO 12779935 as cited in SEQ ID NO 66774
  misc_feature (1)..(1374): Ortholog of  Ceres SEQ ID NO 13598695 as cited in SEQ ID NO 67368
  misc_feature (1)..(1374): Ortholog of  Ceres SEQ ID NO 13591174 as cited in SEQ ID NO 68289
atccatgatcaagaagtgtaaaatgaagaagcttctatggagttggatcattctcttcaacatccatgtaaatggaatgatgatggagtttgatgaaatggagtggttcacagttttcaatggaacaaaagtgtttcagactcaaaatgatgttttttctgaagctaagtttcctatggttggactcactctgattcaatctgctgctgctaaaggagctgtgtgtttggatggaagtcttcccggataccatttgcatcgcgggtttggttccggagcgaacaattggctcgttcaattagagggaggtggatggtgtgataccattagaaattgtgtttaccgtaaaaccactcgtcgtggatcttcttcatatatggagaaagagataccatttaccggcattctaagtgataaagccgcggataatccagacttttataactggaatagagtaaaagttcggtattgtgacggtggatcgtttagcggggatagcgaaaataaggctgcacaacttcagtttagaggaaagagaatttggttagctgctatggaagatttgatggcaaaaggtatgcgtcaagctaagcaggctctgctctctggatgttctgcaggaggtcttgcggtgattttacgatgtgatgattttgggaaattgtttcctccttccaccagagtgaaatgtttgagtgatgctggtttcttccttgatgccatcgatgtgtctggaggtcgatctcttagacgattatacgccggtgtggtcagattacagaatctgcaaaccaaccttcctcagtattgtgtaaaccgtcttaatcccacttcgtgttttttcccacaaaacctaatcaaccaagtcaagactccactttttattcttaatgctgcatatgattcttggcagattcaagagagtttagctccaaaatctgcagatccaagtggaagttggaatgattgtagacttaactacgccaagtgtagtgcatctcagatccaattcttgcaaggttttaggacgcgtatggtgaatttggtaaaaggtttcgcgatgccaagtaagaacggtgtgttcctcaattcgtgctttgctcattgccaaacagagaggcatgacacttggttcgcccaaaactctccagctattaagaacaagggtattgcagtagctgtgggagattggtatttcgaaagaggaggagcaaagctcatagactgtgcttatccttgtgacaagacttgtcacaatttggtctttagaagataaaactagtttttctttggtatcacaatgtatttttttaagaagcatccatttatttattcaggcaacacaatgaaatgaaataaaacccatttgataac

SEQ ID NO: 40653 - protein, 424 aa, Arabidopsis thaliana
  peptide (1)..(424): Ceres Seq. ID no. 12397167
SMIKKCKMKKLLWSWIILFNIHVNGMMMEFDEMEWFTVFNGTKVFQTQNDVFSEAKFPMVGLTLIQSAAAKGAVCLDGSLPGYHLHRGFGSGANNWLVQLEGGGWCDTIRNCVYRKTTRRGSSSYMEKEIPFTGILSDKAADNPDFYNWNRVKVRYCDGGSFSGDSENKAAQLQFRGKRIWLAAMEDLMAKGMRQAKQALLSGCSAGGLAVILRCDDFGKLFPPSTRVKCLSDAGFFLDAIDVSGGRSLRRLYAGVVRLQNLQTNLPQYCVNRLNPTSCFFPQNLINQVKTPLFILNAAYDSWQIQESLAPKSADPSGSWNDCRLNYAKCSASQIQFLQGFRTRMVNLVKGFAMPSKNGVFLNSCFAHCQTERHDTWFAQNSPAIKNKGIAVAVGDWYFERGGAKLIDCAYPCDKTCHNLVFRR

SEQ ID NO: 40654 - protein, 423 aa, Arabidopsis thaliana
  peptide (1)..(423): Ceres Seq. ID no. 12397168
MIKKCKMKKLLWSWIILFNIHVNGMMMEFDEMEWFTVFNGTKVFQTQNDVFSEAKFPMVGLTLIQSAAAKGAVCLDGSLPGYHLHRGFGSGANNWLVQLEGGGWCDTIRNCVYRKTTRRGSSSYMEKEIPFTGILSDKAADNPDFYNWNRVKVRYCDGGSFSGDSENKAAQLQFRGKRIWLAAMEDLMAKGMRQAKQALLSGCSAGGLAVILRCDDFGKLFPPSTRVKCLSDAGFFLDAIDVSGGRSLRRLYAGVVRLQNLQTNLPQYCVNRLNPTSCFFPQNLINQVKTPLFILNAAYDSWQIQESLAPKSADPSGSWNDCRLNYAKCSASQIQFLQGFRTRMVNLVKGFAMPSKNGVFLNSCFAHCQTERHDTWFAQNSPAIKNKGIAVAVGDWYFERGGAKLIDCAYPCDKTCHNLVFRR

SEQ ID NO: 40655 - protein, 417 aa, Arabidopsis thaliana
  peptide (1)..(417): Ceres Seq. ID no. 12397169
MKKLLWSWIILFNIHVNGMMMEFDEMEWFTVFNGTKVFQTQNDVFSEAKFPMVGLTLIQSAAAKGAVCLDGSLPGYHLHRGFGSGANNWLVQLEGGGWCDTIRNCVYRKTTRRGSSSYMEKEIPFTGILSDKAADNPDFYNWNRVKVRYCDGGSFSGDSENKAAQLQFRGKRIWLAAMEDLMAKGMRQAKQALLSGCSAGGLAVILRCDDFGKLFPPSTRVKCLSDAGFFLDAIDVSGGRSLRRLYAGVVRLQNLQTNLPQYCVNRLNPTSCFFPQNLINQVKTPLFILNAAYDSWQIQESLAPKSADPSGSWNDCRLNYAKCSASQIQFLQGFRTRMVNLVKGFAMPSKNGVFLNSCFAHCQTERHDTWFAQNSPAIKNKGIAVAVGDWYFERGGAKLIDCAYPCDKTCHNLVFRR

SEQ ID NO: 40656 - DNA, 1483 bp, Arabidopsis thaliana
  misc_feature (1)..(1483): Ceres Seq. ID no. 12370973
  misc_feature (1)..(1483): Ortholog of  Ceres SEQ ID NO 15177221 as cited in SEQ ID NO 53046
  misc_feature (1)..(1483): Ortholog of  Ceres SEQ ID NO 14315134 as cited in SEQ ID NO 59476
  misc_feature (1)..(1483): Ortholog of  Ceres SEQ ID NO 12616332 as cited in SEQ ID NO 63449
  misc_feature (1)..(1483): Ortholog of  Ceres SEQ ID NO 13597498 as cited in SEQ ID NO 64648
  misc_feature (1)..(1483): Ortholog of  Ceres SEQ ID NO 14308053 as cited in SEQ ID NO 67790
aaaaattatacgtcttaaaaaatttcttctctcttctctgatcgtctctctttgtgtgctcacaatgaagcacaacaacaaagtctccaagagacttactatgacaggttcctcttctttgcatttcttgctttttcctcggagcaatcttcacctccaaattacgatcagcttcgtcagattccggtagccagctcattttacagcaccggcgtgatcaggagcttaagattgttacgcaagattatgctcatgagaaaaaaaaatcacaagacaatgatgtaatggaagaggttttaaaaactcataaagcaatcgaatcattggataagtcagtttctatgcttcaaaagcagctctctgctacacatagccctcaacagattgtgaatgtctcagcaaccaattcttcaacagaaggaaaccaaaagaacaaagtttttatggtgattggtatcaatactgcatttagcagtcgaaaacgtcgcgattcgcttagagagacttggatgcctcaaggggaaaagcttgagaaattggaaaaagagaagggaattgtcgtcaaatttatgattggacacagttcaacgccaaacagtatgttggataaggagattgattcagaagatgctcaatacaacgatttctttaggctggatcatgtcgaaggatattacaatctatctgcaaaaaccaaaagcttcttctctagtgcagttgcaaagtgggatgctgagttttatgtcaagattgatgatgatgttcacgtcaatcttggcacgcttgcttccacattagctagtcaccgttctaagccaagggtctacattggatgtatgaaatccggtcctgtccttactaaaaagacggccaagtaccgtgaacccgagttttggaaatttggagaagaaggtaacaaatattttcgacatgctacgggacagatttatgccatatcaaaggatcttgccacatacatatctaacaaccagccaattttgcataagtatgcaaatgaagatgtgacactcgggtcatggtttatcggtcttgaggttgagcaaatcgatgatcgtaatttctgttgtggtactcctccagactgtgaaatgagggcagaggctggcgaaatgtgtgtggctacatttgactggaagtgtagtggagtatgcagatcagtcgatagaatgtggatggttcatgtgatgtgtggtgaaggtagtaaagctgtgtgggacgcaaatttaaaactctcttagatcggagaaagacacaagagaagatgaacattttgttttgtaaagaaccaaaaggtatacaaatgtgagaaaagacgctgaggaagaccttttagttcaatattctcgttttatttgtggaaaaataaaaattaaaaagaaagaatgagactttctatagatacagacgtgacatacttgcttcttataaacattttgctcgatatgaacaattctatttcttc

SEQ ID NO: 40657 - protein, 324 aa, Arabidopsis thaliana
  peptide (1)..(324): Ceres Seq. ID no. 12370974
MEEVLKTHKAIESLDKSVSMLQKQLSATHSPQQIVNVSATNSSTEGNQKNKVFMVIGINTAFSSRKRRDSLRETWMPQGEKLEKLEKEKGIVVKFMIGHSSTPNSMLDKEIDSEDAQYNDFFRLDHVEGYYNLSAKTKSFFSSAVAKWDAEFYVKIDDDVHVNLGTLASTLASHRSKPRVYIGCMKSGPVLTKKTAKYREPEFWKFGEEGNKYFRHATGQIYAISKDLATYISNNQPILHKYANEDVTLGSWFIGLEVEQIDDRNFCCGTPPDCEMRAEAGEMCVATFDWKCSGVCRSVDRMWMVHVMCGEGSKAVWDANLKLS

SEQ ID NO: 40658 - protein, 305 aa, Arabidopsis thaliana
  peptide (1)..(305): Ceres Seq. ID no. 12370975
MLQKQLSATHSPQQIVNVSATNSSTEGNQKNKVFMVIGINTAFSSRKRRDSLRETWMPQGEKLEKLEKEKGIVVKFMIGHSSTPNSMLDKEIDSEDAQYNDFFRLDHVEGYYNLSAKTKSFFSSAVAKWDAEFYVKIDDDVHVNLGTLASTLASHRSKPRVYIGCMKSGPVLTKKTAKYREPEFWKFGEEGNKYFRHATGQIYAISKDLATYISNNQPILHKYANEDVTLGSWFIGLEVEQIDDRNFCCGTPPDCEMRAEAGEMCVATFDWKCSGVCRSVDRMWMVHVMCGEGSKAVWDANLKLS

SEQ ID NO: 40659 - protein, 271 aa, Arabidopsis thaliana
  peptide (1)..(271): Ceres Seq. ID no. 12370976
MVIGINTAFSSRKRRDSLRETWMPQGEKLEKLEKEKGIVVKFMIGHSSTPNSMLDKEIDSEDAQYNDFFRLDHVEGYYNLSAKTKSFFSSAVAKWDAEFYVKIDDDVHVNLGTLASTLASHRSKPRVYIGCMKSGPVLTKKTAKYREPEFWKFGEEGNKYFRHATGQIYAISKDLATYISNNQPILHKYANEDVTLGSWFIGLEVEQIDDRNFCCGTPPDCEMRAEAGEMCVATFDWKCSGVCRSVDRMWMVHVMCGEGSKAVWDANLKLS

SEQ ID NO: 40660 - DNA, 1292 bp, Arabidopsis thaliana
  misc_feature (1)..(1292): Ceres Seq. ID no. 12328659
  misc_feature (1)..(1292): Ortholog of  Ceres SEQ ID NO 14313159 as cited in SEQ ID NO 54676
  misc_feature (1)..(1292): Ortholog of  Ceres SEQ ID NO 13598547 as cited in SEQ ID NO 65200
  misc_feature (1)..(1292): Ortholog of  Ceres SEQ ID NO 12617920 as cited in SEQ ID NO 65480
agaagaaaaaagaggcgaagaagagagaggaatggcgccagttcttcagagctcacagccatgggttgagaaataccggccgaagcaggttaaggacgtggctcaccaggaagaggtggttcgtgtcctcaccaacactctccagactgctgactgcccgcacatgctcttctatggaccaccaggcactggaaaaaccactactgctcttgccatcgctcaccagctctttggacctgaactatacaagtctagggtgttggagcttaatgcaagtgatgacagaggtattaatgttgttcggactaagatcaaggattttgctgctgttgctgttgggtctaatcatcgtcaaagtggttatccttgcccatcgtttaagatcatcatcctagatgaggctgattcgatgacagaagatgctcagaatgccttgaggcgcacaatggaaacttactccaaagtcaccagattctttttcatatgtaattacatcagcaggatcatagagccccttgcttccaggtgtgcgaagttcaggtttaaaccactttccgaagaagtcatgagtaaccgtatattgcatatttgtaatgaagaaggtctcagccttgatggagaggctctttcaactttgagctccatatcacaaggtgatctccgtagggccatcacatatctgcagagtgctactcggttgtttggatcaacaataacttctacagatttactcaatgtgtctggggtagttcctctagaggtagtcaataaactttttactgcatgcaaaagtggtgatttcgatattgcaaacaaggaagtggataacatagttgcagaaggatatcctgcatctcaaatcatcaatcagctattcgatatagttgcggaggctgacagtgacataacagacatgcaaaaggctaagatctgcaaatgtttagctgaaactgataagcgacttgtagacggggcggatgagtacttgcagcttctggatgtggcaagcagtacaatttgtgccctctcagaaatggctcaagacttctaatgcaaattctgcttgaattggacctgtgccttaagacttatgagactatcatagtgtaggttttgataaaaagttggagcgttatgacgttttactggttacttatctgttattgttttaagaaaaactattagatatatttattgcatcattacttaagtctatttgttttgtgggtaagatcattaaatatcattacaatgtgaaatacatgatcgaatcaaaataattaacatctctt

SEQ ID NO: 40661 - protein, 349 aa, Arabidopsis thaliana
  peptide (1)..(349): Ceres Seq. ID no. 12328660
EEKRGEEERGMAPVLQSSQPWVEKYRPKQVKDVAHQEEVVRVLTNTLQTADCPHMLFYGPPGTGKTTTALAIAHQLFGPELYKSRVLELNASDDRGINVVRTKIKDFAAVAVGSNHRQSGYPCPSFKIIILDEADSMTEDAQNALRRTMETYSKVTRFFFICNYISRIIEPLASRCAKFRFKPLSEEVMSNRILHICNEEGLSLDGEALSTLSSISQGDLRRAITYLQSATRLFGSTITSTDLLNVSGVVPLEVVNKLFTACKSGDFDIANKEVDNIVAEGYPASQIINQLFDIVAEADSDITDMQKAKICKCLAETDKRLVDGADEYLQLLDVASSTICALSEMAQDF

SEQ ID NO: 40662 - protein, 339 aa, Arabidopsis thaliana
  peptide (1)..(339): Ceres Seq. ID no. 12328661
MAPVLQSSQPWVEKYRPKQVKDVAHQEEVVRVLTNTLQTADCPHMLFYGPPGTGKTTTALAIAHQLFGPELYKSRVLELNASDDRGINVVRTKIKDFAAVAVGSNHRQSGYPCPSFKIIILDEADSMTEDAQNALRRTMETYSKVTRFFFICNYISRIIEPLASRCAKFRFKPLSEEVMSNRILHICNEEGLSLDGEALSTLSSISQGDLRRAITYLQSATRLFGSTITSTDLLNVSGVVPLEVVNKLFTACKSGDFDIANKEVDNIVAEGYPASQIINQLFDIVAEADSDITDMQKAKICKCLAETDKRLVDGADEYLQLLDVASSTICALSEMAQDF

SEQ ID NO: 40663 - protein, 295 aa, Arabidopsis thaliana
  peptide (1)..(295): Ceres Seq. ID no. 12328662
MLFYGPPGTGKTTTALAIAHQLFGPELYKSRVLELNASDDRGINVVRTKIKDFAAVAVGSNHRQSGYPCPSFKIIILDEADSMTEDAQNALRRTMETYSKVTRFFFICNYISRIIEPLASRCAKFRFKPLSEEVMSNRILHICNEEGLSLDGEALSTLSSISQGDLRRAITYLQSATRLFGSTITSTDLLNVSGVVPLEVVNKLFTACKSGDFDIANKEVDNIVAEGYPASQIINQLFDIVAEADSDITDMQKAKICKCLAETDKRLVDGADEYLQLLDVASSTICALSEMAQDF

SEQ ID NO: 40664 - DNA, 1517 bp, Arabidopsis thaliana
  misc_feature (1)..(1517): Ceres Seq. ID no. 13494118
  misc_feature (1)..(1517): Ortholog of  Ceres SEQ ID NO 14314480 as cited in SEQ ID NO 52362
  misc_feature (1)..(1517): Ortholog of  Ceres SEQ ID NO 13593854 as cited in SEQ ID NO 53403
  misc_feature (1)..(1517): Ortholog of  Ceres SEQ ID NO 12581680 as cited in SEQ ID NO 55019
aaaaaaatctcacattttttttcttcagtttcatctaaaaagattcaattcatatcgaaaataaaaaaggaacaaactttgctttttgttttcgcaatctccgattcgttaactcgttttctctcttcacctgtttcaagcttttcgatccaacaaatcacgagattcctctttccggtgtggtctccggcgacctaaaataaagagttaattctcgtggtcgtggagagcaaatgagggatgttctcctggttagcgagaatggctcttttttgtttacgacctatgcggcgatacggtcgtatgaacagagatgatgacgatgatgatgatcacgacggtgactcttcttcctccggtgactcccttctttggtctagagaactcgagagacattctttcggagatttctctattgctgttgtgcaagctaacgaggttattgaagatcatagtcaagtcgagactggaaacggtgccgttttcgtcggagtttacgatggtcatggtggtcctgaagcttctagatacatctctgatcatctcttttctcatttgatgagagtttcgagagaaaggagttgtatttcagaggaggctttaagagctgcattttctgctactgaggaagggtttctcacgcttgtgcgaaggacttgcgggttgaaaccgttgattgcagctgttggatcttgttgtttggttggagttatttggaaagggactttgcttatcgctaatgttggtgattctcgtgctgtgcttggttccatgggtagtaataataataggtcaaacaagattgtagctgagcaactgactagtgatcacaatgctgctttggaagaagttagacaagagcttaggtcgttgcatcctgatgattcacatatcgttgtccttaaacatggtgtgtggcgcatcaaaggcatcattcaggtatctagatcaataggggatgcatatttaaagcgcccagagttctcacttgacccttcatttccgcggttccatctcgctgaagaactacaaagacctgttttatcagcagagccttgtgtctacacaagagtcttacaaacaagtgacaagtttgtgatattcgcatcagatggactctgggaacaaatgaccaaccagcaagctgtagagatagtgaataaacacccccgtcctggaatagcgagaaggctggtgagaagagcgataaccatagctgcgaaaaagagagagatgaattacgatgatttgaagaaagtggagagaggagtgaggagattctttcatgatgatataacagtggttgtgatattcatagacaatgagcttcttatggtggagaaagctactgttcctgaattgtccattaaaggtttttctcataccgttggaccttccaagttcagtatcttcctctcttagacatttttgttacatttctttactttactatcacagtcttcacaaatatgataaaaatgaacacggatcgattttgtaccaacacgtttgagttt

SEQ ID NO: 40665 - protein, 393 aa, Arabidopsis thaliana
  peptide (1)..(393): Ceres Seq. ID no. 13494119
MFSWLARMALFCLRPMRRYGRMNRDDDDDDDHDGDSSSSGDSLLWSRELERHSFGDFSIAVVQANEVIEDHSQVETGNGAVFVGVYDGHGGPEASRYISDHLFSHLMRVSRERSCISEEALRAAFSATEEGFLTLVRRTCGLKPLIAAVGSCCLVGVIWKGTLLIANVGDSRAVLGSMGSNNNRSNKIVAEQLTSDHNAALEEVRQELRSLHPDDSHIVVLKHGVWRIKGIIQVSRSIGDAYLKRPEFSLDPSFPRFHLAEELQRPVLSAEPCVYTRVLQTSDKFVIFASDGLWEQMTNQQAVEIVNKHPRPGIARRLVRRAITIAAKKREMNYDDLKKVERGVRRFFHDDITVVVIFIDNELLMVEKATVPELSIKGFSHTVGPSKFSIFLS

SEQ ID NO: 40666 - protein, 386 aa, Arabidopsis thaliana
  peptide (1)..(386): Ceres Seq. ID no. 13494120
MALFCLRPMRRYGRMNRDDDDDDDHDGDSSSSGDSLLWSRELERHSFGDFSIAVVQANEVIEDHSQVETGNGAVFVGVYDGHGGPEASRYISDHLFSHLMRVSRERSCISEEALRAAFSATEEGFLTLVRRTCGLKPLIAAVGSCCLVGVIWKGTLLIANVGDSRAVLGSMGSNNNRSNKIVAEQLTSDHNAALEEVRQELRSLHPDDSHIVVLKHGVWRIKGIIQVSRSIGDAYLKRPEFSLDPSFPRFHLAEELQRPVLSAEPCVYTRVLQTSDKFVIFASDGLWEQMTNQQAVEIVNKHPRPGIARRLVRRAITIAAKKREMNYDDLKKVERGVRRFFHDDITVVVIFIDNELLMVEKATVPELSIKGFSHTVGPSKFSIFLS

SEQ ID NO: 40667 - protein, 378 aa, Arabidopsis thaliana
  peptide (1)..(378): Ceres Seq. ID no. 13494121
MRRYGRMNRDDDDDDDHDGDSSSSGDSLLWSRELERHSFGDFSIAVVQANEVIEDHSQVETGNGAVFVGVYDGHGGPEASRYISDHLFSHLMRVSRERSCISEEALRAAFSATEEGFLTLVRRTCGLKPLIAAVGSCCLVGVIWKGTLLIANVGDSRAVLGSMGSNNNRSNKIVAEQLTSDHNAALEEVRQELRSLHPDDSHIVVLKHGVWRIKGIIQVSRSIGDAYLKRPEFSLDPSFPRFHLAEELQRPVLSAEPCVYTRVLQTSDKFVIFASDGLWEQMTNQQAVEIVNKHPRPGIARRLVRRAITIAAKKREMNYDDLKKVERGVRRFFHDDITVVVIFIDNELLMVEKATVPELSIKGFSHTVGPSKFSIFLS

SEQ ID NO: 40668 - DNA, 2325 bp, Arabidopsis thaliana
  misc_feature (1)..(2325): Ceres Seq. ID no. 12600038
  misc_feature (1)..(2325): Ortholog of  Ceres SEQ ID NO 14302243 as cited in SEQ ID NO 64663
ccgttcgcgtcttcctcttaaaggaaacctcctctacgcgaaattcgtattctctcatttcttctacggagatttgcatcgaagaaactgactcgcttgtggaatcaacaacaagacgatgtggcgctgcgtctctcgtggctttcgagctcctgcttcaaagacctcttcactctttgatggcgtctctggatctcgcttttccagattcttctccactggttctaccgatacgagatcctcttatacgatagtggatcacacttatgatgcggttgtggtgggagctggtggtgctggtcttagggcggcgattgggttatcggagcatggctttaacaccgcttgcattactaagcttttccccacaaggtcacatactgttgctgctcagggtggtattaatgctgcactgggaaatatgtccgaagatgactggagatggcacatgtatgacactgtcaaaggaagtgactggctaggtgatcaagatgctatccagtacatgtgtagagaggcaccaaaagcagtcattgaacttgagaattatgggctgcctttctctcgtactgaagaagggaaaatttaccagcgtgcatttggtggtcagagtcttgactttggaaaaggtggtcaggcctatcgttgtgcttgtgctgcggataggactggtcatgctctgttgcatactctctatggacaagctatgaagcataacacacagttctttgttgaatacttcgccttggatctgctcatggctagtgatggcagttgccagggtgtaattgcactaaacatggaagatggaacattgcatcgtttccgttcttctcaaacaattttggcaactggggggtacggcagagcatacttctctgcaacctcagcacatacatgcacaggggatggaaatgcaatggttgcacgggccggtcttccactgcaggacttggagtttgttcaattccatccaactggtatatatggggccggatgtctcatcaccgaaggatctcgaggtgaaggtggtatccttagaaacagtgaaggtgaacgttttatggaacgatatgctcctacagccaaggatcttgcatcaagagatgttgtctccagatccatgactatggaaatcagggaaggtcgtggtgtaggaccgcataaggatcatatctatctccatctgaatcatcttcctccagaagttctaaaagaaaggcttcctggaatctctgagaccgctgccatctttgctggtgttgatgttaccaaagagccaattcctgtcttacccacggttcattataacatgggtggtatcccaacaaactaccatggcgaggtagttaccatcaaaggcgatgatccagatgcagtgattcctgggctaatggctgctggggaggcagcttgtgcatctgttcatggtgccaacaggcttggtgcaaattcactgctcgacattgtcgtatttggtcgtgcttgtgcaaatagggttgcagagataagcaaaccaggggagaaacagaaacctcttgagaaggatgcgggtgagaagactattgcatggctggacaggttgagaaactcaaacgggtctctacctacttcaactatcagattgaacatgcagaggattatgcagaacaacgcagctgtgttccgcacgcaagaaacattggaagaaggttgtcagttgattgacaaggcctgggaaagttttggggacgtccaggtgaaagatcggagtatgatatggaactcggatttgatagagacattggaactggagaaccttttgataaacgcatccataacaatgcattcagcagaagcacgaaaggaaagcagaggagcacatgctcgggaagacttcacgaaaagagaggatggagaatggatgaagcatacattgggatattgggaagatgagaaagtgagattggattataggcctgttcacatggacactctcgacgatgagatcgacactttccctcccaaagctcgtgtctattgatcgagcccatgtttttattttatctgttatcggaataataataataatcaggaaccccccaaaaaaagggaattaggagaagaagacggagttatgagctgatggagcacaaaggactgttctgaaactgggtttacgttttacaccagaaacgatgaaaataaattgatagaaagaggaaaaaacactacaattcttattttctttatcagttcctgaaattgttacattctttgttacctgttaattacgccttggtgatattcattttttttttttaaatcaaaatgttcgaattccgt

SEQ ID NO: 40669 - protein, 634 aa, Arabidopsis thaliana
  peptide (1)..(634): Ceres Seq. ID no. 12600039
MWRCVSRGFRAPASKTSSLFDGVSGSRFSRFFSTGSTDTRSSYTIVDHTYDAVVVGAGGAGLRAAIGLSEHGFNTACITKLFPTRSHTVAAQGGINAALGNMSEDDWRWHMYDTVKGSDWLGDQDAIQYMCREAPKAVIELENYGLPFSRTEEGKIYQRAFGGQSLDFGKGGQAYRCACAADRTGHALLHTLYGQAMKHNTQFFVEYFALDLLMASDGSCQGVIALNMEDGTLHRFRSSQTILATGGYGRAYFSATSAHTCTGDGNAMVARAGLPLQDLEFVQFHPTGIYGAGCLITEGSRGEGGILRNSEGERFMERYAPTAKDLASRDVVSRSMTMEIREGRGVGPHKDHIYLHLNHLPPEVLKERLPGISETAAIFAGVDVTKEPIPVLPTVHYNMGGIPTNYHGEVVTIKGDDPDAVIPGLMAAGEAACASVHGANRLGANSLLDIVVFGRACANRVAEISKPGEKQKPLEKDAGEKTIAWLDRLRNSNGSLPTSTIRLNMQRIMQNNAAVFRTQETLEEGCQLIDKAWESFGDVQVKDRSMIWNSDLIETLELENLLINASITMHSAEARKESRGAHAREDFTKREDGEWMKHTLGYWEDEKVRLDYRPVHMDTLDDEIDTFPPKARVY

SEQ ID NO: 40670 - protein, 533 aa, Arabidopsis thaliana
  peptide (1)..(533): Ceres Seq. ID no. 12600040
MSEDDWRWHMYDTVKGSDWLGDQDAIQYMCREAPKAVIELENYGLPFSRTEEGKIYQRAFGGQSLDFGKGGQAYRCACAADRTGHALLHTLYGQAMKHNTQFFVEYFALDLLMASDGSCQGVIALNMEDGTLHRFRSSQTILATGGYGRAYFSATSAHTCTGDGNAMVARAGLPLQDLEFVQFHPTGIYGAGCLITEGSRGEGGILRNSEGERFMERYAPTAKDLASRDVVSRSMTMEIREGRGVGPHKDHIYLHLNHLPPEVLKERLPGISETAAIFAGVDVTKEPIPVLPTVHYNMGGIPTNYHGEVVTIKGDDPDAVIPGLMAAGEAACASVHGANRLGANSLLDIVVFGRACANRVAEISKPGEKQKPLEKDAGEKTIAWLDRLRNSNGSLPTSTIRLNMQRIMQNNAAVFRTQETLEEGCQLIDKAWESFGDVQVKDRSMIWNSDLIETLELENLLINASITMHSAEARKESRGAHAREDFTKREDGEWMKHTLGYWEDEKVRLDYRPVHMDTLDDEIDTFPPKARVY

SEQ ID NO: 40671 - protein, 524 aa, Arabidopsis thaliana
  peptide (1)..(524): Ceres Seq. ID no. 12600041
MYDTVKGSDWLGDQDAIQYMCREAPKAVIELENYGLPFSRTEEGKIYQRAFGGQSLDFGKGGQAYRCACAADRTGHALLHTLYGQAMKHNTQFFVEYFALDLLMASDGSCQGVIALNMEDGTLHRFRSSQTILATGGYGRAYFSATSAHTCTGDGNAMVARAGLPLQDLEFVQFHPTGIYGAGCLITEGSRGEGGILRNSEGERFMERYAPTAKDLASRDVVSRSMTMEIREGRGVGPHKDHIYLHLNHLPPEVLKERLPGISETAAIFAGVDVTKEPIPVLPTVHYNMGGIPTNYHGEVVTIKGDDPDAVIPGLMAAGEAACASVHGANRLGANSLLDIVVFGRACANRVAEISKPGEKQKPLEKDAGEKTIAWLDRLRNSNGSLPTSTIRLNMQRIMQNNAAVFRTQETLEEGCQLIDKAWESFGDVQVKDRSMIWNSDLIETLELENLLINASITMHSAEARKESRGAHAREDFTKREDGEWMKHTLGYWEDEKVRLDYRPVHMDTLDDEIDTFPPKARVY

SEQ ID NO: 40672 - DNA, 1106 bp, Arabidopsis thaliana
  misc_feature (1)..(1106): Ceres Seq. ID no. 12370963
  misc_feature (1)..(1106): Ortholog of  Ceres SEQ ID NO 12557432 as cited in SEQ ID NO 92
  misc_feature (1)..(1106): Ortholog of  Ceres SEQ ID NO 15224319 as cited in SEQ ID NO 66044
  misc_feature (1)..(1106): Ortholog of  Ceres SEQ ID NO 13598045 as cited in SEQ ID NO 66822
ggcttgtcgcagaagttgggattcgtctttttataatttgccctgaaaacgaaaacgaaaataaaaagcggagagagagatggctagatacgatcgagcaattactgtcttctcccccgacggtcacctctttcaagtcgaatacgcccttgaagccgtccgcaagggtaacgccgccgtcggtgtccgcggtaccgacaccgttgtcctcgccgtcgagaagaagtccacccccaagcttcaggattctagatcagccagaaaaattgtgagccttgacaatcacattgccttggcatgcgcggggctcaaggctgatgcccgagtcttgattaacaaagcaaggatcgagtgtcaaagccacaggcttacacttgaggaccctgtcactgttgagtacatcactcgctacattgctggccttcaacagaagtatacccaaagtggtggtgtcagacccttcggtctttctactcttatcgttggctttgacccttactctcgcctcccttccctatatcagactgatccttctgggactttctctgcttggaaagctaatgctaccggcagaaactccaactctattagggaattcctcgagaagaactacaaagaatcctctggccaagaaactattaaactcgctatccgtgctctgcttgaggtagttgagagtggcggaaagaacattgaggttgccgtaatgacacgggaggaaactgggctgcgccagctagaagaagctgaaattgatgcaatcgtggccaagatcgaagctgaaaaggcggccgcagaagcagccaagaaaggccctccaaaggaaacttgataaaacaataactgtttctgtttctcaatctgaacttaccttcttcgctgcttctgtttctcaatcttgttttgactcgagccaactctttggcaaaagaagaacctgaccccatcgttttgttaacttgaaaatgctccaaaaaaaaactgaagaaagggtttaaaattcgcttgatcttgatcaaaccaaggataaatttgctgttgctcattgttagatagagaagtgactctccattttctatttataagtaagcagaacaattagtgtt

SEQ ID NO: 40673 - protein, 250 aa, Arabidopsis thaliana
  peptide (1)..(250): Ceres Seq. ID no. 12370964
MARYDRAITVFSPDGHLFQVEYALEAVRKGNAAVGVRGTDTVVLAVEKKSTPKLQDSRSARKIVSLDNHIALACAGLKADARVLINKARIECQSHRLTLEDPVTVEYITRYIAGLQQKYTQSGGVRPFGLSTLIVGFDPYSRLPSLYQTDPSGTFSAWKANATGRNSNSIREFLEKNYKESSGQETIKLAIRALLEVVESGGKNIEVAVMTREETGLRQLEEAEIDAIVAKIEAEKAAAEAAKKGPPKET

SEQ ID NO: 40674 - DNA, 1266 bp, Arabidopsis thaliana
  misc_feature (1)..(1266): Ceres Seq. ID no. 13497266
  misc_feature (1)..(1266): Ortholog of  Ceres SEQ ID NO 13581848 as cited in SEQ ID NO 51340
  misc_feature (1)..(1266): Ortholog of  Ceres SEQ ID NO 13595392 as cited in SEQ ID NO 56164
  misc_feature (1)..(1266): Ortholog of  Ceres SEQ ID NO 14316412 as cited in SEQ ID NO 59209
  misc_feature (1)..(1266): Ortholog of  Ceres SEQ ID NO 12618341 as cited in SEQ ID NO 64256
agtaatctcaatcacaaactatttcccccccttcgttcatcaaatcctcaagagaaaaaaaaaatccccaaaagcttcctcaaaaccctaacacagatctctcgatcttctccgatctgtcttttctcctaatctggtttagtttgattttattggattgaagatgtcagacgctttgaatatgactcttgatgaaattgtgaagaagagtaagagtgaaaggtctgcagctgcaaggtctggaggtaaaggagtttcccgtaagagtggacgtggacgtggtggacctaatggtgttgtaggaggtggaagaggaggtggacctgttcgtagaggtcctcttgctgttaatactcggccatcatcatccttctccataaacaagcttgcccgcaggaagaggagcttgccatggcagaatcagaatgatttgtatgaagaaacccttagagctgttggggtatcaggagtggaagtcggaaccacagtttatattaccaaccttgatcagggagtgacaaatgaagatataagggaactctatgctgaaattggagagctgaaaagatatgcaattcactatgacaaaaatgggcgtccaagtggatcggctgaagttgtgtatatgagaagaagtgatgcaattcaagctatgaggaaatacaataatgtacttttggatggaaggcctatgaaactggagattctgggtggaaatactgaatctgctcctgtcgcagctcgtgttaatgtgactggattgaatggaaggatgaagaggagtgtcttcattggacaaggagttagaggtgggagagtaggaagaggaagaggttcaggtccttctgggagacgccttccactccaacaaaaccaacaaggtggtgtgacagctggtcgaggcgggttccgtggtagaggccggggtaatggtggtggcagagggaataaaagcggtgggcgaggtggaaagaagccagtggagaagtctgctgcggatctcgacaaagatctcgaaagctatcatgctgaagctatgaacatctcttaaacagaagcaagacttcgcatcttgtcatgtacttttgtgttctttattcttagtctctgactaaatatgtggcaaagtctggtttggtttaattacgtttaggatggctctactctgcttttattttcctcttttcttgtttcacactttcacagtcacttttggttattgaagttaaaagagatttagctgtaaatgagaaagctgttcttgtt

SEQ ID NO: 40675 - protein, 295 aa, Arabidopsis thaliana
  peptide (1)..(295): Ceres Seq. ID no. 13497267
MSDALNMTLDEIVKKSKSERSAAARSGGKGVSRKSGRGRGGPNGVVGGGRGGGPVRRGPLAVNTRPSSSFSINKLARRKRSLPWQNQNDLYEETLRAVGVSGVEVGTTVYITNLDQGVTNEDIRELYAEIGELKRYAIHYDKNGRPSGSAEVVYMRRSDAIQAMRKYNNVLLDGRPMKLEILGGNTESAPVAARVNVTGLNGRMKRSVFIGQGVRGGRVGRGRGSGPSGRRLPLQQNQQGGVTAGRGGFRGRGRGNGGGRGNKSGGRGGKKPVEKSAADLDKDLESYHAEAMNIS

SEQ ID NO: 40676 - protein, 289 aa, Arabidopsis thaliana
  peptide (1)..(289): Ceres Seq. ID no. 13497268
MTLDEIVKKSKSERSAAARSGGKGVSRKSGRGRGGPNGVVGGGRGGGPVRRGPLAVNTRPSSSFSINKLARRKRSLPWQNQNDLYEETLRAVGVSGVEVGTTVYITNLDQGVTNEDIRELYAEIGELKRYAIHYDKNGRPSGSAEVVYMRRSDAIQAMRKYNNVLLDGRPMKLEILGGNTESAPVAARVNVTGLNGRMKRSVFIGQGVRGGRVGRGRGSGPSGRRLPLQQNQQGGVTAGRGGFRGRGRGNGGGRGNKSGGRGGKKPVEKSAADLDKDLESYHAEAMNIS

SEQ ID NO: 40677 - DNA, 1248 bp, Arabidopsis thaliana
  misc_feature (1)..(1248): Ceres Seq. ID no. 12395497
  misc_feature (1)..(1248): Ortholog of  Ceres SEQ ID NO 15179139 as cited in SEQ ID NO 1093
  misc_feature (1)..(1248): Ortholog of  Ceres SEQ ID NO 15226793 as cited in SEQ ID NO 58689
atcacgatcaaaaatgccatagtacataaagtatccattaaaacgtagatctagtctcttcacaacacttcaactaataacgcaaaaatcagtttctctttgagtaagtgtttactacaattaaactaactcaggcaagtctatgatcatggcttcttctgctgctgcatcgatctctatgataactctaaggaacctctctcgcaatcatcaatctcaccaaagcactcttctcggtttctctagatccttccataaccaaaggatctcatctaacagtccaggtctctccacacgagcaagatccaccacttcctccactggaggtttcttcagaaccatttgcagcagcagcagcaacgacaactccagaccaagtaagtaaaaactaaaaagttaacctttatgctcacaactaagtacccatttcatgatttgagaaaattagcatcaaattaggtataagaattaagaacaaaaaaagaatcaacctttaagttcaaaatcaagtacccatttcacaaaaactgatttttaacttgataaaaatctcagctaagatccaagagcttaacgtctacgagttcaacgaaggtgatcgaaacagtccagcggttttaaaactagggaaaaaaccagatcagctttgtctcggagatcttgtccccttcacaaacaaactctacacaggagatctcacaaaacgcataggaatcaccgcaggtctctgcgttttgatccaacacgttccagagaagaaaggtgatcgctttgaagcttcttacagtttctacttcggagattacggtcacatatcagttcaaggaccttatctcacttacgaggatacgtttcttgctatcaccggtggctccggcgtgtttgaaggagcttacggacaggtcaagcttcgtcagcttgtgtatcctacgaagctgttttacactttttacttgaaaggtgttgctgctgatttaccggtggagcttaccgggaaacatgttgagccgtcgaaggaagtgaaaccggcggctgaagctcaggcgactcagcccggcgctacgatcgctaactttactaattgaaatctaaatctttgtgggtgtctttgtcatggatcttattgggctgttgttcattgtgtttacattttaataatgggcctaaataatgagcctttgtattgggccgttctcgtaagcctaatgtgtcccgtccctataagctggatttaagcgcgtgaactcc

SEQ ID NO: 40678 - protein, 80 aa, Arabidopsis thaliana
  peptide (1)..(80): Ceres Seq. ID no. 12395498
MIMASSAAASISMITLRNLSRNHQSHQSTLLGFSRSFHNQRISSNSPGLSTRARSTTSSTGGFFRTICSSSSNDNSRPSK

SEQ ID NO: 40679 - protein, 78 aa, Arabidopsis thaliana
  peptide (1)..(78): Ceres Seq. ID no. 12395499
MASSAAASISMITLRNLSRNHQSHQSTLLGFSRSFHNQRISSNSPGLSTRARSTTSSTGGFFRTICSSSSNDNSRPSK

SEQ ID NO: 40680 - protein, 68 aa, Arabidopsis thaliana
  peptide (1)..(68): Ceres Seq. ID no. 12395500
MITLRNLSRNHQSHQSTLLGFSRSFHNQRISSNSPGLSTRARSTTSSTGGFFRTICSSSSNDNSRPSK

SEQ ID NO: 40681 - DNA, 2073 bp, Arabidopsis thaliana
  misc_feature (1)..(2073): Ceres Seq. ID no. 13488774
  misc_feature (1)..(2073): Ortholog of  Ceres SEQ ID NO 13655755 as cited in SEQ ID NO 65117
actatctcacggcttttagttttcaccattctgattaaagagaaaccaaacgtttcatttttcaatatctagagagaaagatgcagacttcggtgaccccagatgccatctccaccgttttgtcaaacccatcctttgattcgtcttccgatcgatctgagatcgttgttcaagttgtggatcttaaacctatcggcaatcgctatacatttagtgcaaatgacggaaagacgaaagtcaaagcaatgtttactgcttcactcacacctgaaatcatttctgggaagatccagaacttgggtctaattcgtctcattgatttcactgttaacgacatttcaagcaaatctacaaaatatttccttgtgactaaatgtgaggctgttggttctgtgcttgattctgagattaacttggacagtaagagcggagaggaggaggctcgtgagcccaagaagcagaaactagagcattctcctgtcagtcctctgaatgatgttgtttctactggtatcacattgaaaccgaagcaggaatttgtagccaaatcagcttctcagataatgagtgaacaaaggggaaatgctgcaccagctgcaagaatggccatgactagaagggttcatccacttgtgtcattaaatccatatcaaggaaactggaccatcaaagtccgagttacaaacaagggagtgatgagaaattacaaaaacgctaggggtgaaggatgtgtcttcaatgttgaactaacagatgaagaaggaacacaaattcaagcaacgatgtttaatgatgctgcaaggaagttttttgacagattccagttgggaaaggtttattatatatcaagggggtcactaaaactcgctaacaagcagttcaaaacagttcagaatgattatgagatgacactgaatgaaaattcagaggttgaggaagctagtagcgaagaaatgttcatccctgagacaaaattcaacttcgtacccattgaagagttgggtctgtatgttaatcagaaggaacttattgatcttattggagttgttcaaagtgtatctcctaccatgagtattagaaggagaactgacaatgagatgattcctaagagggatataactttggctgatgagtcaaggaaaactgttgtggtgtccctgtggaatgatcttgcaactggcataggtcaggagctactagacatggctgatcagtcacctgtgattgcaatcaagtctctcaaagttggagattttcaaggtgtttcgttgtctaccatcagcagaagcaatgtggttattaacccggaatcaccagaagctaaaaagttgaaatcttggtttgattctgaaggcaaggaaatatccatgtcttctattggctcagggatgagcccttctgccaaaaatggatctcggtctttgtatactgaccgagtgcttctctctcacatcacaagcaatccatctttattcgaagaaaagcctgtatttttcagcactagggcttacataagcttcatcaaaccagaccaaacaatgtggtaccaagcttgtaagacttgtaacaagaaagtgacagaagcacttgactctggttactggtgtgaaggatgccagagaaagtatgaagaatgcagcttaaggtacataatggcggtgaaagtcaccgactcatctggagaaacttggatttcgtcattcaacgatgaagcagagaagattcttggatgttcagctgatgagctcaacaaactaaaatcagaggaaggtgaagtaaatgaatatcagacaaaactgaaagaggcaacatggtcatctcatgtcttccgggttagtgtcacacagaatgagtataacggtgagaagagacagagggtaactgtaaaaggagtagctcctcttgattttgctgctgaaacaagattgttgcttcaagacatctccaacaagaacaaaacatctcagtagtagcttttacttcttttttttctctattggcctaaaaaagtctcaaaacttttccttgtataatataagcctttctgcaatttataaaattagggttttgctt

SEQ ID NO: 40682 - protein, 629 aa, Arabidopsis thaliana
  peptide (1)..(629): Ceres Seq. ID no. 13488775
MQTSVTPDAISTVLSNPSFDSSSDRSEIVVQVVDLKPIGNRYTFSANDGKTKVKAMFTASLTPEIISGKIQNLGLIRLIDFTVNDISSKSTKYFLVTKCEAVGSVLDSEINLDSKSGEEEAREPKKQKLEHSPVSPLNDVVSTGITLKPKQEFVAKSASQIMSEQRGNAAPAARMAMTRRVHPLVSLNPYQGNWTIKVRVTNKGVMRNYKNARGEGCVFNVELTDEEGTQIQATMFNDAARKFFDRFQLGKVYYISRGSLKLANKQFKTVQNDYEMTLNENSEVEEASSEEMFIPETKFNFVPIEELGLYVNQKELIDLIGVVQSVSPTMSIRRRTDNEMIPKRDITLADESRKTVVVSLWNDLATGIGQELLDMADQSPVIAIKSLKVGDFQGVSLSTISRSNVVINPESPEAKKLKSWFDSEGKEISMSSIGSGMSPSAKNGSRSLYTDRVLLSHITSNPSLFEEKPVFFSTRAYISFIKPDQTMWYQACKTCNKKVTEALDSGYWCEGCQRKYEECSLRYIMAVKVTDSSGETWISSFNDEAEKILGCSADELNKLKSEEGEVNEYQTKLKEATWSSHVFRVSVTQNEYNGEKRQRVTVKGVAPLDFAAETRLLLQDISNKNKTSQ

SEQ ID NO: 40683 - protein, 574 aa, Arabidopsis thaliana
  peptide (1)..(574): Ceres Seq. ID no. 13488776
MFTASLTPEIISGKIQNLGLIRLIDFTVNDISSKSTKYFLVTKCEAVGSVLDSEINLDSKSGEEEAREPKKQKLEHSPVSPLNDVVSTGITLKPKQEFVAKSASQIMSEQRGNAAPAARMAMTRRVHPLVSLNPYQGNWTIKVRVTNKGVMRNYKNARGEGCVFNVELTDEEGTQIQATMFNDAARKFFDRFQLGKVYYISRGSLKLANKQFKTVQNDYEMTLNENSEVEEASSEEMFIPETKFNFVPIEELGLYVNQKELIDLIGVVQSVSPTMSIRRRTDNEMIPKRDITLADESRKTVVVSLWNDLATGIGQELLDMADQSPVIAIKSLKVGDFQGVSLSTISRSNVVINPESPEAKKLKSWFDSEGKEISMSSIGSGMSPSAKNGSRSLYTDRVLLSHITSNPSLFEEKPVFFSTRAYISFIKPDQTMWYQACKTCNKKVTEALDSGYWCEGCQRKYEECSLRYIMAVKVTDSSGETWISSFNDEAEKILGCSADELNKLKSEEGEVNEYQTKLKEATWSSHVFRVSVTQNEYNGEKRQRVTVKGVAPLDFAAETRLLLQDISNKNKTSQ

SEQ ID NO: 40684 - protein, 468 aa, Arabidopsis thaliana
  peptide (1)..(468): Ceres Seq. ID no. 13488777
MSEQRGNAAPAARMAMTRRVHPLVSLNPYQGNWTIKVRVTNKGVMRNYKNARGEGCVFNVELTDEEGTQIQATMFNDAARKFFDRFQLGKVYYISRGSLKLANKQFKTVQNDYEMTLNENSEVEEASSEEMFIPETKFNFVPIEELGLYVNQKELIDLIGVVQSVSPTMSIRRRTDNEMIPKRDITLADESRKTVVVSLWNDLATGIGQELLDMADQSPVIAIKSLKVGDFQGVSLSTISRSNVVINPESPEAKKLKSWFDSEGKEISMSSIGSGMSPSAKNGSRSLYTDRVLLSHITSNPSLFEEKPVFFSTRAYISFIKPDQTMWYQACKTCNKKVTEALDSGYWCEGCQRKYEECSLRYIMAVKVTDSSGETWISSFNDEAEKILGCSADELNKLKSEEGEVNEYQTKLKEATWSSHVFRVSVTQNEYNGEKRQRVTVKGVAPLDFAAETRLLLQDISNKNKTSQ

SEQ ID NO: 40685 - DNA, 1327 bp, Arabidopsis thaliana
  misc_feature (1)..(1327): Ceres Seq. ID no. 12388491
  misc_feature (1)..(1327): Ortholog of  Ceres SEQ ID NO 13594301 as cited in SEQ ID NO 60110
ctttccttatcgatttttctctccgcgaattgttcgttgttttcttctggcacctgattctcatcttctttcttgtggaatctgggttttgttgcggagttttcgaggttcctcattcgttgcttctgttgaaactctcttttttttttgggtggtttactttgtttttttgttgttgttgctttcaacctttaaatgccctaattttgaggttctagttgtggtttttaagattaggagcagaagccctttcgactaaagttcatgttagctgcaatttgctgaagtattcacagttttgttctgttggaagctctatgtgtttccttctgtgattgaaacacagagagaatgattttaccaaagcagtattgttgcacacactcgccgagctgccaatgcaccaaaggccatttaaacgaagacgtgttgttattagtgttccaacatttgaattggaatccgaaattagttgcaacactttcctgtgtatgcagatggtttgatgatttcgccaaacgggtactatggaaagagttttgcaagactcgtgccccaaaaatgatgcttgatttgcagtctagcggtagtcactgcattgacggtaactggcgagcccttgggaagcttctcatctactgctcaggatgtacacaaggtggtcttttcaatagctctgttcaaatcccaggccactttgtttatagaacccggttctcaagaacattaggaagaagcctccttccgcctcagtgtagaactgatgtactctatgtttgtgatccatgcgagcatcttgaccaaggagaagaaggcgacgtgggtttgttccgtgggattttcaagtcattcccaacatcgaaagttcggaaagtgatcattaacaaggcggttccttttcatccatccgaggtttgcccgtattgtaaagctaagctatggagcatgctacaagctaagataatacctcagagtgcctgcattcgtttggaagcttatgaagactgcattgagtattttgtttgccttaatggacatttgctgggtatctgcactctcgcgcctttgtctgattcagaggatgcaattccaagcgaagataacaatcacacagagaagaaacaagacaatggctttcctagagagaacgtattgaaaaggagaaattctttgttgggtggaagtgaaaatggacctccgccgcaaaaacgactgaccaatcctaatcagtgaaacatctgtaaatttgtgtactactgctaaatttattgtatctgcagagattcttcaacattcatatacagtcaaattatgatcaacaattttc

SEQ ID NO: 40686 - protein, 293 aa, Arabidopsis thaliana
  peptide (1)..(293): Ceres Seq. ID no. 12388492
MILPKQYCCTHSPSCQCTKGHLNEDVLLLVFQHLNWNPKLVATLSCVCRWFDDFAKRVLWKEFCKTRAPKMMLDLQSSGSHCIDGNWRALGKLLIYCSGCTQGGLFNSSVQIPGHFVYRTRFSRTLGRSLLPPQCRTDVLYVCDPCEHLDQGEEGDVGLFRGIFKSFPTSKVRKVIINKAVPFHPSEVCPYCKAKLWSMLQAKIIPQSACIRLEAYEDCIEYFVCLNGHLLGICTLAPLSDSEDAIPSEDNNHTEKKQDNGFPRENVLKRRNSLLGGSENGPPPQKRLTNPNQ

SEQ ID NO: 40687 - protein, 223 aa, Arabidopsis thaliana
  peptide (1)..(223): Ceres Seq. ID no. 12388493
MMLDLQSSGSHCIDGNWRALGKLLIYCSGCTQGGLFNSSVQIPGHFVYRTRFSRTLGRSLLPPQCRTDVLYVCDPCEHLDQGEEGDVGLFRGIFKSFPTSKVRKVIINKAVPFHPSEVCPYCKAKLWSMLQAKIIPQSACIRLEAYEDCIEYFVCLNGHLLGICTLAPLSDSEDAIPSEDNNHTEKKQDNGFPRENVLKRRNSLLGGSENGPPPQKRLTNPNQ

SEQ ID NO: 40688 - protein, 222 aa, Arabidopsis thaliana
  peptide (1)..(222): Ceres Seq. ID no. 12388494
MLDLQSSGSHCIDGNWRALGKLLIYCSGCTQGGLFNSSVQIPGHFVYRTRFSRTLGRSLLPPQCRTDVLYVCDPCEHLDQGEEGDVGLFRGIFKSFPTSKVRKVIINKAVPFHPSEVCPYCKAKLWSMLQAKIIPQSACIRLEAYEDCIEYFVCLNGHLLGICTLAPLSDSEDAIPSEDNNHTEKKQDNGFPRENVLKRRNSLLGGSENGPPPQKRLTNPNQ

SEQ ID NO: 40689 - DNA, 1615 bp, Arabidopsis thaliana
  misc_feature (1)..(1615): Ceres Seq. ID no. 12328333
  misc_feature (1)..(1615): Ortholog of  Ceres SEQ ID NO 15176349 as cited in SEQ ID NO 58789
tttgcaaattctcaaaaatctatcaagggtttgccgtacaaaggtatcggaggagagagtaaaggtgctttgttatcaaggtgaaaatcgatttgaagatggcgagcgaaagtcctgatgttgctgttgtagctccggtggtggagaatggcggcgctgagtcctctaatggtaaagaggaacaattggaatctgagctttcgaagaagcttgagattgcagaagatggtcaagaggagaacgatggagaagaaggaagcaaagctgagacttcaacgaagaagaagaagaagaaaaataaaagcaagaagaagaaggaactccctcaacagactgatccaccttcaattcctgtcgttgagctcttcccatcaggagagtttcctgaaggtgaaatccaagagtataaggatgataatctttggagaacaacatctgaagagaagagagagctggagcgttttgaaaagccaatatataactctgttcgccgagctgcagaagttcatcgccaggttcgtaaatatgtcagaagcatagtgaagcctggaatgttgatgactgatatatgtgagaccctagagaatactgttcgtaagttgatatcagagaatggtcttcaagctggtattgcattccctacaggatgctctttgaattgggtcgctgctcattggacaccaaactctggagataagactgtacttcagtacgacgatgttatgaaattggactttggaacacatattgatgggcatattattgactgtgcatttacagttgccttcaaccctatgttcgatcctctcttagcagcctctcgtgaagctacgtataccggtatcaaggaagctgggatcgatgtccgtctctgtgatatcggtgctgctattcaggaggtcatggagtcttatgaggttgaaatcaacggaaaggtcttccaagttaaaagtatccgaaacttgaatggtcacagcattggaccctatcagatacatgctgggaaatctgttcctatcgtaaaaggaggcgagcagacaaagatggaagagggcgagttttatgccatcgaaacatttggatcaaccgggaaaggatatgtgagagaagacctagaatgtagccattacatgaagaactttgacgctggccacgtccccttgaggttgcctagagcaaaacaactccttgcaaccattaacaagaatttctcgactctcgccttctgcagacgttatttggaccgcattggtgaaaccaaatacttaatggctctaaagaatctttgtgactctggcattgttcagccgtatcctcctctgtgtgatgtgaaaggaagctatgtatcacagtttgaacacaccattttactgcgacctacttgcaaagaagttctctccaagggagacgactactgattcagatcctctgttttgctctgtttacctttattatctcatactgttgtcgagattgtacacttgcttgtttcttttgtcgtcgttaacacaagctttgaatccttttataaaaagcttcagtgcctctgttaaaaaaaaactatgtatttgccatgaacatgaatttgctcatcaatcttactagaagttgattg

SEQ ID NO: 40690 - protein, 439 aa, Arabidopsis thaliana; identical to SEQ ID NO: 21518
  peptide (1)..(439): Ceres Seq. ID no. 12328334

SEQ ID NO: 40691 - protein, 288 aa, Arabidopsis thaliana; identical to SEQ ID NO: 21519
  peptide (1)..(288): Ceres Seq. ID no. 12328335

SEQ ID NO: 40692 - protein, 286 aa, Arabidopsis thaliana; identical to SEQ ID NO: 21520
  peptide (1)..(286): Ceres Seq. ID no. 12328336

SEQ ID NO: 40693 - DNA, 1466 bp, Arabidopsis thaliana
  misc_feature (1)..(1466): Ceres Seq. ID no. 12328673
  misc_feature (1)..(1466): Ortholog of  Ceres SEQ ID NO 15171382 as cited in SEQ ID NO 51642
  misc_feature (1)..(1466): Ortholog of  Ceres SEQ ID NO 15168545 as cited in SEQ ID NO 57829
  misc_feature (1)..(1466): Ortholog of  Ceres SEQ ID NO 15168468 as cited in SEQ ID NO 58115
  misc_feature (1)..(1466): Ortholog of  Ceres SEQ ID NO 15179784 as cited in SEQ ID NO 64755
  misc_feature (1)..(1466): Ortholog of  Ceres SEQ ID NO 13596440 as cited in SEQ ID NO 68769
  misc_feature (1)..(1466): Ortholog of  Ceres SEQ ID NO 15180012 as cited in SEQ ID NO 0
acttttcggttaattgctcctcttcagctaactttggggctttaaagtgataggatggctcgcttcagttttccttgttttccaaattttgggggttttaatcaggtccaagtaattagttgagtgactcttggttccagattcgtttttggtggtcatagtcgcgagctgtgacaaatcgggggcctgagatttcagaaactgctgataattgggtctcaccatctgacattccactcatagaacctaatagtaaagagcacaggatgagagaggcacagctaggcggtcacactctgaggtcccatggaatgactgttgcaaggactcacatgcatgattggatcattctcgtgttacttgttattctcgagtgtgtactccttataatccacccattttatcgctttgttggtaaagatatgatgactgatctaagttacccgttaaagagtaacaccgtaccaatttggtctgtcccggtatatgcgatgctgttacctttggtaatcttcatctttatctacttccgtcgaagagatgtttatgatcttcatcacgcggtgctaggtctcttatactctgttctggtgacagcagtacttaccgatgcaataaagaatgcagttggtcgaccacgtcctgacttcttctggcgttgttttccagatggcaaagctctttatgatagccttggagatgttatatgccatggtgataaaagcgtcataagggaaggtcacaaaagctttccaagtggacacacgtcatggtctttttcgggtctcggatttctttcgctttacttatcgggaaagattcaagcatttgacggtaaaggccacgttgcaaagctatgcatagtcatactccctttgctatttgcagctcttgtcggcatttcccgtgttgatgactattggcatcattggcaagacgtctttgcaggaggcttgctaggtcttgcgatctctacaatctgttatcttcaatttttcccgccaccatatcacaccgaaggttggggaccatatgcttacttccaagtgttggaggctgcgagagtgcaaggagcagcgaatggagcagtgcagcagccgccgccccaagttaacaacggtgaagaagaagacggtgggtttatgggtttacatttggtggataatccgactatgaggagagaagaggatgtagaaactggtagaggctgagatgaagaaactctgaagctggtttggttacttgttaggacactttctcttgttcttttgattctttgttggacaactttagtagatttctctaagataactaatagagtcgtttggttttggttttggtttaaatggatgaccggttttatggttccggtattggtggttaaagtttatgtttttcaaaaaagttcactggataaatgtagctttattttcaatattttaaggattgaaatcggatttgaactt

SEQ ID NO: 40694 - protein, 314 aa, Arabidopsis thaliana; identical to SEQ ID NO: 27353
  peptide (1)..(314): Ceres Seq. ID no. 12328674

SEQ ID NO: 40695 - protein, 299 aa, Arabidopsis thaliana; identical to SEQ ID NO: 27354
  peptide (1)..(299): Ceres Seq. ID no. 12328675

SEQ ID NO: 40696 - protein, 292 aa, Arabidopsis thaliana; identical to SEQ ID NO: 27355
  peptide (1)..(292): Ceres Seq. ID no. 12328676

SEQ ID NO: 40697 - DNA, 1870 bp, Arabidopsis thaliana; identical to SEQ ID NO: 27024
  misc_feature (1)..(1870): Ceres Seq. ID no. 12328430
  misc_feature (1)..(1870): Ortholog of  Ceres SEQ ID NO 14308221 as cited in SEQ ID NO 60363

SEQ ID NO: 40698 - protein, 520 aa, Arabidopsis thaliana; identical to SEQ ID NO: 27025
  peptide (1)..(520): Ceres Seq. ID no. 12328431

SEQ ID NO: 40699 - protein, 359 aa, Arabidopsis thaliana; identical to SEQ ID NO: 27026
  peptide (1)..(359): Ceres Seq. ID no. 12328432

SEQ ID NO: 40700 - protein, 302 aa, Arabidopsis thaliana; identical to SEQ ID NO: 27027
  peptide (1)..(302): Ceres Seq. ID no. 12328433

SEQ ID NO: 40701 - DNA, 1170 bp, Arabidopsis thaliana
  misc_feature (1)..(1170): Ceres Seq. ID no. 12330304
  misc_feature (1)..(1170): Ortholog of  Ceres SEQ ID NO 14306797 as cited in SEQ ID NO 53354
  misc_feature (1)..(1170): Ortholog of  Ceres SEQ ID NO 15176525 as cited in SEQ ID NO 54495
  misc_feature (1)..(1170): Ortholog of  Ceres SEQ ID NO 15169519 as cited in SEQ ID NO 67237
aaaacgcatttggtaggctgagagaaagaaagaaaaagataaagatggatcacgcagcagatgctcaccgtacggatttgatgaccattacaagattcgtgttgaatgaacaatcaaagtatccagaatctcgtggtgatttcaccattttgcttagtcacatcgttttgggttgcaaattcgtttgcagtgctgttaataaggctggtttggctaagttaattggacttgcaggggaaacaaacattcagggtgaagagcaaaagaaacttgatgtgctctctaatgatgtctttgtcaacgctttggttagcagtggtagaacttctgttcttgtctcggaggaagatgaggaagctacgtttgtggagccatccaagcgtggaaagtactgtgttgtttttgatccgcttgatggatcttcaaacattgactgtggtgtttccattggcacaatgttctgaaacctgggaatgaaatggtggctgcaggttattgtatgtacggaagctcctgcatgcttgtgttgagcactggaaccggtgtccacggatttacactggacccatctctaggagagttcattctaactcacccggacattaagattccaaataagggaaacatttattcggtgaatgaaggcaatgcgcagaactgggatggtccaactacaaagtatgtagagaaatgcaagtttcctaaagatggttctcctgcaaagtctctgagatacgtaggaagtatggtagctgatgttcatcgtacactactttatggaggaatcttcttgtacccggctgacaagaaaagccccaatggaaaattgcgtgtcttgtatgaagttttcccgatgtcgtttttgatggagcaagccggaggtcaggcctttacgggaaagaaaagggcgctagaccttgtcccgagaagatccatgagcgttctccgatatttcttggtagctacgatgatgtagaagagattaaagctctctatgctgaggaggaaaagaagaactaagcttctcattcttcttttattctcttactgtctctgtctctcttatttctatatacagtatcttcttctgatgagaagaacaacataactcatttacaaaaggaagatctttctttatctttaaatgcacataaaaatcttctttctttc

SEQ ID NO: 40702 - protein, 165 aa, Arabidopsis thaliana
  peptide (1)..(165): Ceres Seq. ID no. 12330305
MVAAGYCMYGSSCMLVLSTGTGVHGFTLDPSLGEFILTHPDIKIPNKGNIYSVNEGNAQNWDGPTTKYVEKCKFPKDGSPAKSLRYVGSMVADVHRTLLYGGIFLYPADKKSPNGKLRVLYEVFPMSFLMEQAGGQAFTGKKRALDLVPRRSMSVLRYFLVATMM

SEQ ID NO: 40703 - protein, 158 aa, Arabidopsis thaliana
  peptide (1)..(158): Ceres Seq. ID no. 12330306
MYGSSCMLVLSTGTGVHGFTLDPSLGEFILTHPDIKIPNKGNIYSVNEGNAQNWDGPTTKYVEKCKFPKDGSPAKSLRYVGSMVADVHRTLLYGGIFLYPADKKSPNGKLRVLYEVFPMSFLMEQAGGQAFTGKKRALDLVPRRSMSVLRYFLVATMM

SEQ ID NO: 40704 - protein, 153 aa, Arabidopsis thaliana
  peptide (1)..(153): Ceres Seq. ID no. 12330307
NAFGRLRERKKKIKMDHAADAHRTDLMTITRFVLNEQSKYPESRGDFTILLSHIVLGCKFVCSAVNKAGLAKLIGLAGETNIQGEEQKKLDVLSNDVFVNALVSSGRTSVLVSEEDEEATFVEPSKRGKYCVVFDPLDGSSNIDCGVSIGTMF

SEQ ID NO: 40705 - DNA, 1472 bp, Arabidopsis thaliana
  misc_feature (1)..(1472): Ceres Seq. ID no. 12328434
  misc_feature (1)..(1472): Ortholog of  Ceres SEQ ID NO 13503610 as cited in SEQ ID NO 62416
  misc_feature (1)..(1472): Ortholog of  Ceres SEQ ID NO 13657610 as cited in SEQ ID NO 66165
  misc_feature (1)..(1472): Ortholog of  Ceres SEQ ID NO 13598312 as cited in SEQ ID NO 68448
  misc_feature (1)..(1472): Ortholog of  Ceres SEQ ID NO 13596100 as cited in SEQ ID NO 68573
aaggttttgatgcttagtgaaaatggaaaaagaggcaacaaagatggtgaatggtggagttaagtcaaagtcacctaagggcagtcctgatttcctcggatataatttgagatatgtcaagcttggatacatttaccttctctctctctcacgtaccttttgtttcttccttcctcctcttcttcttctcttcatctttgtttctcgatttctcccaatcttggctttccctttgtctaccttcttcatcctcctcatctatcattatcttactccttcctctgtttttcttctcgatttctcctgttaccgcccacccgatcatctcaagatcacaaaaagcgacttcatcgagctggcaatgaagtctggtaacttcaacgagactgccatcgagcttcaaagaaaagtgctggaccaatcagggataggagaggagagctacatgccgagagtggtcttcaagcctggtcacagggtcaatcttcgtgatggtcgtgaagaagcagcaatggtgatctttggagcaattgatgaacttcttgcagcgaccaaaatcaatgtgaagcatatcaagatcctggtgctaaactgcggagtcctcaacaccacgccatctctatcggccatggtgattaaccattataagctgaggcataacacagagagctacaatcttggtggtatggggtgtagcgccggagtcatagccattgatttagccaaagatcttttaaacgctcatcaaggctcttacgctttggtggtgagcactgagatagtaagcttcacttggtactcaggtaatgacgtcgcgttgcttccaccaaattgcttctttcgaatgggagcagctgcagttatgctatctagtcggcgtatcgacagatggcgagccaaataccaacttatgcagctagtaagaacccataaaggcatggaagacacaagttacaagagcatagagttaagagaagacagagatgggaaacaaggactatatgtatctagagatgtaatggaagttgggcgccatgcactgaaagcaaacattgcaacgcttggtcgtcttgagccttcctttgaacatatatgcgtattagcatcgagtaagaaagtacttgatgacattcataaggatctcaagttgacagaagagaatatggaggcatcaagacggacattggagcgtttcgggaacacatcaagcagcagtatatggtacgagctggcttacctagaacacaaggcgaagatgaaaagaggagatagggtttggcaaatcggtttcgggtcagggtttaaatgcaatagtgttgtatggaaagccctaaaaaacattgaccctccaagacataacaacccatggaatctctgaggattcatcaaagttaacaattgtatgataacatgaataaaataacccaccaatgcaaaatccacaatttattcaaatagtgtgattgcatttg

SEQ ID NO: 40706 - protein, 451 aa, Arabidopsis thaliana
  peptide (1)..(451): Ceres Seq. ID no. 12328435
MEKEATKMVNGGVKSKSPKGSPDFLGYNLRYVKLGYIYLLSLSRTFCFFLPPLLLLFIFVSRFLPILAFPLSTFFILLIYHYLTPSSVFLLDFSCYRPPDHLKITKSDFIELAMKSGNFNETAIELQRKVLDQSGIGEESYMPRVVFKPGHRVNLRDGREEAAMVIFGAIDELLAATKINVKHIKILVLNCGVLNTTPSLSAMVINHYKLRHNTESYNLGGMGCSAGVIAIDLAKDLLNAHQGSYALVVSTEIVSFTWYSGNDVALLPPNCFFRMGAAAVMLSSRRIDRWRAKYQLMQLVRTHKGMEDTSYKSIELREDRDGKQGLYVSRDVMEVGRHALKANIATLGRLEPSFEHICVLASSKKVLDDIHKDLKLTEENMEASRRTLERFGNTSSSSIWYELAYLEHKAKMKRGDRVWQIGFGSGFKCNSVVWKALKNIDPPRHNNPWNL

SEQ ID NO: 40707 - protein, 444 aa, Arabidopsis thaliana
  peptide (1)..(444): Ceres Seq. ID no. 12328436
MVNGGVKSKSPKGSPDFLGYNLRYVKLGYIYLLSLSRTFCFFLPPLLLLFIFVSRFLPILAFPLSTFFILLIYHYLTPSSVFLLDFSCYRPPDHLKITKSDFIELAMKSGNFNETAIELQRKVLDQSGIGEESYMPRVVFKPGHRVNLRDGREEAAMVIFGAIDELLAATKINVKHIKILVLNCGVLNTTPSLSAMVINHYKLRHNTESYNLGGMGCSAGVIAIDLAKDLLNAHQGSYALVVSTEIVSFTWYSGNDVALLPPNCFFRMGAAAVMLSSRRIDRWRAKYQLMQLVRTHKGMEDTSYKSIELREDRDGKQGLYVSRDVMEVGRHALKANIATLGRLEPSFEHICVLASSKKVLDDIHKDLKLTEENMEASRRTLERFGNTSSSSIWYELAYLEHKAKMKRGDRVWQIGFGSGFKCNSVVWKALKNIDPPRHNNPWNL

SEQ ID NO: 40708 - protein, 338 aa, Arabidopsis thaliana
  peptide (1)..(338): Ceres Seq. ID no. 12328437
MKSGNFNETAIELQRKVLDQSGIGEESYMPRVVFKPGHRVNLRDGREEAAMVIFGAIDELLAATKINVKHIKILVLNCGVLNTTPSLSAMVINHYKLRHNTESYNLGGMGCSAGVIAIDLAKDLLNAHQGSYALVVSTEIVSFTWYSGNDVALLPPNCFFRMGAAAVMLSSRRIDRWRAKYQLMQLVRTHKGMEDTSYKSIELREDRDGKQGLYVSRDVMEVGRHALKANIATLGRLEPSFEHICVLASSKKVLDDIHKDLKLTEENMEASRRTLERFGNTSSSSIWYELAYLEHKAKMKRGDRVWQIGFGSGFKCNSVVWKALKNIDPPRHNNPWNL

SEQ ID NO: 40709 - DNA, 1928 bp, Arabidopsis thaliana
  misc_feature (1)..(1928): Ceres Seq. ID no. 12371153
  misc_feature (1)..(1928): Ortholog of  Ceres SEQ ID NO 13593925 as cited in SEQ ID NO 59489
  misc_feature (1)..(1928): Ortholog of  Ceres SEQ ID NO 13657610 as cited in SEQ ID NO 66165
  misc_feature (1)..(1928): Ortholog of  Ceres SEQ ID NO 13598312 as cited in SEQ ID NO 68448
  misc_feature (1)..(1928): Ortholog of  Ceres SEQ ID NO 13596100 as cited in SEQ ID NO 68573
atgcatcttactcacttcatcatctcttcttaaaccccaaaacaaacaaacaaacaaacaaaaaataccaaaacaaagaagaaaaaaaaaataactatggatcttctctttctctttttctctcttctcctctcttacctctttttcaagatctggaaactcatagactcaaagcaagacaaagattgctacattttagactaccaatgtcataaaccaaccgacgatcgaatggtgagcactcaattcagtggagagatcatttatcgaaaccaaaaccttggtttaaccgaatacaagttccttctcaaagccatagtaagctcagggattggagaacaaacctacgctccaagacttgtctttgaaggtcgagaagagcgtccttcgttacaagatgggatctccgagatggaagagttctacgtggacagcatcggaaaactcctggagagaaatcaaatatctcctaaagacatagacatcctcgtagtcaacgtctccatgctctcttcaacgccatctttagcttcaagaatcattaaccattacaagatgagagacgacgtcaaagtcttcaacttgaccgggatgggatgcagcgcaagtctaatctccgtagacattgtcaagaacatttttaagagctacgcaaacaagttagctcttgttgccacctccgagtctttgagccctaattggtatagcggaaacaaccgttcaatgatcttagccaactgtttgttccggtccggtggatgtgctattctcttgactaacaaacgtagcttgagaaagaaagcaatgtttaaactcaagtgtatggtacggactcaccatggagctagagaggagtcttataattgttgcatccaagccgaagatgaacaaggccgtgtcgggttttacttggggaagaatctaccaaaagccgctactcgtgcttttgtagaaaacctcaaggttataacacccaagattcttcccgtaaccgagcttataaggttcatgttaaagcttcttatcaagaaaatcaagattcgtcaaaaccctagcaagggctccacgaatctcccaccggggactccattaaaggcaggaatcaacttcaagaccgggatcgaacatttttgcatacataccggaggaaaagctgtgattgatgggattggacatagcttggatttaaacgagtatgatattgaacctgcgaggatgactcttcaccggtttggcaatacttcggcgagtagtttgtggtatgtgttggcttacatggaggccaagaagagattgaagagaggagatagagtttttatgataagctttggagctggttttaagtgtaatagctgcgtttgggaagttgtgagagatcttactggtggtgaatcaaaaggaaatgtgtggaatcattgcattgatgattatccaccaaaatcgattctgaatccttatttggagaagtttggctggattcaagatgaagatcctgacactttcaaggtccctgacgctttcatgtaaaacgtttacgcacaaaaacgcaaacgcaaacgcaaaaacaacacaaggtgatacaatattctctctttcttaatttcttcttttttgcctttagttaaaatttttacgtttttttgtttaaatggattggaaaggagatatgaatgtaaaagaaactttaattagttttttttttaatatgattttttttgggtgttataatttgttaattacatactttgaaataagggttttaagggacatgcacttccaatacgatgagaatttactaatttgccatcatattggaatgctgccttctttttttcttgttaaatgttgtatcaattttatattttttgtaatgttcatttttcactctatgttgtacttgtttcgcattaactcaagcttgccactgg

SEQ ID NO: 40710 - protein, 476 aa, Arabidopsis thaliana
  peptide (1)..(476): Ceres Seq. ID no. 12371154
MDLLFLFFSLLLSYLFFKIWKLIDSKQDKDCYILDYQCHKPTDDRMVSTQFSGEIIYRNQNLGLTEYKFLLKAIVSSGIGEQTYAPRLVFEGREERPSLQDGISEMEEFYVDSIGKLLERNQISPKDIDILVVNVSMLSSTPSLASRIINHYKMRDDVKVFNLTGMGCSASLISVDIVKNIFKSYANKLALVATSESLSPNWYSGNNRSMILANCLFRSGGCAILLTNKRSLRKKAMFKLKCMVRTHHGAREESYNCCIQAEDEQGRVGFYLGKNLPKAATRAFVENLKVITPKILPVTELIRFMLKLLIKKIKIRQNPSKGSTNLPPGTPLKAGINFKTGIEHFCIHTGGKAVIDGIGHSLDLNEYDIEPARMTLHRFGNTSASSLWYVLAYMEAKKRLKRGDRVFMISFGAGFKCNSCVWEVVRDLTGGESKGNVWNHCIDDYPPKSILNPYLEKFGWIQDEDPDTFKVPDAFM

SEQ ID NO: 40711 - protein, 431 aa, Arabidopsis thaliana
  peptide (1)..(431): Ceres Seq. ID no. 12371155
MVSTQFSGEIIYRNQNLGLTEYKFLLKAIVSSGIGEQTYAPRLVFEGREERPSLQDGISEMEEFYVDSIGKLLERNQISPKDIDILVVNVSMLSSTPSLASRIINHYKMRDDVKVFNLTGMGCSASLISVDIVKNIFKSYANKLALVATSESLSPNWYSGNNRSMILANCLFRSGGCAILLTNKRSLRKKAMFKLKCMVRTHHGAREESYNCCIQAEDEQGRVGFYLGKNLPKAATRAFVENLKVITPKILPVTELIRFMLKLLIKKIKIRQNPSKGSTNLPPGTPLKAGINFKTGIEHFCIHTGGKAVIDGIGHSLDLNEYDIEPARMTLHRFGNTSASSLWYVLAYMEAKKRLKRGDRVFMISFGAGFKCNSCVWEVVRDLTGGESKGNVWNHCIDDYPPKSILNPYLEKFGWIQDEDPDTFKVPDAFM

SEQ ID NO: 40712 - protein, 371 aa, Arabidopsis thaliana
  peptide (1)..(371): Ceres Seq. ID no. 12371156
MEEFYVDSIGKLLERNQISPKDIDILVVNVSMLSSTPSLASRIINHYKMRDDVKVFNLTGMGCSASLISVDIVKNIFKSYANKLALVATSESLSPNWYSGNNRSMILANCLFRSGGCAILLTNKRSLRKKAMFKLKCMVRTHHGAREESYNCCIQAEDEQGRVGFYLGKNLPKAATRAFVENLKVITPKILPVTELIRFMLKLLIKKIKIRQNPSKGSTNLPPGTPLKAGINFKTGIEHFCIHTGGKAVIDGIGHSLDLNEYDIEPARMTLHRFGNTSASSLWYVLAYMEAKKRLKRGDRVFMISFGAGFKCNSCVWEVVRDLTGGESKGNVWNHCIDDYPPKSILNPYLEKFGWIQDEDPDTFKVPDAFM

SEQ ID NO: 40713 - DNA, 1136 bp, Arabidopsis thaliana; identical to SEQ ID NO: 29803
  misc_feature (1)..(1136): Ceres Seq. ID no. 12330223
  misc_feature (1)..(1136): Ortholog of  Ceres SEQ ID NO 13594163 as cited in SEQ ID NO 60426

SEQ ID NO: 40714 - protein, 343 aa, Arabidopsis thaliana; identical to SEQ ID NO: 29804
  peptide (1)..(343): Ceres Seq. ID no. 12330224

SEQ ID NO: 40715 - protein, 300 aa, Arabidopsis thaliana; identical to SEQ ID NO: 29805
  peptide (1)..(300): Ceres Seq. ID no. 12330225

SEQ ID NO: 40716 - protein, 186 aa, Arabidopsis thaliana; identical to SEQ ID NO: 29806
  peptide (1)..(186): Ceres Seq. ID no. 12330226

SEQ ID NO: 40717 - DNA, 1152 bp, Arabidopsis thaliana
  misc_feature (1)..(1152): Ceres Seq. ID no. 12327583
  misc_feature (1)..(1152): Ortholog of  Ceres SEQ ID NO 13594193 as cited in SEQ ID NO 58558
  misc_feature (1)..(1152): Ortholog of  Ceres SEQ ID NO 15177545 as cited in SEQ ID NO 0
aacacaaagtcataacagtcgtttaaagtctgatcctttcttttttatttttctttagtgtgtaaaaagagaaatacagttatggcggagatctcgggaaacggtggtgatgctagagacggagctgtggtggtcaatctcaaggaagaagacgaacaacaacaacaacaacaagctattcataaacccttgaagaaacaagactctctcctctctatctctgtccctttcttacaaaagttgatggcggaggttttgggaacatacttcttgatattcgccggttgtgccgcggtggctgtaaacacacaacatgacaaagccgtgactcttccagggatcgccatcgtttggggacttaccgtcatggtccttgtttactctctcggtcacatctccggtgctcatttcaatccggccgtcacaatcgcattcgcttcttgcggccgtttccctcttaaacaggttccggcttatgtgatatcacaagtgatcggatcaacgctagcggcggcgactttacggctcttgttcggacttgatcaagatgtttgtagtgggaaacacgatgtgttcgtcggaacattaccatctggatcgaatttgcagtcgtttgtgatcgagtttatcattactttctacctaatgttcgttatttctggcgttgccaccgataatagagcgatcggagaacttgctggactagcagtaggatcaacagtgctacttaacgtgataattgccgggccggtatcgggagcatcgatgaatccaggacgaagtttaggacctgcaatggtctacagttgctacagaggactttggatctacatagtttctccaattgttggtgcagtttcgggtgcgtgggtttataacatggttcgatatactgataagccattacgagaaataactaaaagcggttcttttttaaagacagtgcgaaacggtagctctcgttaagaaaaagaaaaacatgactatgttgtactagtcatcggaggttaagttgtatcactaaagaagtaactggaatattttgtattaaagtgtttttaaatttggattaccgcaaatggataaacatttatggtatgtgacgaatatgtaactgatctataacgagtttggccatatctaattacgtgc

SEQ ID NO: 40718 - protein, 294 aa, Arabidopsis thaliana
  peptide (1)..(294): Ceres Seq. ID no. 12327584
MAEISGNGGDARDGAVVVNLKEEDEQQQQQQAIHKPLKKQDSLLSISVPFLQKLMAEVLGTYFLIFAGCAAVAVNTQHDKAVTLPGIAIVWGLTVMVLVYSLGHISGAHFNPAVTIAFASCGRFPLKQVPAYVISQVIGSTLAAATLRLLFGLDQDVCSGKHDVFVGTLPSGSNLQSFVIEFIITFYLMFVISGVATDNRAIGELAGLAVGSTVLLNVIIAGPVSGASMNPGRSLGPAMVYSCYRGLWIYIVSPIVGAVSGAWVYNMVRYTDKPLREITKSGSFLKTVRNGSSR

SEQ ID NO: 40719 - protein, 240 aa, Arabidopsis thaliana
  peptide (1)..(240): Ceres Seq. ID no. 12327585
MAEVLGTYFLIFAGCAAVAVNTQHDKAVTLPGIAIVWGLTVMVLVYSLGHISGAHFNPAVTIAFASCGRFPLKQVPAYVISQVIGSTLAAATLRLLFGLDQDVCSGKHDVFVGTLPSGSNLQSFVIEFIITFYLMFVISGVATDNRAIGELAGLAVGSTVLLNVIIAGPVSGASMNPGRSLGPAMVYSCYRGLWIYIVSPIVGAVSGAWVYNMVRYTDKPLREITKSGSFLKTVRNGSSR

SEQ ID NO: 40720 - protein, 199 aa, Arabidopsis thaliana
  peptide (1)..(199): Ceres Seq. ID no. 12327586
MVLVYSLGHISGAHFNPAVTIAFASCGRFPLKQVPAYVISQVIGSTLAAATLRLLFGLDQDVCSGKHDVFVGTLPSGSNLQSFVIEFIITFYLMFVISGVATDNRAIGELAGLAVGSTVLLNVIIAGPVSGASMNPGRSLGPAMVYSCYRGLWIYIVSPIVGAVSGAWVYNMVRYTDKPLREITKSGSFLKTVRNGSSR

SEQ ID NO: 40721 - DNA, 1319 bp, Arabidopsis thaliana
  misc_feature (1)..(1319): Ceres Seq. ID no. 12329728
  misc_feature (1)..(1319): Ortholog of  Ceres SEQ ID NO 13593955 as cited in SEQ ID NO 54278
  misc_feature (1)..(1319): Ortholog of  Ceres SEQ ID NO 13655302 as cited in SEQ ID NO 63307
  misc_feature (1)..(1319): Ortholog of  Ceres SEQ ID NO 13597380 as cited in SEQ ID NO 64054
  misc_feature (1)..(1319): Ortholog of  Ceres SEQ ID NO 12625474 as cited in SEQ ID NO 64169
  misc_feature (1)..(1319): Ortholog of  Ceres SEQ ID NO 13597502 as cited in SEQ ID NO 64681
cagactactcatttgtctccactccaaactttcacaacaatgagaagtcatcacagacattcttcttcatatgtttccttcatcctcttcctattcctgttcttcatctccttctcatcctcaacatcaaaactcgaacccgcaaagtctgaacctaaaagaaaacattcagtttcagctattctcgtgttcggagattcaacagtggatccgggcaataacaactacattgacacagtattcaagtgtaattttccgccctatggactcgatttcagaaacaaaactccgaccggtagattttgcaacggtcgactcgtcacagattttatcgcttcatacattggtgtgaaggagaatgtgccaccgtatttggacccaaatcttggaataaatgagttaataagtggagttagctttgcttcagctggctctggatatgatcctctcactccaaccataactaacgtgatagacattccgactcagctagagtatttcagagaatacaagagaaaattggagggtaaaatgggaaaacaagaaatggaaaaacacatagaagaagctatgttttgtgtaagtgcaggaaccaacgatttcgtcattaattatttcacaattcccatacgaaggaagacttttactatcgaagcttatcaacaattcgttatttccaatctcaagcaatttatccagggtttgtggaaagaaggagcaagaaagataacagtggcaggtttaccaccgattgggtgtttgccgattgttataacattattctccggcgaagcattgaccaaccgtcgttgcattgaccgtttctccactgtggccacaaactacaatttcctcttacaaaaacaattggccctcatgcaagtgggtttggcccatcttggatccaaaatcttttacctcgacgtctatgacccagtttatgaggtcattcgtgaccctcgaaaattcgggtttgaggaagtcttcagtggatgttgtggaagtggatacctagaggcatcgtttttgtgtaatccaaagtcatatgtgtgtcccaatacatctgcttatgtcttctttgactctatccatccaagtgagaagacttacttcagtctttttagatctctccgaccaatttatgattctattctcggttctttctgaaatttttaattaatattatgatcactattagctaattgataagttaatttcaatttacatacacctctttcttccattatgagtgacgaaatgtaatgatggtctatgtgttaatatttcagtttgaaatgcaaaataattagtgtacttgc

SEQ ID NO: 40722 - protein, 388 aa, Arabidopsis thaliana
  peptide (1)..(388): Ceres Seq. ID no. 12329729
QTTHLSPLQTFTTMRSHHRHSSSYVSFILFLFLFFISFSSSTSKLEPAKSEPKRKHSVSAILVFGDSTVDPGNNNYIDTVFKCNFPPYGLDFRNKTPTGRFCNGRLVTDFIASYIGVKENVPPYLDPNLGINELISGVSFASAGSGYDPLTPTITNVIDIPTQLEYFREYKRKLEGKMGKQEMEKHIEEAMFCVSAGTNDFVINYFTIPIRRKTFTIEAYQQFVISNLKQFIQGLWKEGARKITVAGLPPIGCLPIVITLFSGEALTNRRCIDRFSTVATNYNFLLQKQLALMQVGLAHLGSKIFYLDVYDPVYEVIRDPRKFGFEEVFSGCCGSGYLEASFLCNPKSYVCPNTSAYVFFDSIHPSEKTYFSLFRSLRPIYDSILGSF

SEQ ID NO: 40723 - protein, 375 aa, Arabidopsis thaliana
  peptide (1)..(375): Ceres Seq. ID no. 12329730
MRSHHRHSSSYVSFILFLFLFFISFSSSTSKLEPAKSEPKRKHSVSAILVFGDSTVDPGNNNYIDTVFKCNFPPYGLDFRNKTPTGRFCNGRLVTDFIASYIGVKENVPPYLDPNLGINELISGVSFASAGSGYDPLTPTITNVIDIPTQLEYFREYKRKLEGKMGKQEMEKHIEEAMFCVSAGTNDFVINYFTIPIRRKTFTIEAYQQFVISNLKQFIQGLWKEGARKITVAGLPPIGCLPIVITLFSGEALTNRRCIDRFSTVATNYNFLLQKQLALMQVGLAHLGSKIFYLDVYDPVYEVIRDPRKFGFEEVFSGCCGSGYLEASFLCNPKSYVCPNTSAYVFFDSIHPSEKTYFSLFRSLRPIYDSILGSF

SEQ ID NO: 40724 - protein, 211 aa, Arabidopsis thaliana
  peptide (1)..(211): Ceres Seq. ID no. 12329731
MGKQEMEKHIEEAMFCVSAGTNDFVINYFTIPIRRKTFTIEAYQQFVISNLKQFIQGLWKEGARKITVAGLPPIGCLPIVITLFSGEALTNRRCIDRFSTVATNYNFLLQKQLALMQVGLAHLGSKIFYLDVYDPVYEVIRDPRKFGFEEVFSGCCGSGYLEASFLCNPKSYVCPNTSAYVFFDSIHPSEKTYFSLFRSLRPIYDSILGSF

SEQ ID NO: 40725 - DNA, 1541 bp, Arabidopsis thaliana
  misc_feature (1)..(1541): Ceres Seq. ID no. 12600340
  misc_feature (1)..(1541): Ortholog of  Ceres SEQ ID NO 14311870 as cited in SEQ ID NO 51574
  misc_feature (1)..(1541): Ortholog of  Ceres SEQ ID NO 15174583 as cited in SEQ ID NO 53693
  misc_feature (1)..(1541): Ortholog of  Ceres SEQ ID NO 13581563 as cited in SEQ ID NO 58942
  misc_feature (1)..(1541): Ortholog of  Ceres SEQ ID NO 13658707 as cited in SEQ ID NO 66286
  misc_feature (1)..(1541): Ortholog of  Ceres SEQ ID NO 13654528 as cited in SEQ ID NO 68080
agattttactctcatcctaaataaacctctcttcatcgaaaatgtggagactctctgtgtcaattttcctcttctcatgtctcttcgtttcttcgtcttcgttgggcgattcggaggcgacgtgttccggtatagttccgttacggtaccggtacgataagatctcgataaccgactttggaggcgttggagatggtcgaacggtgaatactaaggcgtttagggcggcgatttatcggattcagcatctgaagaggagaggaggcacgcttttgtatatacctccgggagtgtatttgacggagagcttcaatctcactagccatatgactctttacttagctaaaggtgctgtgattagagctgttcaggatacctggaattggccattgattgatcctttgccgtcttatggaagagggagagagttaccagggggacggtatatgagctttattcatggtgatgggcttcgtgatgtagtcatcactggacaaaatgggacaatagacggtcaaggagaagtgtggtggaacatgtggcgtagtagaacgctaaagtacacaagaccgaacttaatcgagttcaaggactctaaggagatcataatctccaatgttattttccaaaattcacctttctggaacattcatcctgtgtattgcagcaacgttgtcatccatcacgttacgatcttagctccacaagattctcccaacaccgatggaatcgatccagattccagctacaacgtctgcatagaagactcctacatctcaacaggagacgacctagtggccatcaaaagcggttgggaccagtacggaatcgcctatggccgtccaagctcaaacataacaatccgccgcatcacaggatcttccccgttcgcaggtatcgcaataggaagcgaaacatcaggaggaatcaagaacattatagcagaacatatcactctctccaatatgggagttggagtcaacatcaagacaaacattggtcgtggaggatacattaaaaacatcaaaatatcagacgtctatgtagacaccgcaaagtatgggatcaagatcgccggcgacacgggagatcatccggacgagaattataacccgaacgctcttccagttgttaagggaatacatatcaagaacgtttggggagttaacgttcgaaacgctggctctattcaaggtcttaagggctcaccatttacgggtatatgtttgagtgagattaatctacatggaagcttgaattcgtataagacgtggaagtgttcggatgtcagtggaacttcactaaaggttagtccttggccgtgttcggagctgagaactaccggcgggtctaatttgtgttcttccacattctaaaaacttctgagcaagttcttacctctttggttcaatttttttttgaaataatttatctccagtttgcagttcctccatttatatatatgtttgtactttgtatgttttaaaaaaattatgtaatgaattgtaatttgaaaaatgaagaaagtttaacaaaataag

SEQ ID NO: 40726 - protein, 444 aa, Arabidopsis thaliana
  peptide (1)..(444): Ceres Seq. ID no. 12600341
MWRLSVSIFLFSCLFVSSSSLGDSEATCSGIVPLRYRYDKISITDFGGVGDGRTVNTKAFRAAIYRIQHLKRRGGTLLYIPPGVYLTESFNLTSHMTLYLAKGAVIRAVQDTWNWPLIDPLPSYGRGRELPGGRYMSFIHGDGLRDVVITGQNGTIDGQGEVWWNMWRSRTLKYTRPNLIEFKDSKEIIISNVIFQNSPFWNIHPVYCSNVVIHHVTILAPQDSPNTDGIDPDSSYNVCIEDSYISTGDDLVAIKSGWDQYGIAYGRPSSNITIRRITGSSPFAGIAIGSETSGGIKNIIAEHITLSNMGVGVNIKTNIGRGGYIKNIKISDVYVDTAKYGIKIAGDTGDHPDENYNPNALPVVKGIHIKNVWGVNVRNAGSIQGLKGSPFTGICLSEINLHGSLNSYKTWKCSDVSGTSLKVSPWPCSELRTTGGSNLCSSTF

SEQ ID NO: 40727 - protein, 349 aa, Arabidopsis thaliana
  peptide (1)..(349): Ceres Seq. ID no. 12600342
MTLYLAKGAVIRAVQDTWNWPLIDPLPSYGRGRELPGGRYMSFIHGDGLRDVVITGQNGTIDGQGEVWWNMWRSRTLKYTRPNLIEFKDSKEIIISNVIFQNSPFWNIHPVYCSNVVIHHVTILAPQDSPNTDGIDPDSSYNVCIEDSYISTGDDLVAIKSGWDQYGIAYGRPSSNITIRRITGSSPFAGIAIGSETSGGIKNIIAEHITLSNMGVGVNIKTNIGRGGYIKNIKISDVYVDTAKYGIKIAGDTGDHPDENYNPNALPVVKGIHIKNVWGVNVRNAGSIQGLKGSPFTGICLSEINLHGSLNSYKTWKCSDVSGTSLKVSPWPCSELRTTGGSNLCSSTF

SEQ ID NO: 40728 - protein, 309 aa, Arabidopsis thaliana
  peptide (1)..(309): Ceres Seq. ID no. 12600343
MSFIHGDGLRDVVITGQNGTIDGQGEVWWNMWRSRTLKYTRPNLIEFKDSKEIIISNVIFQNSPFWNIHPVYCSNVVIHHVTILAPQDSPNTDGIDPDSSYNVCIEDSYISTGDDLVAIKSGWDQYGIAYGRPSSNITIRRITGSSPFAGIAIGSETSGGIKNIIAEHITLSNMGVGVNIKTNIGRGGYIKNIKISDVYVDTAKYGIKIAGDTGDHPDENYNPNALPVVKGIHIKNVWGVNVRNAGSIQGLKGSPFTGICLSEINLHGSLNSYKTWKCSDVSGTSLKVSPWPCSELRTTGGSNLCSSTF

SEQ ID NO: 40729 - DNA, 1155 bp, Arabidopsis thaliana
  misc_feature (1)..(1155): Ceres Seq. ID no. 12330230
  misc_feature (1)..(1155): Ortholog of  Ceres SEQ ID NO 14316440 as cited in SEQ ID NO 58263
  misc_feature (1)..(1155): Ortholog of  Ceres SEQ ID NO 14302462 as cited in SEQ ID NO 65678
acaaacaaagatctgagagatggatgaagaactcaagaacttgatcaaagtatgggtttctgcaataatctcgatatcttattgttactacataccacctagaatcaaatctggtgctcctcgattcctctctgtttcccctgttcttgctctgtttcttgttcttcctctgtttttctcctctctgcatttatctttaatcacagcgtttttcctcacatggcttgctaatttcaaactcatcctcttctccttcgataaaggtcctttaatcccaattccaacaaatttccctcgattcttctgcttcacttgcttccccatcaaggttcagcaaaaccctaaatctcaaaaccatttgcccaaattggttttcgccattaaacttgcaatctttgcagtgctattacatttgtatagctacagacaaaatctgtctccgactatactattaggtctctattttgtgcatctctacttagagattgagattatattaacgtttgttaaagttgttgtttttatctctcttggctgcgatcttgagccacagtccaataaaccgtacttagccacatctctacaagacttctggggtcgccggtggaatctcatggttccggcgattctccggccagccgtttacgcaccaatgcggcgagtctctgaacgcaaaatgagttccggttgggctctgtttccggggattttggcagcgtttatcgtctccggtttggttcacgaattgctcttcttctatttgatacgtgagatgcctacaggagaagttactctgttctttgtgttacatggcgtttgtactgctgtagaattggcggtgaagaagaaaacgacggtagcacagcggtggcggttgagtccgggggtgtcgcgggttctcacggtggggtttgtgtttgtgactggtggttggttgtttacacctcagcttaaaaggagcggggtgatggagagattcacatctgaagctgtgttgctcgttgagttcattaagcgataagttattttatttacgttgttggggatattttataacgagtgttaaatgagcacgagttaacgttattgagtccggttgagcatcaaagtccataatggtcaactacttatcttgaaatgaatcgaacttgtctt

SEQ ID NO: 40730 - protein, 333 aa, Arabidopsis thaliana
  peptide (1)..(333): Ceres Seq. ID no. 12330231
MDEELKNLIKVWVSAIISISYCYYIPPRIKSGAPRFLSVSPVLALFLVLPLFFSSLHLSLITAFFLTWLANFKLILFSFDKGPLIPIPTNFPRFFCFTCFPIKVQQNPKSQNHLPKLVFAIKLAIFAVLLHLYSYRQNLSPTILLGLYFVHLYLEIEIILTFVKVVVFISLGCDLEPQSNKPYLATSLQDFWGRRWNLMVPAILRPAVYAPMRRVSERKMSSGWALFPGILAAFIVSGLVHELLFFYLIREMPTGEVTLFFVLHGVCTAVELAVKKKTTVAQRWRLSPGVSRVLTVGFVFVTGGWLFTPQLKRSGVMERFTSEAVLLVEFIKR

SEQ ID NO: 40731 - DNA, 1233 bp, Arabidopsis thaliana
  misc_feature (1)..(1233): Ceres Seq. ID no. 12336230
  misc_feature (1)..(1233): Ortholog of  Ceres SEQ ID NO 13599003 as cited in SEQ ID NO 0
  misc_feature (1)..(1233): Ortholog of  Ceres SEQ ID NO 15177512 as cited in SEQ ID NO 0
attcgtcgatcgagcgataagaagaagactggaatttttttgaggaggactctgctccatcgccgcccgccctgtaacccaccggactcagtaaactagtctgtaacacaatatcttctatttcagataagatttagcttggagaagagcaagttccgaaaatggaggggcgtcgtgtatagatccaccacccacagccctgatggaagcagacaacggaggccccaattctagtcatgcatccaaacaacgtctgcgttggacgcatgagctacatgaacgcttcgttgatgccgttgctcaacttggtggccctgatagagctacacccaaaggcgttcttagagtgatgggtgtacaaggcttaactatatatcatgtcaagagtcacttacagaaatatcgacttgcaaagtatcttccagattcgtcttctgaagggaaaaaaactgataagaaagaatctggagatatgctctctgggttggacggctcgtcgggaatgcagataactgaagccctcaagttgcagatggaagttcagaaacgattacacgagcaactagaagtgcaaagacagctgcaactacggatagaagcacaaggaaagtacttgaagaagataattgaagagcaacaacgactcagtggagtactcggcgaaccctcagccccagtaacgggcgattcagatcctgcaacccctgccccaacatctgagtctcctcttcaagacaagtctggcaaggactgtggaccagacaaaagtctctcagttgacgagtctctctcatcttaccgggagcctttaacaccagactcagggtgtaacattgggtctccagatgagagcacaggagaggagagattatcaaagaagcctcgattggtgagaggtgcagctggttatacacctgatattgtagtgggtcacccaatactagaatcaggcttgaacacttcttaccatcagtcagaccatgtcctcgcctttgaccagccatctacatcactgcttggggccgaagaacagttggataaggtttcaggagataatctttgagttgttgagtgtaccacatgtagtgttgtttatcctaatccttattagttaggagtttcctctaataatgtgatcacaagtcgttaattctctaggcactatcacgagcatgaagaatgaatatgtctgtgttgtgctgtaatttggtaaacacaaaacaaaattactct

SEQ ID NO: 40732 - protein, 286 aa, Arabidopsis thaliana
  peptide (1)..(286): Ceres Seq. ID no. 12336231
MEADNGGPNSSHASKQRLRWTHELHERFVDAVAQLGGPDRATPKGVLRVMGVQGLTIYHVKSHLQKYRLAKYLPDSSSEGKKTDKKESGDMLSGLDGSSGMQITEALKLQMEVQKRLHEQLEVQRQLQLRIEAQGKYLKKIIEEQQRLSGVLGEPSAPVTGDSDPATPAPTSESPLQDKSGKDCGPDKSLSVDESLSSYREPLTPDSGCNIGSPDESTGEERLSKKPRLVRGAAGYTPDIVVGHPILESGLNTSYHQSDHVLAFDQPSTSLLGAEEQLDKVSGDNL

SEQ ID NO: 40733 - protein, 237 aa, Arabidopsis thaliana
  peptide (1)..(237): Ceres Seq. ID no. 12336232
MGVQGLTIYHVKSHLQKYRLAKYLPDSSSEGKKTDKKESGDMLSGLDGSSGMQITEALKLQMEVQKRLHEQLEVQRQLQLRIEAQGKYLKKIIEEQQRLSGVLGEPSAPVTGDSDPATPAPTSESPLQDKSGKDCGPDKSLSVDESLSSYREPLTPDSGCNIGSPDESTGEERLSKKPRLVRGAAGYTPDIVVGHPILESGLNTSYHQSDHVLAFDQPSTSLLGAEEQLDKVSGDNL

SEQ ID NO: 40734 - protein, 196 aa, Arabidopsis thaliana
  peptide (1)..(196): Ceres Seq. ID no. 12336233
MLSGLDGSSGMQITEALKLQMEVQKRLHEQLEVQRQLQLRIEAQGKYLKKIIEEQQRLSGVLGEPSAPVTGDSDPATPAPTSESPLQDKSGKDCGPDKSLSVDESLSSYREPLTPDSGCNIGSPDESTGEERLSKKPRLVRGAAGYTPDIVVGHPILESGLNTSYHQSDHVLAFDQPSTSLLGAEEQLDKVSGDNL

SEQ ID NO: 40735 - DNA, 908 bp, Arabidopsis thaliana
  misc_feature (1)..(908): Ceres Seq. ID no. 13497431
  misc_feature (1)..(908): Ortholog of  Ceres SEQ ID NO 12624558 as cited in SEQ ID NO 61726
  misc_feature (1)..(908): Ortholog of  Ceres SEQ ID NO 12635763 as cited in SEQ ID NO 0
ttcagcggttctcgagtcatcgctgtctggaacagcgatacccccaaagcccatccttcaacattgcttcctaaccagaaatccaccatcatcttcccacgaatacaacttaaagctttaccagaaaatggagggtcagagaacacaacgccggggttacttgaaagacaaggctacagtctccaaccttgttgaagaagaaatggagaatggcatggatggagaagaggaggatggaggagacgaagacaaaaggaagaaggtgatggaaagagttagaggtcctagcactgaccgtgttccatcgcgactgtgccaggtcgataggtgcactgttaatttgactgaggccaagcagtattaccgcagacacagagtatgtgaagtacatgcaaaggcatctgctgcgactgttgcaggggtcaggcaacgcttttgtcaacaatgcagcaggtttcatgagctaccagagtttgatgaagctaaaagaagctgcaggaggcgcttagctggacacaatgagaggaggaggaagatctctggtgacagttttggagaagggtcaggccggagagggtttagcggtcaactgatccagactcaagaaagaaacagggtagacaggaaacttcctatgaccaactcatcattcaagcgaccacagatcagataaaccctcccgctctctctcttctgtcatctacatatgctctatctacactcttattagacaaataatggcatctaacaatgtcaagaaaagttggtcatggtattaaatcctacacggatatataactataaacctctagtcccctctatgctgtcctgtaatgaatatctatccggaaatgtattcgcatagtcttgcgtctaataatgtttattgattttgtaggtttgattat

SEQ ID NO: 40736 - protein, 223 aa, Arabidopsis thaliana
  peptide (1)..(223): Ceres Seq. ID no. 13497432
SAVLESSLSGTAIPPKPILQHCFLTRNPPSSSHEYNLKLYQKMEGQRTQRRGYLKDKATVSNLVEEEMENGMDGEEEDGGDEDKRKKVMERVRGPSTDRVPSRLCQVDRCTVNLTEAKQYYRRHRVCEVHAKASAATVAGVRQRFCQQCSRFHELPEFDEAKRSCRRRLAGHNERRRKISGDSFGEGSGRRGFSGQLIQTQERNRVDRKLPMTNSSFKRPQIR

SEQ ID NO: 40737 - protein, 181 aa, Arabidopsis thaliana
  peptide (1)..(181): Ceres Seq. ID no. 13497433
MEGQRTQRRGYLKDKATVSNLVEEEMENGMDGEEEDGGDEDKRKKVMERVRGPSTDRVPSRLCQVDRCTVNLTEAKQYYRRHRVCEVHAKASAATVAGVRQRFCQQCSRFHELPEFDEAKRSCRRRLAGHNERRRKISGDSFGEGSGRRGFSGQLIQTQERNRVDRKLPMTNSSFKRPQIR

SEQ ID NO: 40738 - protein, 156 aa, Arabidopsis thaliana
  peptide (1)..(156): Ceres Seq. ID no. 13497434
MENGMDGEEEDGGDEDKRKKVMERVRGPSTDRVPSRLCQVDRCTVNLTEAKQYYRRHRVCEVHAKASAATVAGVRQRFCQQCSRFHELPEFDEAKRSCRRRLAGHNERRRKISGDSFGEGSGRRGFSGQLIQTQERNRVDRKLPMTNSSFKRPQIR

SEQ ID NO: 40739 - DNA, 1999 bp, Arabidopsis thaliana
  misc_feature (1)..(1999): Ceres Seq. ID no. 12328234
  misc_feature (1)..(1999): Ortholog of  Ceres SEQ ID NO 14314144 as cited in SEQ ID NO 54403
  misc_feature (1)..(1999): Ortholog of  Ceres SEQ ID NO 15225015 as cited in SEQ ID NO 0
agcaaggttactgcaaggttaaagcgggaagtgagcaacgagaggcagcggcggccgtcatggattcatcggcgaacataaacaaagctctaacggagacgcgtttctccgacctcgaacctccactctccggagatatcattgaggctcttaatcagtctgatttcgagttctgcactccggttcaagccgcgacgatccctttactctgtagttacaaggatgttgccgtcgacgctgccactggttctggaaaaaccctagctttcgtcgttcccctcgtagaaatcctccgtcgatccacctcattccctccgaagcctcaccaggtcatgggggtgattatatcgccaacgagagagctatcaacgcagatatataatgtcgcacaaccatttgtttcgactttggcaaatgtgaactctgtgttgcttgttggaggccgagaggtgaaagctgacatgaagattattgaagaagaaggatgcaatgtcttgattggtacacctggaagactttctgatattatggaacgaatggagattctggattttcgaaatcttgagattcttattctagatgaggcagataggcttttggagatggggttccaaaggcaggtgaattacattatctcacgcttgccaaagcagaggaggactggcctcttttcagctacacaaacagagggcgttgaagagctcgccaaggctgggcttaggaaccctgtgagagttgaagttcgagctaagtcgaagtcggaatcatcccagcaattgacaaactcgaaaaccccttctggtcttcatcttgagtatatggaatgcgaagcagataaaaaatcatcacaactagttgatctcctcatcaagaacagtgataaaaagcttatagtattcttcatgacctgtgcttctgttgactactggggactcgtactttcaaaaattcctgccctgaagtccatatctttaattcctatccatggggatatgaagcagaatgcaagagacaaggcattagcttcgtttactaaagcatcaagtggtgcccttctgtgcacagacgttgctgcacgtggacttgatattccaggcattgattatgttgttcagtatgatcccccacaagacccaaatatgttcaaccacagggccggcagaactgcaagattaggaagacaagggagggccattgtgtttttactgcccaaggaagaagcctatgtagagtttatgcgcataagaagagtccctttggaagagagaaaatgctctgaggacgcatccgatgtcatcccgattatacgttcagctgccatgaaggaccgagcagtgatggagaagggattaaaggcatttgtttcctttgtccgtgcttataaggagcatcactgctctttcattttcagatggaaagaccttgagattggaaagttagccatgggatatggcctcttgtatcttccttcaatgtctgaagttaaacaacacagactttccagtgagggtttcacaccagttgaaggtgtcaagtttgaagaaataaaattcaaggacaaatatcgggagaaacaaagacagcaaaacttacaagtaaggaaagagaaacggcaagaagagaaaaaagagaaaggcaagagaaaaagggttgatgcttctgctagtaatgatcctaagaaagcgtcgagaaagttaacggggaaacaaagacaaactattcaaactgctgaagatgaagaagtgatggatcgagattataagttgatgataaaagtaaagaaagggttaattaaagaagatgaatatgaaagacttacaggagatgatgatttattctgatgagaagaaacaaaacctgcatgctgagattggactaagcttagtgtctttctactctcatatcatatgtgattctgttaattttttttttttttttgggtgagaattaatatcggatcatgttatgtcctttttcgttctacgagtctcacttttat

SEQ ID NO: 40740 - protein, 612 aa, Arabidopsis thaliana
  peptide (1)..(612): Ceres Seq. ID no. 12328235
QGYCKVKAGSEQREAAAAVMDSSANINKALTETRFSDLEPPLSGDIIEALNQSDFEFCTPVQAATIPLLCSYKDVAVDAATGSGKTLAFVVPLVEILRRSTSFPPKPHQVMGVIISPTRELSTQIYNVAQPFVSTLANVNSVLLVGGREVKADMKIIEEEGCNVLIGTPGRLSDIMERMEILDFRNLEILILDEADRLLEMGFQRQVNYIISRLPKQRRTGLFSATQTEGVEELAKAGLRNPVRVEVRAKSKSESSQQLTNSKTPSGLHLEYMECEADKKSSQLVDLLIKNSDKKLIVFFMTCASVDYWGLVLSKIPALKSISLIPIHGDMKQNARDKALASFTKASSGALLCTDVAARGLDIPGIDYVVQYDPPQDPNMFNHRAGRTARLGRQGRAIVFLLPKEEAYVEFMRIRRVPLEERKCSEDASDVIPIIRSAAMKDRAVMEKGLKAFVSFVRAYKEHHCSFIFRWKDLEIGKLAMGYGLLYLPSMSEVKQHRLSSEGFTPVEGVKFEEIKFKDKYREKQRQQNLQVRKEKRQEEKKEKGKRKRVDASASNDPKKASRKLTGKQRQTIQTAEDEEVMDRDYKLMIKVKKGLIKEDEYERLTGDDDLF

SEQ ID NO: 40741 - protein, 593 aa, Arabidopsis thaliana
  peptide (1)..(593): Ceres Seq. ID no. 12328236
MDSSANINKALTETRFSDLEPPLSGDIIEALNQSDFEFCTPVQAATIPLLCSYKDVAVDAATGSGKTLAFVVPLVEILRRSTSFPPKPHQVMGVIISPTRELSTQIYNVAQPFVSTLANVNSVLLVGGREVKADMKIIEEEGCNVLIGTPGRLSDIMERMEILDFRNLEILILDEADRLLEMGFQRQVNYIISRLPKQRRTGLFSATQTEGVEELAKAGLRNPVRVEVRAKSKSESSQQLTNSKTPSGLHLEYMECEADKKSSQLVDLLIKNSDKKLIVFFMTCASVDYWGLVLSKIPALKSISLIPIHGDMKQNARDKALASFTKASSGALLCTDVAARGLDIPGIDYVVQYDPPQDPNMFNHRAGRTARLGRQGRAIVFLLPKEEAYVEFMRIRRVPLEERKCSEDASDVIPIIRSAAMKDRAVMEKGLKAFVSFVRAYKEHHCSFIFRWKDLEIGKLAMGYGLLYLPSMSEVKQHRLSSEGFTPVEGVKFEEIKFKDKYREKQRQQNLQVRKEKRQEEKKEKGKRKRVDASASNDPKKASRKLTGKQRQTIQTAEDEEVMDRDYKLMIKVKKGLIKEDEYERLTGDDDLF

SEQ ID NO: 40742 - protein, 502 aa, Arabidopsis thaliana
  peptide (1)..(502): Ceres Seq. ID no. 12328237
MGVIISPTRELSTQIYNVAQPFVSTLANVNSVLLVGGREVKADMKIIEEEGCNVLIGTPGRLSDIMERMEILDFRNLEILILDEADRLLEMGFQRQVNYIISRLPKQRRTGLFSATQTEGVEELAKAGLRNPVRVEVRAKSKSESSQQLTNSKTPSGLHLEYMECEADKKSSQLVDLLIKNSDKKLIVFFMTCASVDYWGLVLSKIPALKSISLIPIHGDMKQNARDKALASFTKASSGALLCTDVAARGLDIPGIDYVVQYDPPQDPNMFNHRAGRTARLGRQGRAIVFLLPKEEAYVEFMRIRRVPLEERKCSEDASDVIPIIRSAAMKDRAVMEKGLKAFVSFVRAYKEHHCSFIFRWKDLEIGKLAMGYGLLYLPSMSEVKQHRLSSEGFTPVEGVKFEEIKFKDKYREKQRQQNLQVRKEKRQEEKKEKGKRKRVDASASNDPKKASRKLTGKQRQTIQTAEDEEVMDRDYKLMIKVKKGLIKEDEYERLTGDDDLF

SEQ ID NO: 40743 - DNA, 1278 bp, Arabidopsis thaliana
  misc_feature (1)..(1278): Ceres Seq. ID no. 13491338
  misc_feature (1)..(1278): Ortholog of  Ceres SEQ ID NO 15169372 as cited in SEQ ID NO 58778
ctcccaaacctatcttcttcttcctctcttgtctctctcgctctctctcttctacattgtttcttgaggtcaatctattaaaaatgggattatattcactaatcacaggaagaagaggaccaagtggacttggttcagcttcaacagctgaagaggttactcaagggattgatgcaactaatctcactgcaattatcacaggagggacaggaggaatagggatggagacagcgagagtgctgtcgaagagaggtgctcatgtggtgatcggtgcccgaaacatgggagctgcagaaaacgccaaaacagagattctcagacaaaacgcaaacgcacgtgtcactcttcttcaattagatctctcttccatcaaatccatcaaagcctttgttcgtgaatttcatgccctccatcttcctctcaatctcctcataaacaatgcaggagtaatgttctgtccataccaactctctgaagatggaatcgaattgcagtttgctacaaatcacattggtcactttctgttgacaaacttgctcttggacacaatgaagaacacagctaaaaccagtggtgttgaaggaagaattttgaatgtatcatctgtagctcatatctatacttaccaagaaggaatccaattcgacagcatcaatgacatttgcagttactcggataagcgagcttacggacaatcgaaactagccaatatattgcatgctaatgagctctcccgtcagcttcaggaagaaggagtaaacataacagcaaattcagttcaccctggtcttattctcaccaatctcttccaacacactgctcttttaatgaggttcctgaagttcttcagcttctacttgtggaaaaatatacctcagggagcagcaacaacatgttatgttgctctgcatccaagtgtgaagggagtaacaggaaagtactttgctgattgcaacgaagtcactccaagcaaacttgctagagatgagactttggcacagaaactctgggatttcagtgttaagctcattaactcggtttctaaaaagaactacctcggtttcgatgacaccacttgaatctctacggtgttcttgttgaatgttacctaaagagtgaaaaaaaagtaagaacaagtagagattgtgatgtttctttccacattatcgtatggtaactcatgagatgcattgttgtatgcttaaatattttatcgagtgaatatgtaaccgcgtcaatcttttcatagtatggacaataaaaagaagggttgttcat

SEQ ID NO: 40744 - protein, 358 aa, Arabidopsis thaliana
  peptide (1)..(358): Ceres Seq. ID no. 13491339
PKPIFFFLSCLSRSLSSTLFLEVNLLKMGLYSLITGRRGPSGLGSASTAEEVTQGIDATNLTAIITGGTGGIGMETARVLSKRGAHVVIGARNMGAAENAKTEILRQNANARVTLLQLDLSSIKSIKAFVREFHALHLPLNLLINNAGVMFCPYQLSEDGIELQFATNHIGHFLLTNLLLDTMKNTAKTSGVEGRILNVSSVAHIYTYQEGIQFDSINDICSYSDKRAYGQSKLANILHANELSRQLQEEGVNITANSVHPGLILTNLFQHTALLMRFLKFFSFYLWKNIPQGAATTCYVALHPSVKGVTGKYFADCNEVTPSKLARDETLAQKLWDFSVKLINSVSKKNYLGFDDTT

SEQ ID NO: 40745 - protein, 331 aa, Arabidopsis thaliana
  peptide (1)..(331): Ceres Seq. ID no. 13491340
MGLYSLITGRRGPSGLGSASTAEEVTQGIDATNLTAIITGGTGGIGMETARVLSKRGAHVVIGARNMGAAENAKTEILRQNANARVTLLQLDLSSIKSIKAFVREFHALHLPLNLLINNAGVMFCPYQLSEDGIELQFATNHIGHFLLTNLLLDTMKNTAKTSGVEGRILNVSSVAHIYTYQEGIQFDSINDICSYSDKRAYGQSKLANILHANELSRQLQEEGVNITANSVHPGLILTNLFQHTALLMRFLKFFSFYLWKNIPQGAATTCYVALHPSVKGVTGKYFADCNEVTPSKLARDETLAQKLWDFSVKLINSVSKKNYLGFDDTT

SEQ ID NO: 40746 - protein, 285 aa, Arabidopsis thaliana; identical to SEQ ID NO: 36159
  peptide (1)..(285): Ceres Seq. ID no. 13491341

SEQ ID NO: 40747 - DNA, 1833 bp, Arabidopsis thaliana
  misc_feature (1)..(1833): Ceres Seq. ID no. 13490965
  misc_feature (1)..(1833): Ortholog of  Ceres SEQ ID NO 14305026 as cited in SEQ ID NO 52980
  misc_feature (1)..(1833): Ortholog of  Ceres SEQ ID NO 13655712 as cited in SEQ ID NO 63394
atctctctccctctctatctctctccctctctatctctctcttaccaatttccatttctcgggggaaaataataatacgacttttgaaatctctcactaatatttcccaagaaaacctgatgaattaaaagttcatattttcttggtgttgattggtattagatgactatttcttagtattagtcaattctctgtttccatcttatatggatagtctagacacagagcaaagatccttctttggagaaaaagaagatgagagacgagagaggatcgtttcttcacgtattggtcgtagatagatcttaatcgataaccatctaggccttgatctaaccattcaatataaactttatttccttcttcttttcgatctcaattgttccgaccaaacaagatgaagagatcacgtggaagctccgattctttatccggtttcttaccaattcgccattctacaacagacaaacaaataagcccaagaccaacaactaccggctttctctattccggcgccggagactactcccagatgtttgacgcattagaagacgacggaagtctagaggacctcggcggcgttggacacgcgtcttctacggcggcggagaaaaaacggcggttgggtgtagagcaagtgaaagcgttagagaagaatttcgagattgataacaagttagagccagagaggaaagtgaagctggctcaagagcttgggttgcagccacgccaagtcgcgatctggtttcaaaaccgccgtgctcggtggaagacaaagcagcttgaacgtgattacggcgttcttaagtcaaactttgatgcactcaaacgcaaccgcgactcgcttcaacgcgataacgattcactccttggacagattaaagagctgaaagcaaaacttaacgtggaaggggttaaaggtatagaagagaacggcgctttaaaagcagtggaagcaaatcaatcggtgatggctaataatgaagtcttagagctaagccaccgttctccatcgccaccaccgcatattcctacggacgctccgacatcggagctcgcattcgaaatgtttagcatttttccacgcacggaaaacttcagagacgatcctgccgatagcagcgactcaagcgcggttttgaacgaagagtatagtcccaatacggttgaagcagctggcgcagtggcggccacgactgtagaaatgtcgacgatgggttgttttagccaattcgtgaaaatggaagagcatgaagatctgtttagtggagaggaagcttgcaagttgtttgcggacaatgagcaatggtattgctccgatcagtggaattcgtaaaatgtgggggcagaattaaaagcatagaaaagctgaagggggtatgtggaaatattactgaagtcatattgggtcggaaaatgcattactcaaaatattggggtttttcttgagaaaatggaatatgacgcgagagggtagtaaaaacgagcgtgtggtgttccatgcacgtgtggccgtaatcttttcaaggttgaatgagagaggacaaaaaagtctgaaatcatcgggaataaaaaaaatatgtgacgaagaaatcgttttttcgtcgtttataatattatttgaataattttacttaggtgaatgtaatcgtcaaaaatctttaaattccgaagggttaaagattctgagcacgactaactatctatcctcttttattgttctcgtcgtccattgacgactatgcacaattcataagattattccctatgtacaatgtgtctttttagagaaacctatctgaattttgaaaatgttatataatttaattttgg

SEQ ID NO: 40748 - protein, 312 aa, Arabidopsis thaliana
  peptide (1)..(312): Ceres Seq. ID no. 13490966
MKRSRGSSDSLSGFLPIRHSTTDKQISPRPTTTGFLYSGAGDYSQMFDALEDDGSLEDLGGVGHASSTAAEKKRRLGVEQVKALEKNFEIDNKLEPERKVKLAQELGLQPRQVAIWFQNRRARWKTKQLERDYGVLKSNFDALKRNRDSLQRDNDSLLGQIKELKAKLNVEGVKGIEENGALKAVEANQSVMANNEVLELSHRSPSPPPHIPTDAPTSELAFEMFSIFPRTENFRDDPADSSDSSAVLNEEYSPNTVEAAGAVAATTVEMSTMGCFSQFVKMEEHEDLFSGEEACKLFADNEQWYCSDQWNS

SEQ ID NO: 40749 - protein, 267 aa, Arabidopsis thaliana
  peptide (1)..(267): Ceres Seq. ID no. 13490967
MFDALEDDGSLEDLGGVGHASSTAAEKKRRLGVEQVKALEKNFEIDNKLEPERKVKLAQELGLQPRQVAIWFQNRRARWKTKQLERDYGVLKSNFDALKRNRDSLQRDNDSLLGQIKELKAKLNVEGVKGIEENGALKAVEANQSVMANNEVLELSHRSPSPPPHIPTDAPTSELAFEMFSIFPRTENFRDDPADSSDSSAVLNEEYSPNTVEAAGAVAATTVEMSTMGCFSQFVKMEEHEDLFSGEEACKLFADNEQWYCSDQWNS

SEQ ID NO: 40750 - DNA, 972 bp, Arabidopsis thaliana
  misc_feature (1)..(972): Ceres Seq. ID no. 12325866
  misc_feature (1)..(972): Ortholog of  Ceres SEQ ID NO 12618205 as cited in SEQ ID NO 65153
aaaactagtcgtgactcgtcgtcgtctgatattaccagattcctgagaatttgagcctaatccttcatcaccaagctaagtctcaaggtttcacgagtacaataatgagtcaaaagggtttgatatatagctttgttgctaaaggaacagttgttctagcagagcatactccttattcaggaaactttagcaccattgctgttcaatgtctgcagaagctacccacaaatagcagcaagtatacttactcttgcgatggtcatactttcaatttccttgttgacaatggctttgtgtttctagtggttgctgatgagtccaccggaagaagtgttcctttcgtgtttctcgaacgggtcaaggaagactttaagaagcggtatgaagcgagtataaagaatgatgagcgacatcctcttgcggatgaggacgaagatgatgatttgtttggagatcggtttagcgttgcatacaatcttgacagggagttcgggcccatactaaaggagcatatgcagtattgtatgagccatccagaagagatgagcaaactttctaagttgaaggcccaaataactgaggtcaaggggatcatgatggacaacattgagaaggttctggacagaggagagaagatcgaacttctggttgacaaaaccgaaaacctacagttccaggcagatagcttccagagacaaggaaggcagttaagaaggaagatgtggctacagagtctgcagatgaagctgatggtggctggtgctgttttctcttttattctcatcgtttgggttgttgcttgtggaggtttcaaatgctcatcatgatgtttcgcttcgtttgtatctgttttaacacttaaattgcatgctcatgtttgtacatggaagaacttataataacatatcatcatatcatcatcatctcccacatgctgtgatgctatatatataaaaaaatgtttttgttttc

SEQ ID NO: 40751 - protein, 240 aa, Arabidopsis thaliana; identical to SEQ ID NO: 21608
  peptide (1)..(240): Ceres Seq. ID no. 12325867

SEQ ID NO: 40752 - DNA, 1945 bp, Arabidopsis thaliana
  misc_feature (1)..(1945): Ceres Seq. ID no. 12377546
  misc_feature (1)..(1945): Ortholog of  Ceres SEQ ID NO 14308851 as cited in SEQ ID NO 55618
aatctctcatttgttcttctgcataatctctcacacacttctatttctccctctccttgtcacaaggaaagggcgtagaagaaaccaaaacctaaacaaaagagcaataataactcattaaaaaaccaaaaccaaaaaaaaacaaaatgggtgtcaaaatgttattaatctttggtctcttgatcttagctatggtagctaaatccgtcaatgcaacctaccctttaaccaaatcttgcatcaacgggcaaggttgcatcggggaagacgatgagctcgaatctctaatggattcagagacaaaccgtcgtcaactcgcaagaggacgtcgttacattggctacgatgctctcaaaaagaacaatgtgccttgcagtagacgtggccgatcctactacgattgcaagaagagaagaaggaataatccttacaggcgtggatgcagtgccatcacgcattgctataggtacgctcgctaaatgatagagaggaagagatttgattcaacaacgtacgttcgtatcttcattggtgaaaaaggattgttatttgttgataaaaatttgatctttaaacaatgtttggttttgcataaaggtagaagaaaatggctgatggtgaagacattcaacctcttgtttgcgacaatggaactggaatggttaaggctggttttgctggggatgatgcacctagagctgtgtttcctagtattgtgggtcgtcctcgtcacaccggtgtgatggttgggatggggcaaaaggatgcttatgttggcgatgaagctcaatccaaacgaggtattttaactctcaagtaccctattgagcatggaattgtcaacaattgggatgacatggagaagatttggcatcacactttctacaatgagctccgtgttgctcctgaggaacatcctattctacttaccgaggcaccgcttaacccgaaagctaatcgtgagaagatgactcaaatcatgtttgagactttcaatgcccctgctatgtatgtggctattcaggctgttctttctctttatgccagtggtcgtactaccggtattgtgctcgactctggagatggtgtgagccacactgttcctatctatgaggggtatgcacttccacatgctatcctacgtcttgatcttgctggtcgtgacctcacggatgcgctgatgaagatcctaaccgagcgtggttactctttcaccaccacagcagagcgtgaaattgtcagagacataaaggagaagctttgctacattgctcttgactacgagcaggaactcgagacagccaaaaccagctcatctgttgagaagaactacgagctacctgatgggcaagtgatcaccattggatcagagcgattccgttgtcctgaggttctttaccagccatctatgattggtatggagaatgctggtatccatgaaaccacctataactccataatgaagtgtgatgtcgacatcaggaaggacttgtacggtaacattgtgctcagtggtggaaccacaatgttccctggaatcgccgacagaatgagcaaagagatcactgctttggctccaagcagcatgaagatcaaagtcgttgcccctccagagaggaaatactctgtctggattggagggtccatcttggcctccctcagtaccttccagcagatgtggatcgcaaaggcagagtatgacgagtcaggtccatcgattgttcacaggaagtgcttctgagttcaaagttgatcatttttcagagaagaagcaccgccagggtttttccgaccatctctcaagccgggtttttaatcttccgttattctgctctttgtttttgttctcttatgttttgaaattcatgccaaatacattttcatggatttatggtaatctgtttgtagtatggtttaaaatctaatgcaactgtgtttttgagtg

SEQ ID NO: 40753 - protein, 377 aa, Arabidopsis thaliana; identical to SEQ ID NO: 36003
  peptide (1)..(377): Ceres Seq. ID no. 12377547

SEQ ID NO: 40754 - protein, 360 aa, Arabidopsis thaliana; identical to SEQ ID NO: 36004
  peptide (1)..(360): Ceres Seq. ID no. 12377548

SEQ ID NO: 40755 - protein, 332 aa, Arabidopsis thaliana; identical to SEQ ID NO: 36005
  peptide (1)..(332): Ceres Seq. ID no. 12377549

SEQ ID NO: 40756 - DNA, 834 bp, Arabidopsis thaliana; identical to SEQ ID NO: 24929
  misc_feature (1)..(834): Ceres Seq. ID no. 12488276
  misc_feature (1)..(834): Ortholog of  Ceres SEQ ID NO 12592832 as cited in SEQ ID NO 62031

SEQ ID NO: 40757 - protein, 198 aa, Arabidopsis thaliana; identical to SEQ ID NO: 24930
  peptide (1)..(198): Ceres Seq. ID no. 12488277

SEQ ID NO: 40758 - protein, 117 aa, Arabidopsis thaliana; identical to SEQ ID NO: 24931
  peptide (1)..(117): Ceres Seq. ID no. 12488278

SEQ ID NO: 40759 - DNA, 1571 bp, Arabidopsis thaliana
  misc_feature (1)..(1571): Ceres Seq. ID no. 12327953
  misc_feature (1)..(1571): Ortholog of  Ceres SEQ ID NO 13656486 as cited in SEQ ID NO 69202
accaatttctccagtttcccactccacatccaaaaaaacagtgtaataataatcataatcacctgatcaatctcttacataaaagctacagatctggttttatacaatcatcaccgcaccaagttcctaaaggtttcgactttactgtttctattttcggaaagagagtgcaagattgaaatcgaagatgaaggcggcaacaaggccgatccacgccgtgacgacatgggttcgtcggcaaccaccaaaggttaaagcttttctcggtgttgtctccgccatgactgccctcgttttattgagagtgattgttcatgaccacgacaatctttttgtcgctgctgaagctgttcattcccttggaatctccgtccttatctataaactcaccaaggagaagacttgtgctggtatattcgatttcttgattttgaagtttctagatttaggttttgattagtggattagtgattattgaatttgattttcccctgatctgtttcgatttcgaattagggtttgtttgatgctattgaattcgtacaaagttgcaatctttgaatgatatgttttgacaggattatctctcaagtcacaagagctaacagctctgtttttggcggtgagactgtattgtagttttgtgatggagtttgatattcacacgttacttgactcggctacattggtgactacactttttgttatctatatgatccgttttaagctcaaagctagttatatggacgacaaagacaattttgctatctactacgtcgttattccatgtgttgttctatcagtactcattcacccatcaacacatcatcatataatcaataagatttcttgggccttctgtgtttaccttgaagctgtttcagtccttcctcaacttagagtcatgcaaaacactaaggtacttttaaaaagcttgaaactagtccctgtcctttaccctttttaaattagtaacgcatgtgtcgtcttagatcgtggagccatttacagcacattacgtattcgctttggggatcgctaggttcttgagttgtgcacactgggtccttcaggttttggacactcgagggcggttattgactgctttaggatatggtttctggcctataatggttcttctctctgaaatcgtccaaaccttcattctagccgacttctgctactactatgtcaagaggtaaatcattaatgctttcagtcatcgtcatgtttgttgatacaatggttgtagttatgtgatgattgctgatcttaaagacattgtgaagggtgttgtaagtattttatgtttttggtgtgtggcagtttaatgggtggtcagcttgttcttcgtctcccgtcaggtgttgtgtgaaatttggtgtataagaagaagatacggtgttgctttgagcttatggtgtggtgtaatgatccatgtcttgcaggctaatcgttttgagtcttctctaatctcttttttttttttttttttttttccctttatgttttttcttttcttagaggacttgtaaagaaaaaaagggaattaattagagattttgagtttt

SEQ ID NO: 40760 - protein, 106 aa, Arabidopsis thaliana
  peptide (1)..(106): Ceres Seq. ID no. 12327954
MEFDIHTLLDSATLVTTLFVIYMIRFKLKASYMDDKDNFAIYYVVIPCVVLSVLIHPSTHHHIINKISWAFCVYLEAVSVLPQLRVMQNTKVLLKSLKLVPVLYPF

SEQ ID NO: 40761 - protein, 90 aa, Arabidopsis thaliana
  peptide (1)..(90): Ceres Seq. ID no. 12327955
MKAATRPIHAVTTWVRRQPPKVKAFLGVVSAMTALVLLRVIVHDHDNLFVAAEAVHSLGISVLIYKLTKEKTCAGIFDFLILKFLDLGFD

SEQ ID NO: 40762 - protein, 84 aa, Arabidopsis thaliana
  peptide (1)..(84): Ceres Seq. ID no. 12327956
MIRFKLKASYMDDKDNFAIYYVVIPCVVLSVLIHPSTHHHIINKISWAFCVYLEAVSVLPQLRVMQNTKVLLKSLKLVPVLYPF

SEQ ID NO: 40763 - DNA, 1241 bp, Arabidopsis thaliana
  misc_feature (1)..(1241): Ceres Seq. ID no. 12323894
  misc_feature (1)..(1241): Ortholog of  Ceres SEQ ID NO 13594341 as cited in SEQ ID NO 57917
  misc_feature (1)..(1241): Ortholog of  Ceres SEQ ID NO 13656441 as cited in SEQ ID NO 65703
cataaacttattttgtacgatcacataaaactgtaaacccccacacagttattggccgtcggattcaatggaaggattagctatcagagcatctcgaccgtcggttttctgttctattccaggtctcggcggcgattcccaccgaaaacctccaagtgacggtttcctcaagctgcctgcgtcgtctattccggcggacagccgaaaattagtagcgaattctacttcctttcatccaatctcagccgttaacgtctctgctcaagcttccctcaccgctgattttcccgccctttcagaaactatactgaaagagggaagaaataacggaaaagagaaagcagagaacatcgtgtggcacgagagttcgatatgcagatgcgacagacaacaacttcttcaacaaaagggttgtgtcgtttggatcactggtctcagtggttcagggaaaagcactgttgcttgtgcactaagtaaagcattgtttgaaagaggcaaacttacttacacactcgacggcgacaatgtccgtcacggccttaaccgtgacctcactttcaaagcagagcaccgcaccgaaaacattagaagaattggtgaggtggctaagttgtttgctgacgtcggagtcatttgtatagcaagtttgatttctccgtaccggagagacagagacgcgtgccggtccttgttacctgacggcgatttcgtcgaggtcttcatggacgttcctcttcatgtgtgcgagtcgagagatccaaaggggttgtacaagcttgcacgtgcaggcaaaatcaaaggcttcactggaatcgacgacccttacgaggcaccagtgaattgcgaggtagtgctgaaacacacaggagacgacgagtcgtgttcgccacgtcagatggctgagaacatcatctcttacctgcaaaacaaaggttatcttgagggctaagtcaaagtcggaaaaatcaacccaatttgtcgattctatatatggctaaaggattgttctccctgattcggtcagaagcttgagacctggaaacgatgtcgtctcgcttcgtcacactatcatttgttcttgaattgtgttgaagtcaaaagccaaagggaatatatctatatttgttctaatcatcatttagttagtttataaagagtttttgctccaatgatatcgactgtgttgtataatgtgaattaataaagtggatttcgttgtatttaagtttgtcttaccagcc

SEQ ID NO: 40764 - protein, 293 aa, Arabidopsis thaliana
  peptide (1)..(293): Ceres Seq. ID no. 12323895
MEGLAIRASRPSVFCSIPGLGGDSHRKPPSDGFLKLPASSIPADSRKLVANSTSFHPISAVNVSAQASLTADFPALSETILKEGRNNGKEKAENIVWHESSICRCDRQQLLQQKGCVVWITGLSGSGKSTVACALSKALFERGKLTYTLDGDNVRHGLNRDLTFKAEHRTENIRRIGEVAKLFADVGVICIASLISPYRRDRDACRSLLPDGDFVEVFMDVPLHVCESRDPKGLYKLARAGKIKGFTGIDDPYEAPVNCEVVLKHTGDDESCSPRQMAENIISYLQNKGYLEG

SEQ ID NO: 40765 - DNA, 1534 bp, Arabidopsis thaliana
  misc_feature (1)..(1534): Ceres Seq. ID no. 13488676
  misc_feature (1)..(1534): Ortholog of  Ceres SEQ ID NO 14306565 as cited in SEQ ID NO 53000
  misc_feature (1)..(1534): Ortholog of  Ceres SEQ ID NO 14312192 as cited in SEQ ID NO 59249
ataataattatatctttaaaaaaaaaacagaaaaattctttgctttgcaacaaaggcagacagacaaaaggctaattcggagctctcctccacatcttcttccaaaacacaaacaaacccccaaatttccagaaaaatcagatcattctttcatcaatctcgtcttctttaatcataggtgggaattcatcagctcaaaaacgctgtacccgatcgttttacgactcaaaccagagaagctgattcttttccgatcattccaatttccatttcttccttgggaggtgatcgatcggttttacaccaaattagccgtcgaaaggggtgcttctttgatctaatttcgatggcgggattagagaaaaacgctgatttctcagggaagacgacgaaatcggctacaacgacgtcgtttttcaacaggtcgcttacaattcacggaagaacagtggtggattcgggccccaaatcccacaatctcaatccttctctcaatcgtaccacctccattaccaaattctacacccccgtagaatcgatgggaacttctcttaaaggcaaagtcaaaaacctttgtagattattcgagacttccaaacccgttaaacctgccttagctgagattcctcagaagcagaaatccggtaaatcccttttacccgaatcgcggatatcgcctttttcgagcttaaacaactcggtcatccgtcttcccgggacagaggacaggattgtggtgtattttactagcttgagagggattagacggacgtatgaggattgctatgctgtcagaatgatatttagagggtttcgggtttggatcgatgagcgcgacgtctccatggatatcgcttataggaaagagttgcagattgcaatgggagagaagtctgtgtctttgcctcaagttttcattatgggcaagtatgttggtggtgctgatgtgatcaagagtttgtttgagattggtgagcttgctaagattcttaaagagtttccaatgagacaaccagggtttgtttgccattgctgtggggacattagatttgttccgtgttccaattgtagtggcagcaagaaactgtttgatgaggatgaagatagggtcaagagatgtcctgaatgcaatgagaatggattgatacgttgtcctgattgctcttcttgagatatatcatcaatgaacctgaaaaaaccattaaagaaaagaagaaaaaagaggtatttatttctcttttgatgtttccattgttgtgtagaacagtgaatgatgctgccacaagtatccgaaaatctcttttggatcagcagcatttcactttgggttttttaaggtttgcgatcaacggtaatgggaatgccggtgatcgtggatttagtttatgtatgtgtttgctactaagggctaaatgtaattgtgtaatcaaaatgtctgaaacgggtagtaagcattttgactcttgtgtgtcaatgttgtgaaagacaactgtgttcttatgctatatatttgattgtaaatatttcgtgtgtt

SEQ ID NO: 40766 - protein, 274 aa, Arabidopsis thaliana
  peptide (1)..(274): Ceres Seq. ID no. 13488677
MAGLEKNADFSGKTTKSATTTSFFNRSLTIHGRTVVDSGPKSHNLNPSLNRTTSITKFYTPVESMGTSLKGKVKNLCRLFETSKPVKPALAEIPQKQKSGKSLLPESRISPFSSLNNSVIRLPGTEDRIVVYFTSLRGIRRTYEDCYAVRMIFRGFRVWIDERDVSMDIAYRKELQIAMGEKSVSLPQVFIMGKYVGGADVIKSLFEIGELAKILKEFPMRQPGFVCHCCGDIRFVPCSNCSGSKKLFDEDEDRVKRCPECNENGLIRCPDCSS

SEQ ID NO: 40767 - protein, 210 aa, Arabidopsis thaliana
  peptide (1)..(210): Ceres Seq. ID no. 13488678
MGTSLKGKVKNLCRLFETSKPVKPALAEIPQKQKSGKSLLPESRISPFSSLNNSVIRLPGTEDRIVVYFTSLRGIRRTYEDCYAVRMIFRGFRVWIDERDVSMDIAYRKELQIAMGEKSVSLPQVFIMGKYVGGADVIKSLFEIGELAKILKEFPMRQPGFVCHCCGDIRFVPCSNCSGSKKLFDEDEDRVKRCPECNENGLIRCPDCSS

SEQ ID NO: 40768 - DNA, 1280 bp, Arabidopsis thaliana
  misc_feature (1)..(1280): Ceres Seq. ID no. 12482816
  misc_feature (1)..(1280): Ortholog of  Ceres SEQ ID NO 13596338 as cited in SEQ ID NO 68005
atcctcccttccgcaacattgattttgtttgatgatcgttgggttttgaaagaagagcaatgagcaattatgcagccggactcggtaagcctggctcaggtaaaaggagaatcagagatcttttaaatcaacctgataaccgagtctgcgctgattgtggcgcttctgatcctaaatgggcatcagcaaatatcggagtattcatttgcttaaaatgttgcggtgtgcacaggagcctcggcactcatatttcaaaggttttgtctgtgacactagatgaatggtcagatgaggaagtcgattccatgattgaaattggaggaaatgcgtctgctaattcaatttatgaagcttttttacctgacacgtgctctaagcctggacctgatgttaatcatgaccagcgtatgagattcattagggcaaaatatgaactgcaagagtttctgaaaccaagcttgcggattacatccgggaaaggctcaacaaagagttcagcttttcttacatcaagtctttctagaaagatcatggatagttttcgcacaaattcatcatcgcagacgatgtttcaggaaggaatggtagagtttattggattgttgaaggtgactattaagaagggaactaacttagcaatcagagacatgatgtcaagtgatccatatgttgtgttgaatctagggaagcaaaaacttcagacaactgttatgaatagtaatttgaacccggtatggaatcaagaactcatgctgtctgttcctgagagctatggccctgtgaaattgcaagtgtatgattatgatacattttctgctgatgacataatgggagaagcagatattgatatacaacctttgataacatctgcaatggcttttggggatccagaaatgtttggggatatgcagattgggaaatggctaaaatcgcatgataacccattaatagatgacagtatcattaacattgttgatgggaaagtgaaacaggaggttcagatcaagcttcagaatgtagagtctggagaattagagctagaaatggaatggctgccacttgaccaataagtgtcatataggtctcataacctttataaatgtactgattgatttaattctttgtttttttttttctctccatttgttggaaattttcaaaaatctctttgcatttttttcctcatttcagaggtaaatgtattttgatgtttgtataaaccaatggattactatatgatgttttgattgatggaaaaagggtgaaatatccacttatgt

SEQ ID NO: 40769 - protein, 336 aa, Arabidopsis thaliana
  peptide (1)..(336): Ceres Seq. ID no. 12482817
MSNYAAGLGKPGSGKRRIRDLLNQPDNRVCADCGASDPKWASANIGVFICLKCCGVHRSLGTHISKVLSVTLDEWSDEEVDSMIEIGGNASANSIYEAFLPDTCSKPGPDVNHDQRMRFIRAKYELQEFLKPSLRITSGKGSTKSSAFLTSSLSRKIMDSFRTNSSSQTMFQEGMVEFIGLLKVTIKKGTNLAIRDMMSSDPYVVLNLGKQKLQTTVMNSNLNPVWNQELMLSVPESYGPVKLQVYDYDTFSADDIMGEADIDIQPLITSAMAFGDPEMFGDMQIGKWLKSHDNPLIDDSIINIVDGKVKQEVQIKLQNVESGELELEMEWLPLDQ

SEQ ID NO: 40770 - protein, 254 aa, Arabidopsis thaliana
  peptide (1)..(254): Ceres Seq. ID no. 12482818
MIEIGGNASANSIYEAFLPDTCSKPGPDVNHDQRMRFIRAKYELQEFLKPSLRITSGKGSTKSSAFLTSSLSRKIMDSFRTNSSSQTMFQEGMVEFIGLLKVTIKKGTNLAIRDMMSSDPYVVLNLGKQKLQTTVMNSNLNPVWNQELMLSVPESYGPVKLQVYDYDTFSADDIMGEADIDIQPLITSAMAFGDPEMFGDMQIGKWLKSHDNPLIDDSIINIVDGKVKQEVQIKLQNVESGELELEMEWLPLDQ

SEQ ID NO: 40771 - protein, 220 aa, Arabidopsis thaliana
  peptide (1)..(220): Ceres Seq. ID no. 12482819
MRFIRAKYELQEFLKPSLRITSGKGSTKSSAFLTSSLSRKIMDSFRTNSSSQTMFQEGMVEFIGLLKVTIKKGTNLAIRDMMSSDPYVVLNLGKQKLQTTVMNSNLNPVWNQELMLSVPESYGPVKLQVYDYDTFSADDIMGEADIDIQPLITSAMAFGDPEMFGDMQIGKWLKSHDNPLIDDSIINIVDGKVKQEVQIKLQNVESGELELEMEWLPLDQ

SEQ ID NO: 40772 - DNA, 1252 bp, Arabidopsis thaliana
  misc_feature (1)..(1252): Ceres Seq. ID no. 12330722
  misc_feature (1)..(1252): Ortholog of  Ceres SEQ ID NO 13596891 as cited in SEQ ID NO 62868
  misc_feature (1)..(1252): Ortholog of  Ceres SEQ ID NO 12617235 as cited in SEQ ID NO 63990
  misc_feature (1)..(1252): Ortholog of  Ceres SEQ ID NO 13655371 as cited in SEQ ID NO 68945
aggtaattatcatcttcgtccctatcaaaattttcagcagcgtaaatggcgaacatcggcgtagtgacgacagcgactaacaaccaggtgattctccgtaactacgtgagtggattccctaaagaatccgacctctacatcgccgcaaccaccgttgacttacgtgtacctcccggatccatggcggttctagtcaagaatctctacttatcttgcgatcctttcagccgcattcgcatggaaaaacccgacccttcgtcacctgcttccctcgctcgcgcttactctataggcaagccaatctctgggtatggagtggctaaagcaatagattcaggtcatccaaattacaaaacaggagatttactttggggaagagttggttgggaagagtatagtgttattaatccaactccttcttcacatttcaagattcatcacgccgatgttccattatctttctacactggacttcttggtattccgggtctcactgcgtatgttgggttttacgaaatatgctctccgaagaaaggtgagactgtatttgtatcagctgcatctggtgcagtaggtcaacttgtaggacagtttgcgaagatggcgggatgctatgtcgttggaagtgccagtagtaaagagaaggttgatcttctcaagactaagttcgggtatgacgatgctttcaattacaaggaagagcatgatcttagtgctgccctaaagaggtgtttcccagaaggaatagacatatactttgagaacgtgggaggtaaaatgttagaggcagtgctcgaaaacatgaggacacatggccgaatcgctgcgtgtggaatgatctcacaatacaatctaaaggagccagaaggtgtacataacttagccagcattgtttacaaacggattcgggttcaaggttttgcagctgtggaattctttgataaatactccaagtttttggacttcatacttccatatgtaagagaaggaaagataacatatgtcgaggatatagctcaaggacttgagaatggaccttctgctttgattggactcttccacggtaagaacgtcgggaaacaacttgttgcggttgctcgtgagtgatattgaattaataaatgtggttattatgacaaagctttgtttgtaggtcagaaataattggactattgttaattgtttactatatcgtaatagtccgctggtttaattatgttgtttgtgtgatattatatgcataaaggttctc

SEQ ID NO: 40773 - protein, 353 aa, Arabidopsis thaliana
  peptide (1)..(353): Ceres Seq. ID no. 12330723
MANIGVVTTATNNQVILRNYVSGFPKESDLYIAATTVDLRVPPGSMAVLVKNLYLSCDPFSRIRMEKPDPSSPASLARAYSIGKPISGYGVAKAIDSGHPNYKTGDLLWGRVGWEEYSVINPTPSSHFKIHHADVPLSFYTGLLGIPGLTAYVGFYEICSPKKGETVFVSAASGAVGQLVGQFAKMAGCYVVGSASSKEKVDLLKTKFGYDDAFNYKEEHDLSAALKRCFPEGIDIYFENVGGKMLEAVLENMRTHGRIAACGMISQYNLKEPEGVHNLASIVYKRIRVQGFAAVEFFDKYSKFLDFILPYVREGKITYVEDIAQGLENGPSALIGLFHGKNVGKQLVAVARE

SEQ ID NO: 40774 - protein, 308 aa, Arabidopsis thaliana
  peptide (1)..(308): Ceres Seq. ID no. 12330724
MAVLVKNLYLSCDPFSRIRMEKPDPSSPASLARAYSIGKPISGYGVAKAIDSGHPNYKTGDLLWGRVGWEEYSVINPTPSSHFKIHHADVPLSFYTGLLGIPGLTAYVGFYEICSPKKGETVFVSAASGAVGQLVGQFAKMAGCYVVGSASSKEKVDLLKTKFGYDDAFNYKEEHDLSAALKRCFPEGIDIYFENVGGKMLEAVLENMRTHGRIAACGMISQYNLKEPEGVHNLASIVYKRIRVQGFAAVEFFDKYSKFLDFILPYVREGKITYVEDIAQGLENGPSALIGLFHGKNVGKQLVAVARE

SEQ ID NO: 40775 - protein, 289 aa, Arabidopsis thaliana
  peptide (1)..(289): Ceres Seq. ID no. 12330725
MEKPDPSSPASLARAYSIGKPISGYGVAKAIDSGHPNYKTGDLLWGRVGWEEYSVINPTPSSHFKIHHADVPLSFYTGLLGIPGLTAYVGFYEICSPKKGETVFVSAASGAVGQLVGQFAKMAGCYVVGSASSKEKVDLLKTKFGYDDAFNYKEEHDLSAALKRCFPEGIDIYFENVGGKMLEAVLENMRTHGRIAACGMISQYNLKEPEGVHNLASIVYKRIRVQGFAAVEFFDKYSKFLDFILPYVREGKITYVEDIAQGLENGPSALIGLFHGKNVGKQLVAVARE

SEQ ID NO: 40776 - DNA, 1147 bp, Arabidopsis thaliana
  misc_feature (1)..(1147): Ceres Seq. ID no. 13497119
  misc_feature (1)..(1147): Ortholog of  Ceres SEQ ID NO 14309328 as cited in SEQ ID NO 0
aatcttcatttcttgagagatccaaaaaaagaatcagaaagaagaagaagaagactccaaaaacgatgccgtattacaccaacgacgacaatgacgtcgacgatttcaccgaatacgatccgatgccttatagtggaggctacgacatcaccgtgacatacggccgttcaattccaccgtccgacgagacttgttaccctctctcctctctctccggcgacgcctttgagtatcagcgacctaatttctcttctaaccacgattcttctgcttatgacgaccaagctcttaaaaccgagtacagtagctatgcacgacccggacccgttggatctggatctgattttggccggaaacctaattctggatatggagggagaacggaggttgagtatggccggaaaactgaatcggagcatggatctggctatggtggaagaattgagagcgattacgtgaagcctagctatggcggtcacgaggatgatggtgacgatggtcacaaaaaacatagtggtaaggattatgatgatggagatgagaagagtaagaagaaggagaaggagaagaagaaggataagaagaaagatggtaataactctgaagatgatgagtttaagaagaagaagaagaaagagcagtacaaggagcatcatgatgatgatgattatgatgagaagaagaagaagaagaaagactataatgatgatgatgagaagaagaagaagaagcattataatgatgatgatgatgagaagaagaagaagcataattacaatgatgatgatgatgagaagaagaagaagaaggagtatcatgatgatgaggataagaagaagaagaagcactatgataatgatgatgatgagaagaagaagaagaaggatcatcgtgatgatgatgatgagaagaagaagaagaaggataaccaccacaagggacatgactaaaaaaggtttatgatttgggatttgcattcttatgactaaataagtaacaacaacttaagcacacttctgctctctacgtttatgtcaattgttgttttgtttttgcttcgtgtttttgctgctaacttcaatgagatcttcataagtcatatgtaatatgtttagtgtacgtgttttctagtgatgtcgtttggtct

SEQ ID NO: 40777 - protein, 315 aa, Arabidopsis thaliana
  peptide (1)..(315): Ceres Seq. ID no. 13497120
SSFLERSKKRIRKKKKKTPKTMPYYTNDDNDVDDFTEYDPMPYSGGYDITVTYGRSIPPSDETCYPLSSLSGDAFEYQRPNFSSNHDSSAYDDQALKTEYSSYARPGPVGSGSDFGRKPNSGYGGRTEVEYGRKTESEHGSGYGGRIESDYVKPSYGGHEDDGDDGHKKHSGKDYDDGDEKSKKKEKEKKKDKKKDGNNSEDDEFKKKKKKEQYKEHHDDDDYDEKKKKKKDYNDDDEKKKKKHYNDDDDEKKKKHNYNDDDDEKKKKKEYHDDEDKKKKKHYDNDDDEKKKKKDHRDDDDEKKKKKDNHHKGHD

SEQ ID NO: 40778 - protein, 294 aa, Arabidopsis thaliana
  peptide (1)..(294): Ceres Seq. ID no. 13497121
MPYYTNDDNDVDDFTEYDPMPYSGGYDITVTYGRSIPPSDETCYPLSSLSGDAFEYQRPNFSSNHDSSAYDDQALKTEYSSYARPGPVGSGSDFGRKPNSGYGGRTEVEYGRKTESEHGSGYGGRIESDYVKPSYGGHEDDGDDGHKKHSGKDYDDGDEKSKKKEKEKKKDKKKDGNNSEDDEFKKKKKKEQYKEHHDDDDYDEKKKKKKDYNDDDEKKKKKHYNDDDDEKKKKHNYNDDDDEKKKKKEYHDDEDKKKKKHYDNDDDEKKKKKDHRDDDDEKKKKKDNHHKGHD

SEQ ID NO: 40779 - protein, 275 aa, Arabidopsis thaliana
  peptide (1)..(275): Ceres Seq. ID no. 13497122
MPYSGGYDITVTYGRSIPPSDETCYPLSSLSGDAFEYQRPNFSSNHDSSAYDDQALKTEYSSYARPGPVGSGSDFGRKPNSGYGGRTEVEYGRKTESEHGSGYGGRIESDYVKPSYGGHEDDGDDGHKKHSGKDYDDGDEKSKKKEKEKKKDKKKDGNNSEDDEFKKKKKKEQYKEHHDDDDYDEKKKKKKDYNDDDEKKKKKHYNDDDDEKKKKHNYNDDDDEKKKKKEYHDDEDKKKKKHYDNDDDEKKKKKDHRDDDDEKKKKKDNHHKGHD

SEQ ID NO: 40780 - DNA, 1332 bp, Arabidopsis thaliana
  misc_feature (1)..(1332): Ceres Seq. ID no. 12562243
  misc_feature (1)..(1332): Ortholog of  Ceres SEQ ID NO 13504028 as cited in SEQ ID NO 56107
gatacatctcctcgtcgccgttcttcggattttcactcttctgctcgaaaggtctctcactcttctcttttttaatctattgaaattgaaacttcccttctcttctcttctcttctctgtagcactcctgcttctagtttagctgctcttcttcttctacttgctgcaacaactccaaatcatcatttctcttgttccaggcagtgcttgagaatcattgaagaaggtgatcgctggtgctgttttgataactcaaagccgttttgctgaaagagggttaccaaagttagaagctcaagaacttggagctgtgtcttctttttgtatcatgccatattttattcagaggcttttcaatacttgcaagtcatctctctcacctaatggtcctgtgtctgaggaggccttagacaaggttcgcaatgtcttggagaaaatcaagccgtctgatgttggtctcgaacaggaagctcaattggtgcgtaattggcctggtcctgggaacgagcgtaatggaaacaatcattctctgccagcaataaaataccttcagttacatgagtgtgacagcttctcgattggaattttctgcatgccacctgggtctatcataccacttcataatcatccaggcatgacagtgctaagcaagcttgtttatggttcaatgcacgttaagtcatatgattgggctgagcctgaccaatcagagctagacgatccattacaagcaagacccgcgaagctggtcaaggatattgatatgacttcccctagcccagcaaccactctatatccaacaaccggtggcaacattcattgtttcaaagccattactcattgtgcaatctttgacatcttatctcctccatactcttctactcatggcagacactgcaactacttccgaaaatccccaatgctagacttacctggtgagattgaagtgatgaatggagaagtgatctcaaatgtgacatggcttgaagagtatcaacctccagataactttgtgatatggagagttccgtacagaggtccagtgattagaaaatgagaaatacaaaaaggattaaacatattaaaaaagagcagaaagagaaaggtgcttatgatcaggagaataattggtaaaccattcagaggctggctgcataatggtcgaggttcttacataattgtgaccacattaagttccagcctatgtcgttgtatgataatgattacttcactagtttaatattataatttttttcccctatttttatatgcagctacacaaaaaattgctcataaacagtgttatatttagttatcataaattttgtttcc

SEQ ID NO: 40781 - protein, 242 aa, Arabidopsis thaliana
  peptide (1)..(242): Ceres Seq. ID no. 12562244
MPYFIQRLFNTCKSSLSPNGPVSEEALDKVRNVLEKIKPSDVGLEQEAQLVRNWPGPGNERNGNNHSLPAIKYLQLHECDSFSIGIFCMPPGSIIPLHNHPGMTVLSKLVYGSMHVKSYDWAEPDQSELDDPLQARPAKLVKDIDMTSPSPATTLYPTTGGNIHCFKAITHCAIFDILSPPYSSTHGRHCNYFRKSPMLDLPGEIEVMNGEVISNVTWLEEYQPPDNFVIWRVPYRGPVIRK

SEQ ID NO: 40782 - protein, 154 aa, Arabidopsis thaliana; identical to SEQ ID NO: 40455
  peptide (1)..(154): Ceres Seq. ID no. 12562245

SEQ ID NO: 40783 - protein, 140 aa, Arabidopsis thaliana; identical to SEQ ID NO: 40456
  peptide (1)..(140): Ceres Seq. ID no. 12562246

SEQ ID NO: 40784 - DNA, 1394 bp, Arabidopsis thaliana
  misc_feature (1)..(1394): Ceres Seq. ID no. 12348448
  misc_feature (1)..(1394): Ortholog of  Ceres SEQ ID NO 13654187 as cited in SEQ ID NO 68219
agtataaagacgacaaagtaaaccaaaaaaaaaagagttctcctacaattttcctaaattcttggatttgagatttcactttttccgatttgaaacaatgatgataactcgcggtggagccaaggcggcgaaatcgctgttagtggcggctggaccacgtttgttctcgacggtccgtacggtttcgtctcacgaggctttatcagcaagccatattttgaagcctggtgttacatctgcttggatatggactagagctccgacgattggaggtatgagattcgctagcacgatcactctgggagagaaaactccgatgaaggaggaggacgcgaatcagaagaaaacagagaacgaatccaccggtggagacgccgccggaggtaataacaagggagataaaggaatcgcgagctattggggtgttgaacctaataagattactaaagaagatggttctgaatggaagtggaactgtttcaggccatgggaaacgtataaagctgatataacgatagatctgaagaagcatcatgttccaacgacgtttcttgatagaatagcttattggactgttaaatctcttcgttggcctaccgatttgttcttccagaggagatatggatgtcgagctatgatgcttgaaactgtagcagcagtacctggaatggttggaggaatgttactacactgcaaatcgcttcgacgttttgagcaaagtggaggatggattaaggctcttcttgaggaagcagagaatgagagaatgcatcttatgacattcatggaagtcgcgaaaccgaaatggtacgagagagcgctcgtgatcactgtgcaaggagtcttcttcaacgcttatttccttggttacttaatctctcccaagtttgctcatcgtatggttgggtaccttgaagaagaagcgatccattcttatactgagtttctcaaggaacttgacaaaggtaacattgagaatgttcctgctccggctattgctattgattactggaggcttcctgctgatgcgacacttcgtgatgttgtgatggttgttcgtgctgacgaggctcatcaccgtgatgtaaaccattttgcatctgatattcactaccaaggtcgtgaactaaaggaagctccagctccaattgggtatcattgattcgattaaaagaagagctttttctcaagtttaaaactttgttctaaagaatttaagttctttgacttgtatatacatcatcacctctgcttaagccatacttggattcggctttctttgaatgttgctacgaatgttctgatttcttctttacttttcctgtcaatgggcttttgggcttatcttttgctattgtatggccttgctatttagaatgagagtaatagtttgt

SEQ ID NO: 40785 - protein, 354 aa, Arabidopsis thaliana
  peptide (1)..(354): Ceres Seq. ID no. 12348449
MMITRGGAKAAKSLLVAAGPRLFSTVRTVSSHEALSASHILKPGVTSAWIWTRAPTIGGMRFASTITLGEKTPMKEEDANQKKTENESTGGDAAGGNNKGDKGIASYWGVEPNKITKEDGSEWKWNCFRPWETYKADITIDLKKHHVPTTFLDRIAYWTVKSLRWPTDLFFQRRYGCRAMMLETVAAVPGMVGGMLLHCKSLRRFEQSGGWIKALLEEAENERMHLMTFMEVAKPKWYERALVITVQGVFFNAYFLGYLISPKFAHRMVGYLEEEAIHSYTEFLKELDKGNIENVPAPAIAIDYWRLPADATLRDVVMVVRADEAHHRDVNHFASDIHYQGRELKEAPAPIGYH

SEQ ID NO: 40786 - protein, 353 aa, Arabidopsis thaliana
  peptide (1)..(353): Ceres Seq. ID no. 12348450
MITRGGAKAAKSLLVAAGPRLFSTVRTVSSHEALSASHILKPGVTSAWIWTRAPTIGGMRFASTITLGEKTPMKEEDANQKKTENESTGGDAAGGNNKGDKGIASYWGVEPNKITKEDGSEWKWNCFRPWETYKADITIDLKKHHVPTTFLDRIAYWTVKSLRWPTDLFFQRRYGCRAMMLETVAAVPGMVGGMLLHCKSLRRFEQSGGWIKALLEEAENERMHLMTFMEVAKPKWYERALVITVQGVFFNAYFLGYLISPKFAHRMVGYLEEEAIHSYTEFLKELDKGNIENVPAPAIAIDYWRLPADATLRDVVMVVRADEAHHRDVNHFASDIHYQGRELKEAPAPIGYH

SEQ ID NO: 40787 - protein, 295 aa, Arabidopsis thaliana
  peptide (1)..(295): Ceres Seq. ID no. 12348451
MRFASTITLGEKTPMKEEDANQKKTENESTGGDAAGGNNKGDKGIASYWGVEPNKITKEDGSEWKWNCFRPWETYKADITIDLKKHHVPTTFLDRIAYWTVKSLRWPTDLFFQRRYGCRAMMLETVAAVPGMVGGMLLHCKSLRRFEQSGGWIKALLEEAENERMHLMTFMEVAKPKWYERALVITVQGVFFNAYFLGYLISPKFAHRMVGYLEEEAIHSYTEFLKELDKGNIENVPAPAIAIDYWRLPADATLRDVVMVVRADEAHHRDVNHFASDIHYQGRELKEAPAPIGYH

SEQ ID NO: 40788 - DNA, 1444 bp, Arabidopsis thaliana
  misc_feature (1)..(1444): Ceres Seq. ID no. 12466522
  misc_feature (1)..(1444): Ortholog of  Ceres SEQ ID NO 15179482 as cited in SEQ ID NO 0
atcttcaatttggacttccaacgccgacaccgtttaactccgatggttcccccgccgtctaatccgcagcaggttcagcagttcctctcctctgccctctcccagcgcggcccatcttcagtcccctacgaagagtccaacaagaggttgatccggcaacatctacttaacctaatctcttcttacccttccttagagcccgctccgtcaacctccttcaagcagatggtacgattccgatgccttttcatggagtcacctataacatacctgtgattatctggctcctcgagtcatatcctcgtcatcctccttgcgtctatgtgaatcccaccgctgatatgatcatcaagcgacctcacgcacatgtcactccttctggtctcgtttctcttccgtaccttcagaattgggtctaccctagctccaatctcgtagatctcgtctccgatctcagcgctgcttttgctcgtgatccgcctctttattctcgacgccgtcctcagccaccgccaccgtctcctcctacggtatacgattcgtctctgtcacgacctccttcggctgatcagtcattgcctagaccgttcccgccatcaccttacggcggaggagtaagtagggtgcaagtgcagcatgttcaccaccagcagcaatctgatgatgcggcggaggttttcaagagaaatgcgattaataagatggtggagatggttcatagcgatttggtttcgatgaggagagccagagaagctgaagcagaggagctgctgagcttgcaagctgggctgaagagaagagaggatgagcttaatatagggttgaaagagatggttgaggagaaagaaacacttgaacaacaattacagattatctccatgaacactgatattctagactcgtgggttagagagaaccaaggcaaaaccaagaatttagttgatttggatgtggataatgcttttgaatgtggtgacacactctctaagcagatgttagagtgtactgctttggatttagccattgaagatgctatttattccttggataagtcgtttcaagatggtgttgttccctttgatcagtatttgaggaatgtgaggttgttgtcgagagaacagttcttccaccgagccacgggttctaaagtcagggcggcacaaatggaggttcaggttgcagccatcgcaggtaggttacattcatgaatgaaattcagtgtttttgtttgcgggatactgtgtcacacaatgctggtttatatagtctgagattagcatctttgaggagtatttctgtggctatgcgtgtgatgatggttcctctttaagattgaattaaatgtctatagactatatatacacgtacactgttgtgcacatacatatttgaatggatcagggcctgagaatcgtctccttttgtgatctatgactactttttt

SEQ ID NO: 40789 - protein, 322 aa, Arabidopsis thaliana
  peptide (1)..(322): Ceres Seq. ID no. 12466523
MPFHGVTYNIPVIIWLLESYPRHPPCVYVNPTADMIIKRPHAHVTPSGLVSLPYLQNWVYPSSNLVDLVSDLSAAFARDPPLYSRRRPQPPPPSPPTVYDSSLSRPPSADQSLPRPFPPSPYGGGVSRVQVQHVHHQQQSDDAAEVFKRNAINKMVEMVHSDLVSMRRAREAEAEELLSLQAGLKRREDELNIGLKEMVEEKETLEQQLQIISMNTDILDSWVRENQGKTKNLVDLDVDNAFECGDTLSKQMLECTALDLAIEDAIYSLDKSFQDGVVPFDQYLRNVRLLSREQFFHRATGSKVRAAQMEVQVAAIAGRLHS

SEQ ID NO: 40790 - protein, 288 aa, Arabidopsis thaliana
  peptide (1)..(288): Ceres Seq. ID no. 12466524
MIIKRPHAHVTPSGLVSLPYLQNWVYPSSNLVDLVSDLSAAFARDPPLYSRRRPQPPPPSPPTVYDSSLSRPPSADQSLPRPFPPSPYGGGVSRVQVQHVHHQQQSDDAAEVFKRNAINKMVEMVHSDLVSMRRAREAEAEELLSLQAGLKRREDELNIGLKEMVEEKETLEQQLQIISMNTDILDSWVRENQGKTKNLVDLDVDNAFECGDTLSKQMLECTALDLAIEDAIYSLDKSFQDGVVPFDQYLRNVRLLSREQFFHRATGSKVRAAQMEVQVAAIAGRLHS

SEQ ID NO: 40791 - protein, 168 aa, Arabidopsis thaliana
  peptide (1)..(168): Ceres Seq. ID no. 12466525
MVEMVHSDLVSMRRAREAEAEELLSLQAGLKRREDELNIGLKEMVEEKETLEQQLQIISMNTDILDSWVRENQGKTKNLVDLDVDNAFECGDTLSKQMLECTALDLAIEDAIYSLDKSFQDGVVPFDQYLRNVRLLSREQFFHRATGSKVRAAQMEVQVAAIAGRLHS

SEQ ID NO: 40792 - DNA, 1745 bp, Arabidopsis thaliana
  misc_feature (1)..(1745): Ceres Seq. ID no. 13488918
  misc_feature (1)..(1745): Ortholog of  Ceres SEQ ID NO 14311957 as cited in SEQ ID NO 51628
agagaagaaatagagagagaggccacaaggcacacacaagtcagtatcccacgtgcatctgggaactcgacccctctcctctgccacaacccactcttcatttctctctttctccaccaatctctctttctctctctcaaaagaagagaaactaataattctcaaaagctcacacacagaaacagaggaatctataaggaagttttggtttttggttatcaacaatggtggaagcaaaagatcaagatatgggtgatggtatgcaatgtataaaccatccatttactaaaaacccaggtgggatctgtgctttttgtcttcaagaaaagcttggaaagcttgtaacttcatctttcccacttcctaaacacctcacttcctcttcaacttcttcttctccttccttcagatctgactctgttggtagcacaaccactgcctctgccgcaaatctctcagcgtctctttctctctctgtctccggagcaacaaacaacaacaacagcaagcttccgtttttgttagctaagaagaagaagaagatgcttactgcttcttcttcttcttcgaccacggctaatattgtctacaagagaagtcaatctacaaggactacgaagacaacgtacggagattcagatttgagcccgagaaagagaaatgggttttggtccttttttcatctctactcttcgaaacaacatggtagcagtaagaaagttggaaactttcatcaacccataagccagactgagacaaaaacagagttggcagagactacaacagtgggatcttcgtcttcttcgtcagcttcttcttcaatgtcaaagagagttgttggtggtggtgggagtagtagtaacagaaacggtattgatgtgattgttgaagaagatggaagtcctaacattgaagtcacaccaagtgagaggaaagtgtcgagatctagatctgttgggtgtggaagtagaagcttctctggtgatttctttgagaggatcacaaatgggtttggagattgtactttgagaagagttgagtcacagagagaaggtaataataacaaaggtaacaaggtcagtagtaaccctagtaatggtgttagagagatggtgagatgtggtgggatctttggtgggtttatgataatgacgtcatcgtcttcttcttcatcttcatcatcatgggtatcatcatcatcagctgaacatcatcatcatcataatcataacatgggtcatggtggtggaggaaggaacagaagctggggatggtcatttgcaagtccaatgagagcttttacttcttcttcttactctggtaaaagaggccgtacaatttcagattctactacaagcaagaacacaactccaaacttgggtgcaattccttctttgttgtctgtcagaagctgaattaataataaactttgatctatgtgtttctaataagttcttaaacgagaaaatacatttaattagtttttatcattttcatcaatgtgtttatcttttttttaggtgttcttcaaatatttgttgatgctctttttgataatcttattagtattgtaatgtcacaccactcttctatgttcattatcatcttttgtcaaacaaggaacttaggatactttgagctactttttctgtttatttgtctttttctcttttgtttattttgatctttggattgattcctatgtctctttgaatgatctaatggtaaataaattggttttatct

SEQ ID NO: 40793 - protein, 396 aa, Arabidopsis thaliana
  peptide (1)..(396): Ceres Seq. ID no. 13488919
MVEAKDQDMGDGMQCINHPFTKNPGGICAFCLQEKLGKLVTSSFPLPKHLTSSSTSSSPSFRSDSVGSTTTASAANLSASLSLSVSGATNNNNSKLPFLLAKKKKKMLTASSSSSTTANIVYKRSQSTRTTKTTYGDSDLSPRKRNGFWSFFHLYSSKQHGSSKKVGNFHQPISQTETKTELAETTTVGSSSSSSASSSMSKRVVGGGGSSSNRNGIDVIVEEDGSPNIEVTPSERKVSRSRSVGCGSRSFSGDFFERITNGFGDCTLRRVESQREGNNNKGNKVSSNPSNGVREMVRCGGIFGGFMIMTSSSSSSSSSSWVSSSSAEHHHHHNHNMGHGGGGRNRSWGWSFASPMRAFTSSSYSGKRGRTISDSTTSKNTTPNLGAIPSLLSVRS

SEQ ID NO: 40794 - protein, 388 aa, Arabidopsis thaliana
  peptide (1)..(388): Ceres Seq. ID no. 13488920
MGDGMQCINHPFTKNPGGICAFCLQEKLGKLVTSSFPLPKHLTSSSTSSSPSFRSDSVGSTTTASAANLSASLSLSVSGATNNNNSKLPFLLAKKKKKMLTASSSSSTTANIVYKRSQSTRTTKTTYGDSDLSPRKRNGFWSFFHLYSSKQHGSSKKVGNFHQPISQTETKTELAETTTVGSSSSSSASSSMSKRVVGGGGSSSNRNGIDVIVEEDGSPNIEVTPSERKVSRSRSVGCGSRSFSGDFFERITNGFGDCTLRRVESQREGNNNKGNKVSSNPSNGVREMVRCGGIFGGFMIMTSSSSSSSSSSWVSSSSAEHHHHHNHNMGHGGGGRNRSWGWSFASPMRAFTSSSYSGKRGRTISDSTTSKNTTPNLGAIPSLLSVRS

SEQ ID NO: 40795 - protein, 384 aa, Arabidopsis thaliana
  peptide (1)..(384): Ceres Seq. ID no. 13488921
MQCINHPFTKNPGGICAFCLQEKLGKLVTSSFPLPKHLTSSSTSSSPSFRSDSVGSTTTASAANLSASLSLSVSGATNNNNSKLPFLLAKKKKKMLTASSSSSTTANIVYKRSQSTRTTKTTYGDSDLSPRKRNGFWSFFHLYSSKQHGSSKKVGNFHQPISQTETKTELAETTTVGSSSSSSASSSMSKRVVGGGGSSSNRNGIDVIVEEDGSPNIEVTPSERKVSRSRSVGCGSRSFSGDFFERITNGFGDCTLRRVESQREGNNNKGNKVSSNPSNGVREMVRCGGIFGGFMIMTSSSSSSSSSSWVSSSSAEHHHHHNHNMGHGGGGRNRSWGWSFASPMRAFTSSSYSGKRGRTISDSTTSKNTTPNLGAIPSLLSVRS

SEQ ID NO: 40796 - DNA, 1237 bp, Arabidopsis thaliana
  misc_feature (1)..(1237): Ceres Seq. ID no. 12580434
  misc_feature (1)..(1237): Ortholog of  Ceres SEQ ID NO 12578315 as cited in SEQ ID NO 62451
  misc_feature (1)..(1237): Ortholog of  Ceres SEQ ID NO 13584577 as cited in SEQ ID NO 65298
acacgtctatcttttataccaaaaaatataaaataaaaaacactatggcggaaaactacgaccgtgccagtgagttaaaagcattcgacgagatgaagattggcgtgaaaggactcgtcgacgccggagtcacaaaagtcccgcgcattttccataacccgcatgttaacgtagcaaaccctaagcctacatcgacggtggtgatgattccaacaatcgatctaggtggcgtgttcgaatccacggtcgtgcgagagagtgtagttgcgaaggttaaagacgcaatggagaagtttggatttttccaggcgattaaccatggggttccacttgatgtgatggagaagatgataaatggtattcgtcggtttcacgaccaagatccagaagtgaggaaaatgttctatacccgagacaaaaccaaaaagcttaaatatcactctaatgctgatctctatgagtctcctgctgcgagttggagagataccttaagttgtgtcatggctcctgatgttccaaaagcacaggacttacctgaggtttgtggggagatcatgttggagtactcaaaggaagtgatgaagttagcggagttaatgtttgaaattttatcagaagctttagggttgagtcctaaccacctcaaagaaatggattgcgcaaaaggtttatggatgctctgtcattgttttccaccctgtcctgagccaaaccgaacattcggcggcgctcagcacacagacagatctttccttactattcttcttaacgacaacaatggaggacttcaagttctctacgatggatactggatcgatgttcctcctaatcccgaagcacttatctttaacgtaggagatttcctccagcttatctcgaatgacaagtttgtaagcatggagcatagaattttggcaaatggaggtgaagagccgcgcatttcggtcgcttgtttctttgtgcatacttttacttcaccaagttcgagagtatatggacccattaaagagcttctgtctgagctaaaccctccaaaatacagagacaccacctcggaatcctccaatcactatgtggctagaaaacctaatgggaattcttcgttggaccatttaaggatctgaaacttgaacctatatctcagaggttttcttgagtttccaataaaatttggtgcacgctgtgacgtaccatgttcaagaccttgaacgtatcattcaataattcttccgttgtg

SEQ ID NO: 40797 - protein, 373 aa, Arabidopsis thaliana
  peptide (1)..(373): Ceres Seq. ID no. 12580435
TSIFYTKKYKIKNTMAENYDRASELKAFDEMKIGVKGLVDAGVTKVPRIFHNPHVNVANPKPTSTVVMIPTIDLGGVFESTVVRESVVAKVKDAMEKFGFFQAINHGVPLDVMEKMINGIRRFHDQDPEVRKMFYTRDKTKKLKYHSNADLYESPAASWRDTLSCVMAPDVPKAQDLPEVCGEIMLEYSKEVMKLAELMFEILSEALGLSPNHLKEMDCAKGLWMLCHCFPPCPEPNRTFGGAQHTDRSFLTILLNDNNGGLQVLYDGYWIDVPPNPEALIFNVGDFLQLISNDKFVSMEHRILANGGEEPRISVACFFVHTFTSPSSRVYGPIKELLSELNPPKYRDTTSESSNHYVARKPNGNSSLDHLRI

SEQ ID NO: 40798 - protein, 359 aa, Arabidopsis thaliana
  peptide (1)..(359): Ceres Seq. ID no. 12580436
MAENYDRASELKAFDEMKIGVKGLVDAGVTKVPRIFHNPHVNVANPKPTSTVVMIPTIDLGGVFESTVVRESVVAKVKDAMEKFGFFQAINHGVPLDVMEKMINGIRRFHDQDPEVRKMFYTRDKTKKLKYHSNADLYESPAASWRDTLSCVMAPDVPKAQDLPEVCGEIMLEYSKEVMKLAELMFEILSEALGLSPNHLKEMDCAKGLWMLCHCFPPCPEPNRTFGGAQHTDRSFLTILLNDNNGGLQVLYDGYWIDVPPNPEALIFNVGDFLQLISNDKFVSMEHRILANGGEEPRISVACFFVHTFTSPSSRVYGPIKELLSELNPPKYRDTTSESSNHYVARKPNGNSSLDHLRI

SEQ ID NO: 40799 - protein, 343 aa, Arabidopsis thaliana
  peptide (1)..(343): Ceres Seq. ID no. 12580437
MKIGVKGLVDAGVTKVPRIFHNPHVNVANPKPTSTVVMIPTIDLGGVFESTVVRESVVAKVKDAMEKFGFFQAINHGVPLDVMEKMINGIRRFHDQDPEVRKMFYTRDKTKKLKYHSNADLYESPAASWRDTLSCVMAPDVPKAQDLPEVCGEIMLEYSKEVMKLAELMFEILSEALGLSPNHLKEMDCAKGLWMLCHCFPPCPEPNRTFGGAQHTDRSFLTILLNDNNGGLQVLYDGYWIDVPPNPEALIFNVGDFLQLISNDKFVSMEHRILANGGEEPRISVACFFVHTFTSPSSRVYGPIKELLSELNPPKYRDTTSESSNHYVARKPNGNSSLDHLRI

SEQ ID NO: 40800 - DNA, 1832 bp, Arabidopsis thaliana
  misc_feature (1)..(1832): Ceres Seq. ID no. 12328138
  misc_feature (1)..(1832): Ortholog of  Ceres SEQ ID NO 14311553 as cited in SEQ ID NO 51462
  misc_feature (1)..(1832): Ortholog of  Ceres SEQ ID NO 13599003 as cited in SEQ ID NO 0
acacttcgacggcgatttcgtagcgaaatctccgtctccttcctttaaccccatctcttcttcttcttcttttgctttctcattcgaattaacttcatctctttgatgggattcagcttgttttctcaaatgttagttttttcttcatttgttatgcagcaagtattaaaaaggtgaagactttatcatcctctcagcggcttggatgctaactgcaaactaatgggggatcttgtcaagagacagttttgattgttgatgtacatcaaagcaatcatgaacagacacaggcttctctcagcggcaacagatgaatgcaataaaaaacttggtcaagcttgctcttcttctttatctccagtccataactttctgaatgtccagccagaacaccggaaaactcctttcataaggtcacaatctccagattcacctggtcagctatggccaaagaatagttctcagagcaccttctctcggtcttccaccttttgcacaaacctctacttgtcatcatcttcaacctctgagactcagaaacatctaggaaacagtcttcctttcctccctgatccctcctcttacacccactcagcttctggtgtggagtctgcaagatctccatctattttcactgaggatttgggcaatcaatgtgatggaggcaactccgggtcgcttctcaaagacttccttaatctttctggagatgcttgttccgatggcgattttcatgattttggctgttcgaatgacagctattgcttatcagatcaaatggaattacagttcctgtctgatgaacttgagctggctatcacagaccgcgctgaaactcccaggcttgatgagatctatgaaacgccattggcgtcaaatccagtgacgagattgagtccaagccaaagctgtgttcctggagcaatgtctgtagacgtagtttcatctcacccttctccgggatcagcagccaatcaaaagtcgagaatgagatggactcctgagctccacgagtcttttgtaaaggcggtgatcaaacttgaagggcctgaaaaggccactccaaaggctgttaagaagctcatgaatgttgagggcttgacgatctatcatgtaaaaagccacttgcagaagtatagactagccaagtatatgccagagaaaaaagaagagaaaaggactgataactcagaagaaaagaaactggctttgagtaagagtgaagctgacgagaagaagaaaggggccatacaattaactgaagcactgcgtatgcagatggaagttcagaagcaattgcatgaacagctggaggtgcaacgggtgcttcagctacgaattgaagagcatgctaaatacttggaaaagatgttggaagaacaacgcaaaacaggaaggtggatttcttcttcttcgcagacagtgttatcacctagtgatgactctataccagattctcaaaacatgtccaaaaccaaagcatcttcgcctcagccgccattacctgcagagaacaaagcgtcggaaaccgaagacgataaatgtgaaagccctcagaaacgtcgcaggcttgagaacatagctgaatctgaagatcctaagaggtagtaagattcttcaagtatgtaaatatggtccgttttgtgtaatttagtgagagagagagtgtcactcaaaatatatgtttgtaatgtagatctttgtcagaaacgtgtaaacttattacggatattgaggatgtcactgccttcactgtgagaaaagaatctttaattctgtgtttgtgtgtgtataggtcactggttagtgagaaaactgaagagttcactttc

SEQ ID NO: 40801 - protein, 449 aa, Arabidopsis thaliana
  peptide (1)..(449): Ceres Seq. ID no. 12328139
MYIKAIMNRHRLLSAATDECNKKLGQACSSSLSPVHNFLNVQPEHRKTPFIRSQSPDSPGQLWPKNSSQSTFSRSSTFCTNLYLSSSSTSETQKHLGNSLPFLPDPSSYTHSASGVESARSPSIFTEDLGNQCDGGNSGSLLKDFLNLSGDACSDGDFHDFGCSNDSYCLSDQMELQFLSDELELAITDRAETPRLDEIYETPLASNPVTRLSPSQSCVPGAMSVDVVSSHPSPGSAANQKSRMRWTPELHESFVKAVIKLEGPEKATPKAVKKLMNVEGLTIYHVKSHLQKYRLAKYMPEKKEEKRTDNSEEKKLALSKSEADEKKKGAIQLTEALRMQMEVQKQLHEQLEVQRVLQLRIEEHAKYLEKMLEEQRKTGRWISSSSQTVLSPSDDSIPDSQNMSKTKASSPQPPLPAENKASETEDDKCESPQKRRRLENIAESEDPKR

SEQ ID NO: 40802 - protein, 443 aa, Arabidopsis thaliana
  peptide (1)..(443): Ceres Seq. ID no. 12328140
MNRHRLLSAATDECNKKLGQACSSSLSPVHNFLNVQPEHRKTPFIRSQSPDSPGQLWPKNSSQSTFSRSSTFCTNLYLSSSSTSETQKHLGNSLPFLPDPSSYTHSASGVESARSPSIFTEDLGNQCDGGNSGSLLKDFLNLSGDACSDGDFHDFGCSNDSYCLSDQMELQFLSDELELAITDRAETPRLDEIYETPLASNPVTRLSPSQSCVPGAMSVDVVSSHPSPGSAANQKSRMRWTPELHESFVKAVIKLEGPEKATPKAVKKLMNVEGLTIYHVKSHLQKYRLAKYMPEKKEEKRTDNSEEKKLALSKSEADEKKKGAIQLTEALRMQMEVQKQLHEQLEVQRVLQLRIEEHAKYLEKMLEEQRKTGRWISSSSQTVLSPSDDSIPDSQNMSKTKASSPQPPLPAENKASETEDDKCESPQKRRRLENIAESEDPKR

SEQ ID NO: 40803 - protein, 276 aa, Arabidopsis thaliana
  peptide (1)..(276): Ceres Seq. ID no. 12328141
MELQFLSDELELAITDRAETPRLDEIYETPLASNPVTRLSPSQSCVPGAMSVDVVSSHPSPGSAANQKSRMRWTPELHESFVKAVIKLEGPEKATPKAVKKLMNVEGLTIYHVKSHLQKYRLAKYMPEKKEEKRTDNSEEKKLALSKSEADEKKKGAIQLTEALRMQMEVQKQLHEQLEVQRVLQLRIEEHAKYLEKMLEEQRKTGRWISSSSQTVLSPSDDSIPDSQNMSKTKASSPQPPLPAENKASETEDDKCESPQKRRRLENIAESEDPKR

SEQ ID NO: 40804 - DNA, 1159 bp, Arabidopsis thaliana
  misc_feature (1)..(1159): Ceres Seq. ID no. 13488734
  misc_feature (1)..(1159): Ortholog of  Ceres SEQ ID NO 15224517 as cited in SEQ ID NO 64862
atctaagaagaggattcaggttgttgtaagtcctccaggcgcaagagttgagttcgtcggaactaattacacaggcgagcaagctgctatgcagacgaatacttatagagttggtgtttttaatagagaggctaaaactttgaggattcttcctgttgctcacaataagataatcagattggagcctagagttaaagctcaagaaacaaatgaggaagaagcttcaggaagtgctgtcgtcaaagaacttgaagaactaaaaacaggagaacgcgatcgttataatacaaaaaaagctgttactcgggataagaagaagcgtgccttatatatgggagatgatgctgcgactcagaaggtccttgatgggaaactaagtgagttagatgttaacacagctgctcttgaaggcaccagttctactgttgcacgcaacattcctccttacaataccgctgcaacgactgcaaatgaagcttatcccttagaaaagatcattgaaaagggggattggagttttcttgaagatatttactgacttctgcaacaggaaactgaagcagcaactgaggcttaccctgtatttgtccgcaacagattgtacagattgcgagatatcaaggacgatatgaaaaagcagacggtttgtggtgctgcaacgcttctcacccatctggttaagttcaaggacagaaactcaatgaatggttacgattccgctaaagaccacaagatgccagacatcttccgtcaaaaattcaacagcatgttcaaggattctgaatcagagaggatacctgttgacaagatcaaccttctgataagctacgttcttgtgctatcccttcacgtggataatttcatgaccgatccagaagacatagcaaaagatctgaggacaagcacagttgagctgaggaaacattttctacagcttggctgcaaattcctgaagcagaattctactacggttgctaccttaccgacccctctcaatttcccggaggttaaccggaggcgcagggcacgaaagtgatgacgattttgttctatctttacatatttgctgctattttaatgatatttctttgacggtctgttgagatattataaattgttctgtttcttgggtttaatgatatatgatgttttggcattt

SEQ ID NO: 40805 - protein, 178 aa, Arabidopsis thaliana
  peptide (1)..(178): Ceres Seq. ID no. 13488735
SKKRIQVVVSPPGARVEFVGTNYTGEQAAMQTNTYRVGVFNREAKTLRILPVAHNKIIRLEPRVKAQETNEEEASGSAVVKELEELKTGERDRYNTKKAVTRDKKKRALYMGDDAATQKVLDGKLSELDVNTAALEGTSSTVARNIPPYNTAATTANEAYPLEKIIEKGDWSFLEDIY

SEQ ID NO: 40806 - protein, 149 aa, Arabidopsis thaliana
  peptide (1)..(149): Ceres Seq. ID no. 13488736
MQTNTYRVGVFNREAKTLRILPVAHNKIIRLEPRVKAQETNEEEASGSAVVKELEELKTGERDRYNTKKAVTRDKKKRALYMGDDAATQKVLDGKLSELDVNTAALEGTSSTVARNIPPYNTAATTANEAYPLEKIIEKGDWSFLEDIY

SEQ ID NO: 40807 - protein, 135 aa, Arabidopsis thaliana
  peptide (1)..(135): Ceres Seq. ID no. 13488737
MKKQTVCGAATLLTHLVKFKDRNSMNGYDSAKDHKMPDIFRQKFNSMFKDSESERIPVDKINLLISYVLVLSLHVDNFMTDPEDIAKDLRTSTVELRKHFLQLGCKFLKQNSTTVATLPTPLNFPEVNRRRRARK

SEQ ID NO: 40808 - DNA, 884 bp, Arabidopsis thaliana; identical to SEQ ID NO: 26495
  misc_feature (1)..(884): Ceres Seq. ID no. 12422963
  misc_feature (1)..(884): Ortholog of  Ceres SEQ ID NO 12627129 as cited in SEQ ID NO 68657
  misc_feature (1)..(884): Ortholog of  Ceres SEQ ID NO 15179538 as cited in SEQ ID NO 0

SEQ ID NO: 40809 - protein, 245 aa, Arabidopsis thaliana; identical to SEQ ID NO: 26496
  peptide (1)..(245): Ceres Seq. ID no. 12422964

SEQ ID NO: 40810 - protein, 217 aa, Arabidopsis thaliana; identical to SEQ ID NO: 26497
  peptide (1)..(217): Ceres Seq. ID no. 12422965

SEQ ID NO: 40811 - protein, 216 aa, Arabidopsis thaliana; identical to SEQ ID NO: 26498
  peptide (1)..(216): Ceres Seq. ID no. 12422966

SEQ ID NO: 40812 - DNA, 1342 bp, Arabidopsis thaliana
  misc_feature (1)..(1342): Ceres Seq. ID no. 12396618
  misc_feature (1)..(1342): Ortholog of  Ceres SEQ ID NO 15174737 as cited in SEQ ID NO 52912
  misc_feature (1)..(1342): Ortholog of  Ceres SEQ ID NO 13624551 as cited in SEQ ID NO 0
aacgagtatataactacctttcaattctctctgcctctcatagttaatatatatacgttcacaatcacttctcttctctatttcttattcattatctcaaccctctctctctctctctcagtacaacttatcatccatcaccatatatagagaatatgagcaaaacggaagcaatcagcttgaccaaaaggggaatgttgccgccaagtagttgcaatagcctaatggaccgctctgagtcccttaagagggacagtgtgatgggcaatggtgcagccaaagtgagaggaagcttggagcgcaagaaatcaaagagttttaaggaaggagatggttattcttcgtggctcataacggaggctcctgggagtatagccgccgtgaggagagagcaagtggcggcacaacaagcactaaggaaactaaagattgctcattacggtagatccaaatcaaccattaatttcacttcttccaaagtcgtccctcttcttaaccctaaccctaaccctcatcctcagagatgcagcttcctcacccccacttctgatcctatttacgtggcctaccatgatgaagaatggggagttccagttcatgatgacaagacgttgttcgaactgctgaccctaagcggcgcacaagtaggctccgattggacttcaaccttgagaaaacgccatgactataggaaggcctttatggagtttgaggcggaagtggttgccaaactcaccgagaaagagatgaatgcaataagcatcgaatacaagatagagatgagcaaagtgagaggtgttgtggaaaacgctaaaaagatcgtagagatcaagaaagcgtttgtgtcattagagaaatacctttggggatttgtgaaccacaaaccaatctccacgaactacaagcttggacacaagattccggtcaagacatcgaagtcggagagcatcagcaaagacatggttcgtcgaggcttccggttcgtgggtcccactgtggttcactcattcatgcaagccgctggtcttacaaacgaccacttgatcacttgctgtcgccacgctccttgcactctccttgcaaccaatccctaattattaatttttattttaattgaaagtggtgtttttatttaactttcgagtgcaaaatgtaggtttaggagaaaagagattgcagttttttaaaattggcaatgtaagataaaccagctggtttgatttttttcttgtgtgtgaggtgtttaaaatcacatgtataatggtttttgatgtatgtgtggtgtggcaaattgaaatagtaattgattttcatatgatttatctattgttcaaaatttgtt

SEQ ID NO: 40813 - protein, 312 aa, Arabidopsis thaliana
  peptide (1)..(312): Ceres Seq. ID no. 12396619
MSKTEAISLTKRGMLPPSSCNSLMDRSESLKRDSVMGNGAAKVRGSLERKKSKSFKEGDGYSSWLITEAPGSIAAVRREQVAAQQALRKLKIAHYGRSKSTINFTSSKVVPLLNPNPNPHPQRCSFLTPTSDPIYVAYHDEEWGVPVHDDKTLFELLTLSGAQVGSDWTSTLRKRHDYRKAFMEFEAEVVAKLTEKEMNAISIEYKIEMSKVRGVVENAKKIVEIKKAFVSLEKYLWGFVNHKPISTNYKLGHKIPVKTSKSESISKDMVRRGFRFVGPTVVHSFMQAAGLTNDHLITCCRHAPCTLLATNP

SEQ ID NO: 40814 - protein, 299 aa, Arabidopsis thaliana
  peptide (1)..(299): Ceres Seq. ID no. 12396620
MLPPSSCNSLMDRSESLKRDSVMGNGAAKVRGSLERKKSKSFKEGDGYSSWLITEAPGSIAAVRREQVAAQQALRKLKIAHYGRSKSTINFTSSKVVPLLNPNPNPHPQRCSFLTPTSDPIYVAYHDEEWGVPVHDDKTLFELLTLSGAQVGSDWTSTLRKRHDYRKAFMEFEAEVVAKLTEKEMNAISIEYKIEMSKVRGVVENAKKIVEIKKAFVSLEKYLWGFVNHKPISTNYKLGHKIPVKTSKSESISKDMVRRGFRFVGPTVVHSFMQAAGLTNDHLITCCRHAPCTLLATNP

SEQ ID NO: 40815 - protein, 289 aa, Arabidopsis thaliana
  peptide (1)..(289): Ceres Seq. ID no. 12396621
MDRSESLKRDSVMGNGAAKVRGSLERKKSKSFKEGDGYSSWLITEAPGSIAAVRREQVAAQQALRKLKIAHYGRSKSTINFTSSKVVPLLNPNPNPHPQRCSFLTPTSDPIYVAYHDEEWGVPVHDDKTLFELLTLSGAQVGSDWTSTLRKRHDYRKAFMEFEAEVVAKLTEKEMNAISIEYKIEMSKVRGVVENAKKIVEIKKAFVSLEKYLWGFVNHKPISTNYKLGHKIPVKTSKSESISKDMVRRGFRFVGPTVVHSFMQAAGLTNDHLITCCRHAPCTLLATNP

SEQ ID NO: 40816 - DNA, 621 bp, Arabidopsis thaliana; identical to SEQ ID NO: 31032
  misc_feature (1)..(621): Ceres Seq. ID no. 12559532
  misc_feature (1)..(621): Ortholog of  Ceres SEQ ID NO 15169443 as cited in SEQ ID NO 58785

SEQ ID NO: 40817 - protein, 115 aa, Arabidopsis thaliana; identical to SEQ ID NO: 31033
  peptide (1)..(115): Ceres Seq. ID no. 12559533

SEQ ID NO: 40818 - DNA, 1661 bp, Arabidopsis thaliana
  misc_feature (1)..(1661): Ceres Seq. ID no. 13488644
  misc_feature (1)..(1661): Ortholog of  Ceres SEQ ID NO 13597334 as cited in SEQ ID NO 64244
atttgtgtaatcatatgaaaagaaaagtaaggaattttccattactctctctcacttctctctctctaattctcaccaagaacccagaattgagaataagaatctatagatcattatgctcacctctctgctcttgtttaagtgatgagctgaatctaacaaacgttcacacgtgttaacacccacacgtgcgacttcttctttattctcttcaaagcctcttcttgaactagaagtttcttttgaacatgtatagtccaaatactctagttgctttagagtcattgccaaacttgaacttgttttatccttcttctctttcattagcttgagcaagctgaagcttctttgtgctttctccaagctccactttaaagttgaatcatactcaaacatttactgacagaggactgattcatagaatatttaacatcataagatgatcttctcaataataatggcggttcttttggcccaagcttcaagtttgccaaagaagactgtccagagttcggatggggatattgtagactgcttcgacgtgagagatcagccttcattggatcacccactattgcagaatcatgaaattcagggcgcacccgccacaggattaccatatatgatcaacaaagcgggaaaaagaagagtttggcaggtttggaaccaaaacggcaccagctgtcctgacgaaactatacccataagacgtagcgtggtcggggctaaaagatttaagaaaaaacattggacagatgttcgagtcaatcgccgaacagttccatacgccgctgaggagggacacgagtacgcgattggagaggtggtatatctgcggggaatatatggaacagtggcaactatgaacgtttggaatccatctgtagaacatggaacaaacgaatttagtttgtcccaaatttggctcgtcgctggacattacaacgattccgacctcaacacagtagaggctggttggcaggttttcccggatcattatcatgacagccagccacgacttttcgtctattggacgaaggacacatatcagaagacagggtgtctcaacctcgagtgccctggttttgttcaagtcactagcgagtttgccattggcagtgcattctctcctacatcttcttacggcggcagccagtacgacatcacgatgtacatatggaaggatactaaagatggcaactggtggctgagcattgactcctcagtgattgggtattggccggcgaggcttttcacgcatttagctcacgggccggcgacgttggtacagtggggaggcgagattgtaaactctcgcagctatggccagcacactaccacacagatgggctcgggacattttgcagaggaaggcttcggcaaagcaggtagcttccgaaacctgaaaattattgactacctctcgtacatgcaaccagtccaagagttcatcctgcaaacgaagaaccccacatgttatactgccataaagggatacagcgaggagtgggggagtcatttctactacggcggaccgggatataacgccctgtgtccatagtgtttggacattaggataaacttatttctttatgatatatgataaaactagagtttggagtgtttaatgacgttaaataaaaaactagagtttggatttc

SEQ ID NO: 40819 - protein, 373 aa, Arabidopsis thaliana
  peptide (1)..(373): Ceres Seq. ID no. 13488645
MIFSIIMAVLLAQASSLPKKTVQSSDGDIVDCFDVRDQPSLDHPLLQNHEIQGAPATGLPYMINKAGKRRVWQVWNQNGTSCPDETIPIRRSVVGAKRFKKKHWTDVRVNRRTVPYAAEEGHEYAIGEVVYLRGIYGTVATMNVWNPSVEHGTNEFSLSQIWLVAGHYNDSDLNTVEAGWQVFPDHYHDSQPRLFVYWTKDTYQKTGCLNLECPGFVQVTSEFAIGSAFSPTSSYGGSQYDITMYIWKDTKDGNWWLSIDSSVIGYWPARLFTHLAHGPATLVQWGGEIVNSRSYGQHTTTQMGSGHFAEEGFGKAGSFRNLKIIDYLSYMQPVQEFILQTKNPTCYTAIKGYSEEWGSHFYYGGPGYNALCP

SEQ ID NO: 40820 - protein, 367 aa, Arabidopsis thaliana
  peptide (1)..(367): Ceres Seq. ID no. 13488646
MAVLLAQASSLPKKTVQSSDGDIVDCFDVRDQPSLDHPLLQNHEIQGAPATGLPYMINKAGKRRVWQVWNQNGTSCPDETIPIRRSVVGAKRFKKKHWTDVRVNRRTVPYAAEEGHEYAIGEVVYLRGIYGTVATMNVWNPSVEHGTNEFSLSQIWLVAGHYNDSDLNTVEAGWQVFPDHYHDSQPRLFVYWTKDTYQKTGCLNLECPGFVQVTSEFAIGSAFSPTSSYGGSQYDITMYIWKDTKDGNWWLSIDSSVIGYWPARLFTHLAHGPATLVQWGGEIVNSRSYGQHTTTQMGSGHFAEEGFGKAGSFRNLKIIDYLSYMQPVQEFILQTKNPTCYTAIKGYSEEWGSHFYYGGPGYNALCP

SEQ ID NO: 40821 - protein, 312 aa, Arabidopsis thaliana
  peptide (1)..(312): Ceres Seq. ID no. 13488647
MINKAGKRRVWQVWNQNGTSCPDETIPIRRSVVGAKRFKKKHWTDVRVNRRTVPYAAEEGHEYAIGEVVYLRGIYGTVATMNVWNPSVEHGTNEFSLSQIWLVAGHYNDSDLNTVEAGWQVFPDHYHDSQPRLFVYWTKDTYQKTGCLNLECPGFVQVTSEFAIGSAFSPTSSYGGSQYDITMYIWKDTKDGNWWLSIDSSVIGYWPARLFTHLAHGPATLVQWGGEIVNSRSYGQHTTTQMGSGHFAEEGFGKAGSFRNLKIIDYLSYMQPVQEFILQTKNPTCYTAIKGYSEEWGSHFYYGGPGYNALCP

SEQ ID NO: 40822 - DNA, 1343 bp, Arabidopsis thaliana
  misc_feature (1)..(1343): Ceres Seq. ID no. 12328390
  misc_feature (1)..(1343): Ortholog of  Ceres SEQ ID NO 12616843 as cited in SEQ ID NO 68992
aattccggtgcagctaagaaccagagatagagagatagagatgcggaggatcaattcactgtacggaagaattggtctcctaaaacgagtacccgagaaatctacgaagcaagctcatacatttctcgcatctctctccttctctacggaaggtgcttatggcggtgacggtgagtttcagcagaacagctccaaagtcaagatctttgaccgagacctcaagcgaatacatcgtgatcgagcggcgtggctttctcgccaaaaaaacgattcttttgttgacgctgttgcagataatctacttgatcgcttagaggattgtaagaagagttttcccactgcattttgtttgggaggatctcttggtgctgttaagagattactacgtcgtcgcggtgggattgagaagcttatcatgatggatacttcatatgacatgattaagtcatgtagagatgctcaagacgattcactcgataactccattgaaacctcttactttgttggtgatgaagagtttctgccagtcaaagagagttcggttgatttgatcattagttcgttggggcttcactggacaaatgatcttcctggatccatgatacagtgcaagctagcactgaagccggatggcttatttttagcagcaattcttggtggagaaaccttaaaggagctgagaatagcatgcactttggctcacatggagcgggaaggagggattagtcctcggctatcacctttggcacaggttagggacgcagggaatctgttgaccagggcgggttttagtcttcctggtgttgatgttgatgaatatgtagttaaatacaagagagcgatggatcttatagagcatcttcgtgcgatgggtgaaaccaatgctcttctcgagagaaacaagattttgaatcgtgaaactgctgttgccacggcagccatatatgactccatgtttgccacagaggacggcactatacccgctacttttcaggtgatttacatgacaggatggagagaacaatcgtctcacccgcaggccaaacgaagaggttcagccaccgtatccttcacggatctccaaaagcaatttggcggacaatcttgatggaatgattgaagaagagaaacattcaataagcagagactttacaaatgacacttgagagagaaatcagtgacttaagctataaggtacttggaggaactcttgtagatttgtcggagtctttcactgggcgaaagcatcacaattaggacgcctgctttcgcccatgtatttcgtatcgaataatagctgatcagaaacatatttgtattttacaaaaatattacgaatactt

SEQ ID NO: 40823 - protein, 368 aa, Arabidopsis thaliana
  peptide (1)..(368): Ceres Seq. ID no. 12328391
IPVQLRTRDREIEMRRINSLYGRIGLLKRVPEKSTKQAHTFLASLSFSTEGAYGGDGEFQQNSSKVKIFDRDLKRIHRDRAAWLSRQKNDSFVDAVADNLLDRLEDCKKSFPTAFCLGGSLGAVKRLLRRRGGIEKLIMMDTSYDMIKSCRDAQDDSLDNSIETSYFVGDEEFLPVKESSVDLIISSLGLHWTNDLPGSMIQCKLALKPDGLFLAAILGGETLKELRIACTLAHMEREGGISPRLSPLAQVRDAGNLLTRAGFSLPGVDVDEYVVKYKRAMDLIEHLRAMGETNALLERNKILNRETAVATAAIYDSMFATEDGTIPATFQVIYMTGWREQSSHPQAKRRGSATVSFTDLQKQFGGQS

SEQ ID NO: 40824 - protein, 355 aa, Arabidopsis thaliana
  peptide (1)..(355): Ceres Seq. ID no. 12328392
MRRINSLYGRIGLLKRVPEKSTKQAHTFLASLSFSTEGAYGGDGEFQQNSSKVKIFDRDLKRIHRDRAAWLSRQKNDSFVDAVADNLLDRLEDCKKSFPTAFCLGGSLGAVKRLLRRRGGIEKLIMMDTSYDMIKSCRDAQDDSLDNSIETSYFVGDEEFLPVKESSVDLIISSLGLHWTNDLPGSMIQCKLALKPDGLFLAAILGGETLKELRIACTLAHMEREGGISPRLSPLAQVRDAGNLLTRAGFSLPGVDVDEYVVKYKRAMDLIEHLRAMGETNALLERNKILNRETAVATAAIYDSMFATEDGTIPATFQVIYMTGWREQSSHPQAKRRGSATVSFTDLQKQFGGQS

SEQ ID NO: 40825 - protein, 230 aa, Arabidopsis thaliana
  peptide (1)..(230): Ceres Seq. ID no. 12328393
MMDTSYDMIKSCRDAQDDSLDNSIETSYFVGDEEFLPVKESSVDLIISSLGLHWTNDLPGSMIQCKLALKPDGLFLAAILGGETLKELRIACTLAHMEREGGISPRLSPLAQVRDAGNLLTRAGFSLPGVDVDEYVVKYKRAMDLIEHLRAMGETNALLERNKILNRETAVATAAIYDSMFATEDGTIPATFQVIYMTGWREQSSHPQAKRRGSATVSFTDLQKQFGGQS

SEQ ID NO: 40826 - DNA, 1452 bp, Arabidopsis thaliana
  misc_feature (1)..(1452): Ceres Seq. ID no. 12395487
  misc_feature (1)..(1452): Ortholog of  Ceres SEQ ID NO 15176843 as cited in SEQ ID NO 59195
aaatcgagcgattgagagcacttcgcaaaatcagagcgacaaaaaaaaataaaaaccaatcctttcgattccaaattttttgttactcactcgcacgagttttatttggtcgttagttatctctttcgttgaataacggttttaatttaaaccgttactttttatcaatggcgacttcgtcaccgtctctgagtaacaatggtctttcctccgtcgtcacgcctcccaaaactctccgtggtctcaataagcctaagtgtattcaatgcggcaatgtagctcgctccaggtgcccttttcaatcttgtaagggttgttgttcaagagcagagaatccctgcccgattcacgttcttaaagtagcttcaacgtctggtgagaagacgcaggcgccaagtactccatcttcagagcagaaagcaaccgagggcactcccgggagtaccactagagtttcgtcaatccggcaactttctagcaactttgctcagtttaataacctgaatgcttcttcccgccagagaaaacctttgacgataaaggatgctcaagctttaaacgagtggcggtttacaaagctaaaagagtacagagacagaaacattgaagtagaaaatgaagcttttgatcggtacatgagtaatgtgaatttactcgaagaagcattttcatttacatctgttcctgatgaagagagtcatggaacagcagctcctgagcaaaacaaagaggaaaatattgtttcagagcttaaactgaggctgagatcgaactctgcaagaacagagagctttaagaagcggatcgcggagacagtcaaagccggtttggtgaagcttaagagactggatttaggcagttcttcagatgatcaagatgatatcaaaaggcgggtcaaaagaaagaaatgggaagagaaaggttcagctttgaatgaaataatcgataaactgaacaaagcaagaaccgaagaggatctcaaatcttgcttagagatgaaatcaaagctctgtggtcaagtttctcccactgctgcttccgagaagaacaagatctttccgggtgtagtccgaaaagttgagatgagtgaagaagcacttcaaaaaatcgctgagaatctccaatcttttgacaaagttggaatgttgtgaagtcgagaacatcctgtggatgaactgaaaagtttgagtggcaagaaaatttctagatccttcgtgaccacggtattgtacaatgatcaaacatccctcaaaactgatcctgaagactccaaagactcaagagattcttgtaaagtagtgttgagcatcatttagatattagaactcagccatggataaagctgttgattctatctcattggatttttttcactgtgtgttgttgctttgttagatttgaaattgctcattggattacctttgacttaataaatagttggtttggtttggt

SEQ ID NO: 40827 - protein, 327 aa, Arabidopsis thaliana
  peptide (1)..(327): Ceres Seq. ID no. 12395488
MATSSPSLSNNGLSSVVTPPKTLRGLNKPKCIQCGNVARSRCPFQSCKGCCSRAENPCPIHVLKVASTSGEKTQAPSTPSSEQKATEGTPGSTTRVSSIRQLSSNFAQFNNLNASSRQRKPLTIKDAQALNEWRFTKLKEYRDRNIEVENEAFDRYMSNVNLLEEAFSFTSVPDEESHGTAAPEQNKEENIVSELKLRLRSNSARTESFKKRIAETVKAGLVKLKRLDLGSSSDDQDDIKRRVKRKKWEEKGSALNEIIDKLNKARTEEDLKSCLEMKSKLCGQVSPTAASEKNKIFPGVVRKVEMSEEALQKIAENLQSFDKVGML

SEQ ID NO: 40828 - protein, 171 aa, Arabidopsis thaliana
  peptide (1)..(171): Ceres Seq. ID no. 12395489
MSNVNLLEEAFSFTSVPDEESHGTAAPEQNKEENIVSELKLRLRSNSARTESFKKRIAETVKAGLVKLKRLDLGSSSDDQDDIKRRVKRKKWEEKGSALNEIIDKLNKARTEEDLKSCLEMKSKLCGQVSPTAASEKNKIFPGVVRKVEMSEEALQKIAENLQSFDKVGML

SEQ ID NO: 40829 - DNA, 703 bp, Arabidopsis thaliana
  misc_feature (1)..(703): Ceres Seq. ID no. 12580344
  misc_feature (1)..(703): Ortholog of  Ceres SEQ ID NO 13582619 as cited in SEQ ID NO 56520
  misc_feature (1)..(703): Ortholog of  Ceres SEQ ID NO 12611392 as cited in SEQ ID NO 56826
  misc_feature (1)..(703): Ortholog of  Ceres SEQ ID NO 13660872 as cited in SEQ ID NO 60830
  misc_feature (1)..(703): Ortholog of  Ceres SEQ ID NO 12616221 as cited in SEQ ID NO 63291
aaaatacttttttgttgctctctactagcctgcctttctgggaacgcgaaaagaaagacaaaattttcttgcaattgaaggtgaggtttggtgaaagggaaattgagaaaaccctagaacaagtacggtctctattttgctttaatgggtcgcgaatctgtggctgttgtgactgcgccgccctcggcgactgctccgggtactgcttcggtggcgacctcgcttgctcctggcttccgatttcatccgactgatgaggaactcgtgagctattacttgaagaggaaggttctgggccaacctgtacgcttcgatgcgattggagaggtcgatatatacaagcatgagccctgggatttagcagtgttttcgagattgaagacaagggaccaagaatggtacttctacagtgcattagataagaagtatggaaacggtgctaggatgaaccgagcaactaacagagggtactggaaagctactggaaaagacagagaaatccgccgtgacattctgcttctcggtatgaaaaagacacttgttttccacagtgggcgtgcaccagacgggcttcggactaattgggttatgcacgagtatcgccttgtggaatatgaaaccgagaaaaacggaaacctggtgcaagatgcatatgtgttgtgtagagtcttgttttccatctaatgacttaaggtttttatcc

SEQ ID NO: 40830 - protein, 179 aa, Arabidopsis thaliana
  peptide (1)..(179): Ceres Seq. ID no. 12580345
MGRESVAVVTAPPSATAPGTASVATSLAPGFRFHPTDEELVSYYLKRKVLGQPVRFDAIGEVDIYKHEPWDLAVFSRLKTRDQEWYFYSALDKKYGNGARMNRATNRGYWKATGKDREIRRDILLLGMKKTLVFHSGRAPDGLRTNWVMHEYRLVEYETEKNGNLVQDAYVLCRVLFSI

SEQ ID NO: 40831 - DNA, 1931 bp, Arabidopsis thaliana
  misc_feature (1)..(1931): Ceres Seq. ID no. 13492425
  misc_feature (1)..(1931): Ortholog of  Ceres SEQ ID NO 15226540 as cited in SEQ ID NO 58479
  misc_feature (1)..(1931): Ortholog of  Ceres SEQ ID NO 13596689 as cited in SEQ ID NO 62728
  misc_feature (1)..(1931): Ortholog of  Ceres SEQ ID NO 14302142 as cited in SEQ ID NO 0
cttcttaaactcgtttttaactctccatctctaaaaagaccatcaacgctcttctctttattgcagcagaaacagaacccagttcaataaagctttttggtaagaaaatttgaaaggaaaagatatttgaaaactcgtagagagaaagtggcacagaatctgaaattctgacactttttaccacgaataatgattctcttttgaaaaacatgactcaatgttttctttatctttttctctgaattgaggtttgtttgtacttaaagtatgctcctttatctaccgttgactgattctactcttttattctcaacttttctctgatttgctcgtgtgtttacttcaattcctcagttcttgtgtagaaagttgagtttcatgtgatcaaaattggggctttactacttttaagagaatgagtgacaaagacgagtttgccgcaaagaagaaggatttggtcaatacgccagtggatttgtatcctccggagaatccaatgttgggtccttctccgatgatggattcattcagagaaactctttggcatgatggtggtttcaatgtccacacagatgcagacacttcctttagaggtaataataatattgatatacctcttgaaatgggttggaatatggctcagttccctgcagattcaggattcattgagcgtgctgcaaagttttctttttttggatgtggtgaaatgatgatgaaccaacaacaatcatctcttggagttccagattcaactggcttgtttcttcaagatacacagattcctagtggatccaaactagataatggtcctcttactgatgcatctaagttagtgaaagagagatcgattaataatgtatcagaggattctcaatctagtggaggtaatggtcatgatgatgctaagtgtgggcaaacatcttccaaggggtttagtagtaagaagaggaaaagaattgggaaggattgtgaagaagaagaagataaaaagcaaaaggatgagcaaagtccaacttcaaatgcgaacaagacaaacagtgagaagcaaccttctgattctttaaaggatgggtatattcacatgagggcacgaagaggccaggctactaatagtcacagtcttgctgaaagagtaagaagagaaaaaatcagtgaaaggatgaagttcttgcaagatcttgtgccaggttgcgacaaggtgactggtaaggcagttatgctcgatgaaatcattaactatgtgcaatcacttcaatgccaaatcgagtttttatcgatgaaactttcggctgtgaatcctgtgctcgattttaacctcgaaagcctccttgcaaaagatgctcttcaatcatctgcaccgacatttccccacaacatgtcgatgctttatcctcctgtatcgtatctctctcaaacaggattcatgcaaccgaacatttcctcaatgtcgctattgagtggaggattaaaacggcaggaaacacatggatatgaaagtgatcaccacaatcttgtccacatgaaccatgaaaccggcactgcacctgatcatgaagatacaacagctgacatgaaggtggagccgtagatgtttcttcttcactttgtactcagctttagctgctgatatagtgcgccgcggtcgagaattttattaacttcgaacagaagagtgaaaacgaaacagaggaggaagcagattttgtctttgaaatattgacagctcccggagaaagagtcgagagtaagaatcaacaatgttgtgtaatgaatagctactgtctgcttcttttgtagctattgtctgcttcttttttgtacatataaatccatgcaagggaagaggaatgttaattcaacacatgtgcacaacatgatcatcacatatgtacttcaacttgatcaatcggaattagctctacttggcaacc

SEQ ID NO: 40832 - protein, 390 aa, Arabidopsis thaliana
  peptide (1)..(390): Ceres Seq. ID no. 13492426
MSDKDEFAAKKKDLVNTPVDLYPPENPMLGPSPMMDSFRETLWHDGGFNVHTDADTSFRGNNNIDIPLEMGWNMAQFPADSGFIERAAKFSFFGCGEMMMNQQQSSLGVPDSTGLFLQDTQIPSGSKLDNGPLTDASKLVKERSINNVSEDSQSSGGNGHDDAKCGQTSSKGFSSKKRKRIGKDCEEEEDKKQKDEQSPTSNANKTNSEKQPSDSLKDGYIHMRARRGQATNSHSLAERVRREKISERMKFLQDLVPGCDKVTGKAVMLDEIINYVQSLQCQIEFLSMKLSAVNPVLDFNLESLLAKDALQSSAPTFPHNMSMLYPPVSYLSQTGFMQPNISSMSLLSGGLKRQETHGYESDHHNLVHMNHETGTAPDHEDTTADMKVEP

SEQ ID NO: 40833 - protein, 363 aa, Arabidopsis thaliana
  peptide (1)..(363): Ceres Seq. ID no. 13492427
MLGPSPMMDSFRETLWHDGGFNVHTDADTSFRGNNNIDIPLEMGWNMAQFPADSGFIERAAKFSFFGCGEMMMNQQQSSLGVPDSTGLFLQDTQIPSGSKLDNGPLTDASKLVKERSINNVSEDSQSSGGNGHDDAKCGQTSSKGFSSKKRKRIGKDCEEEEDKKQKDEQSPTSNANKTNSEKQPSDSLKDGYIHMRARRGQATNSHSLAERVRREKISERMKFLQDLVPGCDKVTGKAVMLDEIINYVQSLQCQIEFLSMKLSAVNPVLDFNLESLLAKDALQSSAPTFPHNMSMLYPPVSYLSQTGFMQPNISSMSLLSGGLKRQETHGYESDHHNLVHMNHETGTAPDHEDTTADMKVEP

SEQ ID NO: 40834 - protein, 357 aa, Arabidopsis thaliana
  peptide (1)..(357): Ceres Seq. ID no. 13492428
MMDSFRETLWHDGGFNVHTDADTSFRGNNNIDIPLEMGWNMAQFPADSGFIERAAKFSFFGCGEMMMNQQQSSLGVPDSTGLFLQDTQIPSGSKLDNGPLTDASKLVKERSINNVSEDSQSSGGNGHDDAKCGQTSSKGFSSKKRKRIGKDCEEEEDKKQKDEQSPTSNANKTNSEKQPSDSLKDGYIHMRARRGQATNSHSLAERVRREKISERMKFLQDLVPGCDKVTGKAVMLDEIINYVQSLQCQIEFLSMKLSAVNPVLDFNLESLLAKDALQSSAPTFPHNMSMLYPPVSYLSQTGFMQPNISSMSLLSGGLKRQETHGYESDHHNLVHMNHETGTAPDHEDTTADMKVEP

SEQ ID NO: 40835 - DNA, 1662 bp, Arabidopsis thaliana
  misc_feature (1)..(1662): Ceres Seq. ID no. 13491575
  misc_feature (1)..(1662): Ortholog of  Ceres SEQ ID NO 13656435 as cited in SEQ ID NO 65853
ctcccgacgccattatccttcaccctcggagcttttcttgaagcagggattcttctaatcattaatccctacttctttctttcttttttgtttgttctcctttgagatctatctagtactagtagtaaaaccccctcccctccattgaatttgaattgaattgaatctctgggaatcaaatctttgatgtcgcatctggacgacattccttctacgcctgggaaattcaagatgatggataaatcccccttcttcctccaccgtactcgttggcaatcctccgtcgccaagcttgccttttggtcccttgtctttttcggattgctcttcatcttcttctaccgatctcccatctccaatcccgattcctctcgccgctctcttcgcacctactcttggggcggtcccgcctgggagaaacgcgtccgatcctccgctcgtgtccgcacccgcaacggcgtctccgttctcgtcaccggggccgccggtttcgtcgggactcacgtctctgccgctcttaaacgacgcggcgacggcgttctaggcctcgacaacttcaacgattactacgacacctctctcaagagatctcgacaagccctcctcgagagaagcggagtgttcatcgttgaaggagacatcaacgatctgtctctcctcaagaagctcttcgaggtcgtccctttcactcacgtcatgcatcttgccgctcaagctggtgtcagatacgccatggagaaccccggctcctacgttcacagcaacatcgctggtttcgttaacctcctcgaggtctgtaaatccgctaatcctcagccggcgatcgtgtgggcatcgtctagctccgtctacggtttaaacaccaaagtccccttctctgagaaagacagaacagatcagcctgcgagtctctacgctgcgaccaagaaagctggagaagagattgcccacacttacaaccacatctacgggctctctctcaccggcttgaggtttttcacggtgtacgggccgtggggaagacctgacatggcttacttcttcttcaccagagacatcctcaaagggaaagctatttcgatcttcgaaggagccaatcacggaacagtggctagggatttcacatacatcgatgacatagtgaaaggatgtttgggggctctggacacggcggagaagagcacagggagtggtggcaagaagcggggagcggctcagctaagggtattcaacctggggaacacatctccggtgccggtgactgatcttgtgagtatattggagagattgttgaaagtgaaagccaagaggaacatgatgaagctgccgaggaatggtgatgtgcccttcacacatgctaatatcagttcggcacagagagagtttgggtacaaaccaagcacggatttgcagactggtctaaagaagtttgtgagatggtatcttggttactacaagcaggggggaaagaaagttgctgctgctgcttgaatattgataattcacaagattctttagtgtatagtgagtgagtggattgatacacaccataaagaagagacatgattcattcgagattatatattctttacatttgtgttctgctttgtaatttcgatctcttgagtcgaatctctgatatttatttcataggaagttcac

SEQ ID NO: 40836 - protein, 434 aa, Arabidopsis thaliana
  peptide (1)..(434): Ceres Seq. ID no. 13491576
MSHLDDIPSTPGKFKMMDKSPFFLHRTRWQSSVAKLAFWSLVFFGLLFIFFYRSPISNPDSSRRSLRTYSWGGPAWEKRVRSSARVRTRNGVSVLVTGAAGFVGTHVSAALKRRGDGVLGLDNFNDYYDTSLKRSRQALLERSGVFIVEGDINDLSLLKKLFEVVPFTHVMHLAAQAGVRYAMENPGSYVHSNIAGFVNLLEVCKSANPQPAIVWASSSSVYGLNTKVPFSEKDRTDQPASLYAATKKAGEEIAHTYNHIYGLSLTGLRFFTVYGPWGRPDMAYFFFTRDILKGKAISIFEGANHGTVARDFTYIDDIVKGCLGALDTAEKSTGSGGKKRGAAQLRVFNLGNTSPVPVTDLVSILERLLKVKAKRNMMKLPRNGDVPFTHANISSAQREFGYKPSTDLQTGLKKFVRWYLGYYKQGGKKVAAAA

SEQ ID NO: 40837 - protein, 419 aa, Arabidopsis thaliana
  peptide (1)..(419): Ceres Seq. ID no. 13491577
MMDKSPFFLHRTRWQSSVAKLAFWSLVFFGLLFIFFYRSPISNPDSSRRSLRTYSWGGPAWEKRVRSSARVRTRNGVSVLVTGAAGFVGTHVSAALKRRGDGVLGLDNFNDYYDTSLKRSRQALLERSGVFIVEGDINDLSLLKKLFEVVPFTHVMHLAAQAGVRYAMENPGSYVHSNIAGFVNLLEVCKSANPQPAIVWASSSSVYGLNTKVPFSEKDRTDQPASLYAATKKAGEEIAHTYNHIYGLSLTGLRFFTVYGPWGRPDMAYFFFTRDILKGKAISIFEGANHGTVARDFTYIDDIVKGCLGALDTAEKSTGSGGKKRGAAQLRVFNLGNTSPVPVTDLVSILERLLKVKAKRNMMKLPRNGDVPFTHANISSAQREFGYKPSTDLQTGLKKFVRWYLGYYKQGGKKVAAAA

SEQ ID NO: 40838 - protein, 418 aa, Arabidopsis thaliana
  peptide (1)..(418): Ceres Seq. ID no. 13491578
MDKSPFFLHRTRWQSSVAKLAFWSLVFFGLLFIFFYRSPISNPDSSRRSLRTYSWGGPAWEKRVRSSARVRTRNGVSVLVTGAAGFVGTHVSAALKRRGDGVLGLDNFNDYYDTSLKRSRQALLERSGVFIVEGDINDLSLLKKLFEVVPFTHVMHLAAQAGVRYAMENPGSYVHSNIAGFVNLLEVCKSANPQPAIVWASSSSVYGLNTKVPFSEKDRTDQPASLYAATKKAGEEIAHTYNHIYGLSLTGLRFFTVYGPWGRPDMAYFFFTRDILKGKAISIFEGANHGTVARDFTYIDDIVKGCLGALDTAEKSTGSGGKKRGAAQLRVFNLGNTSPVPVTDLVSILERLLKVKAKRNMMKLPRNGDVPFTHANISSAQREFGYKPSTDLQTGLKKFVRWYLGYYKQGGKKVAAAA

SEQ ID NO: 40839 - DNA, 1110 bp, Arabidopsis thaliana
  misc_feature (1)..(1110): Ceres Seq. ID no. 12439693
  misc_feature (1)..(1110): Ortholog of  Ceres SEQ ID NO 15226909 as cited in SEQ ID NO 61336
  misc_feature (1)..(1110): Ortholog of  Ceres SEQ ID NO 15179474 as cited in SEQ ID NO 0
attcaaaattatataaaatgggaagaagcagcgacgagacgccagtggttctcatcacaggatgttctcagggaggaatcggtcacgcgttggcgcgtgagttctctgctaatggttgtcgtgtggtggcgacgagtcgatcgcagaagacgatgactgaattggagaaagattccaagttctttgtgcaagagctcgatgttcagtctgagcagagcgtgagtaaagttgtgtcgaaagttatcgacaaatttggtcagattgatgttttggttaataacgccggagttcagtgtatcggacctttggcggagattccaatttcagccatggattacaccttcaacaccaatgtgctcggtgaatgaaaattttcgagttacttcttatatgcacaccatgtgtttgttaaaattcttgactcaactctttcatgttttattttgctctgttgatttgggttgtgagaagtctcttcaagaactgaactttgtaaagaaactttgcaggttccatgaggatgactcaagctgttgtacctcacatggcgtctaagaaaaagggaaagattgtgaacataggaagtattagcataatggcaccaggaccatgggctggggtttatactgcatcaaaagctgctcttcatgctcttaccgacactttaaggttggagcttaagccatttgggattgatgtaatcaacattgtaccaggaggtattcaatcaaacatagctaactcagggatatcgagtttcaacaatttacctgaattgaaactatacaaaccgttcgaggacgctatccgtgagagagcgtttctgtcgcaaaacataaagccgatacccacagagacttttgcgaaagagactgtttccgtggtgctgaagaaaaacccaccggcttggtactctacaggtaggttatctacagtcatggcgatcatgcaccatataccgattttcatgaaagattttctgttgactaagagttttatgaaaaagggagtaaaacctgaatagttgtgttcttggttagaaactgttttaaatgtatccaacaaagtaaatgtgttgcctaaccatgttacatctttagtaaaaggatt

SEQ ID NO: 40840 - protein, 169 aa, Arabidopsis thaliana
  peptide (1)..(169): Ceres Seq. ID no. 12439694
MRMTQAVVPHMASKKKGKIVNIGSISIMAPGPWAGVYTASKAALHALTDTLRLELKPFGIDVINIVPGGIQSNIANSGISSFNNLPELKLYKPFEDAIRERAFLSQNIKPIPTETFAKETVSVVLKKNPPAWYSTGRLSTVMAIMHHIPIFMKDFLLTKSFMKKGVKPE

SEQ ID NO: 40841 - protein, 167 aa, Arabidopsis thaliana
  peptide (1)..(167): Ceres Seq. ID no. 12439695
MTQAVVPHMASKKKGKIVNIGSISIMAPGPWAGVYTASKAALHALTDTLRLELKPFGIDVINIVPGGIQSNIANSGISSFNNLPELKLYKPFEDAIRERAFLSQNIKPIPTETFAKETVSVVLKKNPPAWYSTGRLSTVMAIMHHIPIFMKDFLLTKSFMKKGVKPE

SEQ ID NO: 40842 - protein, 159 aa, Arabidopsis thaliana
  peptide (1)..(159): Ceres Seq. ID no. 12439696
MASKKKGKIVNIGSISIMAPGPWAGVYTASKAALHALTDTLRLELKPFGIDVINIVPGGIQSNIANSGISSFNNLPELKLYKPFEDAIRERAFLSQNIKPIPTETFAKETVSVVLKKNPPAWYSTGRLSTVMAIMHHIPIFMKDFLLTKSFMKKGVKPE

SEQ ID NO: 40843 - DNA, 2010 bp, Arabidopsis thaliana
  misc_feature (1)..(2010): Ceres Seq. ID no. 13489428
  misc_feature (1)..(2010): Ortholog of  Ceres SEQ ID NO 14313167 as cited in SEQ ID NO 54354
gcactttttatagaccaaagtccctacattactctattttctcaaaccccatttagaagaagagttcttagctgtcttcaatctctttgtctgtatcattctttacggaagccatgaaaatggcatcaagaaaaacaacatccttgcttaatcatcttcttcttcttggagctttgactcttttgagcagtttggtgatagtgaaaggagaaagcccttacaagttttacacttggactgtgacttatggcattatctctcctcttggtgttcctcaacaggttattctcatcaatggtcagtttcctggtccaaaacttgaagttgtgaccaacgacaacatcatcctcaacctcatcaacaaacttgaccagcctttcctcttgacctggaatgggattaagcagaggaagaactcatggcaagatggtgttttgggaacaaactgtccgatccaaccaaactcaaacttcacttacaaattccaaaccaaagatcagatcggaactttcaactacttcccttccactgcttttcacaaagccgccggtggattcggagccatcaatgtctacgcaagacctggaattccaatcccttaccctctcccaaccgcagatttcactttactcgttggtgattggttcaaaaccaaccacaaaacgcttcaacagcgtttggattctggtggggttcttccatttcccgatgggatgcttataaatggacaaacccaatcaacgttttcaggcgaccaagggaagacttacatgttgagaatctccaatgttgggttatcaagcactttcaatttcagaatccaaggccatacaatgaaagtagttgaagttgaaggctctcatgttattcaaactgattatgattctcttgacattcacgttggccagtctttagcagttcttgttactttaaaccaatctcctaaagattattacatcgttgcaagcacccggttcataagaagcaagctttctgttatgggtttgttgcgttattctaactctcgcgtcccagcttctggtgatcctcccgctcttccacctggagagcttgtttggtccatgagacaagctagaaccttcagatggaacttaacagcaaatgcagctagaccaaaccctcaaggatctttccactatggaatgatcagtccaacaaagacatttgtcttctcaaattcagctcctttgattaatgggaagcaaagatatgcagtcaatggagtctcttatgtgaaatcagagacgcctcttaaactcgctgatcactttggcatctcaggagttttcagcaccaatgccattcaaagcgtcccatcaaactctccgccaacagttgcaacatcagttgttcaaacatctcaccatgacttccttgaaattgtatttcagaacaatgagaagtcaatgcagtcttggcatcttgatggatatgacttctgggtcgttggatttggttctggacaatggacacctgcaaaaagatcacttcacaatcttgttgatgctctgaccagacacacaactcaggtctacccagagtcttggacaacaatcttagtgtctttagacaatcaagggatgtggaatatgagatcagcgatatgggaaagacaatattcaggacaacagttttatctcaaagtatggaattcagtacagagtcttgccaatgaatacaatcctcctgacaatcttcaactctgtggcaaagctgttggacgacatgtttagagaaaatcctcttacagtttcctctgttctttcttaaaagtgatttactttaaggctttttcgattcaatttggttgaggttttgcgtttgttcgttatggtcatgagagtatggctgatggcttacttgtagtaaacaaagggaagaggaaagttatatgtgtcattggtggtaggctagcttggagttttataataatcttcctatatacaattctattcatgtgttttttctaatcgaaatctcttgcggttt

SEQ ID NO: 40844 - protein, 546 aa, Arabidopsis thaliana
  peptide (1)..(546): Ceres Seq. ID no. 13489429
MKMASRKTTSLLNHLLLLGALTLLSSLVIVKGESPYKFYTWTVTYGIISPLGVPQQVILINGQFPGPKLEVVTNDNIILNLINKLDQPFLLTWNGIKQRKNSWQDGVLGTNCPIQPNSNFTYKFQTKDQIGTFNYFPSTAFHKAAGGFGAINVYARPGIPIPYPLPTADFTLLVGDWFKTNHKTLQQRLDSGGVLPFPDGMLINGQTQSTFSGDQGKTYMLRISNVGLSSTFNFRIQGHTMKVVEVEGSHVIQTDYDSLDIHVGQSLAVLVTLNQSPKDYYIVASTRFIRSKLSVMGLLRYSNSRVPASGDPPALPPGELVWSMRQARTFRWNLTANAARPNPQGSFHYGMISPTKTFVFSNSAPLINGKQRYAVNGVSYVKSETPLKLADHFGISGVFSTNAIQSVPSNSPPTVATSVVQTSHHDFLEIVFQNNEKSMQSWHLDGYDFWVVGFGSGQWTPAKRSLHNLVDALTRHTTQVYPESWTTILVSLDNQGMWNMRSAIWERQYSGQQFYLKVWNSVQSLANEYNPPDNLQLCGKAVGRHV

SEQ ID NO: 40845 - protein, 544 aa, Arabidopsis thaliana
  peptide (1)..(544): Ceres Seq. ID no. 13489430
MASRKTTSLLNHLLLLGALTLLSSLVIVKGESPYKFYTWTVTYGIISPLGVPQQVILINGQFPGPKLEVVTNDNIILNLINKLDQPFLLTWNGIKQRKNSWQDGVLGTNCPIQPNSNFTYKFQTKDQIGTFNYFPSTAFHKAAGGFGAINVYARPGIPIPYPLPTADFTLLVGDWFKTNHKTLQQRLDSGGVLPFPDGMLINGQTQSTFSGDQGKTYMLRISNVGLSSTFNFRIQGHTMKVVEVEGSHVIQTDYDSLDIHVGQSLAVLVTLNQSPKDYYIVASTRFIRSKLSVMGLLRYSNSRVPASGDPPALPPGELVWSMRQARTFRWNLTANAARPNPQGSFHYGMISPTKTFVFSNSAPLINGKQRYAVNGVSYVKSETPLKLADHFGISGVFSTNAIQSVPSNSPPTVATSVVQTSHHDFLEIVFQNNEKSMQSWHLDGYDFWVVGFGSGQWTPAKRSLHNLVDALTRHTTQVYPESWTTILVSLDNQGMWNMRSAIWERQYSGQQFYLKVWNSVQSLANEYNPPDNLQLCGKAVGRHV

SEQ ID NO: 40846 - protein, 346 aa, Arabidopsis thaliana
  peptide (1)..(346): Ceres Seq. ID no. 13489431
MLINGQTQSTFSGDQGKTYMLRISNVGLSSTFNFRIQGHTMKVVEVEGSHVIQTDYDSLDIHVGQSLAVLVTLNQSPKDYYIVASTRFIRSKLSVMGLLRYSNSRVPASGDPPALPPGELVWSMRQARTFRWNLTANAARPNPQGSFHYGMISPTKTFVFSNSAPLINGKQRYAVNGVSYVKSETPLKLADHFGISGVFSTNAIQSVPSNSPPTVATSVVQTSHHDFLEIVFQNNEKSMQSWHLDGYDFWVVGFGSGQWTPAKRSLHNLVDALTRHTTQVYPESWTTILVSLDNQGMWNMRSAIWERQYSGQQFYLKVWNSVQSLANEYNPPDNLQLCGKAVGRHV

SEQ ID NO: 40847 - DNA, 1402 bp, Arabidopsis thaliana
  misc_feature (1)..(1402): Ceres Seq. ID no. 12330726
  misc_feature (1)..(1402): Ortholog of  Ceres SEQ ID NO 15171152 as cited in SEQ ID NO 60275
ttcagtgagcattgtgcaaaatgcatttccttctaccaccaaatcgttctcttctacaatagctaaagattcgagtactttcacagtctcttatcttgttgaatcattgggtttgactaaaaaacttgcagaaacaatctcaaagaaagtcaccttccaagacaaggtaaatccggattctgttctgaatcttcttagaagtaatgggtttaaagattctcagatctctaggatccttagggcttacccaagattgcttgtaatagatgctgagaagtctcttcgtccaaagcttcagtttttaaagtctagaggagcttcaagctctgaggtcatagagattgtttcgaatgttccaacaatcttggataagaaaggtgaagaatctgttagtttatactatgatttcgctaaggacattatgcaagatggtaaaagtttgtgtatttcttgtccagagggaaagaaaggtaacagaattcgaaatatatcggttttgagagaattgggagtacctcagaagttgttgttttcattgcttatatctagatatcaacctgtttgtggtaaagagaagtttgaagaaagtttaaagaaagttgttgatatgggttttgatccggctaaatccaagtttgtggaagctttgcatgtagtttacgaaatgagcgagaaaacgatagaagagaaagtgaatgtgtataagaggttaggctttagtgaagccgagatatgggcgattttcaagaagtggccttactttttaaaattctctgagaagaagataattctgatgtttgaaacactgaagaagtgtggtttggtagaggaagagattatttcggtgttgaagagtcgtccacaatgcatacgatcttctgagcagaagatattagactctattgaaatgttcttaggcttaggattcagtagagatgatttcaagatgatggttaagcgatatccttgttgcactgcatattctggcgagaccctgaggaagaagtttgaggttttggtgaagaagatgaattggccgctagaggctgtggtcatgatccctacggtacttggatacagcttggagaagaggatagtgccaaggtctaacgtgatcaaagctctcatgtcgaaaggattgatcggaagtgaaaaccctccaatttcatctgtcttggtatgtactgatcaggagttcttgaaaaggtatgtgatgaagcatgacaagctagtgcctaagttgatggctatcttcaacagaggtcgtgtttcatagttaatcttttaacgcgtgaatggaactgaggaagaggagtttttatttactagtgtctgttaatgtctaaactgaaatccatttctgtaatagtcgtaacgaaaaatttaactactatatttgtgc

SEQ ID NO: 40848 - protein, 424 aa, Arabidopsis thaliana
  peptide (1)..(424): Ceres Seq. ID no. 12330727
SVSIVQNAFPSTTKSFSSTIAKDSSTFTVSYLVESLGLTKKLAETISKKVTFQDKVNPDSVLNLLRSNGFKDSQISRILRAYPRLLVIDAEKSLRPKLQFLKSRGASSSEVIEIVSNVPTILDKKGEESVSLYYDFAKDIMQDGKSLCISCPEGKKGNRIRNISVLRELGVPQKLLFSLLISRYQPVCGKEKFEESLKKVVDMGFDPAKSKFVEALHVVYEMSEKTIEEKVNVYKRLGFSEAEIWAIFKKWPYFLKFSEKKIILMFETLKKCGLVEEEIISVLKSRPQCIRSSEQKILDSIEMFLGLGFSRDDFKMMVKRYPCCTAYSGETLRKKFEVLVKKMNWPLEAVVMIPTVLGYSLEKRIVPRSNVIKALMSKGLIGSENPPISSVLVCTDQEFLKRYVMKHDKLVPKLMAIFNRGRVS

SEQ ID NO: 40849 - protein, 284 aa, Arabidopsis thaliana
  peptide (1)..(284): Ceres Seq. ID no. 12330728
MQDGKSLCISCPEGKKGNRIRNISVLRELGVPQKLLFSLLISRYQPVCGKEKFEESLKKVVDMGFDPAKSKFVEALHVVYEMSEKTIEEKVNVYKRLGFSEAEIWAIFKKWPYFLKFSEKKIILMFETLKKCGLVEEEIISVLKSRPQCIRSSEQKILDSIEMFLGLGFSRDDFKMMVKRYPCCTAYSGETLRKKFEVLVKKMNWPLEAVVMIPTVLGYSLEKRIVPRSNVIKALMSKGLIGSENPPISSVLVCTDQEFLKRYVMKHDKLVPKLMAIFNRGRVS

SEQ ID NO: 40850 - protein, 222 aa, Arabidopsis thaliana
  peptide (1)..(222): Ceres Seq. ID no. 12330729
MGFDPAKSKFVEALHVVYEMSEKTIEEKVNVYKRLGFSEAEIWAIFKKWPYFLKFSEKKIILMFETLKKCGLVEEEIISVLKSRPQCIRSSEQKILDSIEMFLGLGFSRDDFKMMVKRYPCCTAYSGETLRKKFEVLVKKMNWPLEAVVMIPTVLGYSLEKRIVPRSNVIKALMSKGLIGSENPPISSVLVCTDQEFLKRYVMKHDKLVPKLMAIFNRGRVS

SEQ ID NO: 40851 - DNA, 1376 bp, Arabidopsis thaliana
  misc_feature (1)..(1376): Ceres Seq. ID no. 13576752
  misc_feature (1)..(1376): Ortholog of  Ceres SEQ ID NO 14302123 as cited in SEQ ID NO 0
  misc_feature (1)..(1376): Ortholog of  Ceres SEQ ID NO 15179452 as cited in SEQ ID NO 0
acgccgctcatttttagggtttcagatataggcagattctcacatttgcaaacatgacgactcagatcagcaagaagagaaagtttgtagcggacggtgtgttctacgctgaattgaatgaggttcttacaagagagctagcagaggatggttactctggtgttgaggttagggttactcctatgaggactgagattatcatcagagctacacgtactcagaatgttctcggtgagaaggggaggagaattagggaattgacttcccttgttcagaagagattcaagtttccagttgacagtgttgagctttatgccgagaaggttaacaacagaggtctctgtgccatcgctcaggctgagtctttacgttacaagcttcttggcataaagctcaacactgtcaactggaaacttgaatntcttctgaacaagggatctcaaaaccctaatatctgaacttcgccgtcgagagcatccatgggtcgtgtcatcagagctcaacgtaagggtgcgggttccgtcttcaaatcccacactcaccaccgcaaaggtccggctaagttccgtagcctcgatttcggcgagagaaatggttacctcaagggcgtcgtgacggagatcatccacgatcctggtcgtggtgctcctcttgctcgtgtcactttccgtcatcctttccgtttcaagaaacaaaaggagctcttcgtcgccgccgaaggtatgtacaccggtcagttcttgtactgcggtaagaaagctactctcgtcgttggaaatgttctccctcttagatctattcctgaaggagctgttgtctgcaacgtcgagcatcacgtcggtgatcgtggtgtcctcgctagagcttctggtgattacgccattgttatcgctcacaaccctgacagcgacactactaggattaagttgccatcgggttcgaagaagattgtcccaagtggatgcagggctatgattggacaagttgctggaggtggaagaactgagaagccgatgctcaaggcaggaaacgcgtaccacaagtaccgtgtgaagaggaactcatggcctaaggttcgtggtgtggctatgaatccagtggagcatcctcatggaggaggtaaccatcagcacattggtcacgccagtactgttaggcgtgatgcacctcctggacagaaggttggtcttattgctgcaaggaggactggtcgtctcagaggtcaagctgctgcttcagctgccaaggcagactagagttaaaagagataaactttgtttctcttgttttctatgtttcaagttttgttgtctgtgtttccttttgaacctcattctgaaatcctaaaagatttttatgataaacctttctctctt

SEQ ID NO: 40852 - protein, 258 aa, Arabidopsis thaliana [sequence omitted]

SEQ ID NO: 40853 - protein, 177 aa, Arabidopsis thaliana
  peptide (1)..(177): Ceres Seq. ID no. 13576754
MYTGQFLYCGKKATLVVGNVLPLRSIPEGAVVCNVEHHVGDRGVLARASGDYAIVIAHNPDSDTTRIKLPSGSKKIVPSGCRAMIGQVAGGGRTEKPMLKAGNAYHKYRVKRNSWPKVRGVAMNPVEHPHGGGNHQHIGHASTVRRDAPPGQKVGLIAARRTGRLRGQAAASAAKAD

SEQ ID NO: 40854 - protein, 134 aa, Arabidopsis thaliana
  peptide (1)..(134): Ceres Seq. ID no. 13576755
  misc_feature (123)..(123): Xaa is any aa, unknown or other
MTTQISKKRKFVADGVFYAELNEVLTRELAEDGYSGVEVRVTPMRTEIIIRATRTQNVLGEKGRRIRELTSLVQKRFKFPVDSVELYAEKVNNRGLCAIAQAESLRYKLLGIKLNTVNWKLEXLLNKGSQNPNI

SEQ ID NO: 40855 - DNA, 1240 bp, Arabidopsis thaliana
  misc_feature (1)..(1240): Ceres Seq. ID no. 12482127
  misc_feature (1)..(1240): Ortholog of  Ceres SEQ ID NO 15180156 as cited in SEQ ID NO 0
aatttgataaacaccgatgattcgattctaagggaagaagatctctctctactacgacaagctcaactctttcgttttcgagaaaccaattccaaagatcatcctaaacaattcgaaaccacaacaatgttcaacaacaacagtgtctcgatctcagtatctgacgacgaatctaacgatttgaatcggatccgagctcgtacccgacgaaagcggaagaaagtgagtcacagaaccagctacgagcttcctcgtcatgttctaaggctttttgtgagatactgggtcgtcttagtttttcttctcgctgttgggttgcttgtatttgaatcaacgaggatcggattcaaatctagtgacttgaagaaaccagatttgaatgggaaagagagtcctagtaagaaaaatgaaggaaatttgaatcgattggatcctactaccaaagttattggtggtgttagacaacgttgtttgaagcttttaccacctgaggagcttgagcatcttgatatcttagagcgtaaagattcaggctctccggttaagagagttgtgtatctaactgatacggatgtgtcggtgggagaaatgagaggtgttcgtggtaatgggacgcggtttaatttattcacggggaaccagacttttgctgagagagaaaatagttttcaggtaagggaaacagtttctttgcattgtgggtttttcaatgaaaatgggggatttaggatttcggataaggataagaagtttatgacatcatgtgaagtagtggtctcgacgtgtgcgtttggtggtggagataacctttatgaacctattggaatgtctaagacatcaagtcaaaaggtttgctatgttgcgttttgggatgaagttactcttacaacacaagaagcagagggtcataagatcgatgagaatgatcacattggaaagtggcgtattgtgattgtaaaggatcttccttttacagaccaaaggcttaatgggaagatcccaaaggtactactcatctacttcagaggcacatgtgatgatttgtactgcacgtagcaatcttattcgctgggtgttaacgtttctgattatgcgttcatggtactgtgtaaaatgtttccattacaaccaaatttaaccttctttggttttcattttgtgctgtgtaaaatggtatgtgctcgatttgaattagctcactgttgtcttttttttttccttacatcttttaatcttgttt

SEQ ID NO: 40856 - protein, 351 aa, Arabidopsis thaliana
  peptide (1)..(351): Ceres Seq. ID no. 12482128
NLINTDDSILREEDLSLLRQAQLFRFRETNSKDHPKQFETTTMFNNNSVSISVSDDESNDLNRIRARTRRKRKKVSHRTSYELPRHVLRLFVRYWVVLVFLLAVGLLVFESTRIGFKSSDLKKPDLNGKESPSKKNEGNLNRLDPTTKVIGGVRQRCLKLLPPEELEHLDILERKDSGSPVKRVVYLTDTDVSVGEMRGVRGNGTRFNLFTGNQTFAERENSFQVRETVSLHCGFFNENGGFRISDKDKKFMTSCEVVVSTCAFGGGDNLYEPIGMSKTSSQKVCYVAFWDEVTLTTQEAEGHKIDENDHIGKWRIVIVKDLPFTDQRLNGKIPKVLLIYFRGTCDDLYCT

SEQ ID NO: 40857 - protein, 309 aa, Arabidopsis thaliana
  peptide (1)..(309): Ceres Seq. ID no. 12482129
MFNNNSVSISVSDDESNDLNRIRARTRRKRKKVSHRTSYELPRHVLRLFVRYWVVLVFLLAVGLLVFESTRIGFKSSDLKKPDLNGKESPSKKNEGNLNRLDPTTKVIGGVRQRCLKLLPPEELEHLDILERKDSGSPVKRVVYLTDTDVSVGEMRGVRGNGTRFNLFTGNQTFAERENSFQVRETVSLHCGFFNENGGFRISDKDKKFMTSCEVVVSTCAFGGGDNLYEPIGMSKTSSQKVCYVAFWDEVTLTTQEAEGHKIDENDHIGKWRIVIVKDLPFTDQRLNGKIPKVLLIYFRGTCDDLYCT

SEQ ID NO: 40858 - DNA, 1328 bp, Arabidopsis thaliana
  misc_feature (1)..(1328): Ceres Seq. ID no. 12421168
  misc_feature (1)..(1328): Ortholog of  Ceres SEQ ID NO 14304273 as cited in SEQ ID NO 53621
  misc_feature (1)..(1328): Ortholog of  Ceres SEQ ID NO 13595438 as cited in SEQ ID NO 56490
  misc_feature (1)..(1328): Ortholog of  Ceres SEQ ID NO 14314104 as cited in SEQ ID NO 63109
gtcggaaaatacggacggcgtcgtcgttctttttgacggtgtagctcaccggcgacgatttttagatttttttttaagggaaacactaagcagcaaattacaagtgggtgatttgtgtttgttacataatcttatatctaactatgtcagattctggtgagcctaaaccttctcagcaagaagagcctctacctcaacctgctgcccaagaaactcagtctcaacaagtttgcactttcttcaagaagccaacgaaaagtaaaaacataagaaaaagaaccattgacgctgatgaagaagacggagattcgaaaagcgaaagctctattctacaaaatctaaagaaagttgcaaaacccgatagcaagttatacttttcttctggaccatctaagagctctactacaacgagtggagctcctgagagatccgtctttcactacgattcatccaaggaaatccaggttcagaacgacagtggagcaacagcaacccttgaaactgagaccgacttcaatcaagacgcacgagctatccgtgagagagttcttaaaaaagcagacgaagcattgaaagggaataagaaaaaggcttctgatgagaagctgtacaaaggaattcatggatatacagatcacaaagctgggtttagaagagaacaaacaatctcgagcgagaaagctggaggctcacacgggccattaagagcttctgctcacataagagtgtcggctagatttgattaccagccagacatttgcaaggattacaaagaaaccggatactgtggatatggagattcgtgtaagttcttgcatgaccgtggggattacaaaccgggatggcagatagagaaagagtgggaagaagcagagaaagttaggaagagaaataaagctatgggagttgaggatgaagatgatgaggctgacaaggatagcgacgaagacgaaaatgcattgccctttgcttgcttcatttgcagggagccatttgttgatccagttgtcaccaaatgcaagcattacttctgtgagcattgtgctttaaagcatcacacgaagaacaagaagtgctttgtgtgtaaccaaccaacaatggggattttcaatgcagcacatgagatcaagaagagaatggctgaagaacggagtaaagctgaagaaggattgtgaagtccttgtttcactggacaaaaaggcaaaaactatatttggttatttagctttttgttttgttgtactcactggcctacatatattcattcggatgacgacgatgtttgtttcaaactgattaacttttaaatttaaacaaactgaaaattg

SEQ ID NO: 40859 - protein, 343 aa, Arabidopsis thaliana
  peptide (1)..(343): Ceres Seq. ID no. 12421169
MSDSGEPKPSQQEEPLPQPAAQETQSQQVCTFFKKPTKSKNIRKRTIDADEEDGDSKSESSILQNLKKVAKPDSKLYFSSGPSKSSTTTSGAPERSVFHYDSSKEIQVQNDSGATATLETETDFNQDARAIRERVLKKADEALKGNKKKASDEKLYKGIHGYTDHKAGFRREQTISSEKAGGSHGPLRASAHIRVSARFDYQPDICKDYKETGYCGYGDSCKFLHDRGDYKPGWQIEKEWEEAEKVRKRNKAMGVEDEDDEADKDSDEDENALPFACFICREPFVDPVVTKCKHYFCEHCALKHHTKNKKCFVCNQPTMGIFNAAHEIKKRMAEERSKAEEGL

SEQ ID NO: 40860 - DNA, 825 bp, Arabidopsis thaliana
  misc_feature (1)..(825): Ceres Seq. ID no. 12329445
  misc_feature (1)..(825): Ortholog of  Ceres SEQ ID NO 14310057 as cited in SEQ ID NO 225
atgatcaagcctgacggcgtccagagaggactcatcggtgaagtcatctgcagatttgagaagaagggtttcactttgaaaggtaacgatgattaccaaacttacttgactgattttactttataattagaggtcttagttctaatttaagtcactttgttacttgaattaagattttaatgacactatagttgcttatggtttggtctagtttctgaacattgatagtttagtaaaacttctttggcttgacaaagattctatgtgttgtctaatagagtttagattagagtatctgtgcataagaacttgttattatgtaatttggtagataagagtgttagtcttgtgtttctgatcagtgtagatttgtattttatacaggtctgaagttgatcagtgtagagagatcttttgctgagaagcactacgaagacttatcttcaaagtctttcttcagtggacttgttgactacattgtatccggccctgttgttgctatgatctgggaaggaaagaatgttgtcttgaccggaagaaagatcattggagctaccaacccagcagcttctgagcctggaactatccgtggggactttgctattgacattggaaggaatgtgatccacggtagtgactctgtcgagagcgccagaaaggagattgctttgtggttccctgatggacctgtcaactggcagagcagcgttcacccttgggtctatgaaacttgatgatctgttgctttttcagtagtgtgttttctacattgcttgcttttgaacaagactgaaatattttaagttgaatttgattatccttctc

SEQ ID NO: 40861 - protein, 77 aa, Arabidopsis thaliana; identical to SEQ ID NO: 21516
  peptide (1)..(77): Ceres Seq. ID no. 12329446

SEQ ID NO: 40862 - protein, 41 aa, Arabidopsis thaliana
  peptide (1)..(41): Ceres Seq. ID no. 12329447
MIKPDGVQRGLIGEVICRFEKKGFTLKGNDDYQTYLTDFTL

SEQ ID NO: 40863 - DNA, 593 bp, Arabidopsis thaliana
  misc_feature (1)..(593): Ceres Seq. ID no. 12559998
  misc_feature (1)..(593): Ortholog of  Ceres SEQ ID NO 12563124 as cited in SEQ ID NO 57104
acataagtctctctcttacattttgaaaccctaatttctcaaaaaaaatgtctgaagttgagtaccggtgctttgtcggcggccttgcctgggccaccaatgatgaagatcttcaaaggacgttctcacagttcggcgacgttatcgattctaagatcattaacgaccgcgagagtggaagatcaaggggattcggattcgtcaccttcaaggacgagaaagccatgagggatgcgattgaagagatgaacggtaaagagctcgatggacgtgtcatcaccgtgaacgaggctcagtcgagaggtagcggcggtggcggaggaggccgtggtggaagcggtggtggttaccgcagcggaggcggtgatggtggaagttacggcggcggtggtggcggctggtaatcaaagatagagttgtttgcgtgctgctgctctgtttttggtttagatttggatttgtgtcaccacttctggtttggttatcgttcgtttggtttacttttttgatgaaacagtttcgtttaagtcttctttgtctggatcgaaatgttaattcgcgtgttgtttactaaatttataacgtttcctttt

SEQ ID NO: 40864 - protein, 118 aa, Arabidopsis thaliana
  peptide (1)..(118): Ceres Seq. ID no. 12559999
MSEVEYRCFVGGLAWATNDEDLQRTFSQFGDVIDSKIINDRESGRSRGFGFVTFKDEKAMRDAIEEMNGKELDGRVITVNEAQSRGSGGGGGGRGGSGGGYRSGGGDGGSYGGGGGGW

SEQ ID NO: 40865 - protein, 59 aa, Arabidopsis thaliana
  peptide (1)..(59): Ceres Seq. ID no. 12560000
MRDAIEEMNGKELDGRVITVNEAQSRGSGGGGGGRGGSGGGYRSGGGDGGSYGGGGGGW

SEQ ID NO: 40866 - DNA, 868 bp, Arabidopsis thaliana
  misc_feature (1)..(868): Ceres Seq. ID no. 13489284
  misc_feature (1)..(868): Ortholog of  Ceres SEQ ID NO 12473977 as cited in SEQ ID NO 133
  misc_feature (1)..(868): Ortholog of  Ceres SEQ ID NO 15225932 as cited in SEQ ID NO 60016
  misc_feature (1)..(868): Ortholog of  Ceres SEQ ID NO 12585294 as cited in SEQ ID NO 63023
cttcgtcttcgatctctctaccaactccacgatcaacgaaaccaaagatctctcttcaaagcttccaccatgtttctccgatcactcaatctctgtacaatactactcttcctagcgatttcatcacaagtttctcaatctctccacttcgaattgcaatctggtcgaacaaaatgtatatcggaagacataaaaagcaattcaatgaccgtcgggatgtacaccgtcgttaaccctaacgaagctcatccttctcctcaatctcacaagatctccatcagagtgacatcgagttacgggaacacgtatcatcacgcggaagatgtagaatcgggacaattcgcgttcacggcggtggagtctggagattacatggcttgttacacagctgttgatcataaacctgaggttacattgagtattgatttcgattggagaactggtgttcaatctaaaagctggagtagtgttgctaagaagagccaagtcgaagttatggagtttgatgtaaaaagacttattgaaaccgtcaattcgattcatgaagagatgttttatctcagagaaagggaagaagagatgcagaatctgaaccgggctactaactcgaaaatggcgtggttgagtttcctctctcttttcgtatgcttaggagtcgcgggaatgcagtttgtgcatttgaagacgtttttcgagaagaagaaagtcatctaagatggttagatgaaacaaatcccactcttttcttttcccaactcaaaggagtcttctattcctccatgagttttgtacatttagatctttacttttgagtatgtactctcggaactggaaattaaatgaatatgaaagtattgcccctttttcc

SEQ ID NO: 40867 - protein, 237 aa, Arabidopsis thaliana
  peptide (1)..(237): Ceres Seq. ID no. 13489285
LRLRSLYQLHDQRNQRSLFKASTMFLRSLNLCTILLFLAISSQVSQSLHFELQSGRTKCISEDIKSNSMTVGMYTVVNPNEAHPSPQSHKISIRVTSSYGNTYHHAEDVESGQFAFTAVESGDYMACYTAVDHKPEVTLSIDFDWRTGVQSKSWSSVAKKSQVEVMEFDVKRLIETVNSIHEEMFYLREREEEMQNLNRATNSKMAWLSFLSLFVCLGVAGMQFVHLKTFFEKKKVI

SEQ ID NO: 40868 - protein, 214 aa, Arabidopsis thaliana
  peptide (1)..(214): Ceres Seq. ID no. 13489286
MFLRSLNLCTILLFLAISSQVSQSLHFELQSGRTKCISEDIKSNSMTVGMYTVVNPNEAHPSPQSHKISIRVTSSYGNTYHHAEDVESGQFAFTAVESGDYMACYTAVDHKPEVTLSIDFDWRTGVQSKSWSSVAKKSQVEVMEFDVKRLIETVNSIHEEMFYLREREEEMQNLNRATNSKMAWLSFLSLFVCLGVAGMQFVHLKTFFEKKKVI

SEQ ID NO: 40869 - protein, 169 aa, Arabidopsis thaliana
  peptide (1)..(169): Ceres Seq. ID no. 13489287
MTVGMYTVVNPNEAHPSPQSHKISIRVTSSYGNTYHHAEDVESGQFAFTAVESGDYMACYTAVDHKPEVTLSIDFDWRTGVQSKSWSSVAKKSQVEVMEFDVKRLIETVNSIHEEMFYLREREEEMQNLNRATNSKMAWLSFLSLFVCLGVAGMQFVHLKTFFEKKKVI

SEQ ID NO: 40870 - DNA, 853 bp, Arabidopsis thaliana; identical to SEQ ID NO: 27020
  misc_feature (1)..(853): Ceres Seq. ID no. 13645771
  misc_feature (1)..(853): Ortholog of  Ceres SEQ ID NO 14308278 as cited in SEQ ID NO 55403
  misc_feature (1)..(853): Ortholog of  Ceres SEQ ID NO 12618176 as cited in SEQ ID NO 64489
  misc_feature (1)..(853): Ortholog of  Ceres SEQ ID NO 15179231 as cited in SEQ ID NO 0

SEQ ID NO: 40871 - protein, 244 aa, Arabidopsis thaliana; identical to SEQ ID NO: 27021
  peptide (1)..(244): Ceres Seq. ID no. 13645772

SEQ ID NO: 40872 - protein, 233 aa, Arabidopsis thaliana; identical to SEQ ID NO: 27022
  peptide (1)..(233): Ceres Seq. ID no. 13645773

SEQ ID NO: 40873 - protein, 213 aa, Arabidopsis thaliana; identical to SEQ ID NO: 27023
  peptide (1)..(213): Ceres Seq. ID no. 13645774

SEQ ID NO: 40874 - DNA, 1636 bp, Arabidopsis thaliana
  misc_feature (1)..(1636): Ceres Seq. ID no. 13620891
  misc_feature (1)..(1636): Ortholog of  Ceres SEQ ID NO 14314896 as cited in SEQ ID NO 54010
  misc_feature (1)..(1636): Ortholog of  Ceres SEQ ID NO 14308813 as cited in SEQ ID NO 55485
  misc_feature (1)..(1636): Ortholog of  Ceres SEQ ID NO 13655744 as cited in SEQ ID NO 64032
gcgctctcatatttctcacattttcgtagccgcaagactcctttcagattcttacttgcagctatgggtaaagagaagtttcacattaacattgtggtcattggtcatgttgattctggaaaatcgaccacaactggtcacttgatctataagcttggtggtattgacaagcgtgtcatcgagaggttcgagaaggaggctgctgagatgaacaagaggtccttcaagtacgcatgggtgttggacaaacttaaggccgagcgtgagcgtggtattaccatcgatattgctctatggaagttcgagaccaccaagtactactgcacagtcattgatgccccaggacatcgtgatttcatcaagaacatgattactggtacctcccaggctgattgtgctgttcttatcattgactccaccactggaggttttgaggctggtatctctaaggatggtcagacccgtgagcacgctcttcttgctttcacccttggtgtcaagcagatgatttgctgttgtaacaagatggatgccaccacccccaaatactccaaggctaggtacgatgaaatcatcaaggaggtgtcttcatacctgaagaaggtcggatacaaccctgacaaaatcccatttgtgccaatctctggattcgagggagacaacatgattgagaggtcaaccaaccttgactggtacaagggaccaactcttcttgaggctcttgaccagatcaacgagcccaagaggccatcagacaagccccttcgtcttccacttcaggatgtctacaagattggtggtattggaacggtgccagtgggacgtgttgagactggtatgatcaagcctggtatggttgttacctttgctcccacagggttgaccactgaggttaagtctgttgagatgcaccacgagtctcttcttgaggcacttcccggtgacaatgttggattcaatgtcaagaatgttgctgtcaaggatcttaagagaggatacgttgcctctaactccaaggatgatccagctaagggtgccgccaacttcacctcccaggtcatcatcatgaaccaccctggtcagattggtaacggttacgccccagttctcgattgccacacctctcacattgcagtcaagttctctgagatcttgaccaagattgacaggcgttctggtaaggagattgagaaggagcccaagtttttgaagaatggtgacgctggtatggttaagatgaccccaaccaagcccatggttgttgagactttctccgagtacccacctttgggacgtttcgctgttagggacatgaggcagaccgttgctgttggtgttattaagagcgtggacaagaaggacccaactggagccaaggtcaccaaggctgcagtgaagaagggtgccaaatgatgagactttcgttatgatcgactctcttatggttttctttggttcttaaaactttgatggcgtttgagcctttttcttttttctctttatttctgtgactttctctctccctcctttttggatatctctgagactttttattatggttttcaattatgcagtttccggataattttgcttgaaacttatttaggagttgtgttacaaagttgctgtctttctt

SEQ ID NO: 40875 - protein, 470 aa, Arabidopsis thaliana
  peptide (1)..(470): Ceres Seq. ID no. 13620892
ALSYFSHFRSRKTPFRFLLAAMGKEKFHINIVVIGHVDSGKSTTTGHLIYKLGGIDKRVIERFEKEAAEMNKRSFKYAWVLDKLKAERERGITIDIALWKFETTKYYCTVIDAPGHRDFIKNMITGTSQADCAVLIIDSTTGGFEAGISKDGQTREHALLAFTLGVKQMICCCNKMDATTPKYSKARYDEIIKEVSSYLKKVGYNPDKIPFVPISGFEGDNMIERSTNLDWYKGPTLLEALDQINEPKRPSDKPLRLPLQDVYKIGGIGTVPVGRVETGMIKPGMVVTFAPTGLTTEVKSVEMHHESLLEALPGDNVGFNVKNVAVKDLKRGYVASNSKDDPAKGAANFTSQVIIMNHPGQIGNGYAPVLDCHTSHIAVKFSEILTKIDRRSGKEIEKEPKFLKNGDAGMVKMTPTKPMVVETFSEYPPLGRFAVRDMRQTVAVGVIKSVDKKDPTGAKVTKAAVKKGAK

SEQ ID NO: 40876 - protein, 449 aa, Arabidopsis thaliana; identical to SEQ ID NO: 27284
  peptide (1)..(449): Ceres Seq. ID no. 13620893

SEQ ID NO: 40877 - protein, 401 aa, Arabidopsis thaliana; identical to SEQ ID NO: 21437
  peptide (1)..(401): Ceres Seq. ID no. 13620894

SEQ ID NO: 40878 - DNA, 1561 bp, Arabidopsis thaliana
  misc_feature (1)..(1561): Ceres Seq. ID no. 13494109
  misc_feature (1)..(1561): Ortholog of  Ceres SEQ ID NO 15176426 as cited in SEQ ID NO 53944
gaggaggaagaagacgatggttgacacttgacagagtaagctcagaaatggcgactctggtttcgaattgaacttgtgaggaaggtttttagggttataaggtgataaagaaaatggggaatagtggagatttggagcaggctctgcaagatgggaatatctttagacagctcaatgctcttattgtagctcatctccgtcatcacaatctctcacaagttgcaagtgcggttgcttcagcaacaatgacaccattgaatattgaggttcctccaaaccgtcttttggagcttgttgcaaagggtcttgcagcggagaacaatgggacattgagaggtgtttcttcatcagtcttgttaccttcttcttatggatcaatcactactcctcgaacagcttctatcgactttagtgttaatcatgcgaagggctcatcaaagactatcccaaagcatgaatcaaagacgctatcagagcacaagagcgttgttaggtgtgcaagatttagtcctgatggaatgttttttgctactggtggtgcagacacatctattaagctctttgaggtgccaaaagttaaacagatgatttcaggagatactcaagctcgaccattaatacggactttttatgatcatgctgaaccgataaacgatcttgatttccaccctcggagcacaatcctaatatctagtgccaaagacaactgtataaagttcttcgacttctccaaaaccacggctaaacgagcattcaaagtttttcaggatacccataacgtgcgctctatatcttttcatccgtcaggagagtttcttcttgcaggaaccgatcatccaattccacatctgtacgatgtaaacacatatcagtgctttcttccttcaaacttccctgacagtggagtaagtggagccattaatcaggtgagatattcttccacgggatccatctacattacagcctcaaaggatggagctattcgactctttgacggggttagcgcaaagtgtgttcgctccattggcaatgcacatggaaaatcagaggtcacaagcgcagtgttcactaaagatcaaaggtttgttctctcatccggtaaggattccacagttaagttatgggaaataggctcaggtcgaatggtaaaggaatatcttggagcaaagcgggtaaaactgcggtctcaggcaatttttaacgacactgaagagtttgtaatctccatagatgaagcaagcaatgaggtcgttacatgggatgctagaaccgcagataaagtggcaaagtggccttctaaccataacggtgcaccacggtggatcgagcactcgccggttgaatcagtctttgttacttgtggaatagatagatcaattcggttctggaaggaatccgtttagatgagaatccaatcaatcaaagtagtgtattttattctcttaaaacataaaccatacatgaaaaaaaaaaaaaaatccgttgttcatgttgctttgtagaagacgcaagtaatcttccaggtcactgcaaaagaacgaaatcaaagcaggtgagcttc

SEQ ID NO: 40879 - protein, 429 aa, Arabidopsis thaliana
  peptide (1)..(429): Ceres Seq. ID no. 13494110
MGNSGDLEQALQDGNIFRQLNALIVAHLRHHNLSQVASAVASATMTPLNIEVPPNRLLELVAKGLAAENNGTLRGVSSSVLLPSSYGSITTPRTASIDFSVNHAKGSSKTIPKHESKTLSEHKSVVRCARFSPDGMFFATGGADTSIKLFEVPKVKQMISGDTQARPLIRTFYDHAEPINDLDFHPRSTILISSAKDNCIKFFDFSKTTAKRAFKVFQDTHNVRSISFHPSGEFLLAGTDHPIPHLYDVNTYQCFLPSNFPDSGVSGAINQVRYSSTGSIYITASKDGAIRLFDGVSAKCVRSIGNAHGKSEVTSAVFTKDQRFVLSSGKDSTVKLWEIGSGRMVKEYLGAKRVKLRSQAIFNDTEEFVISIDEASNEVVTWDARTADKVAKWPSNHNGAPRWIEHSPVESVFVTCGIDRSIRFWKESV

SEQ ID NO: 40880 - protein, 385 aa, Arabidopsis thaliana
  peptide (1)..(385): Ceres Seq. ID no. 13494111
MTPLNIEVPPNRLLELVAKGLAAENNGTLRGVSSSVLLPSSYGSITTPRTASIDFSVNHAKGSSKTIPKHESKTLSEHKSVVRCARFSPDGMFFATGGADTSIKLFEVPKVKQMISGDTQARPLIRTFYDHAEPINDLDFHPRSTILISSAKDNCIKFFDFSKTTAKRAFKVFQDTHNVRSISFHPSGEFLLAGTDHPIPHLYDVNTYQCFLPSNFPDSGVSGAINQVRYSSTGSIYITASKDGAIRLFDGVSAKCVRSIGNAHGKSEVTSAVFTKDQRFVLSSGKDSTVKLWEIGSGRMVKEYLGAKRVKLRSQAIFNDTEEFVISIDEASNEVVTWDARTADKVAKWPSNHNGAPRWIEHSPVESVFVTCGIDRSIRFWKESV

SEQ ID NO: 40881 - protein, 294 aa, Arabidopsis thaliana
  peptide (1)..(294): Ceres Seq. ID no. 13494112
MFFATGGADTSIKLFEVPKVKQMISGDTQARPLIRTFYDHAEPINDLDFHPRSTILISSAKDNCIKFFDFSKTTAKRAFKVFQDTHNVRSISFHPSGEFLLAGTDHPIPHLYDVNTYQCFLPSNFPDSGVSGAINQVRYSSTGSIYITASKDGAIRLFDGVSAKCVRSIGNAHGKSEVTSAVFTKDQRFVLSSGKDSTVKLWEIGSGRMVKEYLGAKRVKLRSQAIFNDTEEFVISIDEASNEVVTWDARTADKVAKWPSNHNGAPRWIEHSPVESVFVTCGIDRSIRFWKESV

SEQ ID NO: 40882 - DNA, 2128 bp, Arabidopsis thaliana
  misc_feature (1)..(2128): Ceres Seq. ID no. 12371466
  misc_feature (1)..(2128): Ortholog of  Ceres SEQ ID NO 14303201 as cited in SEQ ID NO 67304
acattttcatgacgtctcgtttgatctacacatattgtttgacctctctctatctctaagtttacatattcctaatgcgtttagctcaaagcatccacgacaagataagtagaaaaaaaaagacatccttttttggttcttcttcttcttcttcttcagacaaaaaggaagaaggtgttgactgattcttaagatgggtttgtgttaagtttgtgagtatagttgaaagtttcagttcaatttcaatggagcctccaataggatttcgagcttctttattccaattcttactcttccttccttatttcattggattgctatttctgggtttcatcaaaggtattgttttgtgcccactcgtatgcctcgttgtgactataggcaactccgcggtcatactgagtcttctaccagtccacatcgtttggactttctattcaatcgtgagtgccaaacaagtaggaccaatcttgaagatctttctatgcttatgtcttcctgctgccatcattctctggcctattgttggtattttaggaagtgttttgggaggagctttatatggtttcttctccccaattttcgccacctttgatgctgttggtgaaggcaatccttaccagtttttccattgcttttatgatggaacttggagcaccatgcaacgcagcttcaccgttgttcgggattttaaagatgtttgctttcattcatacttctcacttatggatgagctgaaacaaagctgtccggatcgaaaatattatgagataaggctacttcaacttccaggggctttagtagtttcagttctcgggatacttgttgatcctccggttatctcacttgtagccatatgcaaaagcccttatatgttgtttaaaggatggcaccgtttgtttcacgacctgattggacgggaaggtccattcttggagacaatgtgtgtccccatagcaggcctcgcgatcttactctggcctttggctgtcacgggcgcggttattggatcagttatctctagtatcttccttggtgcttatgcaggagtagtctcatatcaagaatcatctttttactatggactctgctatatagttgcctctgtctccatttacgacgagtatagcaccgatatacttgacttgcctgaaggatcttgttttccaaggccgaaatatcggaaaaaggacgaggaaccaacgcctgtttctggtcctgtaccaagactaggctctgtcaagaacgcgtcatcagtcagaatccctatgattgatattaagcctctcgatctgttgaatgagctctttgtggaatgtagaagatatggagaagttttggcaacaaaaggattgataaactcgaaagatatcgaagaagcgagatctagtagaggcagccaagtgatcagcgttggtttaccggcttatggacttctttacgagattcttcgctcagtcaaagccaattcttccggcttgttactaagtgacggtgtaactgaaataactaccatgaaccgaccaaaagacgtcttctttgattggtttctgaatccgtttttgatactaaaggagcaaatgaaagctacaaacttgtctgaggaagaagaagagtacctcggaagattagttttgctatttggagatccagagaggctaaagagctcgaatgccatttccgcgtctcctcctctcaccgaacgtaaaagagccgaactcgatgcctttgctcgcaggatgcaagggctaacgaaaacggtatcaagatatccaacatttcgtcgacattttgtggcattagtgaagaaactatcggaagatttggacttgaaagacaacaattcggctaaggacgaatcgataacagaaccgccagctccggttaagatcatttcgcggatattcagtcagagatcgttcagaagaaaaggaagtgtcaatggatctgatcaagaatcgcaaaagggtgtctcaaggaatgtagatatagtttaaacatggaacgtgtggtgtggatatttgaaacttaaaacgcatttagttctttgctttataaactttgtcattccttgtaaagatttttcagacgtttttatttatttatagaacagtgtatgttttcgttc

SEQ ID NO: 40883 - protein, 583 aa, Arabidopsis thaliana
  peptide (1)..(583): Ceres Seq. ID no. 12371467
MEPPIGFRASLFQFLLFLPYFIGLLFLGFIKGIVLCPLVCLVVTIGNSAVILSLLPVHIVWTFYSIVSAKQVGPILKIFLCLCLPAAIILWPIVGILGSVLGGALYGFFSPIFATFDAVGEGNPYQFFHCFYDGTWSTMQRSFTVVRDFKDVCFHSYFSLMDELKQSCPDRKYYEIRLLQLPGALVVSVLGILVDPPVISLVAICKSPYMLFKGWHRLFHDLIGREGPFLETMCVPIAGLAILLWPLAVTGAVIGSVISSIFLGAYAGVVSYQESSFYYGLCYIVASVSIYDEYSTDILDLPEGSCFPRPKYRKKDEEPTPVSGPVPRLGSVKNASSVRIPMIDIKPLDLLNELFVECRRYGEVLATKGLINSKDIEEARSSRGSQVISVGLPAYGLLYEILRSVKANSSGLLLSDGVTEITTMNRPKDVFFDWFLNPFLILKEQMKATNLSEEEEEYLGRLVLLFGDPERLKSSNAISASPPLTERKRAELDAFARRMQGLTKTVSRYPTFRRHFVALVKKLSEDLDLKDNNSAKDESITEPPAPVKIISRIFSQRSFRRKGSVNGSDQESQKGVSRNVDIV

SEQ ID NO: 40884 - protein, 445 aa, Arabidopsis thaliana
  peptide (1)..(445): Ceres Seq. ID no. 12371468
MQRSFTVVRDFKDVCFHSYFSLMDELKQSCPDRKYYEIRLLQLPGALVVSVLGILVDPPVISLVAICKSPYMLFKGWHRLFHDLIGREGPFLETMCVPIAGLAILLWPLAVTGAVIGSVISSIFLGAYAGVVSYQESSFYYGLCYIVASVSIYDEYSTDILDLPEGSCFPRPKYRKKDEEPTPVSGPVPRLGSVKNASSVRIPMIDIKPLDLLNELFVECRRYGEVLATKGLINSKDIEEARSSRGSQVISVGLPAYGLLYEILRSVKANSSGLLLSDGVTEITTMNRPKDVFFDWFLNPFLILKEQMKATNLSEEEEEYLGRLVLLFGDPERLKSSNAISASPPLTERKRAELDAFARRMQGLTKTVSRYPTFRRHFVALVKKLSEDLDLKDNNSAKDESITEPPAPVKIISRIFSQRSFRRKGSVNGSDQESQKGVSRNVDIV

SEQ ID NO: 40885 - protein, 423 aa, Arabidopsis thaliana
  peptide (1)..(423): Ceres Seq. ID no. 12371469
MDELKQSCPDRKYYEIRLLQLPGALVVSVLGILVDPPVISLVAICKSPYMLFKGWHRLFHDLIGREGPFLETMCVPIAGLAILLWPLAVTGAVIGSVISSIFLGAYAGVVSYQESSFYYGLCYIVASVSIYDEYSTDILDLPEGSCFPRPKYRKKDEEPTPVSGPVPRLGSVKNASSVRIPMIDIKPLDLLNELFVECRRYGEVLATKGLINSKDIEEARSSRGSQVISVGLPAYGLLYEILRSVKANSSGLLLSDGVTEITTMNRPKDVFFDWFLNPFLILKEQMKATNLSEEEEEYLGRLVLLFGDPERLKSSNAISASPPLTERKRAELDAFARRMQGLTKTVSRYPTFRRHFVALVKKLSEDLDLKDNNSAKDESITEPPAPVKIISRIFSQRSFRRKGSVNGSDQESQKGVSRNVDIV

SEQ ID NO: 40886 - DNA, 1718 bp, Arabidopsis thaliana
  misc_feature (1)..(1718): Ceres Seq. ID no. 13499932
  misc_feature (1)..(1718): Ortholog of  Ceres SEQ ID NO 14311313 as cited in SEQ ID NO 53503
  misc_feature (1)..(1718): Ortholog of  Ceres SEQ ID NO 14311625 as cited in SEQ ID NO 55184
  misc_feature (1)..(1718): Ortholog of  Ceres SEQ ID NO 14310588 as cited in SEQ ID NO 58770
agtgaaaaaaccaaaaccccacaaagcttggaaagagccacaaataggtcaaagaatgggtgaagacaagaagacggcaagggagacggtggaggaggaaccacttagcccatgttcacggctgttcaattcgccggattttaactgtgcaataatcgttacaatgggatctaaagttaaaggagacacaccagccatcatccacggccttgaacacaccctcgtaaaccaccctcgcttctctagcattttagagatgaacaatgggaagaagccgcgttgggttcggacaaaagttaaagtagaagagcatgtgattgttcctgatgtggatcccgacattgaaaatccggatcagtatcttgaagactatatctctaagttaacgaccattcctatggatttgtctaaaccattatgggaaatgcacttactaggcgtcaaaacatcgagcgctgaatcctatgctattctcaagatccatcattctttgggtgatggaatgtctctcatgtctcttttactggcttgtacccgcaaaacatcagaccccgaggctttgcctaccgttgcggttcataaaaaacgctttggaccgagctgcaacagcgggtttttcaacaagatttggtggttatttgtagggctctggttcatcctaagattgctattcaacacttttgttgatatcttaatgtttgctcttacaatatttgtcttgagggatacggagactcctctcttggccaaacccggtagtgaacttatccctaagaggttcgtccaccggattatcagttttgacgatgttaagctggtgaaaaacgcaatgaaaatgacggtgaacgatgttcttcttggagtaacgcaagccggactttcgcgttaccttagtcgaaaatatgatcaagaagcaacaccgaaatcgaaagagtccatgaggagaatccgacttcgttcagccattatgattaacttgagaccaaacgcaggaattgaggctctagcggatatgatggccaagaaatcaaaatgcagatggggaaatctcttcggctacattctcctaccgttctccgttgggctagagaccgatcctctagaatacgtgcgccaagctaaagccacgattgaccgcaagaaacactctctagaagccgtattctccatggcattctttaaattgatactaaaagttcttgggctcaaggcaagtgtagttcttgtaaggaaagtgatccatagcacaacgttatcattttcaaatgtggtcggtccaaaggaagaaattacattccatggtcacccactgaattatatctccccatgtgtttttggccacccacatgctcttactctacatttccagacctacgcgaacaaggtcataatatcggtaacggctgatccaacggtcattcctgaccctcacaagatgtgtgatgatttggtggagtctctcaagatgattaaagccgctgttcttgaaagagggttatatgagattgaggtctaactaaagctcttttgttgtggatcacaatgtggattcgcccgtttcttctttgtctacggctcctcaatgattactctaaattgataccttaggaagttattattataataactagacatattgatataaaaaagttgtaagacatcaagttaaaattttaagcatgtagtgtatcattttaatagatactaattcacttccg

SEQ ID NO: 40887 - protein, 504 aa, Arabidopsis thaliana
  peptide (1)..(504): Ceres Seq. ID no. 13499933
VKKPKPHKAWKEPQIGQRMGEDKKTARETVEEEPLSPCSRLFNSPDFNCAIIVTMGSKVKGDTPAIIHGLEHTLVNHPRFSSILEMNNGKKPRWVRTKVKVEEHVIVPDVDPDIENPDQYLEDYISKLTTIPMDLSKPLWEMHLLGVKTSSAESYAILKIHHSLGDGMSLMSLLLACTRKTSDPEALPTVAVHKKRFGPSCNSGFFNKIWWLFVGLWFILRLLFNTFVDILMFALTIFVLRDTETPLLAKPGSELIPKRFVHRIISFDDVKLVKNAMKMTVNDVLLGVTQAGLSRYLSRKYDQEATPKSKESMRRIRLRSAIMINLRPNAGIEALADMMAKKSKCRWGNLFGYILLPFSVGLETDPLEYVRQAKATIDRKKHSLEAVFSMAFFKLILKVLGLKASVVLVRKVIHSTTLSFSNVVGPKEEITFHGHPLNYISPCVFGHPHALTLHFQTYANKVIISVTADPTVIPDPHKMCDDLVESLKMIKAAVLERGLYEIEV

SEQ ID NO: 40888 - protein, 486 aa, Arabidopsis thaliana
  peptide (1)..(486): Ceres Seq. ID no. 13499934
MGEDKKTARETVEEEPLSPCSRLFNSPDFNCAIIVTMGSKVKGDTPAIIHGLEHTLVNHPRFSSILEMNNGKKPRWVRTKVKVEEHVIVPDVDPDIENPDQYLEDYISKLTTIPMDLSKPLWEMHLLGVKTSSAESYAILKIHHSLGDGMSLMSLLLACTRKTSDPEALPTVAVHKKRFGPSCNSGFFNKIWWLFVGLWFILRLLFNTFVDILMFALTIFVLRDTETPLLAKPGSELIPKRFVHRIISFDDVKLVKNAMKMTVNDVLLGVTQAGLSRYLSRKYDQEATPKSKESMRRIRLRSAIMINLRPNAGIEALADMMAKKSKCRWGNLFGYILLPFSVGLETDPLEYVRQAKATIDRKKHSLEAVFSMAFFKLILKVLGLKASVVLVRKVIHSTTLSFSNVVGPKEEITFHGHPLNYISPCVFGHPHALTLHFQTYANKVIISVTADPTVIPDPHKMCDDLVESLKMIKAAVLERGLYEIEV

SEQ ID NO: 40889 - protein, 450 aa, Arabidopsis thaliana
  peptide (1)..(450): Ceres Seq. ID no. 13499935
MGSKVKGDTPAIIHGLEHTLVNHPRFSSILEMNNGKKPRWVRTKVKVEEHVIVPDVDPDIENPDQYLEDYISKLTTIPMDLSKPLWEMHLLGVKTSSAESYAILKIHHSLGDGMSLMSLLLACTRKTSDPEALPTVAVHKKRFGPSCNSGFFNKIWWLFVGLWFILRLLFNTFVDILMFALTIFVLRDTETPLLAKPGSELIPKRFVHRIISFDDVKLVKNAMKMTVNDVLLGVTQAGLSRYLSRKYDQEATPKSKESMRRIRLRSAIMINLRPNAGIEALADMMAKKSKCRWGNLFGYILLPFSVGLETDPLEYVRQAKATIDRKKHSLEAVFSMAFFKLILKVLGLKASVVLVRKVIHSTTLSFSNVVGPKEEITFHGHPLNYISPCVFGHPHALTLHFQTYANKVIISVTADPTVIPDPHKMCDDLVESLKMIKAAVLERGLYEIEV

SEQ ID NO: 40890 - DNA, 1197 bp, Arabidopsis thaliana
  misc_feature (1)..(1197): Ceres Seq. ID no. 13497435
  misc_feature (1)..(1197): Ortholog of  Ceres SEQ ID NO 13599448 as cited in SEQ ID NO 521
  misc_feature (1)..(1197): Ortholog of  Ceres SEQ ID NO 14311918 as cited in SEQ ID NO 51684
  misc_feature (1)..(1197): Ortholog of  Ceres SEQ ID NO 13596408 as cited in SEQ ID NO 62028
gacagcgaacaagatcaaaaagctagctctcttcttttctcatcaaacttatttctctctcgatcgcaatatatacgattccataaattctcccaaaaacaaattaagagatagaggagagatcatgaggtcaccggtgcaactccaacacggctcagacgccactaacggtttccacacgctgcagcctcacgatcagaccgatggtccgatcaagagagtgtgtctcacgcgcggtatgcatgtccctgaacacgttgcgatgcaccacacacacgacgttggtccggaccagtgttgctcctcggtggtgcagatgatccacgcgccgcctgagtccgtgtgggctcttgtgcggcgtttcgataatccgaaggtttacaagaacttcatcagacagtgccgtatcgtccaaggcgatggactacacgtcggcgatctccgggaggtcatggtggtctctggactcccggcggtctcgagcaccgagaggctcgagatcttggacgaggagcgtcacgtgataagctttagtgtcgttggtggggaccacaggctcaagaactaccgatcggtgacgacactacacgcgtcggacgacgaaggtaccgtggtggtggagtcttacatcgttgatgtgccgccgggaaacacggaggaggaaactctaagcttcgttgatactatcgtccggtgcaaccttcagtctctggctcgaagtaccaaccggcaataatctcatctttcttatataaattgcaattatgtatctaattttttttgttgttctatttcttttagatgttcgatcttctttacaaggaagaaaatttcgagtaccttttctttctttttaaatagatatatcggcttagaaagaattgtaatttaatggggatttctttgggagatttatgttggaaatttcgaagtactgttgggggattcacaaaactttggatttggagggtgttagtactggtacataaaacattttaaggtgaatctgttaaatgaattaatccatttgttgttttgtacatggtatcattctttgtgacattgtttaatttcttgtactcttttaaatgttactcttaaccgtttttttcttttgtggtttgtaaatgaatatttgatgcatcggtattgttaatgatagacttattaatttatttcttcatagtatgtaacatt

SEQ ID NO: 40891 - protein, 244 aa, Arabidopsis thaliana
  peptide (1)..(244): Ceres Seq. ID no. 13497436
TANKIKKLALFFSHQTYFSLDRNIYDSINSPKNKLRDRGEIMRSPVQLQHGSDATNGFHTLQPHDQTDGPIKRVCLTRGMHVPEHVAMHHTHDVGPDQCCSSVVQMIHAPPESVWALVRRFDNPKVYKNFIRQCRIVQGDGLHVGDLREVMVVSGLPAVSSTERLEILDEERHVISFSVVGGDHRLKNYRSVTTLHASDDEGTVVVESYIVDVPPGNTEEETLSFVDTIVRCNLQSLARSTNRQ

SEQ ID NO: 40892 - protein, 203 aa, Arabidopsis thaliana
  peptide (1)..(203): Ceres Seq. ID no. 13497437
MRSPVQLQHGSDATNGFHTLQPHDQTDGPIKRVCLTRGMHVPEHVAMHHTHDVGPDQCCSSVVQMIHAPPESVWALVRRFDNPKVYKNFIRQCRIVQGDGLHVGDLREVMVVSGLPAVSSTERLEILDEERHVISFSVVGGDHRLKNYRSVTTLHASDDEGTVVVESYIVDVPPGNTEEETLSFVDTIVRCNLQSLARSTNRQ

SEQ ID NO: 40893 - protein, 165 aa, Arabidopsis thaliana
  peptide (1)..(165): Ceres Seq. ID no. 13497438
MHVPEHVAMHHTHDVGPDQCCSSVVQMIHAPPESVWALVRRFDNPKVYKNFIRQCRIVQGDGLHVGDLREVMVVSGLPAVSSTERLEILDEERHVISFSVVGGDHRLKNYRSVTTLHASDDEGTVVVESYIVDVPPGNTEEETLSFVDTIVRCNLQSLARSTNRQ

SEQ ID NO: 40894 - DNA, 959 bp, Arabidopsis thaliana; identical to SEQ ID NO: 38103
  misc_feature (1)..(959): Ceres Seq. ID no. 13591405
  misc_feature (1)..(959): Ortholog of  Ceres SEQ ID NO 13596958 as cited in SEQ ID NO 63319
  misc_feature (1)..(959): Ortholog of  Ceres SEQ ID NO 12614814 as cited in SEQ ID NO 68816

SEQ ID NO: 40895 - protein, 197 aa, Arabidopsis thaliana; identical to SEQ ID NO: 38104
  peptide (1)..(197): Ceres Seq. ID no. 13591406

SEQ ID NO: 40896 - protein, 172 aa, Arabidopsis thaliana; identical to SEQ ID NO: 38105
  peptide (1)..(172): Ceres Seq. ID no. 13591407

SEQ ID NO: 40897 - protein, 171 aa, Arabidopsis thaliana; identical to SEQ ID NO: 38106
  peptide (1)..(171): Ceres Seq. ID no. 13591408

SEQ ID NO: 40898 - DNA, 1390 bp, Arabidopsis thaliana
  misc_feature (1)..(1390): Ceres Seq. ID no. 12328010
  misc_feature (1)..(1390): Ortholog of  Ceres SEQ ID NO 13594232 as cited in SEQ ID NO 59271
agtttactgactacagagaggatttgaactgagaatcgaagaaagtctctgagggttcatctatggaaccggttataatcggtgcgctgattttggatgttcacgccaagccttcgaccacaccaatctcaggaaccactgtccctggccaggtcttatttgcgccgggtggtgtagcaagaaatgtagctgattgcatcttcaagcttggaattacaccttttatgattggtactttagggcttgatggtccagccaatgttttattgaaagagtggaagctctctatgaaaggaatcttgagacgtgaagacattagtactcccattgtgtcccttgtatatgacactaatggagaagttgccgctggtgttgctggcgtggatgccgttgaaaattttttaacacctgagtggatccagcggtttgaatacaacataagctctgctcgtcttcttatggtagatgcaaatcttagctctcttgctttggaagcatcttgcaaattggctgcagagtccagtgttcctgtatggtttgagccagtgtcagtcactaagtcacagaggatcgcctcaattgccaagtatgtaacaatagtgtccccaaaccaagacgaactcatagcaatggcaaacgctctctgcgccaagaatttgtttcatccctttagatcagacgaaaataagctttctattgaagatatgttccgtgcactaaagccagctattttggttctccttaaaaatggtgttaaagtagttatcgtaactctcggctccaatggagctctcctatgttccaagggaaacccgaaaaaggctctgaacatagacagaaagtttctaagaagtggagaggtcttcaaaagagtacagtctgtatgttcaccaaaccggttttctgaattgggatcgaatcgcagcccgagtcttttcgcaatgcatttcccaaccatcccagccaaagtcaagaagctgactggtgcaggtgattgtctggtaggcgggacagttgcatcgctaagcgatgggttagatctaatccagagtttagcggttggcattgcgtcggcgaaagcagcggttgagtcagatgataatgtgcctcctgagttcaagttggatcttatatctggtgatgcagagttggtatacaatggcgctaagatgttgatggttcaccagtcgatgctatgaactgtgaaggagtttagtggtttacctagtagtctagtcttatcaaataaagtattgctagcaaaaaaaaataatgtccaaaatattccctagtgtttagaaatcaatttagagattttatttttggtgcgcaagggtacaactaaatagttgcaagggtttttcaaataaagtaagggttacagttgttc

SEQ ID NO: 40899 - protein, 378 aa, Arabidopsis thaliana
  peptide (1)..(378): Ceres Seq. ID no. 12328011
MEPVIIGALILDVHAKPSTTPISGTTVPGQVLFAPGGVARNVADCIFKLGITPFMIGTLGLDGPANVLLKEWKLSMKGILRREDISTPIVSLVYDTNGEVAAGVAGVDAVENFLTPEWIQRFEYNISSARLLMVDANLSSLALEASCKLAAESSVPVWFEPVSVTKSQRIASIAKYVTIVSPNQDELIAMANALCAKNLFHPFRSDENKLSIEDMFRALKPAILVLLKNGVKVVIVTLGSNGALLCSKGNPKKALNIDRKFLRSGEVFKRVQSVCSPNRFSELGSNRSPSLFAMHFPTIPAKVKKLTGAGDCLVGGTVASLSDGLDLIQSLAVGIASAKAAVESDDNVPPEFKLDLISGDAELVYNGAKMLMVHQSML

SEQ ID NO: 40900 - protein, 324 aa, Arabidopsis thaliana
  peptide (1)..(324): Ceres Seq. ID no. 12328012
MIGTLGLDGPANVLLKEWKLSMKGILRREDISTPIVSLVYDTNGEVAAGVAGVDAVENFLTPEWIQRFEYNISSARLLMVDANLSSLALEASCKLAAESSVPVWFEPVSVTKSQRIASIAKYVTIVSPNQDELIAMANALCAKNLFHPFRSDENKLSIEDMFRALKPAILVLLKNGVKVVIVTLGSNGALLCSKGNPKKALNIDRKFLRSGEVFKRVQSVCSPNRFSELGSNRSPSLFAMHFPTIPAKVKKLTGAGDCLVGGTVASLSDGLDLIQSLAVGIASAKAAVESDDNVPPEFKLDLISGDAELVYNGAKMLMVHQSML

SEQ ID NO: 40901 - protein, 303 aa, Arabidopsis thaliana
  peptide (1)..(303): Ceres Seq. ID no. 12328013
MKGILRREDISTPIVSLVYDTNGEVAAGVAGVDAVENFLTPEWIQRFEYNISSARLLMVDANLSSLALEASCKLAAESSVPVWFEPVSVTKSQRIASIAKYVTIVSPNQDELIAMANALCAKNLFHPFRSDENKLSIEDMFRALKPAILVLLKNGVKVVIVTLGSNGALLCSKGNPKKALNIDRKFLRSGEVFKRVQSVCSPNRFSELGSNRSPSLFAMHFPTIPAKVKKLTGAGDCLVGGTVASLSDGLDLIQSLAVGIASAKAAVESDDNVPPEFKLDLISGDAELVYNGAKMLMVHQSML

SEQ ID NO: 40902 - DNA, 1647 bp, Arabidopsis thaliana
  misc_feature (1)..(1647): Ceres Seq. ID no. 13489302
  misc_feature (1)..(1647): Ortholog of  Ceres SEQ ID NO 14314312 as cited in SEQ ID NO 57283
atatattcaatattcctaacgaaaaaatggccaaagcataaataccttatagcgatatttgagtatttaccataaaaccattcgaatactgtcacggttctaaatttctaatattgttcttttgttattaaaggaaagagtgaagggtgttttcgtcatttaacatatccatcgggtcaataacggagattacctatccggtgaccttatcccctcgccggtgagcgaatctcagatccaaaattttgcaaaatcctcagatcgtcttaccttctccgaatcgatcgatttttcatggaggacgacgacgagattcagtcaattccatctccgggagattcttccctttcaccacaagctcctccttctccgccgattttgccaacaaacgacgtgacggtggccgtcgtgaagaaaccacaaccggggctttcttctcaatctccgtccatgaacgctttagcgttagtggttcatactccttctgtaaccggtggtggtggtagcggaaacagaaacggacgaggaggaggaggaggaagcggtggtggtggaggaggaagagatgattgttggagcgaagaagctacaaaggttctaatcgaagcttggggagatcgattctctgaaccaggtaaaggaactttgaagcaacaacattggaaagaagtagctgagattgtgaacaagagtcgtcaatgcaaataccctaaaactgatattcagtgtaagaacagaattgatacggtgaagaagaagtataagcaagagaaagctaagattgcttctggtgatggacctagtaaatgggttttcttcaagaagcttgagagtttgattggtggtactacaacattcattgcttcttcaaaagcttcagagaaggctcctatgggaggagctcttgggaatagccgttcgagtatgtttaaacggcaaactaaaggtaatcagattgtgcagcaacaacaagagaagagaggctctgattcgatgcggtggcattttaggaaacgtagtgcttctgagactgagtctgagtctgatcctgaacctgaggcttctcctgaggaatctgctgagagtctcccacctttgcaaccgattcaaccgctttcgtttcatatgccaaagcggttgaaggtggataagagtggaggtggagggagtggagttggagatgtggcgagggcgatacttggatttacggaagcttatgagaaggcggaaactgctaagcttaagttaatggcggaactggaaaaggagaggatgaaatttgctaaagagatggagttgcagagaatgcagttcttgaaaactcaattggagataacacagaacaatcaagaagaggaagagaggagcaggcagcgaggagaaaggaggatcgttgatgatgatgatgatcgcaatggcaagaataacggcaatgtaagtagctgacaattgaacacacaaatgttcctatgatatttgctatgataagctggattttaggttttgatgttgttgttgttgttattgttactgccttgtgggatgtgtaaatgtagagaagttatgactctgattatcatcatgttgttgttattgttatccatcttcttgtcttaaacatgggcaaattaaaaagctttgaacttg

SEQ ID NO: 40903 - protein, 383 aa, Arabidopsis thaliana
  peptide (1)..(383): Ceres Seq. ID no. 13489303
MEDDDEIQSIPSPGDSSLSPQAPPSPPILPTNDVTVAVVKKPQPGLSSQSPSMNALALVVHTPSVTGGGGSGNRNGRGGGGGSGGGGGGRDDCWSEEATKVLIEAWGDRFSEPGKGTLKQQHWKEVAEIVNKSRQCKYPKTDIQCKNRIDTVKKKYKQEKAKIASGDGPSKWVFFKKLESLIGGTTTFIASSKASEKAPMGGALGNSRSSMFKRQTKGNQIVQQQQEKRGSDSMRWHFRKRSASETESESDPEPEASPEESAESLPPLQPIQPLSFHMPKRLKVDKSGGGGSGVGDVARAILGFTEAYEKAETAKLKLMAELEKERMKFAKEMELQRMQFLKTQLEITQNNQEEEERSRQRGERRIVDDDDDRNGKNNGNVSS

SEQ ID NO: 40904 - protein, 331 aa, Arabidopsis thaliana
  peptide (1)..(331): Ceres Seq. ID no. 13489304
MNALALVVHTPSVTGGGGSGNRNGRGGGGGSGGGGGGRDDCWSEEATKVLIEAWGDRFSEPGKGTLKQQHWKEVAEIVNKSRQCKYPKTDIQCKNRIDTVKKKYKQEKAKIASGDGPSKWVFFKKLESLIGGTTTFIASSKASEKAPMGGALGNSRSSMFKRQTKGNQIVQQQQEKRGSDSMRWHFRKRSASETESESDPEPEASPEESAESLPPLQPIQPLSFHMPKRLKVDKSGGGGSGVGDVARAILGFTEAYEKAETAKLKLMAELEKERMKFAKEMELQRMQFLKTQLEITQNNQEEEERSRQRGERRIVDDDDDRNGKNNGNVSS

SEQ ID NO: 40905 - DNA, 1039 bp, Arabidopsis thaliana
  misc_feature (1)..(1039): Ceres Seq. ID no. 12327569
  misc_feature (1)..(1039): Ortholog of  Ceres SEQ ID NO 15170627 as cited in SEQ ID NO 52703
  misc_feature (1)..(1039): Ortholog of  Ceres SEQ ID NO 13655124 as cited in SEQ ID NO 62896
  misc_feature (1)..(1039): Ortholog of  Ceres SEQ ID NO 13597493 as cited in SEQ ID NO 64613
  misc_feature (1)..(1039): Ortholog of  Ceres SEQ ID NO 14313540 as cited in SEQ ID NO 68110
  misc_feature (1)..(1039): Ortholog of  Ceres SEQ ID NO 13596175 as cited in SEQ ID NO 68297
atttttgtctgaactgaaaccaagaaaaaatggctgaaaaatcagtaagttctggcttttgtagatatgctatagttactggagggaatagaggaattggatttgagatatgcagacaattagcaaacaaagggattagggttattttgacatctagagatgagaaacaagggcttgaagctgttgagacattgaagaaagagcttgagatttctgatcaaagcattgtctttcatcagcttgatgtctctgatccttctagtgtcacttctcttgctaagtttgtgaaaacccatttcggaaaactcgatatcttgatcaataatgctggggttggtggtgtaatcactgatgttgatgctcttagagctgggacagggaaagaaggtttcaagtgggaggaaactatcactgagacttataagttagctgaagaatgcataaagattaactattatggaccaaagagaatgtgtgaggcttttattcatcttctgcagttatctaattctccaagaatcgttaatgtatcatccttcatgggtcaagtaaagaatttactaaacgaatgggcaaaagggatcctgagtgacgcagagaatctaacggaggtaagaattgaccaagtgatcaaccaacttctcaatgatctgaaagaagatacggctaagacaaaagattgggctaaagtcatgtcggcttacgttgtttcgaaagccggtttgaatgcttacacgaggatcttagcgaagaaacatcccgagattcgcgttaactcggtttgtcctggatttgtgaagactgatatgaattttaaaactggaattttatctgtggaagaaggagcatcaagtcctgtgagattagctttgcttccacatcaagaatctccttctggttgtttctttgatcgcaaacaagtttcatagttctgaaatctttgtgtggagatagataagccaaagttttattcatgtaatgagaattattgtttgaaagctaaacagaaagtatcgactattcaataaacagaaacatt

SEQ ID NO: 40906 - protein, 299 aa, Arabidopsis thaliana
  peptide (1)..(299): Ceres Seq. ID no. 12327570
MAEKSVSSGFCRYAIVTGGNRGIGFEICRQLANKGIRVILTSRDEKQGLEAVETLKKELEISDQSIVFHQLDVSDPSSVTSLAKFVKTHFGKLDILINNAGVGGVITDVDALRAGTGKEGFKWEETITETYKLAEECIKINYYGPKRMCEAFIHLLQLSNSPRIVNVSSFMGQVKNLLNEWAKGILSDAENLTEVRIDQVINQLLNDLKEDTAKTKDWAKVMSAYVVSKAGLNAYTRILAKKHPEIRVNSVCPGFVKTDMNFKTGILSVEEGASSPVRLALLPHQESPSGCFFDRKQVS

SEQ ID NO: 40907 - protein, 152 aa, Arabidopsis thaliana
  peptide (1)..(152): Ceres Seq. ID no. 12327571
MCEAFIHLLQLSNSPRIVNVSSFMGQVKNLLNEWAKGILSDAENLTEVRIDQVINQLLNDLKEDTAKTKDWAKVMSAYVVSKAGLNAYTRILAKKHPEIRVNSVCPGFVKTDMNFKTGILSVEEGASSPVRLALLPHQESPSGCFFDRKQVS

SEQ ID NO: 40908 - DNA, 1093 bp, Arabidopsis thaliana
  misc_feature (1)..(1093): Ceres Seq. ID no. 13580537
  misc_feature (1)..(1093): Ortholog of  Ceres SEQ ID NO 15169809 as cited in SEQ ID NO 52839
  misc_feature (1)..(1093): Ortholog of  Ceres SEQ ID NO 15224302 as cited in SEQ ID NO 53942
  misc_feature (1)..(1093): Ortholog of  Ceres SEQ ID NO 14306297 as cited in SEQ ID NO 56907
gtttctcaaaaatcaaaatcccttcctctctctctctcaccgagccggcgagcccgttctctcggtgtttttaaagatgcttatgatgatgatggggagtgagtaatatcagaaatcaagctttttcacaatctcagaaattgtagtagagtttggcgattttatcaacctccggaacaagcttcttcttcttcgttttactcttgtcatccgtaaatgggttgtttccattccacggctgccagagaatttcccgatcacgaaaaccctgtgaagcttgcttctgagactgcttttagtgttagtgaagttgaagcattgtatgaattgttcaagagcataagcagctcggttgttgacgatggcttgataaacaaggaagagtttcaacttgctttgttcaagaacagaaagaaagaaaatttgtttgccaataggatatttgatttatttgatgttaaacgaaaaggcgtaattgattttggagactttgtgagatcactcaatgttttccatcctaatgcttccctagaggagaaaacagactttacctttaggctttacgacatggactgcacaggcttcattgagcgccaagaggtgaagcagatgttgattgcacttctctgcgaatctgaaatgaaactggctgatgatacaatagagatgatacttgatcagacatttgaggacgcagatgtggatcgggatggaaagattgataagacagaatggagcaatttcgttatcaaaaacccatctttgcttaaaatcatgactcttccgtatctcagggatataacgacgacatttccgagtttcgtatttaactcggaggtggacgagattgcgacgtgaaagagacaagacaagctggtttatagagaccaagtcgtaggctggaccaagaataaaaagaagattgattccaacaatgttatatagcaggatcgagctctatttcctttggaatttttagtctattggatttcaatttcatgtattgcgattacttttggctctctttctttaacagttttgaatactcaagttgtagttctacgaaaagattaatataaaaccacaatttctg

SEQ ID NO: 40909 - protein, 213 aa, Arabidopsis thaliana
  peptide (1)..(213): Ceres Seq. ID no. 13580538
MGCFHSTAAREFPDHENPVKLASETAFSVSEVEALYELFKSISSSVVDDGLINKEEFQLALFKNRKKENLFANRIFDLFDVKRKGVIDFGDFVRSLNVFHPNASLEEKTDFTFRLYDMDCTGFIERQEVKQMLIALLCESEMKLADDTIEMILDQTFEDADVDRDGKIDKTEWSNFVIKNPSLLKIMTLPYLRDITTTFPSFVFNSEVDEIAT

SEQ ID NO: 40910 - DNA, 2059 bp, Arabidopsis thaliana
  misc_feature (1)..(2059): Ceres Seq. ID no. 13489068
  misc_feature (1)..(2059): Ortholog of  Ceres SEQ ID NO 15171212 as cited in SEQ ID NO 56899
  misc_feature (1)..(2059): Ortholog of  Ceres SEQ ID NO 12613725 as cited in SEQ ID NO 68196
aagtcttttttataagctcatgctcattattactccgacaagtgccgtgtaattcctcgccctcggctactcttttctcttcttgcctctcgtctccgccgctgattcagctgccgccgacaaaggaatatggaagaaaaagatgtgtatacgcaagatggaactgttgatattcacaaaaatcctgcaaacaaggagaaaaccggaaattggaaagcttgccgcttcattctcggaaatgagtgctgtgaaagattggcctactatggcatgggcactaaccttgtgaattatcttgagagccgtctgaatcaaggcaatgctacggctgcaaataacgtcacgaattggtctggaacatgttatataactcctttgattggagcctttatagctgatgcttaccttggacgatattggactattgcaacttttgttttcatctatgtctccggtatgactcttttgacattatcagcttcagttcctggacttaaaccaggtaactgcaatgctgatacttgtcatccaaattctagtcagactgctgttttctttgtcgcgctttatatgattgctcttggaactggcggtataaagccgtgtgtttcgtcctttggagctgatcagtttgatgagaatgatgagaatgagaagatcaagaaaagttctttcttcaactggttttacttctccattaatgttggagctctcattgctgcaactgttctcgtctggatacaaatgaatgttggttggggatggggtttcggtgttccaacagtcgcgatggttatcgcggtttgctttttcttcttcggaagccgtttttacagacttcagagacctggagggagtccacttactaggatctttcaggttatagtagcggcttttcggaagataagtgttaaggttccagaggacaagtctctgctctttgaaactgcagatgatgagagtaacatcaaaggtagccggaaacttgtgcacacagataacttaaagttttttgacaaggcagcggttgagagtcaatctgatagcatcaaagacggggaagtcaatccatggagactatgttctgttactcaagttgaagaacttaagtcaataatcacacttcttccagtttgggccacaggaatagtcttcgccacagtgtacagccaaatgagcacaatgtttgtgttacaaggaaacacaatggaccaacacatgggaaaaaactttgaaatcccatcagcttcactctcacttttcgacactgtcagtgtactcttctggactcctgtctatgaccagttcattatcccgctggcaagaaagttcacacgcaatgaacgaggcttcactcagcttcaacgtatgggtataggtcttgtggtctccatctttgccatgatcactgcaggagtcttggaggttgtcaggcttgattatgtcaaaactcacaatgcatatgaccaaaaacagatccatatgtcgatattctggcagataccgcagtatttacttatcggttgtgcagaagttttcacctttataggtcagcttgagtttttctatgatcaggctcctgatgccatgagaagtctctgctctgctttgtcgttgaccacggttgcgttggggaactatttgagcacagttcttgtgacggttgtgatgaagataacgaagaagaacggtaaaccgggttggataccggataacttgaaccgaggccatcttgattactttttctacttgttggcaactctcagtttcctcaacttcttagtgtacctctggatttcaaaacgctacaaatacaagaaagctgttggtcgagcacattgatcaagaaactggtgtggaagatatttggagttaacagtatttgtttgaaaagtgttttgcttgtaaatgttttttgtatgtggtctagttgttgttggtgtgttaggtttgttttggttttgcttatgtatttctgaatacttccagtcttccacttatatgtaaaaggctattggtaactattttatgagctttttgcttaaagctttttgaccgc

SEQ ID NO: 40911 - protein, 570 aa, Arabidopsis thaliana
  peptide (1)..(570): Ceres Seq. ID no. 13489069
MEEKDVYTQDGTVDIHKNPANKEKTGNWKACRFILGNECCERLAYYGMGTNLVNYLESRLNQGNATAANNVTNWSGTCYITPLIGAFIADAYLGRYWTIATFVFIYVSGMTLLTLSASVPGLKPGNCNADTCHPNSSQTAVFFVALYMIALGTGGIKPCVSSFGADQFDENDENEKIKKSSFFNWFYFSINVGALIAATVLVWIQMNVGWGWGFGVPTVAMVIAVCFFFFGSRFYRLQRPGGSPLTRIFQVIVAAFRKISVKVPEDKSLLFETADDESNIKGSRKLVHTDNLKFFDKAAVESQSDSIKDGEVNPWRLCSVTQVEELKSIITLLPVWATGIVFATVYSQMSTMFVLQGNTMDQHMGKNFEIPSASLSLFDTVSVLFWTPVYDQFIIPLARKFTRNERGFTQLQRMGIGLVVSIFAMITAGVLEVVRLDYVKTHNAYDQKQIHMSIFWQIPQYLLIGCAEVFTFIGQLEFFYDQAPDAMRSLCSALSLTTVALGNYLSTVLVTVVMKITKKNGKPGWIPDNLNRGHLDYFFYLLATLSFLNFLVYLWISKRYKYKKAVGRAH

SEQ ID NO: 40912 - protein, 523 aa, Arabidopsis thaliana
  peptide (1)..(523): Ceres Seq. ID no. 13489070
MGTNLVNYLESRLNQGNATAANNVTNWSGTCYITPLIGAFIADAYLGRYWTIATFVFIYVSGMTLLTLSASVPGLKPGNCNADTCHPNSSQTAVFFVALYMIALGTGGIKPCVSSFGADQFDENDENEKIKKSSFFNWFYFSINVGALIAATVLVWIQMNVGWGWGFGVPTVAMVIAVCFFFFGSRFYRLQRPGGSPLTRIFQVIVAAFRKISVKVPEDKSLLFETADDESNIKGSRKLVHTDNLKFFDKAAVESQSDSIKDGEVNPWRLCSVTQVEELKSIITLLPVWATGIVFATVYSQMSTMFVLQGNTMDQHMGKNFEIPSASLSLFDTVSVLFWTPVYDQFIIPLARKFTRNERGFTQLQRMGIGLVVSIFAMITAGVLEVVRLDYVKTHNAYDQKQIHMSIFWQIPQYLLIGCAEVFTFIGQLEFFYDQAPDAMRSLCSALSLTTVALGNYLSTVLVTVVMKITKKNGKPGWIPDNLNRGHLDYFFYLLATLSFLNFLVYLWISKRYKYKKAVGRAH

SEQ ID NO: 40913 - protein, 461 aa, Arabidopsis thaliana
  peptide (1)..(461): Ceres Seq. ID no. 13489071
MTLLTLSASVPGLKPGNCNADTCHPNSSQTAVFFVALYMIALGTGGIKPCVSSFGADQFDENDENEKIKKSSFFNWFYFSINVGALIAATVLVWIQMNVGWGWGFGVPTVAMVIAVCFFFFGSRFYRLQRPGGSPLTRIFQVIVAAFRKISVKVPEDKSLLFETADDESNIKGSRKLVHTDNLKFFDKAAVESQSDSIKDGEVNPWRLCSVTQVEELKSIITLLPVWATGIVFATVYSQMSTMFVLQGNTMDQHMGKNFEIPSASLSLFDTVSVLFWTPVYDQFIIPLARKFTRNERGFTQLQRMGIGLVVSIFAMITAGVLEVVRLDYVKTHNAYDQKQIHMSIFWQIPQYLLIGCAEVFTFIGQLEFFYDQAPDAMRSLCSALSLTTVALGNYLSTVLVTVVMKITKKNGKPGWIPDNLNRGHLDYFFYLLATLSFLNFLVYLWISKRYKYKKAVGRAH

SEQ ID NO: 40914 - DNA, 1083 bp, Arabidopsis thaliana
  misc_feature (1)..(1083): Ceres Seq. ID no. 12327708
  misc_feature (1)..(1083): Ortholog of  Ceres SEQ ID NO 14305022 as cited in SEQ ID NO 53586
  misc_feature (1)..(1083): Ortholog of  Ceres SEQ ID NO 12506279 as cited in SEQ ID NO 55440
  misc_feature (1)..(1083): Ortholog of  Ceres SEQ ID NO 13654847 as cited in SEQ ID NO 62459
  misc_feature (1)..(1083): Ortholog of  Ceres SEQ ID NO 15174357 as cited in SEQ ID NO 0
ccttaacgacaaaggaaagaaagcatggagattgaaaacggaagccatttctagcaaaacaattctctcttttgtcttgaagataagtttcacaaaaaggtctgcttcgcctcttctacgacgttgcagaaactaagaagagatgggtcttctctccaacagaatcgatagatcgagtttgaaacctggagatcatatctactcctggaggactgcttacatctatgcccatcacggcatctatgttggagatgatagagtcatccatttcactagacgaggccaagaagttggaaccgggactgttctagatctcatactagtcagctcaggtccatcccgaaaccacacccactgtccaacctgtgttccacctaacgaaggtcacggtgttgtttcctcatgccttaactgtttcctagccggtggtgtcttgtaccggtttgagtactcagtcaacgctgctcacttcctcgtcaaagccagaggaggaacttgcacactcgctgtcgctgaccctaatgagattgttgttcaccgggccaaacacctccttcaaaacggatttggatgttatgacgttttcaagaacaactgtgaggatttcgctatatattgcaaaaccgcattgctggttcttgagggaaggacaatgggacagagcggtcaggcggtttcgattataggtgggccgattgctgcggttttgtccacgccaatgcggcttctgactacaaacgtgtatgggatggctgctacagcgattggtgtgtattgtgcgagtagatacgctactgatatcggaatgagagctgacgtcgcgaaagttgaagcagaggacctcacaagaaggctgtcttcaggacttttccaagtacttgatcctccattggcagccatagctttaccaagcacgagttgataagcttaagcttcaccagcttatcccactgttgtattttctatttgtcccttagcttctataaatgttctaataagaacactccttgcacaattgatctcggtgtgattcaaacttatataattatgtacaataataggtaaaaaagggtaccagttacc

SEQ ID NO: 40915 - protein, 259 aa, Arabidopsis thaliana
  peptide (1)..(259): Ceres Seq. ID no. 12327709
MGLLSNRIDRSSLKPGDHIYSWRTAYIYAHHGIYVGDDRVIHFTRRGQEVGTGTVLDLILVSSGPSRNHTHCPTCVPPNEGHGVVSSCLNCFLAGGVLYRFEYSVNAAHFLVKARGGTCTLAVADPNEIVVHRAKHLLQNGFGCYDVFKNNCEDFAIYCKTALLVLEGRTMGQSGQAVSIIGGPIAAVLSTPMRLLTTNVYGMAATAIGVYCASRYATDIGMRADVAKVEAEDLTRRLSSGLFQVLDPPLAAIALPSTS

SEQ ID NO: 40916 - DNA, 1080 bp, Arabidopsis thaliana
  misc_feature (1)..(1080): Ceres Seq. ID no. 13492124
  misc_feature (1)..(1080): Ortholog of  Ceres SEQ ID NO 15171268 as cited in SEQ ID NO 51297
  misc_feature (1)..(1080): Ortholog of  Ceres SEQ ID NO 15170521 as cited in SEQ ID NO 55668
  misc_feature (1)..(1080): Ortholog of  Ceres SEQ ID NO 13598249 as cited in SEQ ID NO 62509
  misc_feature (1)..(1080): Ortholog of  Ceres SEQ ID NO 13598595 as cited in SEQ ID NO 64671
  misc_feature (1)..(1080): Ortholog of  Ceres SEQ ID NO 13654241 as cited in SEQ ID NO 68348
gtcgacccacgcgtccgagaagaaaaccctagatttctccgtctctctaatttcctttctctctcaagcttctcagaaagtctgacactttcgagaatctaatctccaaatttcttgtctttttggagaaggaatcgaattatgtacaaggaacgtagtggaggaggtggtggtgggtcatcgagatcagagatcctcggtggagctattgatcggaaacgaatcaacgatgcactcaataagaaactagagaaatcttcaacttccaccaccacatctagggttttctcttctaaagacaaagatcccttttccttcacatctactaaaactcagcttcctgatgtggaatcggaaactgatagtgaagggtctgatgtgagtggatcggagggtgatgatacgtcgtggatctcttggttttgtaatttgagagggaatgatttcttctgtgaagtcgatgaagattatattcaagatgatttcaatctttgtggtttaagtggtcaagtcccttactatgattatgcacttgatctcattttagatgttgatgcttccaacagtgagatgtttactgatgaacagcatgaaatggtggaatcagctgctgagatgctatatggtcttattcatgttcgttacattttgactactaaaggaatggctgcaatgactgagaagtacaagaactgtgatttcgggagatgcccgagagttttctgttgcggtcagtcttgtcttccagttggacaatccgatatcccgagatcgagtactgtgaagatatactgccctaaatgcgaggatatatcttacccgcgatctaaattccaaggcaatattgatggagcgtactttggaaccacattccctcacttgttcttgatgacttacgggaacttaaagccgcagaagcctactcaaagctatgtcccaaaaatctttggcttcaaggtacacaaaccatgatactagtgctctgcattctcaatggtgatacatttagtggctctgtaattgcatccggatgagcaactgaaacgatagctgcggtgactggagcatacatcaaccatt

SEQ ID NO: 40917 - protein, 276 aa, Arabidopsis thaliana
  peptide (1)..(276): Ceres Seq. ID no. 13492125
MYKERSGGGGGGSSRSEILGGAIDRKRINDALNKKLEKSSTSTTTSRVFSSKDKDPFSFTSTKTQLPDVESETDSEGSDVSGSEGDDTSWISWFCNLRGNDFFCEVDEDYIQDDFNLCGLSGQVPYYDYALDLILDVDASNSEMFTDEQHEMVESAAEMLYGLIHVRYILTTKGMAAMTEKYKNCDFGRCPRVFCCGQSCLPVGQSDIPRSSTVKIYCPKCEDISYPRSKFQGNIDGAYFGTTFPHLFLMTYGNLKPQKPTQSYVPKIFGFKVHKP

SEQ ID NO: 40918 - DNA, 1334 bp, Arabidopsis thaliana
  misc_feature (1)..(1334): Ceres Seq. ID no. 12562248
  misc_feature (1)..(1334): Ortholog of  Ceres SEQ ID NO 12612333 as cited in SEQ ID NO 56421
tttttttctataaaaggtacacgtacactcatgtatctacttactcactcctttcagaaacccaaaccctcattccaaaaaatggggtctcgctctcaaaacctctcctttctcgtcctcctcctccttggcttcgttgccgtctcctatgcttgcgactgtacccctcctaaaccatcaccggcgcctcacaaaccaccaaaacatcctgtcaaaccgcctaaacctcctgccgtcaaaccacctaaaccacgggcagtaaaaccacctaccccaaaaccgcccaccgtcaaaccccatcctaaaccaccaaccgtcaaaccccaccctaagccacccaccgtcaaaccaccacaccctaaaccacccaccaaatctcacccccacccaaaacctcccatagtaaagccaccaaccaagcctcctccgtccacccctaaacctcccaccaaacctcccccgtccactcctaaacctcccacgaccaagcctcctccctctactccgaaaccgccccaccacaagcctccacctacaccatgcccaccaccaacaccaacaccgactccaccagttgtaacaccgccaacaccaaccccacccgtcataactccaccaacaccaaccccacccgtcgtaacaccgccaacgccaactccacccgtcattacaccaccaacaccaactccacccgtcattacaccaccaacaccaacaccacccgtcgtgacacctccaacaccaacaccacccgtagtaacaccaccaacaccaactcctcctacgcctattccagagacttgcccaattgacacgaagaagctaggcgcttgtgtggacgttcttggaggtttgattcacatcggacttggaaaaagccacgccaaggcagaatgttgtccggttttaggaggtttacttgacctagacgcagccgtttgtctatgtaccaccattaagctcaaacttctcaacatcgaccttgttctccccattgctcttgagcttcttctcgactgtggaaaaactccaccatctgacttcaaatgtcccgcttaatcgatgtagaacgttgagagtctctggacgactccaaaagtttcgtttcttcaagaaatttgttagtttcatgatctatttggtaatgggaggttaatctgcatatgtgcgacctttagttacatgtttcatttgatacaataaaaggcgttgtaatttgggtttgagatctcaatttctttgggttttcttgttatgttgtacttttaagaagaagaaaaaaaactgttaaacgatataactttttttttaatatgaacaagtttgtatctgtc

SEQ ID NO: 40919 - protein, 352 aa, Arabidopsis thaliana
  peptide (1)..(352): Ceres Seq. ID no. 12562249
FFSIKGTRTLMYLLTHSFQKPKPSFQKMGSRSQNLSFLVLLLLGFVAVSYACDCTPPKPSPAPHKPPKHPVKPPKPPAVKPPKPRAVKPPTPKPPTVKPHPKPPTVKPHPKPPTVKPPHPKPPTKSHPHPKPPIVKPPTKPPPSTPKPPTKPPPSTPKPPTTKPPPSTPKPPHHKPPPTPCPPPTPTPTPPVVTPPTPTPPVITPPTPTPPVVTPPTPTPPVITPPTPTPPVITPPTPTPPVVTPPTPTPPVVTPPTPTPPTPIPETCPIDTKKLGACVDVLGGLIHIGLGKSHAKAECCPVLGGLLDLDAAVCLCTTIKLKLLNIDLVLPIALELLLDCGKTPPSDFKCPA

SEQ ID NO: 40920 - protein, 342 aa, Arabidopsis thaliana
  peptide (1)..(342): Ceres Seq. ID no. 12562250
MYLLTHSFQKPKPSFQKMGSRSQNLSFLVLLLLGFVAVSYACDCTPPKPSPAPHKPPKHPVKPPKPPAVKPPKPRAVKPPTPKPPTVKPHPKPPTVKPHPKPPTVKPPHPKPPTKSHPHPKPPIVKPPTKPPPSTPKPPTKPPPSTPKPPTTKPPPSTPKPPHHKPPPTPCPPPTPTPTPPVVTPPTPTPPVITPPTPTPPVVTPPTPTPPVITPPTPTPPVITPPTPTPPVVTPPTPTPPVVTPPTPTPPTPIPETCPIDTKKLGACVDVLGGLIHIGLGKSHAKAECCPVLGGLLDLDAAVCLCTTIKLKLLNIDLVLPIALELLLDCGKTPPSDFKCPA

SEQ ID NO: 40921 - protein, 325 aa, Arabidopsis thaliana
  peptide (1)..(325): Ceres Seq. ID no. 12562251
MGSRSQNLSFLVLLLLGFVAVSYACDCTPPKPSPAPHKPPKHPVKPPKPPAVKPPKPRAVKPPTPKPPTVKPHPKPPTVKPHPKPPTVKPPHPKPPTKSHPHPKPPIVKPPTKPPPSTPKPPTKPPPSTPKPPTTKPPPSTPKPPHHKPPPTPCPPPTPTPTPPVVTPPTPTPPVITPPTPTPPVVTPPTPTPPVITPPTPTPPVITPPTPTPPVVTPPTPTPPVVTPPTPTPPTPIPETCPIDTKKLGACVDVLGGLIHIGLGKSHAKAECCPVLGGLLDLDAAVCLCTTIKLKLLNIDLVLPIALELLLDCGKTPPSDFKCPA

SEQ ID NO: 40922 - DNA, 839 bp, Arabidopsis thaliana
  misc_feature (1)..(839): Ceres Seq. ID no. 12371460
  misc_feature (1)..(839): Ortholog of  Ceres SEQ ID NO 12626166 as cited in SEQ ID NO 64505
atttttctcaacgtgaaagagagaaaagagaatctctcagaaggtgagcctaacaaagcgtgaatctctctttctctctctatctctctatctctctgtctccgagatcgcatcaccggaaatctccttctacggtggtggtggtgacagttgaccagagatggcggcggagaatgagagaaaatctccttcagcagtctccgatatgggagcttgggcaatgaatgtaataagctccgttggaatcatcatggcgaataaacaacttatgtcctcttctggattcgcatttagtttcgctacaactctcaccggattccacttcgctttaaccgcattggtcggtatggtatcaaacgctaccggattctctgcttcgaagcatgttcctatgtgggagcttatttggttctccattgttgggatggtaatctatagttgggcaatggaattggagaaacagtcgattattgcagcaaaggctttaaacagtgtgaaacatagcttaacagaggaagagtttgaacttttgaaggaaggtgtagaaactacacaatcaaaagatgttgaacttggccgcacaaaagattagagacagatggatagagaaagaaacatagtcttcaggtacaatttgttctgctataatttttgtatgttttgtgttatctaaaccaagagatcggatcctcggagattagtgtctaggcttcgatctaaagtttccttggttatacaaatgttttgtgttatttatatctttttacccaattccatggaaataacttcaatgaccacatgttcttgttttacgtagcactcaaagagtatattccttt

SEQ ID NO: 40923 - protein, 143 aa, Arabidopsis thaliana
  peptide (1)..(143): Ceres Seq. ID no. 12371461
MAAENERKSPSAVSDMGAWAMNVISSVGIIMANKQLMSSSGFAFSFATTLTGFHFALTALVGMVSNATGFSASKHVPMWELIWFSIVGMVIYSWAMELEKQSIIAAKALNSVKHSLTEEEFELLKEGVETTQSKDVELGRTKD

SEQ ID NO: 40924 - protein, 128 aa, Arabidopsis thaliana
  peptide (1)..(128): Ceres Seq. ID no. 12371462
MGAWAMNVISSVGIIMANKQLMSSSGFAFSFATTLTGFHFALTALVGMVSNATGFSASKHVPMWELIWFSIVGMVIYSWAMELEKQSIIAAKALNSVKHSLTEEEFELLKEGVETTQSKDVELGRTKD

SEQ ID NO: 40925 - protein, 123 aa, Arabidopsis thaliana
  peptide (1)..(123): Ceres Seq. ID no. 12371463
MNVISSVGIIMANKQLMSSSGFAFSFATTLTGFHFALTALVGMVSNATGFSASKHVPMWELIWFSIVGMVIYSWAMELEKQSIIAAKALNSVKHSLTEEEFELLKEGVETTQSKDVELGRTKD

SEQ ID NO: 40926 - DNA, 1466 bp, Arabidopsis thaliana
  misc_feature (1)..(1466): Ceres Seq. ID no. 13504682
  misc_feature (1)..(1466): Ortholog of  Ceres SEQ ID NO 13596803 as cited in SEQ ID NO 62267
gcgttctcgacttgggttcgtcttcttcttctttctattcagattcacaataattgccaagcgaacaagtctttgcctctttggtttactttcctctgttttcgatccatttagaaaatgttattcacgaggagtgttgctcggatttcttctaagtttctgagaaaccgtagcttctatggctcctctcaatctctcgcctctcatcggttcgcaatcattcccgatcagggtcactcttgttctgactctccacacaagggttacgtttgcagaacaacttattcattgaaatctccggtttttggtggatttagtcatcaactctatcaccagagtagctccttggttgaggaggagcttgacccattttcgcttgttgccgatgagctgtcacttcttagtaataagttgagagagatggtacttgccgaggttccaaagcttgcctctgctgctgagtacttcttcaaaaggggtgtgcaaggaaaacagtttcgttcaactattttgctgctgatggcgacagctctgaatgtacgagttccagaagcattgattggggaatcaacagatatagtcacatcagaattacgcgtaaggcaacggggtattgctgaaatcactgaaatgatacacgtcgcaagtctactgcacgatgatgtcttggatgatgccgatacaaggcgtggtgttggttccttaaatgttgtaatgggtaacaagatgtcggtattagcaggagacttcttgctctcccgggcttgtggggctctcgctgctttaaagaacacagaggttgtagcattacttgcaactgctgtagaacatcttgttaccggtgaaaccatggagataactagttcaaccgagcagcgttatagtatggactactacatgcagaagacatattataagacagcatcgctaatctctaacagctgcaaagctgttgccgttctcactggacaaacagcagaagttgccgtgttagcttttgagtatgggaggaatctgggtttagcattccaattaatagacgacattcttgatttcacgggcacatctgcctctctcggaaagggatcgttgtcagatattcgccatggagtcataacagccccaatcctctttgccatggaagagtttcctcaactacgcgaagttgttgatcaagttgaaaaagatcctaggaatgttgacattgctttagagtatcttgggaagagcaagggaatacagagggcaagagaattagccatggaacatgcgaatctagcagcagctgcaatcgggtctctacctgaaacagacaatgaagatgtcaaaagatcgaggcgggcacttattgacttgacccatagagtcatcaccagaaacaagtgagattaagtaatgtttctctctatacaccaaaacattcctcatttcatttgtaggattttgttggtccaattcgtttcacg

SEQ ID NO: 40927 - protein, 422 aa, Arabidopsis thaliana
  peptide (1)..(422): Ceres Seq. ID no. 13504683
MLFTRSVARISSKFLRNRSFYGSSQSLASHRFAIIPDQGHSCSDSPHKGYVCRTTYSLKSPVFGGFSHQLYHQSSSLVEEELDPFSLVADELSLLSNKLREMVLAEVPKLASAAEYFFKRGVQGKQFRSTILLLMATALNVRVPEALIGESTDIVTSELRVRQRGIAEITEMIHVASLLHDDVLDDADTRRGVGSLNVVMGNKMSVLAGDFLLSRACGALAALKNTEVVALLATAVEHLVTGETMEITSSTEQRYSMDYYMQKTYYKTASLISNSCKAVAVLTGQTAEVAVLAFEYGRNLGLAFQLIDDILDFTGTSASLGKGSLSDIRHGVITAPILFAMEEFPQLREVVDQVEKDPRNVDIALEYLGKSKGIQRARELAMEHANLAAAAIGSLPETDNEDVKRSRRALIDLTHRVITRNK

SEQ ID NO: 40928 - protein, 321 aa, Arabidopsis thaliana
  peptide (1)..(321): Ceres Seq. ID no. 13504684
MVLAEVPKLASAAEYFFKRGVQGKQFRSTILLLMATALNVRVPEALIGESTDIVTSELRVRQRGIAEITEMIHVASLLHDDVLDDADTRRGVGSLNVVMGNKMSVLAGDFLLSRACGALAALKNTEVVALLATAVEHLVTGETMEITSSTEQRYSMDYYMQKTYYKTASLISNSCKAVAVLTGQTAEVAVLAFEYGRNLGLAFQLIDDILDFTGTSASLGKGSLSDIRHGVITAPILFAMEEFPQLREVVDQVEKDPRNVDIALEYLGKSKGIQRARELAMEHANLAAAAIGSLPETDNEDVKRSRRALIDLTHRVITRNK

SEQ ID NO: 40929 - protein, 288 aa, Arabidopsis thaliana
  peptide (1)..(288): Ceres Seq. ID no. 13504685
MATALNVRVPEALIGESTDIVTSELRVRQRGIAEITEMIHVASLLHDDVLDDADTRRGVGSLNVVMGNKMSVLAGDFLLSRACGALAALKNTEVVALLATAVEHLVTGETMEITSSTEQRYSMDYYMQKTYYKTASLISNSCKAVAVLTGQTAEVAVLAFEYGRNLGLAFQLIDDILDFTGTSASLGKGSLSDIRHGVITAPILFAMEEFPQLREVVDQVEKDPRNVDIALEYLGKSKGIQRARELAMEHANLAAAAIGSLPETDNEDVKRSRRALIDLTHRVITRNK

SEQ ID NO: 40930 - DNA, 1791 bp, Arabidopsis thaliana
  misc_feature (1)..(1791): Ceres Seq. ID no. 13489502
  misc_feature (1)..(1791): Ortholog of  Ceres SEQ ID NO 13595201 as cited in SEQ ID NO 56606
agaatccagattcctttcttatcatcatctctctctctcacactgtttatctgattcgtcttctctgataatcaagagtagtagtgcggttctctggaaaatattcgatttttaaaagactctgatgatgacattaaactcactatctccagctgaatccaaagctatttctttcttggatacctccaggttcaatccaatccctaaactctcaggtgggtttagtttgaggaggaggaatcaagggagaggttttggaaaaggtgttaagtgttcagtgaaagtgcagcagcaacaacaacctcctccagcatggcctgggagagctgtccctgaggcgcctcgtcaatcttgggatggaccaaaacccatctctatcgttggatctactggttctattggcactcagacattggatattgtggctgagaatcctgacaaattcagagttgtggctctagctgctggttcgaatgttactctacttgctgatcaggtaaggagatttaagcctgcattggttgctgttagaaacgagtcactgattaatgagcttaaagaggctttagctgatttggactataaactcgagattattccaggagagcaaggagtgattgaggttgcccgacatcctgaagctgtaaccgttgttaccggaatagtaggttgtgcgggactaaagcctacggttgctgcaattgaagcaggaaaggacattgctcttgcaaacaaagagacattaatcgcaggtggtcctttcgtgcttccgcttgccaacaaacataatgtaaagattcttccggcagattcagaacattctgccatatttcagtgtattcaaggtttgcctgaaggcgctctgcgcaagataatcttgactgcatctggtggagcttttagggattggcctgtcgaaaagctaaaggaagttaaagtagcggatgcgttgaagcatccaaactggaacatgggaaagaaaatcactgtggactctgctacgcttttcaacaagggtcttgaggtcattgaagcgcattatttgtttggagctgagtatgacgatatagagattgtcattcatccgcaaagtatcatacattccatgattgaaacacaggattcatctgtgcttgctcaattgggttggcctgatatgcgtttaccgattctctacaccatgtcatggcccgatagagttccttgttctgaagtaacttggccaagacttgacctttgcaaactcggttcattgactttcaagaaaccagacaatgtgaaatacccatccatggatcttgcttatgctgctggacgagctggaggcacaatgactggagttctcagcgccgccaatgagaaagctgttgaaatgttcattgatgaaaagataagctatttggatatcttcaaggttgtggaattaacatgcgataaacatcgaaacgagttggtaacatcaccgtctcttgaagagattgttcactatgacttgtgggcacgtgaatatgccgcgaatgtgcagctttcttctggtgctaggccagttcatgcatgaagaattggttgttggaagaacataaggaagcttctgaggaaatgttgaaagaagattagtgtagagaatggggtactacttaatagcgtttttggcaaggattatggattgtgtagctaatttatctgtgatccgaacaagccaaactgataatttgaaaccatttttaccaataaaaccgagcttaattgtttcacattatatgattaattacattcatctaagggttcttg

SEQ ID NO: 40931 - protein, 477 aa, Arabidopsis thaliana
  peptide (1)..(477): Ceres Seq. ID no. 13489503
MMTLNSLSPAESKAISFLDTSRFNPIPKLSGGFSLRRRNQGRGFGKGVKCSVKVQQQQQPPPAWPGRAVPEAPRQSWDGPKPISIVGSTGSIGTQTLDIVAENPDKFRVVALAAGSNVTLLADQVRRFKPALVAVRNESLINELKEALADLDYKLEIIPGEQGVIEVARHPEAVTVVTGIVGCAGLKPTVAAIEAGKDIALANKETLIAGGPFVLPLANKHNVKILPADSEHSAIFQCIQGLPEGALRKIILTASGGAFRDWPVEKLKEVKVADALKHPNWNMGKKITVDSATLFNKGLEVIEAHYLFGAEYDDIEIVIHPQSIIHSMIETQDSSVLAQLGWPDMRLPILYTMSWPDRVPCSEVTWPRLDLCKLGSLTFKKPDNVKYPSMDLAYAAGRAGGTMTGVLSAANEKAVEMFIDEKISYLDIFKVVELTCDKHRNELVTSPSLEEIVHYDLWAREYAANVQLSSGARPVHA

SEQ ID NO: 40932 - protein, 476 aa, Arabidopsis thaliana
  peptide (1)..(476): Ceres Seq. ID no. 13489504
MTLNSLSPAESKAISFLDTSRFNPIPKLSGGFSLRRRNQGRGFGKGVKCSVKVQQQQQPPPAWPGRAVPEAPRQSWDGPKPISIVGSTGSIGTQTLDIVAENPDKFRVVALAAGSNVTLLADQVRRFKPALVAVRNESLINELKEALADLDYKLEIIPGEQGVIEVARHPEAVTVVTGIVGCAGLKPTVAAIEAGKDIALANKETLIAGGPFVLPLANKHNVKILPADSEHSAIFQCIQGLPEGALRKIILTASGGAFRDWPVEKLKEVKVADALKHPNWNMGKKITVDSATLFNKGLEVIEAHYLFGAEYDDIEIVIHPQSIIHSMIETQDSSVLAQLGWPDMRLPILYTMSWPDRVPCSEVTWPRLDLCKLGSLTFKKPDNVKYPSMDLAYAAGRAGGTMTGVLSAANEKAVEMFIDEKISYLDIFKVVELTCDKHRNELVTSPSLEEIVHYDLWAREYAANVQLSSGARPVHA

SEQ ID NO: 40933 - DNA, 1178 bp, Arabidopsis thaliana
  misc_feature (1)..(1178): Ceres Seq. ID no. 12325769
  misc_feature (1)..(1178): Ortholog of  Ceres SEQ ID NO 14311934 as cited in SEQ ID NO 51605
aactcacaccactccattgcccattgctctgtgtactttgcttctttaggagaaagaaagcacaaggggcaaaatcggaaagattatcatggccgacggtagtactagttcttcggagtccactaccgcctgcgctggaagcggcacaagaagagagattatgctgttcggagtcagggttgtgcttgacccgatgagaaagtgcgtgagtttgaacaatctgtctgactatgaacagacggcggagactccaaagatcgacggcgaagatagagatgaacaagatatgaacaaaaccccggccggttacgcctcggcggatgaagctcttcccatgtcttcttctaacggcaaaatcgagaggaaacgaggagttccatggactgaagaagaacacaagctgttcttgcttgggctgcagagagtcggtaaaggagattggaaaggaatatcaagaaactttgtcaagaccagaacctctacacaagttgctagtcatgctcagaaatacttcctcaggcgaagtaatcttaaccgtcgccgccgaagatctagcctttttgacatgactactgatacggtcatacccatggaagaagatcaccaagtgcttatacaggagaacacatctcaatcatcttctcctgtaccggaaatcaacaacttctctatacatccggttatgcaagtctttcccgagttcccggtaccaacagggaatcaatcatacggacagcttacttcatcgaatctcatcaatttggttccattaacttttcagtcaagtccagcaccgctttctctcaacctctcactagcttcatctaatcttaatgaaccatctccttcaatgcatccagcattcaacacgattggagtcgcttagagcttatcctaaaggtgaaaatctgcaacacaccctgtttgtttctttgctgtacagataggtcttgactttgttataaaaaaattcgtcaaatttatgtatttggctaaaaaaaatctgttgaaaagaagaataataaacagagtttggagataggacttaagtggggttttagggttcataatcatcctgtgtttttccttccatgtttggaagttgttgtaatactctctaagttcattcgtgtggatctatcaaaacttataaatcatattaacgttatgtttgtttc

SEQ ID NO: 40934 - protein, 265 aa, Arabidopsis thaliana
  peptide (1)..(265): Ceres Seq. ID no. 12325770
MADGSTSSSESTTACAGSGTRREIMLFGVRVVLDPMRKCVSLNNLSDYEQTAETPKIDGEDRDEQDMNKTPAGYASADEALPMSSSNGKIERKRGVPWTEEEHKLFLLGLQRVGKGDWKGISRNFVKTRTSTQVASHAQKYFLRRSNLNRRRRRSSLFDMTTDTVIPMEEDHQVLIQENTSQSSSPVPEINNFSIHPVMQVFPEFPVPTGNQSYGQLTSSNLINLVPLTFQSSPAPLSLNLSLASSNLNEPSPSMHPAFNTIGVA

SEQ ID NO: 40935 - protein, 241 aa, Arabidopsis thaliana
  peptide (1)..(241): Ceres Seq. ID no. 12325771
MLFGVRVVLDPMRKCVSLNNLSDYEQTAETPKIDGEDRDEQDMNKTPAGYASADEALPMSSSNGKIERKRGVPWTEEEHKLFLLGLQRVGKGDWKGISRNFVKTRTSTQVASHAQKYFLRRSNLNRRRRRSSLFDMTTDTVIPMEEDHQVLIQENTSQSSSPVPEINNFSIHPVMQVFPEFPVPTGNQSYGQLTSSNLINLVPLTFQSSPAPLSLNLSLASSNLNEPSPSMHPAFNTIGVA

SEQ ID NO: 40936 - protein, 230 aa, Arabidopsis thaliana
  peptide (1)..(230): Ceres Seq. ID no. 12325772
MRKCVSLNNLSDYEQTAETPKIDGEDRDEQDMNKTPAGYASADEALPMSSSNGKIERKRGVPWTEEEHKLFLLGLQRVGKGDWKGISRNFVKTRTSTQVASHAQKYFLRRSNLNRRRRRSSLFDMTTDTVIPMEEDHQVLIQENTSQSSSPVPEINNFSIHPVMQVFPEFPVPTGNQSYGQLTSSNLINLVPLTFQSSPAPLSLNLSLASSNLNEPSPSMHPAFNTIGVA

SEQ ID NO: 40937 - DNA, 1108 bp, Arabidopsis thaliana; identical to SEQ ID NO: 38081
  misc_feature (1)..(1108): Ceres Seq. ID no. 12371248
  misc_feature (1)..(1108): Ortholog of  Ceres SEQ ID NO 15179676 as cited in SEQ ID NO 52442
  misc_feature (1)..(1108): Ortholog of  Ceres SEQ ID NO 13582807 as cited in SEQ ID NO 67806

SEQ ID NO: 40938 - protein, 284 aa, Arabidopsis thaliana; identical to SEQ ID NO: 38082
  peptide (1)..(284): Ceres Seq. ID no. 12371249

SEQ ID NO: 40939 - protein, 185 aa, Arabidopsis thaliana; identical to SEQ ID NO: 38083
  peptide (1)..(185): Ceres Seq. ID no. 12371250

SEQ ID NO: 40940 - protein, 182 aa, Arabidopsis thaliana; identical to SEQ ID NO: 38084
  peptide (1)..(182): Ceres Seq. ID no. 12371251

SEQ ID NO: 40941 - DNA, 1793 bp, Arabidopsis thaliana
  misc_feature (1)..(1793): Ceres Seq. ID no. 12338267
  misc_feature (1)..(1793): Ortholog of  Ceres SEQ ID NO 14316451 as cited in SEQ ID NO 57956
  misc_feature (1)..(1793): Ortholog of  Ceres SEQ ID NO 15224799 as cited in SEQ ID NO 0
aaatatctaacaatctatcttttgggtccctaaaaaagctccttcctttatcttgttttctaagttatctttttgtatgagtttcaaagcttatcattatctcactcttcttccatagctatgactactttaacgaagattcaagtgtacccacaagtcttggagcaccgtctcttcttcagagatccgatacgggtcgggtcaagattgacttgtagagaacgtagtaatagggtttatgtgcatcggtgtgagaaaaaagttgaaagaaagagaaaagttgagaaatttaagggaaatgggtcgtgggattctttgaaatctgggtttttagggtttagtaaattagggttcttgtctaaagatgagtataatcagaaagttgaaaacttggagatggttttctcttcggttgctgttcaaattgcgagatacattgtgacgatgacaagtactggagctattcttttgattgggtttcaattatcaggtggagatagttcgatgaactcattggtttggtatagttggcttggtggaattatcattggaaccatgactggtgctaacatggttttggaagatcattatcgagccggtccacggaatgttgttataaccggaagcactaggggactagggaaagctcttgctagagagtttcttctctctggagacagagtcattgtcacatctcgcagttctgaatctgttgatatgactgtcaaagagctagagcaaaatctcaaagagattatgagtaacgctagcgagtcagctagaaagaaactgagtgatgctaaggtagttggtattgcctgtgatgtttgcaaacccgaagacgttgagaagctgtcgaatttcgctgtaaaagagcttggttccatcaacatatggataaacaatgctggtactaacaaaggttttagaccgctactcgagttcacggaagaagatatcacacagattgtctccacaaatttgattggatcaattctatgtacacgaggggctatagatgtgatgagcagacagcacagtggtggacacatttttaacatggatggtgctggctctggaggttcaagtactcctctcactgccgtatatggttcaacaaaatgtggacttaggcagtttcatgggtctatagtgaaagaaagccaaaaaacaaacgttggccttcacactgcatcccctggcatggttctgacagaacttcttctcagtggttcgagcattaaaaacaagcagatgtttaacataatctgtgagcttcctgagacagtagctagaactttggtaccacgaatgcgagttgtgaaaggttcgggaaaagccgtcaattacctaactcctcctcggatattgttagctattgtcacttcctggctaaggagaggccgatggtttgatgaccaaggacgggcgttatatgcagcagaagcagatagactaaggaactgggcagagaacaggacgaggttgtcgttaacagacgcgatggagatgtatacagagaatacttgggtctctgttttctctctttctgttgtttgcgctttcatcatcttacaaagcacaacacctagctcttttccaggcacataacaaacatcttcctcggatgtgttttaagaaaattgtaaacgtacatgttatgtataaaaaacatatatataacagaaccgatttgttcatgtaaacacttcttatagttgtagaatgtgtcgttgttgaaaacaatgaaaaaatagattgtaataaacttttatcagattgtagtattttct

SEQ ID NO: 40942 - protein, 496 aa, Arabidopsis thaliana
  peptide (1)..(496): Ceres Seq. ID no. 12338268
MTTLTKIQVYPQVLEHRLFFRDPIRVGSRLTCRERSNRVYVHRCEKKVERKRKVEKFKGNGSWDSLKSGFLGFSKLGFLSKDEYNQKVENLEMVFSSVAVQIARYIVTMTSTGAILLIGFQLSGGDSSMNSLVWYSWLGGIIIGTMTGANMVLEDHYRAGPRNVVITGSTRGLGKALAREFLLSGDRVIVTSRSSESVDMTVKELEQNLKEIMSNASESARKKLSDAKVVGIACDVCKPEDVEKLSNFAVKELGSINIWINNAGTNKGFRPLLEFTEEDITQIVSTNLIGSILCTRGAIDVMSRQHSGGHIFNMDGAGSGGSSTPLTAVYGSTKCGLRQFHGSIVKESQKTNVGLHTASPGMVLTELLLSGSSIKNKQMFNIICELPETVARTLVPRMRVVKGSGKAVNYLTPPRILLAIVTSWLRRGRWFDDQGRALYAAEADRLRNWAENRTRLSLTDAMEMYTENTWVSVFSLSVVCAFIILQSTTPSSFPGT

SEQ ID NO: 40943 - protein, 404 aa, Arabidopsis thaliana
  peptide (1)..(404): Ceres Seq. ID no. 12338269
MVFSSVAVQIARYIVTMTSTGAILLIGFQLSGGDSSMNSLVWYSWLGGIIIGTMTGANMVLEDHYRAGPRNVVITGSTRGLGKALAREFLLSGDRVIVTSRSSESVDMTVKELEQNLKEIMSNASESARKKLSDAKVVGIACDVCKPEDVEKLSNFAVKELGSINIWINNAGTNKGFRPLLEFTEEDITQIVSTNLIGSILCTRGAIDVMSRQHSGGHIFNMDGAGSGGSSTPLTAVYGSTKCGLRQFHGSIVKESQKTNVGLHTASPGMVLTELLLSGSSIKNKQMFNIICELPETVARTLVPRMRVVKGSGKAVNYLTPPRILLAIVTSWLRRGRWFDDQGRALYAAEADRLRNWAENRTRLSLTDAMEMYTENTWVSVFSLSVVCAFIILQSTTPSSFPGT

SEQ ID NO: 40944 - protein, 388 aa, Arabidopsis thaliana
  peptide (1)..(388): Ceres Seq. ID no. 12338270
MTSTGAILLIGFQLSGGDSSMNSLVWYSWLGGIIIGTMTGANMVLEDHYRAGPRNVVITGSTRGLGKALAREFLLSGDRVIVTSRSSESVDMTVKELEQNLKEIMSNASESARKKLSDAKVVGIACDVCKPEDVEKLSNFAVKELGSINIWINNAGTNKGFRPLLEFTEEDITQIVSTNLIGSILCTRGAIDVMSRQHSGGHIFNMDGAGSGGSSTPLTAVYGSTKCGLRQFHGSIVKESQKTNVGLHTASPGMVLTELLLSGSSIKNKQMFNIICELPETVARTLVPRMRVVKGSGKAVNYLTPPRILLAIVTSWLRRGRWFDDQGRALYAAEADRLRNWAENRTRLSLTDAMEMYTENTWVSVFSLSVVCAFIILQSTTPSSFPGT

SEQ ID NO: 40945 - DNA, 1287 bp, Arabidopsis thaliana
  misc_feature (1)..(1287): Ceres Seq. ID no. 12327890
  misc_feature (1)..(1287): Ortholog of  Ceres SEQ ID NO 13597041 as cited in SEQ ID NO 63502
ctcgttgctgatgtgtcgctctgcttgagagagtcagagagtcaagagagaaaaggggtcgagaatggcggtcgcaatatctgggagtagtttgatatcgtcgactcttcagcattataataatcggatttatatccgagattatccgattccgtgtcactcttctaatccaatttgcaattcttttaatttcaaaagacgttcgttctctccttcttcccccaaatttaacgaccatgtcgttaacccttcctcttcttatttatcctccaagctttctccaattcgaacccattcctctttcgctgcgtgtggctgctcctggattcaagacaattcaatggttcatgattatgctacaacaactaatgggacgtccaagcgttgctcggcgttaccaacaacaaacacagtggatgtctcttcggtgtcagatctttttgaattcatatgctcgggtcctctcgtaaacaagattggtatcactcctcaaagagttggccagtctattgacaaatggttactctacggctcacaactttgtagactgtttcagcttaatgagcttaagcttacaattcctcagaaagctaggctataccactactacatacccgtttttatttgctgcgaagatcagattgctttgcataattccaagtttaaagatggagatgatgtacctaggtacaataagtctgcctatagtgggagaggtgacagagccgattcatcaacatggcctgaagttgaaggacctctatcggttattctctttgagggatggatgcttggttttaagcctcttccagctgacgttgttaaagcagttgacccacagctggaggttgtgaataagaaccttgaagcgtattacgacgcatgggacaagtacatcgatgcttgggtcgtcatcaaaatccaggacccaagttatgtataccggtggcgtcttcaggcggaaatcgccatgaggcaggatggccaagctgggatgtcggatgaggaggtgaatgactttgtgtcgcggtatttgccggcgtataaggcctatcttccaactctttacgcggaagggccaagcggctcagacccagaccgtgtccttgcgatagatatcgatgaagaaaggaacccgatactcgcaaactaatgcgatgctgtctccattgcctttatagtatatcatcattgtatgtaaaggagagtaacattacgttcttcttccttctatttgacattctttttcctacactatactttcacatatatacatattcttttctt

SEQ ID NO: 40946 - protein, 362 aa, Arabidopsis thaliana
  peptide (1)..(362): Ceres Seq. ID no. 12327891
MAVAISGSSLISSTLQHYNNRIYIRDYPIPCHSSNPICNSFNFKRRSFSPSSPKFNDHVVNPSSSYLSSKLSPIRTHSSFAACGCSWIQDNSMVHDYATTTNGTSKRCSALPTTNTVDVSSVSDLFEFICSGPLVNKIGITPQRVGQSIDKWLLYGSQLCRLFQLNELKLTIPQKARLYHYYIPVFICCEDQIALHNSKFKDGDDVPRYNKSAYSGRGDRADSSTWPEVEGPLSVILFEGWMLGFKPLPADVVKAVDPQLEVVNKNLEAYYDAWDKYIDAWVVIKIQDPSYVYRWRLQAEIAMRQDGQAGMSDEEVNDFVSRYLPAYKAYLPTLYAEGPSGSDPDRVLAIDIDEERNPILAN

SEQ ID NO: 40947 - protein, 270 aa, Arabidopsis thaliana
  peptide (1)..(270): Ceres Seq. ID no. 12327892
MVHDYATTTNGTSKRCSALPTTNTVDVSSVSDLFEFICSGPLVNKIGITPQRVGQSIDKWLLYGSQLCRLFQLNELKLTIPQKARLYHYYIPVFICCEDQIALHNSKFKDGDDVPRYNKSAYSGRGDRADSSTWPEVEGPLSVILFEGWMLGFKPLPADVVKAVDPQLEVVNKNLEAYYDAWDKYIDAWVVIKIQDPSYVYRWRLQAEIAMRQDGQAGMSDEEVNDFVSRYLPAYKAYLPTLYAEGPSGSDPDRVLAIDIDEERNPILAN

SEQ ID NO: 40948 - DNA, 1782 bp, Arabidopsis thaliana
  misc_feature (1)..(1782): Ceres Seq. ID no. 13575086
  misc_feature (1)..(1782): Ortholog of  Ceres SEQ ID NO 14309674 as cited in SEQ ID NO 55707
  misc_feature (1)..(1782): Ortholog of  Ceres SEQ ID NO 13658728 as cited in SEQ ID NO 66270
  misc_feature (1)..(1782): Ortholog of  Ceres SEQ ID NO 12465428 as cited in SEQ ID NO 68898
atccgaaacctaacgagtaacgacgagagatgcttcttcaggcggcggtgcagaaccgcaatgttccactggcttcttccgcctcctactctcgtctccttcgctgcagatctcctgtcgtctccgtagctgctctctcgaagaagacggcagcaatcgtgtgctccatctcccaggtttatggctacggcacggtggactacgagagaaggccgattgtccagtggaatgccatctacaagaagatttcgctgatggagaagccagagcttggcgctgcttccgtcttgaatcagtgggagaaagccggccgcaagcttaccaagtgggagctctgtcgggtcgtcaaggagcttcgcaagtacaagcgtgccaaccaagctctcgaggtgtacgactggatgaacaacagaggcgaaaggtttcggttgtctgcaagtgatgctgcaatccagctcgacttaatcggcaaagtgcgtggcattccagacgccgaagagttcttcctccagctccctgagaattttaaggaccggagagtttatggttccctcctcaatgcctatgtgagggccaagtcgagagaaaaggctgaagccctgctcaacaccatgagggacaaaggttacgccctgcacccgcttcccttcaacgtcatgatgactctctacatgaacctcagggagtatgacaaagtcgacgctatggtcttcgagatgaagcagaaagatatacgtctcgacatttactcctacaacatctggctctcctcttgcggctccttaggatcagttgagaaaatggaactagtgtatcagcagatgaaatcggatgtttccatttatcccaactggaccacgtttagcacaatggccacaatgtacataaagatgggtgaaactgagaaagccgaagatgcactgaggaaggttgaagcaaggattactggtcgtaatcgcattccgtatcactacctcttgagtttgtatggcagccttggtaacaagaaagagctgtaccgagtctggcacgtctacaaatctgttgtcccgagcattcccaatttgggttaccatgccttggtctcgtcgctggtgaggatgggagacattgaaggggccgagaaggtatatgaggaatggcttccagtcaagtcttcttatgaccccaggataccaaatcttctgatgaatgcgtatgtcaaaaacgaccaactagagacagctgaggggttgttcgaccacatggttgaaatgggaggaaaaccaagttcaagtacgtgggagattctagctgttggtcataccagaaagaggtgtatttcagaggctttgacttgtcttagaaatgctttttcggctgaagggtccagcaattggaggcccaaggtgttgatgctgtctggtttcttcaagctctgtgaagaggaatcggatgttaccagtaaagaggccgttttggaattgttaaggcagtcgggggatcttgaagacaaatcttacctagctcttattgatgtggacgaaaacagaacagtaaacaacagtgaaatcgatgcccatgagaccgatgcgcttctaacacagctacaagatgatttgtaatctgatagtcctagatctttgctttaaaaaacgaatcttgtaaccggagtcaactgaggaaatgcgaaatatgtataatgtacacaagagactgcctagtgaaacatgaatgtaagagctgtgtccctttttgtgacagctatttggaattagtgttgcttagggaactggattagcc

SEQ ID NO: 40949 - protein, 524 aa, Arabidopsis thaliana
  peptide (1)..(524): Ceres Seq. ID no. 13575087
MLLQAAVQNRNVPLASSASYSRLLRCRSPVVSVAALSKKTAAIVCSISQVYGYGTVDYERRPIVQWNAIYKKISLMEKPELGAASVLNQWEKAGRKLTKWELCRVVKELRKYKRANQALEVYDWMNNRGERFRLSASDAAIQLDLIGKVRGIPDAEEFFLQLPENFKDRRVYGSLLNAYVRAKSREKAEALLNTMRDKGYALHPLPFNVMMTLYMNLREYDKVDAMVFEMKQKDIRLDIYSYNIWLSSCGSLGSVEKMELVYQQMKSDVSIYPNWTTFSTMATMYIKMGETEKAEDALRKVEARITGRNRIPYHYLLSLYGSLGNKKELYRVWHVYKSVVPSIPNLGYHALVSSLVRMGDIEGAEKVYEEWLPVKSSYDPRIPNLLMNAYVKNDQLETAEGLFDHMVEMGGKPSSSTWEILAVGHTRKRCISEALTCLRNAFSAEGSSNWRPKVLMLSGFFKLCEEESDVTSKEAVLELLRQSGDLEDKSYLALIDVDENRTVNNSEIDAHETDALLTQLQDDL

SEQ ID NO: 40950 - protein, 449 aa, Arabidopsis thaliana
  peptide (1)..(449): Ceres Seq. ID no. 13575088
MEKPELGAASVLNQWEKAGRKLTKWELCRVVKELRKYKRANQALEVYDWMNNRGERFRLSASDAAIQLDLIGKVRGIPDAEEFFLQLPENFKDRRVYGSLLNAYVRAKSREKAEALLNTMRDKGYALHPLPFNVMMTLYMNLREYDKVDAMVFEMKQKDIRLDIYSYNIWLSSCGSLGSVEKMELVYQQMKSDVSIYPNWTTFSTMATMYIKMGETEKAEDALRKVEARITGRNRIPYHYLLSLYGSLGNKKELYRVWHVYKSVVPSIPNLGYHALVSSLVRMGDIEGAEKVYEEWLPVKSSYDPRIPNLLMNAYVKNDQLETAEGLFDHMVEMGGKPSSSTWEILAVGHTRKRCISEALTCLRNAFSAEGSSNWRPKVLMLSGFFKLCEEESDVTSKEAVLELLRQSGDLEDKSYLALIDVDENRTVNNSEIDAHETDALLTQLQDDL

SEQ ID NO: 40951 - protein, 400 aa, Arabidopsis thaliana
  peptide (1)..(400): Ceres Seq. ID no. 13575089
MNNRGERFRLSASDAAIQLDLIGKVRGIPDAEEFFLQLPENFKDRRVYGSLLNAYVRAKSREKAEALLNTMRDKGYALHPLPFNVMMTLYMNLREYDKVDAMVFEMKQKDIRLDIYSYNIWLSSCGSLGSVEKMELVYQQMKSDVSIYPNWTTFSTMATMYIKMGETEKAEDALRKVEARITGRNRIPYHYLLSLYGSLGNKKELYRVWHVYKSVVPSIPNLGYHALVSSLVRMGDIEGAEKVYEEWLPVKSSYDPRIPNLLMNAYVKNDQLETAEGLFDHMVEMGGKPSSSTWEILAVGHTRKRCISEALTCLRNAFSAEGSSNWRPKVLMLSGFFKLCEEESDVTSKEAVLELLRQSGDLEDKSYLALIDVDENRTVNNSEIDAHETDALLTQLQDDL

SEQ ID NO: 40952 - DNA, 1414 bp, Arabidopsis thaliana
  misc_feature (1)..(1414): Ceres Seq. ID no. 12395575
  misc_feature (1)..(1414): Ortholog of  Ceres SEQ ID NO 15171275 as cited in SEQ ID NO 51428
aatccgctaaatcattcttcttcatctctctctcattcacaattcccgaaactctctcaaatcacagatccttttagggtttttccactgtttctaggttttttttattgctcaaatctgatcaatggatagttgtctctctaatcaaacggcgcttcagtttctcccgtcgcgttccaggagacagagcggcgatggaggcggtggttttgttattccggcgaagaggaagatccagtatagttcgatggttgtggttgcggcggcgggacagagtcggtgtgagcctggaagcagtctaaacgcgccgcttgagccacgatcggcgcaggggaggtttctgagaagcgtgttgctaaacaaacggcagctatttcattacgccgccgctgatgagctaaagcaactggctgatgatagggaagctgctttagctcgtatgtctctcagctctggttccgatgaggcttctctccacagaaggatagctgaactcaaggaacgctactgtaaaactgcagtccaagacataatgtacatgttaatcttttacaaatactccgagataagagtccctcttgttccaaagctatccagatgcatctataatggaagactcgagatctggccttcaaaagactgggagttagagtcaatttacagctgcgatacccttgagatcatcaaagaacacgttagcgcagtcatcggattacgggtcaactcatgtgtgactgacaattgggcaacaacgcagatacagaaactgcatctcaggaaagtatatgctgcctcgatcttgtacggttacttcttgaaatcagcttccctaaggcaccagcttgagtgttccttatcagatattcatggaagcggatatctgaaaagtcccatctttggatgctcattcacaacgggcactgcacagatctccaacaagcagcagctgagacattacatctcagactttgatcccgagacattgcagagatgcgcaaaaccaaggacagaggaggcaaggaatctgatagagaagcaaagtttggctctttttggcacggaagagagtgatgagaccatagtgacatcgttttcgagtctgaagcggttggttctcgaggctgtggcgtttgggacattcctgtgggacacggaattgtatgtagatggtgcatataagctgaaggagaatgggaatgcagaagaacaagaaggaaagaaaagcatatgatgaacaagtctggttagaagaaaagcttcatgatcttctggtagtgtatatatagagaaatgtttctgccgaatctctcaggcagttgttcagttcaatgtatagatcttgcttagaaatattttgatttctgaataagaatgtggtgtggttataaggaataagagatactgtagttgggtt

SEQ ID NO: 40953 - protein, 368 aa, Arabidopsis thaliana; identical to SEQ ID NO: 23835
  peptide (1)..(368): Ceres Seq. ID no. 12395576

SEQ ID NO: 40954 - protein, 327 aa, Arabidopsis thaliana; identical to SEQ ID NO: 23836
  peptide (1)..(327): Ceres Seq. ID no. 12395577

SEQ ID NO: 40955 - protein, 263 aa, Arabidopsis thaliana; identical to SEQ ID NO: 23837
  peptide (1)..(263): Ceres Seq. ID no. 12395578

SEQ ID NO: 40956 - DNA, 1140 bp, Arabidopsis thaliana
  misc_feature (1)..(1140): Ceres Seq. ID no. 12481838
  misc_feature (1)..(1140): Ortholog of  Ceres SEQ ID NO 15170406 as cited in SEQ ID NO 53721
aaagaaaaaaattatcagactttcagaagaagaaaaaacgaaggagaagaagaacaatttcgcggattcaagagacagagagcttcttctgcgtaaagtttgatcctttgaaaatgacggaagaaccagagaaggtgtcttcttcagtattacatcaaccttctggtgataagaaacctgaagatgttgggatcaaacctcaggatccagcgtcttcttctgggtttcgagcttatcctaatggtgattctccaatgtacccggttttttatccgggtcttgttcccggatccaatcctgtacagtacgaggaacaaatgaaccgtggagctgggatctatgcggttcctgttcatcaatttggaggacatgtcgctggtcttccctcaaattatcttatccctctcacttacaatgttccaacgactagaccaaataatgaagctgagactgggggagagaatcaagcgcaagctgggcagggtcagcagcagcagctacctgcaaatcaaaggcatgttgtggaaaggagatttcagatcgcgtttcagcttgatttgtttctcatactcaagcttgctgctgttatctttttgttcaaccaagatggatcaagacaaaggcttgctgttcttgtgattttcgctaccataatttacttataccaaactggagctcttgcaccgtttgtgcgatggctctcacaaggtatgcatagagcagcagtaccacctgctcgaccacatagacctgctgttagagctgataatgatcccgcagctgcagttccactaaacgaaaatgctgttctcgagggagaagagaatgaagctgataacggtaaccgagcaagagcaaatgcaaatgaaaatgaaaacgttgacgcaggaaaccaagggaatcaatggtgggggatagtgaaagagattcagatgatagtgttcggcttcataacttcattactccctggttttcacaacatagagtagaagtagactcttttctgcatactttcatcttctgcaactcaaaaaaagtgttgtgttctacttttagtctccttcgatctaatgtgtaagtacagaaaattttacccttcagactccaaaacttaatgtatgtgagccgcaatttttatgc

SEQ ID NO: 40957 - protein, 328 aa, Arabidopsis thaliana
  peptide (1)..(328): Ceres Seq. ID no. 12481839
RKKLSDFQKKKKRRRRRTISRIQETESFFCVKFDPLKMTEEPEKVSSSVLHQPSGDKKPEDVGIKPQDPASSSGFRAYPNGDSPMYPVFYPGLVPGSNPVQYEEQMNRGAGIYAVPVHQFGGHVAGLPSNYLIPLTYNVPTTRPNNEAETGGENQAQAGQGQQQQLPANQRHVVERRFQIAFQLDLFLILKLAAVIFLFNQDGSRQRLAVLVIFATIIYLYQTGALAPFVRWLSQGMHRAAVPPARPHRPAVRADNDPAAAVPLNENAVLEGEENEADNGNRARANANENENVDAGNQGNQWWGIVKEIQMIVFGFITSLLPGFHNIE

SEQ ID NO: 40958 - protein, 291 aa, Arabidopsis thaliana
  peptide (1)..(291): Ceres Seq. ID no. 12481840
MTEEPEKVSSSVLHQPSGDKKPEDVGIKPQDPASSSGFRAYPNGDSPMYPVFYPGLVPGSNPVQYEEQMNRGAGIYAVPVHQFGGHVAGLPSNYLIPLTYNVPTTRPNNEAETGGENQAQAGQGQQQQLPANQRHVVERRFQIAFQLDLFLILKLAAVIFLFNQDGSRQRLAVLVIFATIIYLYQTGALAPFVRWLSQGMHRAAVPPARPHRPAVRADNDPAAAVPLNENAVLEGEENEADNGNRARANANENENVDAGNQGNQWWGIVKEIQMIVFGFITSLLPGFHNIE

SEQ ID NO: 40959 - protein, 244 aa, Arabidopsis thaliana
  peptide (1)..(244): Ceres Seq. ID no. 12481841
MYPVFYPGLVPGSNPVQYEEQMNRGAGIYAVPVHQFGGHVAGLPSNYLIPLTYNVPTTRPNNEAETGGENQAQAGQGQQQQLPANQRHVVERRFQIAFQLDLFLILKLAAVIFLFNQDGSRQRLAVLVIFATIIYLYQTGALAPFVRWLSQGMHRAAVPPARPHRPAVRADNDPAAAVPLNENAVLEGEENEADNGNRARANANENENVDAGNQGNQWWGIVKEIQMIVFGFITSLLPGFHNIE

SEQ ID NO: 40960 - DNA, 1239 bp, Arabidopsis thaliana
  misc_feature (1)..(1239): Ceres Seq. ID no. 13592761
  misc_feature (1)..(1239): Ortholog of  Ceres SEQ ID NO 13598714 as cited in SEQ ID NO 62656
  misc_feature (1)..(1239): Ortholog of  Ceres SEQ ID NO 13596969 as cited in SEQ ID NO 63375
  misc_feature (1)..(1239): Ortholog of  Ceres SEQ ID NO 13597519 as cited in SEQ ID NO 64759
  misc_feature (1)..(1239): Ortholog of  Ceres SEQ ID NO 13656123 as cited in SEQ ID NO 65212
  misc_feature (1)..(1239): Ortholog of  Ceres SEQ ID NO 13595926 as cited in SEQ ID NO 67778
atgcatctaaaacaaactctatctactaactcgaaacacacttgcggtcttatctaaaacacaaaccaacaaaaagaaaaaatgggcttggtccgatcatttgctttggtcatagtcttccttagttgtctcatcgccgtttatggccaaggtacgaggatcgggttctactcgactacgtgccctaatgccgagacaattgttcggaccactgtggcatctcactttggttcagatccaaaggttgcacccgggttactgagaatgcacaaccatgattgctttgtccaaggttgtgatggttcggtgcttttatcgggacctaactctgaaagaaccgctggcgcaaacgttaacctccatggttttgaggtcattgacgatgccaagaggcagctcgaggcagcatgtcctggtgttgtctcttgtgctgatatcttggccttagcggctcgtgattcggtttctctcacaaacggacaaagttggcaagttccaacaggacgtagagatggaagagtttccttggcatcgaacgttaacaatcttccttctccaagtgactctctagccattcaacaaaggaaattctccgcttttcgcctcaacactcgcgatctcgtcactcttgttggaggaggacacacgatcggaacagctgcatgtgggtttatcacgaacaggatattcaactcgagcggaaacacagcagatccaacaatggaccaaacatttgtaccacaacttcaaagactttgtccccaaaacggcgacggatcagcacgtgttgatcttgacaccggaagtggaaacacttttgacacatcttatttcatcaatctcagccgtaacagaggaattcttcaatccgatcacgttctttggactagtccggccacaagatccatagtgcaagagtttatggcacctagaggcaacttcaatgtccagttcgcaaggtcaatggttaaaatgagtaatattggtgtgaagacggggacaaatggagaaattcgtagggtttgctctgcggttaattaatcagtgattaagtttttatggctaaaaaaaagtgtttatggctaactcttgttcaagggcattttttttatagtttgatttaaatttaaacccaatagaatagaaaggatatgagagaaacccaaaagtgggttgctgataaatgtatttcatttctttcggtttgacttggtggaataaataaagttcaatttcgtt

SEQ ID NO: 40961 - protein, 319 aa, Arabidopsis thaliana
  peptide (1)..(319): Ceres Seq. ID no. 13592762
MGLVRSFALVIVFLSCLIAVYGQGTRIGFYSTTCPNAETIVRTTVASHFGSDPKVAPGLLRMHNHDCFVQGCDGSVLLSGPNSERTAGANVNLHGFEVIDDAKRQLEAACPGVVSCADILALAARDSVSLTNGQSWQVPTGRRDGRVSLASNVNNLPSPSDSLAIQQRKFSAFRLNTRDLVTLVGGGHTIGTAACGFITNRIFNSSGNTADPTMDQTFVPQLQRLCPQNGDGSARVDLDTGSGNTFDTSYFINLSRNRGILQSDHVLWTSPATRSIVQEFMAPRGNFNVQFARSMVKMSNIGVKTGTNGEIRRVCSAVN

SEQ ID NO: 40962 - protein, 258 aa, Arabidopsis thaliana
  peptide (1)..(258): Ceres Seq. ID no. 13592763
MHNHDCFVQGCDGSVLLSGPNSERTAGANVNLHGFEVIDDAKRQLEAACPGVVSCADILALAARDSVSLTNGQSWQVPTGRRDGRVSLASNVNNLPSPSDSLAIQQRKFSAFRLNTRDLVTLVGGGHTIGTAACGFITNRIFNSSGNTADPTMDQTFVPQLQRLCPQNGDGSARVDLDTGSGNTFDTSYFINLSRNRGILQSDHVLWTSPATRSIVQEFMAPRGNFNVQFARSMVKMSNIGVKTGTNGEIRRVCSAVN

SEQ ID NO: 40963 - DNA, 2156 bp, Arabidopsis thaliana
  misc_feature (1)..(2156): Ceres Seq. ID no. 13497092
  misc_feature (1)..(2156): Ortholog of  Ceres SEQ ID NO 14310784 as cited in SEQ ID NO 58503
ggacctcgagggaatctactgtagctctcacactatccactcttcatcggcagctagatttccgggtcctcagtatcgggtcagatctagatccggatccggagacgctgagaatgaaacacttcagaactgagcgagtccgtgcgactccgaagctcttcacctacgttctcgtcggtttcatcgctctactcggcttgacttgcctctactacggctcttcgttcgctcccggatccagaaagtccgatgagttcgatggatctaataaccgcgttcgcaccggaatcggatccttgaggaatcgagatattgtgcttgcagtgagccgtttcgaagttcctaaaagtgttccgatatgtgattcgagacactcggagttgataccgtgtttggatcggaaccttcattaccagttgaaattgaaactcaatttatcgttaatggagcactatgagcatcattgtcctccatcagaacggcgtttcaattgccttgttccgcctcctgttggttataagatcccgttaaggtggcctgtgagtagagacgaggtgtggaaggcgaatatcccgcacacacaccttgctcaagagaagtctgatcagaattggatggttgttaatggtgataagatcaattttcctggtggaggaacacatttccacaacggagctgacaaatacattgtttccctggctcagatgctgaaattccctggtgacaaactcaacaatgggggaagcattcggaatgttcttgacgttggttgtggggtagctagcttcggagcctatcttctttcacatgacatcatagccatgtctcttgcccctaatgatgtccaccagaaccagatccagtttgctctagaacgagggattccatcaacacttggtgttcttgggacaaagcggcttccatacccaagcagatcatttgaacttgctcactgctctagatgtcggatagattggcttcaaagagatgggatcttgttactggaacttgataggttgctcagacctggtggctactttgtatactcgtcgcctgaagcttatgcacacgacccagagaacagaaagattgggaatgcaatgcatgatctctttaagagaatgtgttggaaggtcgtggccaaacgagaccaatctgttatatggggaaaaccgatatccaacagctgttacttgaagagggatccgggtgtcctgcctccgctttgtccttctggagatgacccagatgcaacttggaatgtctcaatgaaggcttgcatatcaccttactcagtgaggatgcacaaagaaagatggagtggactcgttccctggccacggaggctgacagctcctccaccacgtcttgaagaaattggtgtcactcctgagcaattccgtgaagatacggaaacatggcggcttagagtgatagaatactggaaactgctgaaaccaatggtgcaaaagaactccataagaaacgtgatggacatgagctcaaaccttggcggtttcgcagctgctctaaacgataaagatgtatgggtaatgaatgtcatgcccgttcaatcctctccaagaatgaagatcatttacgaccgtggccttatcggagccactcatgattggtgtgaagcctttgacacatacccacgaacgtttgatcttatccacgcatggaacaccttcacagaaacccaagcacgtggatgcagctttgaagatctgcttatcgagatggatcggatactacgcccagaaggatttgtcataattcgtgacacaactgacaatattagctatatcaagaagtatctgacattattgaaatgggataaatggtccacagagacaactccaaaaggtgatcctctgtcgaccaaagacgagatagttttgatcgccagaaagaaactttggagcttgcccgccatttcagtgtcctgaaatctaacagtcaacaggcgaatgaatgagatttacagcatcagaggcgcgtagctgaggaaaatactcagcaatggagaagtgtaaattacacgacattcatacatagttgttaacttgttatgcatttgttgtaggaaactgcaaaatcttcttattttgcgattttcatgttcctctttataattaaaatctgcttttgtg

SEQ ID NO: 40964 - protein, 649 aa, Arabidopsis thaliana
  peptide (1)..(649): Ceres Seq. ID no. 13497093
TSRESTVALTLSTLHRQLDFRVLSIGSDLDPDPETLRMKHFRTERVRATPKLFTYVLVGFIALLGLTCLYYGSSFAPGSRKSDEFDGSNNRVRTGIGSLRNRDIVLAVSRFEVPKSVPICDSRHSELIPCLDRNLHYQLKLKLNLSLMEHYEHHCPPSERRFNCLVPPPVGYKIPLRWPVSRDEVWKANIPHTHLAQEKSDQNWMVVNGDKINFPGGGTHFHNGADKYIVSLAQMLKFPGDKLNNGGSIRNVLDVGCGVASFGAYLLSHDIIAMSLAPNDVHQNQIQFALERGIPSTLGVLGTKRLPYPSRSFELAHCSRCRIDWLQRDGILLLELDRLLRPGGYFVYSSPEAYAHDPENRKIGNAMHDLFKRMCWKVVAKRDQSVIWGKPISNSCYLKRDPGVLPPLCPSGDDPDATWNVSMKACISPYSVRMHKERWSGLVPWPRRLTAPPPRLEEIGVTPEQFREDTETWRLRVIEYWKLLKPMVQKNSIRNVMDMSSNLGGFAAALNDKDVWVMNVMPVQSSPRMKIIYDRGLIGATHDWCEAFDTYPRTFDLIHAWNTFTETQARGCSFEDLLIEMDRILRPEGFVIIRDTTDNISYIKKYLTLLKWDKWSTETTPKGDPLSTKDEIVLIARKKLWSLPAISVS

SEQ ID NO: 40965 - protein, 612 aa, Arabidopsis thaliana
  peptide (1)..(612): Ceres Seq. ID no. 13497094
MKHFRTERVRATPKLFTYVLVGFIALLGLTCLYYGSSFAPGSRKSDEFDGSNNRVRTGIGSLRNRDIVLAVSRFEVPKSVPICDSRHSELIPCLDRNLHYQLKLKLNLSLMEHYEHHCPPSERRFNCLVPPPVGYKIPLRWPVSRDEVWKANIPHTHLAQEKSDQNWMVVNGDKINFPGGGTHFHNGADKYIVSLAQMLKFPGDKLNNGGSIRNVLDVGCGVASFGAYLLSHDIIAMSLAPNDVHQNQIQFALERGIPSTLGVLGTKRLPYPSRSFELAHCSRCRIDWLQRDGILLLELDRLLRPGGYFVYSSPEAYAHDPENRKIGNAMHDLFKRMCWKVVAKRDQSVIWGKPISNSCYLKRDPGVLPPLCPSGDDPDATWNVSMKACISPYSVRMHKERWSGLVPWPRRLTAPPPRLEEIGVTPEQFREDTETWRLRVIEYWKLLKPMVQKNSIRNVMDMSSNLGGFAAALNDKDVWVMNVMPVQSSPRMKIIYDRGLIGATHDWCEAFDTYPRTFDLIHAWNTFTETQARGCSFEDLLIEMDRILRPEGFVIIRDTTDNISYIKKYLTLLKWDKWSTETTPKGDPLSTKDEIVLIARKKLWSLPAISVS

SEQ ID NO: 40966 - protein, 502 aa, Arabidopsis thaliana
  peptide (1)..(502): Ceres Seq. ID no. 13497095
MEHYEHHCPPSERRFNCLVPPPVGYKIPLRWPVSRDEVWKANIPHTHLAQEKSDQNWMVVNGDKINFPGGGTHFHNGADKYIVSLAQMLKFPGDKLNNGGSIRNVLDVGCGVASFGAYLLSHDIIAMSLAPNDVHQNQIQFALERGIPSTLGVLGTKRLPYPSRSFELAHCSRCRIDWLQRDGILLLELDRLLRPGGYFVYSSPEAYAHDPENRKIGNAMHDLFKRMCWKVVAKRDQSVIWGKPISNSCYLKRDPGVLPPLCPSGDDPDATWNVSMKACISPYSVRMHKERWSGLVPWPRRLTAPPPRLEEIGVTPEQFREDTETWRLRVIEYWKLLKPMVQKNSIRNVMDMSSNLGGFAAALNDKDVWVMNVMPVQSSPRMKIIYDRGLIGATHDWCEAFDTYPRTFDLIHAWNTFTETQARGCSFEDLLIEMDRILRPEGFVIIRDTTDNISYIKKYLTLLKWDKWSTETTPKGDPLSTKDEIVLIARKKLWSLPAISVS

SEQ ID NO: 40967 - DNA, 1503 bp, Arabidopsis thaliana; identical to SEQ ID NO: 35171
  misc_feature (1)..(1503): Ceres Seq. ID no. 12335175
  misc_feature (1)..(1503): Ortholog of  Ceres SEQ ID NO 15177291 as cited in SEQ ID NO 52286
  misc_feature (1)..(1503): Ortholog of  Ceres SEQ ID NO 13595164 as cited in SEQ ID NO 56222
  misc_feature (1)..(1503): Ortholog of  Ceres SEQ ID NO 14315021 as cited in SEQ ID NO 57018
  misc_feature (1)..(1503): Ortholog of  Ceres SEQ ID NO 15177783 as cited in SEQ ID NO 58894
  misc_feature (1)..(1503): Ortholog of  Ceres SEQ ID NO 13591068 as cited in SEQ ID NO 69043
  misc_feature (1)..(1503): Ortholog of  Ceres SEQ ID NO 13623041 as cited in SEQ ID NO 0

SEQ ID NO: 40968 - protein, 392 aa, Arabidopsis thaliana; identical to SEQ ID NO: 35172
  peptide (1)..(392): Ceres Seq. ID no. 12335176

SEQ ID NO: 40969 - protein, 305 aa, Arabidopsis thaliana; identical to SEQ ID NO: 35173
  peptide (1)..(305): Ceres Seq. ID no. 12335177

SEQ ID NO: 40970 - protein, 284 aa, Arabidopsis thaliana; identical to SEQ ID NO: 35174
  peptide (1)..(284): Ceres Seq. ID no. 12335178

SEQ ID NO: 40971 - DNA, 1303 bp, Arabidopsis thaliana
  misc_feature (1)..(1303): Ceres Seq. ID no. 13489181
  misc_feature (1)..(1303): Ortholog of  Ceres SEQ ID NO 13532807 as cited in SEQ ID NO 53012
  misc_feature (1)..(1303): Ortholog of  Ceres SEQ ID NO 15170532 as cited in SEQ ID NO 55671
  misc_feature (1)..(1303): Ortholog of  Ceres SEQ ID NO 13663060 as cited in SEQ ID NO 60964
  misc_feature (1)..(1303): Ortholog of  Ceres SEQ ID NO 13598532 as cited in SEQ ID NO 65204
  misc_feature (1)..(1303): Ortholog of  Ceres SEQ ID NO 13656849 as cited in SEQ ID NO 65764
  misc_feature (1)..(1303): Ortholog of  Ceres SEQ ID NO 13656501 as cited in SEQ ID NO 69206
ctcgtacttcctcgaagtgtaccggagaatctaaacccaatgtcgaaatccggcgataatcaaccagttgatagatacctccgccgtcaaatcctcggagaaggaacatacggtgtcgtttacaaagccaccgacacaaagactgggaaaactgtagcagtgaagaagataagattaggaaaccaaaaggaaggagtaaatttcacagctttaagagaaatcaagctactaaaagagctgaatcatccacatatcgttgaactcattgatgctttccctcacgatggaagtttgcatctagtttttgagtatatgcaaacagatttagaagcagtgattcgtgatcgtaatatctttttatctcctggtgatattaagtcttatatgttgatgactttgaagggtttagcttattgtcataagaaatgggttcttcacagggatatgaagccgaataatttgttgattggagagaatggtttgttgaagttggctgattttggtttggcgaggttgtttgggagtccgaatcggaggtttactcatcaggtatttgctacatggtacagagcgcctgagttactgtttgggagtcgacagtatggagcaggagttgatgtttgggctgcaggctgtatttttgctgagttactacttcgtagaccatttcttccgggttctactgagattgatcaacttggaaagatctttcaagcgtttggtactccagtaccttcccaatggtctgacatgatctatctcccagactacatggaattctcctatacacccgctccaccattacgtaccattttccctatggcaagtgatgacgctttggatcttctagcaaaaatgttcatctacgacccacgtcaaaggatcacaatacaacaagctttagaccacaggtatttctcgtcttctccatcaccaactgagccagggaagcttcagattccagcttccaaaggagacgcactcgaaccaaaggcctccgagcaaaaccaacatggaaatagcccagcggtactgtctcctcctggtaaaatgaggagagtgatgggtcctgaaggattcacttgagaagatgatgtttcatttcttttggaaaatatcaatggatatgcccagaagatttcaaaattagatttttaccattgataattcaatattagttaactatcaaagagaaaaaatttaaagccataaatgtccttcttagttcttactttgtttaatttaccaaatatgtcatgtatcaactattgttataatttcactatatatcaactatcttacc

SEQ ID NO: 40972 - protein, 361 aa, Arabidopsis thaliana
  peptide (1)..(361): Ceres Seq. ID no. 13489182
LVLPRSVPENLNPMSKSGDNQPVDRYLRRQILGEGTYGVVYKATDTKTGKTVAVKKIRLGNQKEGVNFTALREIKLLKELNHPHIVELIDAFPHDGSLHLVFEYMQTDLEAVIRDRNIFLSPGDIKSYMLMTLKGLAYCHKKWVLHRDMKPNNLLIGENGLLKLADFGLARLFGSPNRRFTHQVFATWYRAPELLFGSRQYGAGVDVWAAGCIFAELLLRRPFLPGSTEIDQLGKIFQAFGTPVPSQWSDMIYLPDYMEFSYTPAPPLRTIFPMASDDALDLLAKMFIYDPRQRITIQQALDHRYFSSSPSPTEPGKLQIPASKGDALEPKASEQNQHGNSPAVLSPPGKMRRVMGPEGFT

SEQ ID NO: 40973 - protein, 348 aa, Arabidopsis thaliana
  peptide (1)..(348): Ceres Seq. ID no. 13489183
MSKSGDNQPVDRYLRRQILGEGTYGVVYKATDTKTGKTVAVKKIRLGNQKEGVNFTALREIKLLKELNHPHIVELIDAFPHDGSLHLVFEYMQTDLEAVIRDRNIFLSPGDIKSYMLMTLKGLAYCHKKWVLHRDMKPNNLLIGENGLLKLADFGLARLFGSPNRRFTHQVFATWYRAPELLFGSRQYGAGVDVWAAGCIFAELLLRRPFLPGSTEIDQLGKIFQAFGTPVPSQWSDMIYLPDYMEFSYTPAPPLRTIFPMASDDALDLLAKMFIYDPRQRITIQQALDHRYFSSSPSPTEPGKLQIPASKGDALEPKASEQNQHGNSPAVLSPPGKMRRVMGPEGFT

SEQ ID NO: 40974 - protein, 257 aa, Arabidopsis thaliana
  peptide (1)..(257): Ceres Seq. ID no. 13489184
MQTDLEAVIRDRNIFLSPGDIKSYMLMTLKGLAYCHKKWVLHRDMKPNNLLIGENGLLKLADFGLARLFGSPNRRFTHQVFATWYRAPELLFGSRQYGAGVDVWAAGCIFAELLLRRPFLPGSTEIDQLGKIFQAFGTPVPSQWSDMIYLPDYMEFSYTPAPPLRTIFPMASDDALDLLAKMFIYDPRQRITIQQALDHRYFSSSPSPTEPGKLQIPASKGDALEPKASEQNQHGNSPAVLSPPGKMRRVMGPEGFT

SEQ ID NO: 40975 - DNA, 1353 bp, Arabidopsis thaliana; identical to SEQ ID NO: 40492
  misc_feature (1)..(1353): Ceres Seq. ID no. 13494668
  misc_feature (1)..(1353): Ortholog of  Ceres SEQ ID NO 13582619 as cited in SEQ ID NO 56520
  misc_feature (1)..(1353): Ortholog of  Ceres SEQ ID NO 14314632 as cited in SEQ ID NO 59923
  misc_feature (1)..(1353): Ortholog of  Ceres SEQ ID NO 13660872 as cited in SEQ ID NO 60830
  misc_feature (1)..(1353): Ortholog of  Ceres SEQ ID NO 12616221 as cited in SEQ ID NO 63291

SEQ ID NO: 40976 - protein, 336 aa, Arabidopsis thaliana; identical to SEQ ID NO: 29064
  peptide (1)..(336): Ceres Seq. ID no. 13494669

SEQ ID NO: 40977 - protein, 323 aa, Arabidopsis thaliana; identical to SEQ ID NO: 29065
  peptide (1)..(323): Ceres Seq. ID no. 13494670

SEQ ID NO: 40978 - protein, 273 aa, Arabidopsis thaliana; identical to SEQ ID NO: 40495
  peptide (1)..(273): Ceres Seq. ID no. 13494671

SEQ ID NO: 40979 - DNA, 1464 bp, Arabidopsis thaliana
  misc_feature (1)..(1464): Ceres Seq. ID no. 12328322
  misc_feature (1)..(1464): Ortholog of  Ceres SEQ ID NO 14316328 as cited in SEQ ID NO 57856
accttcttctatctaaaggaagtctttactcagagaaccaaaagaaaaataaagagaaaagaacccaaaaaaaaaaagccattgtaaattcagaataaatggaagaacatctaaatccattagcagtgactcatcttcttcaacacacactaagaagcttatgcatccatgagaactctcaatgggtttatgctgttttctggaggatcttgcctagaaactatcctcctcccaaatgggatggtcaaggagcttatgatagatcaagagggaacaggagaaactggatcttggtttgggaagatggtttttgcaactttgcagcttctgccgcggaaatgagctccggagaaggtagtggtggcggtggtggctcagcggcttatggaaatagtgattttcaacaataccaagggcttcagcctgaattgttcttcaagatgtctcatgaaatctacaattatggagaagggttgataggaaaagtagctgcagatcacagtcacaagtggatttataaagaacctaatgaccaagagattaacttcttatctgcttggcataattccgctgactcataccctaggacatgggaagctcagtttcagtctggtatcaaaaccattgccttgatttctgttcgagaaggtgttgtccagttaggagctgttcacaaggtgatagaggatttaagctatgttgtgatgctaagaaaaaagctgagctatatagagagcatccctggagtacttcttcctcacccttcttcttctggttaccctttcatcaacgcttctccttctgacacgtggcatttcccgggagtcgctcctccgcatcagcagcctgagcaccagttttatcattctgaccacaaccaccgctttttgataggccaccacaaccagccacaagctgtaggaggggctgcaccgcctctaccgctttcgatgaagataacaccgtcaatgagcagcctcgaggcgcttctctcgaagctcccgtcggttgtacctccggcgacacaaccagggtactacccgtttcaccacagtgctaaagaggaaatgagtcaagaagaacaaaacgatgcgtttagggttgaacgtaatgatttggtgggtgagggtagtaataatcataatcataataataattacaatagtaataatgatatttataactatagcaataattgcagcaacaataattacgatagagagaataagatcggtgggtttcttagtgaggattattgatgagtctagtaaaatatctctcttttttttgtcgtacaataagtataaattgtactaagaattttcgtagtctgacatttgtaattcttagattttatttttctactggttggcaaatttaatataaatgattttattttaatatttgcattgtagcagtgtatatgtcttgtttctgacatagtgacatagtagtacgttgttt

SEQ ID NO: 40980 - protein, 386 aa, Arabidopsis thaliana
  peptide (1)..(386): Ceres Seq. ID no. 12328323
MEEHLNPLAVTHLLQHTLRSLCIHENSQWVYAVFWRILPRNYPPPKWDGQGAYDRSRGNRRNWILVWEDGFCNFAASAAEMSSGEGSGGGGGSAAYGNSDFQQYQGLQPELFFKMSHEIYNYGEGLIGKVAADHSHKWIYKEPNDQEINFLSAWHNSADSYPRTWEAQFQSGIKTIALISVREGVVQLGAVHKVIEDLSYVVMLRKKLSYIESIPGVLLPHPSSSGYPFINASPSDTWHFPGVAPPHQQPEHQFYHSDHNHRFLIGHHNQPQAVGGAAPPLPLSMKITPSMSSLEALLSKLPSVVPPATQPGYYPFHHSAKEEMSQEEQNDAFRVERNDLVGEGSNNHNHNNNYNSNNDIYNYSNNCSNNNYDRENKIGGFLSEDY

SEQ ID NO: 40981 - protein, 306 aa, Arabidopsis thaliana
  peptide (1)..(306): Ceres Seq. ID no. 12328324
MSSGEGSGGGGGSAAYGNSDFQQYQGLQPELFFKMSHEIYNYGEGLIGKVAADHSHKWIYKEPNDQEINFLSAWHNSADSYPRTWEAQFQSGIKTIALISVREGVVQLGAVHKVIEDLSYVVMLRKKLSYIESIPGVLLPHPSSSGYPFINASPSDTWHFPGVAPPHQQPEHQFYHSDHNHRFLIGHHNQPQAVGGAAPPLPLSMKITPSMSSLEALLSKLPSVVPPATQPGYYPFHHSAKEEMSQEEQNDAFRVERNDLVGEGSNNHNHNNNYNSNNDIYNYSNNCSNNNYDRENKIGGFLSEDY

SEQ ID NO: 40982 - protein, 272 aa, Arabidopsis thaliana
  peptide (1)..(272): Ceres Seq. ID no. 12328325
MSHEIYNYGEGLIGKVAADHSHKWIYKEPNDQEINFLSAWHNSADSYPRTWEAQFQSGIKTIALISVREGVVQLGAVHKVIEDLSYVVMLRKKLSYIESIPGVLLPHPSSSGYPFINASPSDTWHFPGVAPPHQQPEHQFYHSDHNHRFLIGHHNQPQAVGGAAPPLPLSMKITPSMSSLEALLSKLPSVVPPATQPGYYPFHHSAKEEMSQEEQNDAFRVERNDLVGEGSNNHNHNNNYNSNNDIYNYSNNCSNNNYDRENKIGGFLSEDY

SEQ ID NO: 40983 - DNA, 1512 bp, Arabidopsis thaliana
  misc_feature (1)..(1512): Ceres Seq. ID no. 13575090
  misc_feature (1)..(1512): Ortholog of  Ceres SEQ ID NO 15177969 as cited in SEQ ID NO 58823
aaccacacttttgttaacaaacctcattaatccaacaaaagtttcaacattccccaagaagaaaagacagcaactttaatcaaagcttctcgagtttgttgagtatcaaaaagcaaaacaagaatcatgaagaagaaaggcaccaacaacaacaactttagccttctgtctttgtctctgttcctgaattgtttgattctaacaaacggatacagcattggagtcggagttggaatcggcggtggagacggtgacgacggcggagtttggataggtggaggaaaccctaattccaatcctggctcagctccaaaccaacaacagacaacaaatgcagcttacaatgctcttcaatcttggaaatccgccattacagaggatccatctggtgttcttaaaacatgggttggtgaagatgtttgttcttacagaggcgtgttctgttctggctcatctataacctccatagatctaaacaaagcaaatctcaaaggcaccattgttaaagacctctctttactctcagacctaaccattcttcatctcaacagtaacagattctctggtcaaatcccagattctttcaagaatcttgattctcttcaagaactcgatctcagcaacaacagattctccggttctttccctcaagtcacactctacatcccaaatctggtttacctcgatctccggttcaacaatttcactggctctataccggaaaatctcttcaacaaacaattagacgcgattctcctcaacaacaatcaattcaccggagaaatccctgggaatctcggttactctacagcttcggtgattaatctcgctaacaacaaattatccggcgaaatcccgacgagtttcggtatcaccggttcgaaattgaaagaggttttgttcttgaataaccagttaaccggttgtataccggaatcagttggtttattctccgacattgaagtgtttgatgttagtttcaattcattgatgggtcatgtccctgacacgatctcttgcttatcggagattgaagttttgaatctcggacacaacaaattctccggtgatcttcctgatttggtctgtactttgaggaatctgataaatctgacggtttctttcaacttcttctctgggtttagctctcagtgctcgagccttagcgttgggtttgatttcaccggaaattgtattcccggtaagggttatcaacggcctcagccggattgttcggcgattcctggtggccaattgagctgttttagaattccggcgcagccgttaacgtgtgctgcgattagcttggggttgaaggtggcttcatctccatgaaaacataaaaagttcgaagcttttgtattggttatgcaattgtgacttgatagaagaaaatggtttttatcagttacattattaatcaaaatgatttatattagtagataaaacttatttctgattttgaaacctttgtaatctgatctttctaaaaaaaaagaaaagttgggatct

SEQ ID NO: 40984 - protein, 402 aa, Arabidopsis thaliana
  peptide (1)..(402): Ceres Seq. ID no. 13575091
MKKKGTNNNNFSLLSLSLFLNCLILTNGYSIGVGVGIGGGDGDDGGVWIGGGNPNSNPGSAPNQQQTTNAAYNALQSWKSAITEDPSGVLKTWVGEDVCSYRGVFCSGSSITSIDLNKANLKGTIVKDLSLLSDLTILHLNSNRFSGQIPDSFKNLDSLQELDLSNNRFSGSFPQVTLYIPNLVYLDLRFNNFTGSIPENLFNKQLDAILLNNNQFTGEIPGNLGYSTASVINLANNKLSGEIPTSFGITGSKLKEVLFLNNQLTGCIPESVGLFSDIEVFDVSFNSLMGHVPDTISCLSEIEVLNLGHNKFSGDLPDLVCTLRNLINLTVSFNFFSGFSSQCSSLSVGFDFTGNCIPGKGYQRPQPDCSAIPGGQLSCFRIPAQPLTCAAISLGLKVASSP

SEQ ID NO: 40985 - DNA, 1103 bp, Arabidopsis thaliana
  misc_feature (1)..(1103): Ceres Seq. ID no. 13489505
  misc_feature (1)..(1103): Ortholog of  Ceres SEQ ID NO 13596902 as cited in SEQ ID NO 62521
aaagctctgaaaagatggccggagctgtttctgccgtcgatcaaccgttgaaaatcatcaccggagctgatgactttggagcgagcctcaaggacgcgatggtaacacacctccgctctctcggcatagacgtggaggataccggagtgtcctcttactactctgctggatctgaagtcggtcgccgcgtctccgcttcatcgtcttccgaagttcgcggcttagtctgctgcggcaccggcgtcggagttgcgatgttcgccaacaagttcccgggcgtctacgcagccacttgtctctccgtcgaagacgccgtcaacgctcgatcaataagcaattgcaatgtcctcgcattctccggcatcaaaacatccccggaaaccgccttggaaatcttcgacgcttggatcaaaactcctttcaaatctccttgtcctgcgtccggatccgaaccatggagctcagttatctcttccttcctcgacaattctctctccgagatgtctcagattggaaagtcaaccgccggcgattcaacaaccaagaagatcgatgaaacaaccgcgtcttgcgtaatttgctgcttggcgaagaacagagagttcactccagtggacatcatgccgggaggctcgatgaagatcgttagagagacgccgacgtcggcgattgtaagattcaaagcgggaagtgtggaaccggcgcatcaccacacattcggccatgaccttgtagtcataaagggaaagaaaagtgtgtggaatctgagcaagaaggagagagctgatctcgttgacggcgattacctattcactcccgccggtgatgttcaccgagtcaaatatcacgaagacactgagttcttcatcacttgggatggccattgggacatattccttgacgaagacctcgaaactgcaaagaaagccatcgaagaagaagcttgaaggtgtaaactttgtgtagtactctcttcttttgaatgttgtaagttctgagagtaaactttcttaaattgatgtactttgtaagaatctttgatttcaaaagatggtgtaatattacaaatactttctcttatgaacactatataaagggtttct

SEQ ID NO: 40986 - protein, 314 aa, Arabidopsis thaliana
  peptide (1)..(314): Ceres Seq. ID no. 13489506
SSEKMAGAVSAVDQPLKIITGADDFGASLKDAMVTHLRSLGIDVEDTGVSSYYSAGSEVGRRVSASSSSEVRGLVCCGTGVGVAMFANKFPGVYAATCLSVEDAVNARSISNCNVLAFSGIKTSPETALEIFDAWIKTPFKSPCPASGSEPWSSVISSFLDNSLSEMSQIGKSTAGDSTTKKIDETTASCVICCLAKNREFTPVDIMPGGSMKIVRETPTSAIVRFKAGSVEPAHHHTFGHDLVVIKGKKSVWNLSKKERADLVDGDYLFTPAGDVHRVKYHEDTEFFITWDGHWDIFLDEDLETAKKAIEEEA

SEQ ID NO: 40987 - protein, 310 aa, Arabidopsis thaliana
  peptide (1)..(310): Ceres Seq. ID no. 13489507
MAGAVSAVDQPLKIITGADDFGASLKDAMVTHLRSLGIDVEDTGVSSYYSAGSEVGRRVSASSSSEVRGLVCCGTGVGVAMFANKFPGVYAATCLSVEDAVNARSISNCNVLAFSGIKTSPETALEIFDAWIKTPFKSPCPASGSEPWSSVISSFLDNSLSEMSQIGKSTAGDSTTKKIDETTASCVICCLAKNREFTPVDIMPGGSMKIVRETPTSAIVRFKAGSVEPAHHHTFGHDLVVIKGKKSVWNLSKKERADLVDGDYLFTPAGDVHRVKYHEDTEFFITWDGHWDIFLDEDLETAKKAIEEEA

SEQ ID NO: 40988 - protein, 282 aa, Arabidopsis thaliana
  peptide (1)..(282): Ceres Seq. ID no. 13489508
MVTHLRSLGIDVEDTGVSSYYSAGSEVGRRVSASSSSEVRGLVCCGTGVGVAMFANKFPGVYAATCLSVEDAVNARSISNCNVLAFSGIKTSPETALEIFDAWIKTPFKSPCPASGSEPWSSVISSFLDNSLSEMSQIGKSTAGDSTTKKIDETTASCVICCLAKNREFTPVDIMPGGSMKIVRETPTSAIVRFKAGSVEPAHHHTFGHDLVVIKGKKSVWNLSKKERADLVDGDYLFTPAGDVHRVKYHEDTEFFITWDGHWDIFLDEDLETAKKAIEEEA

SEQ ID NO: 40989 - DNA, 1254 bp, Arabidopsis thaliana
  misc_feature (1)..(1254): Ceres Seq. ID no. 12328326
  misc_feature (1)..(1254): Ortholog of  Ceres SEQ ID NO 15178181 as cited in SEQ ID NO 58740
  misc_feature (1)..(1254): Ortholog of  Ceres SEQ ID NO 12614739 as cited in SEQ ID NO 68587
gtttttcgatgccttacgagaaagagctcgctgctgctaagaaagccgtctctctagctgctcgtctcagccaggaagtgcagaagtctctgttgcaatcagatgtccggtcaaaatctgataaaagtccggttacagctgctgattatggatcccaagctgtgatcagtcatgtactagagagagaacttcaccctgaaccactatacttggttgctgaagagaatgcagaagatctgcacaagaatggcgccgaggaatttctagaaagcattactaagcttgtgaacaatgctctagcttctgatgattcctacgccaactcttctctttcaatggatgatgtaaggaaggcgatagaccacgggaggtcacaaggcggttccagtggccgccattggattcttgatcctgttgatggaaccagagggtttgtaaaaggagaggaatacgctgtggcattagctttgcttgtggaaggcaaagtagtgctcggtgtcatggcttgcccgaaacttgagaatcacaagtcttcttcttcaggatgccttttctttgctacagtgggagaaggagcttatgtgcaatcgcttgaaggcgactctcatcctccacaaaaggtattataattatcagagcatttgatgtcccttaggcttgttctctcgttttgtgttcttaaaacagagtggagaaagtgtgctaataggtgcaagtgagcaacattgagaatcctgaagaagcaacctttgtggaatcatcccacaaaccaatccccatccatagctccattgccaataaacttgggatcaaagctccacctctaagaatccatagtcaagtgaagtacgcagctctggctcgaggagatgcagagatatacttgcgtttcactcttaaagggtaccgagagttcatatggaaccatgctgctggtgcaatcatcacaacagaagctggaggtgtagtttgcgatgctgacgggaatcctctggacttctcgagaggaaatcatcttgaacacaaaacagggatcgtggtcagcaccaagaaccttatgccacggctcttgaaagccattagagaatccatagaagaggagatgcttctctctgagacacaactgaaactgtaatatatgtactgcctgaaatagctatctggtgtatatcacacatctgccgttgtgtactgtcagacactgaagaaattgtatgcttttgaatattggtctcgatttcaataaaagatttc

SEQ ID NO: 40990 - protein, 208 aa, Arabidopsis thaliana
  peptide (1)..(208): Ceres Seq. ID no. 12328327
FSMPYEKELAAAKKAVSLAARLSQEVQKSLLQSDVRSKSDKSPVTAADYGSQAVISHVLERELHPEPLYLVAEENAEDLHKNGAEEFLESITKLVNNALASDDSYANSSLSMDDVRKAIDHGRSQGGSSGRHWILDPVDGTRGFVKGEEYAVALALLVEGKVVLGVMACPKLENHKSSSSGCLFFATVGEGAYVQSLEGDSHPPQKVL

SEQ ID NO: 40991 - protein, 206 aa, Arabidopsis thaliana
  peptide (1)..(206): Ceres Seq. ID no. 12328328
MPYEKELAAAKKAVSLAARLSQEVQKSLLQSDVRSKSDKSPVTAADYGSQAVISHVLERELHPEPLYLVAEENAEDLHKNGAEEFLESITKLVNNALASDDSYANSSLSMDDVRKAIDHGRSQGGSSGRHWILDPVDGTRGFVKGEEYAVALALLVEGKVVLGVMACPKLENHKSSSSGCLFFATVGEGAYVQSLEGDSHPPQKVL

SEQ ID NO: 40992 - DNA, 1950 bp, Arabidopsis thaliana
  misc_feature (1)..(1950): Ceres Seq. ID no. 13488610
  misc_feature (1)..(1950): Ortholog of  Ceres SEQ ID NO 14314280 as cited in SEQ ID NO 57429
  misc_feature (1)..(1950): Ortholog of  Ceres SEQ ID NO 13595870 as cited in SEQ ID NO 62101
  misc_feature (1)..(1950): Ortholog of  Ceres SEQ ID NO 13590241 as cited in SEQ ID NO 63878
  misc_feature (1)..(1950): Ortholog of  Ceres SEQ ID NO 13657939 as cited in SEQ ID NO 66349
cttgctcagggtccttagcaaggcctagaggatcaaatggacctcctgggtgtagcttgtcctcgaaatccaatccgttggtgattctgtagtactcggctccaccgaggagaacaacctcagcaactacggcgagaacaaggttgatagggatgttcttgccaaagtagttcaatgtgtttccatcaagaagcaaagcaccagtcttaaaccagacagcttcagggccacagttagcgccatatttgtttaaagcttcaggaatgatgaaaccagctgctcctaacatagcccatctcgcatggatcaattcaaaagcttggtatttagcaaagttctcaggcttctttccaagaccaaatgggtcataaccataatctccagcaacttcaccgtttaagtactctgggatctctgatctatccaaaagaccatcaggcaagaaaattctcctgtcaggaccataccacttggcgagctcactagtccccccccccctcaaagatctctcaaagaatggcttccgcggctgttgcatcgatggttcttgaccctaaagcatcaccggccttgatggatctatccaccgcagacgaagaagatctctatggccgcctcaaatcgcttgaacgacaactagagttcaccgatatccaagaagaatatgtgaaagacgagcaaaagaatctcaaacgagagctgttacgagcacaagaagaggtcaaacgaattcaatccgtgcctttggtgataggtcagttcatggagatggtagatcagaacaacggcatcgtcggatctactactggctccaattactatgtcagaattctcagcacaatcaatagagaactcttaaagccttctgcttccgtcgctcttcaccgtcactccaacgcccttgttgatgttttgcctccggaggctgattctagcatctcccttctcagccaatctgagaagcctgacgtctcctacaatgatattggaggatgcgatattcagaaacaggaaattcgtgaggctgttgaattgcctcttacccaccacgagctttacaaacagattggtattgacccacctcgtggagtcttgctctatggacctcctggtactggaaagactatgttggctaaggctgttgccaatcacacaactgctgccttcattagggttgttggatccgagtttgtgcaaaagtatctcggcgagggacctcgtatggttcgtgatgtcttccgtcttgccaaggaaaatgctccagctatcatcttcattgatgaggtagatgccatcgctactgctaggtttgatgctcaaacaggagccgatagggaagttcagcgtattctcatggagcttcttaatcagatggatggatttgaccagaccgtgaatgtcaaggtcataatggcaacaaacagggcagacactctagatcctgctctcttacgtcctggaagacttgatcgtaagattgagttcccccttcctgatagacgtcaaaagaggcttgttttccaggtatgcacctccaaaatgaaccttagcgatgaggttgacttggaagactatgtttcacggcctgataaaattagcgctgctgagatagcagcaatttgccaggaagctggtatgcatgcggtgcgaaagaacagatatgtgatactacctaaggatttcgagaagggctaccgcgcaaatgttaagaagccagacacggactttgagttttacaagtgaagagaaagcagaagtggaaccagattatggctgttgttaaaattccagtgtgttttgagaattattaaggacatggaatcaaatttgcagttaaattaagaactaagttgcatctcctaatttctgtaactcgagttcacatttgtttttagtctatcagctttttacagtttaatgtataagaaaaactggggatggtgtccttag

SEQ ID NO: 40993 - protein, 408 aa, Arabidopsis thaliana
  peptide (1)..(408): Ceres Seq. ID no. 13488611
MASAAVASMVLDPKASPALMDLSTADEEDLYGRLKSLERQLEFTDIQEEYVKDEQKNLKRELLRAQEEVKRIQSVPLVIGQFMEMVDQNNGIVGSTTGSNYYVRILSTINRELLKPSASVALHRHSNALVDVLPPEADSSISLLSQSEKPDVSYNDIGGCDIQKQEIREAVELPLTHHELYKQIGIDPPRGVLLYGPPGTGKTMLAKAVANHTTAAFIRVVGSEFVQKYLGEGPRMVRDVFRLAKENAPAIIFIDEVDAIATARFDAQTGADREVQRILMELLNQMDGFDQTVNVKVIMATNRADTLDPALLRPGRLDRKIEFPLPDRRQKRLVFQVCTSKMNLSDEVDLEDYVSRPDKISAAEIAAICQEAGMHAVRKNRYVILPKDFEKGYRANVKKPDTDFEFYK

SEQ ID NO: 40994 - protein, 400 aa, Arabidopsis thaliana
  peptide (1)..(400): Ceres Seq. ID no. 13488612
MVLDPKASPALMDLSTADEEDLYGRLKSLERQLEFTDIQEEYVKDEQKNLKRELLRAQEEVKRIQSVPLVIGQFMEMVDQNNGIVGSTTGSNYYVRILSTINRELLKPSASVALHRHSNALVDVLPPEADSSISLLSQSEKPDVSYNDIGGCDIQKQEIREAVELPLTHHELYKQIGIDPPRGVLLYGPPGTGKTMLAKAVANHTTAAFIRVVGSEFVQKYLGEGPRMVRDVFRLAKENAPAIIFIDEVDAIATARFDAQTGADREVQRILMELLNQMDGFDQTVNVKVIMATNRADTLDPALLRPGRLDRKIEFPLPDRRQKRLVFQVCTSKMNLSDEVDLEDYVSRPDKISAAEIAAICQEAGMHAVRKNRYVILPKDFEKGYRANVKKPDTDFEFYK

SEQ ID NO: 40995 - protein, 389 aa, Arabidopsis thaliana
  peptide (1)..(389): Ceres Seq. ID no. 13488613
MDLSTADEEDLYGRLKSLERQLEFTDIQEEYVKDEQKNLKRELLRAQEEVKRIQSVPLVIGQFMEMVDQNNGIVGSTTGSNYYVRILSTINRELLKPSASVALHRHSNALVDVLPPEADSSISLLSQSEKPDVSYNDIGGCDIQKQEIREAVELPLTHHELYKQIGIDPPRGVLLYGPPGTGKTMLAKAVANHTTAAFIRVVGSEFVQKYLGEGPRMVRDVFRLAKENAPAIIFIDEVDAIATARFDAQTGADREVQRILMELLNQMDGFDQTVNVKVIMATNRADTLDPALLRPGRLDRKIEFPLPDRRQKRLVFQVCTSKMNLSDEVDLEDYVSRPDKISAAEIAAICQEAGMHAVRKNRYVILPKDFEKGYRANVKKPDTDFEFYK

SEQ ID NO: 40996 - DNA, 1772 bp, Arabidopsis thaliana
  misc_feature (1)..(1772): Ceres Seq. ID no. 12421835
  misc_feature (1)..(1772): Ortholog of  Ceres SEQ ID NO 14311183 as cited in SEQ ID NO 58495
  misc_feature (1)..(1772): Ortholog of  Ceres SEQ ID NO 13502874 as cited in SEQ ID NO 66298
  misc_feature (1)..(1772): Ortholog of  Ceres SEQ ID NO 12614124 as cited in SEQ ID NO 68392
actctaaacttgttcaaaactctgactaacattcttcttcacttatctcccatctttctctcttcaataataataaacatggatctcaccgacgtaatcatattcttgttcgctctctatttcatcaacctatggtggcgccggtacttttccgccggaagcagccagtgtagcttgaacattccaccgggaccaaaaggatggccactagtcggaaacctactccaagtcatattccaacgtcgccatttcgtcttcttaatgcgtgacctacgtaaaaagtatggtccaatattcaccatgcagatgggacaacgtacgatgattatcatcacggacgaaaaactcatccacgaggcactagtccaacgcggccctacattcgcttcccggcctccggactcgccgatccggctcatgtttagtgttgggaaatgcgctataaactcggcggagtacggatctttgtggaggactctgaggaggaactttgtgacagagctagtgaccgcgccgagagtgaagcagtgctcgtggataaggagttgggctatgcagaatcatatgaagaggattaaaacggagaatgttgagaaaggtttcgtggaggttatgagccaatgtaggctaacgatttgtagtatcttgatctgtctttgtttcggtgccaagatcagcgaggaaaagattaagaacattgagaatgttcttaaggacgttatgcttataacttctccgacgttacctgactttttgccggttttcactccgttgtttcggcgtcaagttagagaagctagagagctgaggaagacgcagctcgagtgtctcgtgccgttgataagaaaccgtcgtaagttcgttgatgcaaaggagaatcctaacgaagagatggttagtccgattggtgcagcttatgtggattctttgtttcgtttgaatttgatcgagagaggtggtgagcttggagatgaagagattgtgactttgtgctcggagattgtctctgccggtacggacacgagtgcaacgacgcttgaatgggcgttatttcatctagtgactgaccaaaacattcaagagaagttatatgaggaagttgttggagttgttggcaaaaacggcgtcgttgaagaggatgacgtggcgaaaatgccttatttagaagccatcgtgaaagagactctccgacgacatcctccgggacactttcttctctctcacgccgccgtgaaagacacggagctaggagggtatgatattccggcaggggcgtatgtggaaatttacactgcttgggttactgagaacccggatatttggtcggatcctggtaagtttcgacccgagaggtttttaaccggtggggacggggttgatgctgactggacggggacacgtggtgttacaatgttgccttttggtgcgggtcgtaggatctgcccggcttggtctttagggattctgcacatcaacttgatgcttgcaaggatgatccattcgtttaaatggatcccggttccggattctccacccgacccgactgagacgtacgccttcacggtcgttatgaaaaattctctcaaagcgcaaatcaggtcaaggacctaacggatatgtttagtttttgtaagcgtgtggggtaattaaaagttataattccttagtacgtcacattaatctttgctatttttaatgttgtttatgtctatctttatctattctcaaggagtgtaaaatatatataatcatatgcagtttctgttcgttcg

SEQ ID NO: 40997 - protein, 536 aa, Arabidopsis thaliana
  peptide (1)..(536): Ceres Seq. ID no. 12421836
TLNLFKTLTNILLHLSPIFLSSIIINMDLTDVIIFLFALYFINLWWRRYFSAGSSQCSLNIPPGPKGWPLVGNLLQVIFQRRHFVFLMRDLRKKYGPIFTMQMGQRTMIIITDEKLIHEALVQRGPTFASRPPDSPIRLMFSVGKCAINSAEYGSLWRTLRRNFVTELVTAPRVKQCSWIRSWAMQNHMKRIKTENVEKGFVEVMSQCRLTICSILICLCFGAKISEEKIKNIENVLKDVMLITSPTLPDFLPVFTPLFRRQVREARELRKTQLECLVPLIRNRRKFVDAKENPNEEMVSPIGAAYVDSLFRLNLIERGGELGDEEIVTLCSEIVSAGTDTSATTLEWALFHLVTDQNIQEKLYEEVVGVVGKNGVVEEDDVAKMPYLEAIVKETLRRHPPGHFLLSHAAVKDTELGGYDIPAGAYVEIYTAWVTENPDIWSDPGKFRPERFLTGGDGVDADWTGTRGVTMLPFGAGRRICPAWSLGILHINLMLARMIHSFKWIPVPDSPPDPTETYAFTVVMKNSLKAQIRSRT

SEQ ID NO: 40998 - protein, 510 aa, Arabidopsis thaliana
  peptide (1)..(510): Ceres Seq. ID no. 12421837
MDLTDVIIFLFALYFINLWWRRYFSAGSSQCSLNIPPGPKGWPLVGNLLQVIFQRRHFVFLMRDLRKKYGPIFTMQMGQRTMIIITDEKLIHEALVQRGPTFASRPPDSPIRLMFSVGKCAINSAEYGSLWRTLRRNFVTELVTAPRVKQCSWIRSWAMQNHMKRIKTENVEKGFVEVMSQCRLTICSILICLCFGAKISEEKIKNIENVLKDVMLITSPTLPDFLPVFTPLFRRQVREARELRKTQLECLVPLIRNRRKFVDAKENPNEEMVSPIGAAYVDSLFRLNLIERGGELGDEEIVTLCSEIVSAGTDTSATTLEWALFHLVTDQNIQEKLYEEVVGVVGKNGVVEEDDVAKMPYLEAIVKETLRRHPPGHFLLSHAAVKDTELGGYDIPAGAYVEIYTAWVTENPDIWSDPGKFRPERFLTGGDGVDADWTGTRGVTMLPFGAGRRICPAWSLGILHINLMLARMIHSFKWIPVPDSPPDPTETYAFTVVMKNSLKAQIRSRT

SEQ ID NO: 40999 - protein, 449 aa, Arabidopsis thaliana
  peptide (1)..(449): Ceres Seq. ID no. 12421838
MRDLRKKYGPIFTMQMGQRTMIIITDEKLIHEALVQRGPTFASRPPDSPIRLMFSVGKCAINSAEYGSLWRTLRRNFVTELVTAPRVKQCSWIRSWAMQNHMKRIKTENVEKGFVEVMSQCRLTICSILICLCFGAKISEEKIKNIENVLKDVMLITSPTLPDFLPVFTPLFRRQVREARELRKTQLECLVPLIRNRRKFVDAKENPNEEMVSPIGAAYVDSLFRLNLIERGGELGDEEIVTLCSEIVSAGTDTSATTLEWALFHLVTDQNIQEKLYEEVVGVVGKNGVVEEDDVAKMPYLEAIVKETLRRHPPGHFLLSHAAVKDTELGGYDIPAGAYVEIYTAWVTENPDIWSDPGKFRPERFLTGGDGVDADWTGTRGVTMLPFGAGRRICPAWSLGILHINLMLARMIHSFKWIPVPDSPPDPTETYAFTVVMKNSLKAQIRSRT

SEQ ID NO: 41000 - DNA, 1771 bp, Arabidopsis thaliana
  misc_feature (1)..(1771): Ceres Seq. ID no. 12331243
  misc_feature (1)..(1771): Ortholog of  Ceres SEQ ID NO 13581848 as cited in SEQ ID NO 51340
  misc_feature (1)..(1771): Ortholog of  Ceres SEQ ID NO 13595392 as cited in SEQ ID NO 56164
  misc_feature (1)..(1771): Ortholog of  Ceres SEQ ID NO 12618341 as cited in SEQ ID NO 64256
ccgtaatctcaatcacaaactatttccccccttcgttcatcaaatcctcaagagaaaaaaaaaatccccaaaagcttcctcaaaaccctaacacagatctctcgatcttctccgatctgtcttttctcctaatctggtttagtttgatttaattggattgaagatgtcagacgctttgaatatgactcttgatgaaattgtgaagaagagtaagagtgaaaggtctgcagctgcaaggtctggaggtaaaggagtttcccgtaagagtggacgtggacgtggtggacctaatggtgttgtaggagctggaagaggaggtggacctgttcgtagaggtcctcttgctgttaatactcggccatcatcatccttctccataaacaaggcaagctcgaaatcttgattggaactctgtgccaccaaataccgaagcatgctaaaacttaagatggatgatcttttaatgctcttatgtccttggagaagaatcatacatgcataaaccgttacctctgatgatgattcagattacaagaatcttctaacatcttcttagaaaagcttctttcctgcaattagtggtttttatggttaaatactgggaacttcgagaggcatgcgtagatgtgcagaagttttcggttgatattgtcactcgctataggtttattgaagagctcctttaatctaagtagtccacatagggttatctacagggggataaagcctgaaaatgtgtgtggttctagggggaatttcagaaattttacttaaagagtaaataggatttatgatgggttatcaaagtgggggtatttgcactatgcatgaagttcacgatggtacatctggaatttcttcggagtgtgatggcagtctcagttttcgtttttggcttcagagactgactgataacaccacttgcccgcaggaagaggagcttgccatggcagaatcagaatgatttgtatgaagaaacccttagagctgttggggtgtcaggagtggaagtcggaaccacagtttatattaccaaccttgatcagggagtgacaaatgaagatataagggaactctatgctgagattggagagctgaaaagatatgcaattcactatgacaaaaatgggcgtccaagtggatcggctgaagttgtgtatatgagaagaagtgatgcaattcaagctatgaggaaatacaacaatgtacttttggatggaaggcctatgaaactggagattctgggtggaagtactgaatctgctcctgtcgcagctcgtgttaatgtgactggattgaatggaaggatgaagaggagtgtcttcattggacaaggagttagaggtgggagagtaggaagaggaagaggttcaggtccttctggaagacgccttccagtccaacaaaaccaacaaggtggtcgaggtggtcgaggcggggtccgtggtagaggcagaggtgctggtggaggcagagggaataaaagtggtggccgaggtggaaagaagccggtggagaagtctgctgcggatctcgacaaagatctcgaaagctatcatgctgaagctatgaacatctcttaaagcaagacttcgcatcttgtcatgtacttttgtgttctttattcgtagtctctgactaaatatgtgccaaagtctggtttggtttaattacgtttaggatggctctactctgctttcgttttcctcttttcttgtttcacactttcacagtcacttttggttattgaagttaaaagagatttagctgc

SEQ ID NO: 41001 - protein, 140 aa, Arabidopsis thaliana; identical to SEQ ID NO: 26230
  peptide (1)..(140): Ceres Seq. ID no. 12331244

SEQ ID NO: 41002 - protein, 131 aa, Arabidopsis thaliana; identical to SEQ ID NO: 26231
  peptide (1)..(131): Ceres Seq. ID no. 12331245

SEQ ID NO: 41003 - protein, 118 aa, Arabidopsis thaliana; identical to SEQ ID NO: 26232
  peptide (1)..(118): Ceres Seq. ID no. 12331246

SEQ ID NO: 41004 - DNA, 935 bp, Arabidopsis thaliana
  misc_feature (1)..(935): Ceres Seq. ID no. 13494180
  misc_feature (1)..(935): Ortholog of  Ceres SEQ ID NO 13586122 as cited in SEQ ID NO 0
agttttctcaattttttctagactcgtatcgatatggcgaatcatgaaacgatatttgatcagctaaagaagcagattccagtagatgaggaagaacctctgattttgaatcgagactcaagcgttggtctcgtcatcgttgacgttgttaatggcttctgcacaattggctccggcaatatggctccaacaaagcataatgaacagatatcgaagatggtggaggaaagtgcaaagcttgctagagagttctgtgatcggaaatggccggttttggcgtttattgactctcatcatccagatattccggagagaccttatcctcctcattgtattataggaactgaagaatcagaacttgttcctgctctgaaatggcttgaaagtgaggattgtgccactcttagacgaaaggattgtattaatgggtttgtgggttcgatggagagtgatggttctaatgtttttgtggattgggttaaggaaaaacagatcaaagttattgtcgttgtaggtatctgtacagacatatgtgtgtttgattttgtggctactgcactttctgcccgaaaccacggtgttctttctcctgtagaagatgtggtagtgtactcccgtggctgtgctacttttgaccttcctcttcatgttgcgaaagacatcaaaggcgctcaggctcatcctcaggagttgatgcaccatgtaggtctatatatggctaaaggaagaggagctcaggtagtctctaaaatttcttttgagacttgaaagactatatctcgtttataaacataacactcttgatatcaaatatttcagtaaattgttgagtttgcctctcttttctttcgtgtaaattgttcatgaagcttgttctctgaatttcaactcttgtgtaactgtttcagaatgacaaataatatgatgggtttctt

SEQ ID NO: 41005 - protein, 244 aa, Arabidopsis thaliana
  peptide (1)..(244): Ceres Seq. ID no. 13494181
MANHETIFDQLKKQIPVDEEEPLILNRDSSVGLVIVDVVNGFCTIGSGNMAPTKHNEQISKMVEESAKLAREFCDRKWPVLAFIDSHHPDIPERPYPPHCIIGTEESELVPALKWLESEDCATLRRKDCINGFVGSMESDGSNVFVDWVKEKQIKVIVVVGICTDICVFDFVATALSARNHGVLSPVEDVVVYSRGCATFDLPLHVAKDIKGAQAHPQELMHHVGLYMAKGRGAQVVSKISFET

SEQ ID NO: 41006 - protein, 195 aa, Arabidopsis thaliana
  peptide (1)..(195): Ceres Seq. ID no. 13494182
MAPTKHNEQISKMVEESAKLAREFCDRKWPVLAFIDSHHPDIPERPYPPHCIIGTEESELVPALKWLESEDCATLRRKDCINGFVGSMESDGSNVFVDWVKEKQIKVIVVVGICTDICVFDFVATALSARNHGVLSPVEDVVVYSRGCATFDLPLHVAKDIKGAQAHPQELMHHVGLYMAKGRGAQVVSKISFET

SEQ ID NO: 41007 - protein, 183 aa, Arabidopsis thaliana
  peptide (1)..(183): Ceres Seq. ID no. 13494183
MVEESAKLAREFCDRKWPVLAFIDSHHPDIPERPYPPHCIIGTEESELVPALKWLESEDCATLRRKDCINGFVGSMESDGSNVFVDWVKEKQIKVIVVVGICTDICVFDFVATALSARNHGVLSPVEDVVVYSRGCATFDLPLHVAKDIKGAQAHPQELMHHVGLYMAKGRGAQVVSKISFET

SEQ ID NO: 41008 - DNA, 1337 bp, Arabidopsis thaliana
  misc_feature (1)..(1337): Ceres Seq. ID no. 12329732
  misc_feature (1)..(1337): Ortholog of  Ceres SEQ ID NO 13638160 as cited in SEQ ID NO 58847
atcttgtccgatggttcaaacagaaaccgatcaaaggatgggtcttaatctgaatttgtctatctactctttaccaaaacccttatctcaatttctcgatgaagtgtcgaggatcaaagacaatcattccaaactgtctgaaatcgatggttatgtcggaaaattagaggaagaaaggaacaaaatcgatgtttttaaacgagaactccctttatgcatgctcttattgaacgaagcgattggggcgttgaaggatgaggctagaaaagggttatcactgatggcatctaatgggaaattcgatgatgttgaaagggcaaaaccggaaactgataagaagagctggatgagctctgcccagttatggatctcgaaccctaattcccaattccgatcgacaaatgaagaagaagaagatcggtgtgtgagtcagaacccatttcagacatgtaattaccctaatcaaggaggggtatttatgccatttaaccgtcccccacctcctccaccaccagctcctctgtctctcatgactccaacatcagagatgatgatggattatagcagaattgagcagagtcatcatcatcatcaattcaataaaccttcttcacagagtcatcacattcagaagaaagagcagagaaggagatggtcacaggaacttcaccgtaaatttgttgatgctcttcataggcttggagggccacaagttgctacaccaaagcagattagagatttgatgaaagttgatggtttaaccaatgatgaagtcaagagccatttacaaaaatatagaatgcatatccgtaagcatccgctgcatccgacaaagactttgtcatcgtcggatcagccaggtgtgttagagagagaatcgcagagcttaataagtttgtcgaggtcggattcgccacaaagcccacttgttgcaagagggttgttcagtagtaatgttggtcatagctcagaggaagatgaggaggaggaggatgaagaggaggagaagtctgatggacgtagtagctgtagaaatgatgaaacaaagaagaagagacaagtgttggatcttgagctttgaaagtctgcatagtgaatgatataatctttaccaacttatgttatatatgctcaaaactttgagtttgttcgggagtttttgtagatgtaaacatgagagttgaaataaggaagaggattttgagcaaaaagtagggtttgtttttgcaagaggaaatagatagagaagagtgttcgaaatcctctgtgttttttttttttttttttttttacttcataagtaagataaactcatatatcaaagattttgtttttat

SEQ ID NO: 41009 - protein, 359 aa, Arabidopsis thaliana
  peptide (1)..(359): Ceres Seq. ID no. 12329733
SCPMVQTETDQRMGLNLNLSIYSLPKPLSQFLDEVSRIKDNHSKLSEIDGYVGKLEEERNKIDVFKRELPLCMLLLNEAIGALKDEARKGLSLMASNGKFDDVERAKPETDKKSWMSSAQLWISNPNSQFRSTNEEEEDRCVSQNPFQTCNYPNQGGVFMPFNRPPPPPPPAPLSLMTPTSEMMMDYSRIEQSHHHHQFNKPSSQSHHIQKKEQRRRWSQELHRKFVDALHRLGGPQVATPKQIRDLMKVDGLTNDEVKSHLQKYRMHIRKHPLHPTKTLSSSDQPGVLERESQSLISLSRSDSPQSPLVARGLFSSNVGHSSEEDEEEEDEEEEKSDGRSSCRNDETKKKRQVLDLEL

SEQ ID NO: 41010 - protein, 356 aa, Arabidopsis thaliana
  peptide (1)..(356): Ceres Seq. ID no. 12329734
MVQTETDQRMGLNLNLSIYSLPKPLSQFLDEVSRIKDNHSKLSEIDGYVGKLEEERNKIDVFKRELPLCMLLLNEAIGALKDEARKGLSLMASNGKFDDVERAKPETDKKSWMSSAQLWISNPNSQFRSTNEEEEDRCVSQNPFQTCNYPNQGGVFMPFNRPPPPPPPAPLSLMTPTSEMMMDYSRIEQSHHHHQFNKPSSQSHHIQKKEQRRRWSQELHRKFVDALHRLGGPQVATPKQIRDLMKVDGLTNDEVKSHLQKYRMHIRKHPLHPTKTLSSSDQPGVLERESQSLISLSRSDSPQSPLVARGLFSSNVGHSSEEDEEEEDEEEEKSDGRSSCRNDETKKKRQVLDLEL

SEQ ID NO: 41011 - protein, 347 aa, Arabidopsis thaliana
  peptide (1)..(347): Ceres Seq. ID no. 12329735
MGLNLNLSIYSLPKPLSQFLDEVSRIKDNHSKLSEIDGYVGKLEEERNKIDVFKRELPLCMLLLNEAIGALKDEARKGLSLMASNGKFDDVERAKPETDKKSWMSSAQLWISNPNSQFRSTNEEEEDRCVSQNPFQTCNYPNQGGVFMPFNRPPPPPPPAPLSLMTPTSEMMMDYSRIEQSHHHHQFNKPSSQSHHIQKKEQRRRWSQELHRKFVDALHRLGGPQVATPKQIRDLMKVDGLTNDEVKSHLQKYRMHIRKHPLHPTKTLSSSDQPGVLERESQSLISLSRSDSPQSPLVARGLFSSNVGHSSEEDEEEEDEEEEKSDGRSSCRNDETKKKRQVLDLEL

SEQ ID NO: 41012 - DNA, 1185 bp, Arabidopsis thaliana
  misc_feature (1)..(1185): Ceres Seq. ID no. 12327893
  misc_feature (1)..(1185): Ortholog of  Ceres SEQ ID NO 15169045 as cited in SEQ ID NO 58372
  misc_feature (1)..(1185): Ortholog of  Ceres SEQ ID NO 13597361 as cited in SEQ ID NO 63638
caataacaacactttcgatgacttcggctttgactctggtttcttaggacaacaattccatggaaatcatcaatctccgaactcgatgaatttcactggcttaaaccactcagtaccggattttcttccagctccggaaaacagctctggatcatgtggattgagtcctctgttctcgaacagagcaaaggttttaaaaccgttacaggtaatggcttcatctggctcgcagccaactctgtttcagaaacgagctgcaatgcgtcagagttcgactagcaaatcagagagttcttctgaaatgaggaaatcgagctacgagagagagattgacgatactagtaccggaatcatcgatatctctggattgaattacgaatctgatgaccataatactaataacaacaaaggtaagaagaaaggaatgcctgcaaagaaccttatggctgagagaagaagaaggaagaagcttaatgataggctttacatgcttagatcagttgttcccaagatcagcaaaatggatagagcatcaatacttggagatgctattgattacctcaaagagcttttacaaagaatcaacgatcttcataccgaactcgaatctactccaccgagttcttcaagcttgcatccgttaacaccgactccacaaacgctgtcttaccgtgttaaggaagagttgtgtccatcttcctccttgccaagccctaaaggccagcaaccaagagttgaggttagattaagagaaggaaaggcagtgaacattcacatgttctgtggacgtagaccaggtcttttactttccaccatgagagctttggataacttaggattggatgttcaacaagctgtgattagctgtttcaacggttttgctttggatgttttccgcgctgagcaatgtcaagaagaccatgacgtgttacctgaacaaatcaaagcagtgcttttagatacagcaggttacgctggtttggtttgattgcgaagcagaaggaagcatctgtgtggaacagagctagatctaagtccttgttctgttttagtcagcaattttcttacttagtttcatcatttttaatcagtgtattgaagatgataactacttaattttagcttcgaaaacatgtgtttcgagtacaatagtttcaacctttgagcaaaatgccattgtttctc

SEQ ID NO: 41013 - protein, 328 aa, Arabidopsis thaliana
  peptide (1)..(328): Ceres Seq. ID no. 12327894
NNNTFDDFGFDSGFLGQQFHGNHQSPNSMNFTGLNHSVPDFLPAPENSSGSCGLSPLFSNRAKVLKPLQVMASSGSQPTLFQKRAAMRQSSTSKSESSSEMRKSSYEREIDDTSTGIIDISGLNYESDDHNTNNNKGKKKGMPAKNLMAERRRRKKLNDRLYMLRSVVPKISKMDRASILGDAIDYLKELLQRINDLHTELESTPPSSSSLHPLTPTPQTLSYRVKEELCPSSSLPSPKGQQPRVEVRLREGKAVNIHMFCGRRPGLLLSTMRALDNLGLDVQQAVISCFNGFALDVFRAEQCQEDHDVLPEQIKAVLLDTAGYAGLV

SEQ ID NO: 41014 - protein, 300 aa, Arabidopsis thaliana
  peptide (1)..(300): Ceres Seq. ID no. 12327895
MNFTGLNHSVPDFLPAPENSSGSCGLSPLFSNRAKVLKPLQVMASSGSQPTLFQKRAAMRQSSTSKSESSSEMRKSSYEREIDDTSTGIIDISGLNYESDDHNTNNNKGKKKGMPAKNLMAERRRRKKLNDRLYMLRSVVPKISKMDRASILGDAIDYLKELLQRINDLHTELESTPPSSSSLHPLTPTPQTLSYRVKEELCPSSSLPSPKGQQPRVEVRLREGKAVNIHMFCGRRPGLLLSTMRALDNLGLDVQQAVISCFNGFALDVFRAEQCQEDHDVLPEQIKAVLLDTAGYAGLV

SEQ ID NO: 41015 - protein, 258 aa, Arabidopsis thaliana
  peptide (1)..(258): Ceres Seq. ID no. 12327896
MASSGSQPTLFQKRAAMRQSSTSKSESSSEMRKSSYEREIDDTSTGIIDISGLNYESDDHNTNNNKGKKKGMPAKNLMAERRRRKKLNDRLYMLRSVVPKISKMDRASILGDAIDYLKELLQRINDLHTELESTPPSSSSLHPLTPTPQTLSYRVKEELCPSSSLPSPKGQQPRVEVRLREGKAVNIHMFCGRRPGLLLSTMRALDNLGLDVQQAVISCFNGFALDVFRAEQCQEDHDVLPEQIKAVLLDTAGYAGLV

SEQ ID NO: 41016 - DNA, 2079 bp, Arabidopsis thaliana
  misc_feature (1)..(2079): Ceres Seq. ID no. 13489597
  misc_feature (1)..(2079): Ortholog of  Ceres SEQ ID NO 14313636 as cited in SEQ ID NO 64205
atcacattctctccttattcaacttaaatactacacggccaaaaacatttaacaaacgccactcagatcctgagtctttggatcaatggctatttcaaatgttatttctgtcttattattattgcttgtactaatcaatttaagcaatcaaaatatcaaaggaattgatgcatttcatcagatttacgaagaattgcaatctgaatcagtcgagtcagtgaatcatcttcacagacctagttttcactttcaacctccaaagcattggattaacgatccaaatggtccagtatactacaaaggtctctaccatctcttctaccaatataacaccaaaggtgcggtttggggtaatattatatgggcccattcggtttctaaagacttggttaactgggaggctcttgaaccggctcttagtccttcaaaatggttcgacatcggaggtacatggtccggttcaataacaatcgtaccgggaaaagtaccgattatcctctataccggtgttaaccagaacgaaactcagttgcaaaactatgcaatcccagaggaccgatcagacccatacctaaggaaatggattaaaccggacgataacccgattgcaatcccagactatacaatgaacggttcagcattccgtgacccgacaaccgcttggttctccaaagacgggcattggagaaccgtggtagggtcaaaaagaaagcgtagaggaattgcttacatctacagaagccgagatttcaagcattgggtcaaagctaagcacccggttcactctaaacagtcaaccggtatgtgggaatgtcctgatttcttcccggtttccttaaccgatttccgaaacggtttggacttggattacgtcggtccaaacaccaagcatgtgttgaaggttagcttggacattacccggtacgagtattacacgcttggtaaatacgatcttaagaaggaccggtacataccggacggtaatactcccgatggttgggagggtttaagattcgattacggtaatttctacgcttccaagacattctttgactacaaaaagaacagaagaatcttatggggttgggctaatgaatctgacaccgttgaagatgatattttgaagggttgggctggtcttcaggtgattccaagaacggtgctccttgattcaagcaagaagcaacttgtgttttggcctgttgaagagatagagtcattaagaggtaactacgtccgaatgaacaatcatgacatcaagatgggtcaacgcatagaagtcaaaggaatcactcctgctcaagccgatgtggaagtaacgttctatgttggaagtctagagaaagctgagatattcgatccgagtttcacgtggaaaccattggaattgtgtaacattaaaggctcgaatgtgagaggcggtgtaggaccttttggtctgatcacattagcgactcctgatttggaagagtacactcctgtcttctttagagtcttcaacgacactaaaactcataagcctaaagttctcatgtgctccgatgctagaccgtcgtcgttaaagcaagacacgggtttactcgcaaaagataggatgtataaaccatcgtttgctggttttgtggatgttgatatggctgatggaaggatctctctaaggagtttgattgatcattcagtagtagagagctttggagcattaggtaaaacggtgataacatcaagagtgtatccagtgaaagcagtaaaagagaatgcacatttgtatgtctttaacaatggaacacaaactgtgaccatagagagtctcaatgcttggaatatggatcgtcctctgcaaatgaatgatggagctctttaatttagctcttctctctatagtttagctataccgtcttctctctttctcactttttcttatattttcatcttcagtatagtaactgagagatactgtgaaattaggaagaaaaatgtgggagtttctgtgtttacgaacaatttggttgtgatgtccatactttatgtatcgactgttgtatctttctgtctttagtctctcaataaaaataagtttag

SEQ ID NO: 41017 - protein, 591 aa, Arabidopsis thaliana
  peptide (1)..(591): Ceres Seq. ID no. 13489598
MAISNVISVLLLLLVLINLSNQNIKGIDAFHQIYEELQSESVESVNHLHRPSFHFQPPKHWINDPNGPVYYKGLYHLFYQYNTKGAVWGNIIWAHSVSKDLVNWEALEPALSPSKWFDIGGTWSGSITIVPGKVPIILYTGVNQNETQLQNYAIPEDRSDPYLRKWIKPDDNPIAIPDYTMNGSAFRDPTTAWFSKDGHWRTVVGSKRKRRGIAYIYRSRDFKHWVKAKHPVHSKQSTGMWECPDFFPVSLTDFRNGLDLDYVGPNTKHVLKVSLDITRYEYYTLGKYDLKKDRYIPDGNTPDGWEGLRFDYGNFYASKTFFDYKKNRRILWGWANESDTVEDDILKGWAGLQVIPRTVLLDSSKKQLVFWPVEEIESLRGNYVRMNNHDIKMGQRIEVKGITPAQADVEVTFYVGSLEKAEIFDPSFTWKPLELCNIKGSNVRGGVGPFGLITLATPDLEEYTPVFFRVFNDTKTHKPKVLMCSDARPSSLKQDTGLLAKDRMYKPSFAGFVDVDMADGRISLRSLIDHSVVESFGALGKTVITSRVYPVKAVKENAHLYVFNNGTQTVTIESLNAWNMDRPLQMNDGAL

SEQ ID NO: 41018 - protein, 411 aa, Arabidopsis thaliana
  peptide (1)..(411): Ceres Seq. ID no. 13489599
MNGSAFRDPTTAWFSKDGHWRTVVGSKRKRRGIAYIYRSRDFKHWVKAKHPVHSKQSTGMWECPDFFPVSLTDFRNGLDLDYVGPNTKHVLKVSLDITRYEYYTLGKYDLKKDRYIPDGNTPDGWEGLRFDYGNFYASKTFFDYKKNRRILWGWANESDTVEDDILKGWAGLQVIPRTVLLDSSKKQLVFWPVEEIESLRGNYVRMNNHDIKMGQRIEVKGITPAQADVEVTFYVGSLEKAEIFDPSFTWKPLELCNIKGSNVRGGVGPFGLITLATPDLEEYTPVFFRVFNDTKTHKPKVLMCSDARPSSLKQDTGLLAKDRMYKPSFAGFVDVDMADGRISLRSLIDHSVVESFGALGKTVITSRVYPVKAVKENAHLYVFNNGTQTVTIESLNAWNMDRPLQMNDGAL

SEQ ID NO: 41019 - protein, 352 aa, Arabidopsis thaliana
  peptide (1)..(352): Ceres Seq. ID no. 13489600
MWECPDFFPVSLTDFRNGLDLDYVGPNTKHVLKVSLDITRYEYYTLGKYDLKKDRYIPDGNTPDGWEGLRFDYGNFYASKTFFDYKKNRRILWGWANESDTVEDDILKGWAGLQVIPRTVLLDSSKKQLVFWPVEEIESLRGNYVRMNNHDIKMGQRIEVKGITPAQADVEVTFYVGSLEKAEIFDPSFTWKPLELCNIKGSNVRGGVGPFGLITLATPDLEEYTPVFFRVFNDTKTHKPKVLMCSDARPSSLKQDTGLLAKDRMYKPSFAGFVDVDMADGRISLRSLIDHSVVESFGALGKTVITSRVYPVKAVKENAHLYVFNNGTQTVTIESLNAWNMDRPLQMNDGAL

SEQ ID NO: 41020 - DNA, 875 bp, Arabidopsis thaliana; identical to SEQ ID NO: 25017
  misc_feature (1)..(875): Ceres Seq. ID no. 13575759
  misc_feature (1)..(875): Ortholog of  Ceres SEQ ID NO 15174145 as cited in SEQ ID NO 0

SEQ ID NO: 41021 - protein, 195 aa, Arabidopsis thaliana; identical to SEQ ID NO: 25018
  peptide (1)..(195): Ceres Seq. ID no. 13575760

SEQ ID NO: 41022 - protein, 170 aa, Arabidopsis thaliana; identical to SEQ ID NO: 25019
  peptide (1)..(170): Ceres Seq. ID no. 13575761

SEQ ID NO: 41023 - protein, 165 aa, Arabidopsis thaliana; identical to SEQ ID NO: 25020
  peptide (1)..(165): Ceres Seq. ID no. 13575762

SEQ ID NO: 41024 - DNA, 1686 bp, Arabidopsis thaliana
  misc_feature (1)..(1686): Ceres Seq. ID no. 12562538
  misc_feature (1)..(1686): Ortholog of  Ceres SEQ ID NO 14304471 as cited in SEQ ID NO 53670
atctggtgttgctttccttgtaccacacgatccttatagctcatcatctaatggccatttaatccgccagagaagaagaagaagaagaaaatagattagggtttttcattccagaatagccctaatccaaattcgaaatctttcttctgattttgatctttccgatcatgtcatcggtctgtgttaacgaagcattaaccgatgacgagctgagatgggtattgtcgagactagacagtgataaagataaggaagtgtttggtttggtctgcaagaggtggctaaatctgcagagtaccgaccggaagaagctagcggcacgtgctggtccacatatgctccgccgtctcgcttctaggttcactcaaatcgtcgaattggatttgtctcagtcaatttctaggtccttttatccaggagttactgattctgacctcgctgttatctctgagggattcaagtttctcagagttcttaatcttcacaactgtaaaggtattacagatactggattggcctcaattggaaggtgtctttctttactgcagtttttggatgtatcatattgtagaaagctctcagataaaggattatcagctgttgcagaaggctgccatgatctaagggcattgcatttagcgggttgtcgtttcatcaccgatgaatcgttgaaatcactctctgagagatgccgtgatctcgaagctctggggctacaaggctgcaccaatatcactgattcaggtcttgctgatcttgtgaagggatgcagaaagataaaatctttagacattaataaatgtagcaatgttggagatgctggagtttcgagcgtggcgaaagcttgtgcatcttccctcaagacactcaaattgctggactgttacaaagtcgggaacgaatctatatcgtcgctggcgcagttttgcaagaatctggaaactctgataatcggtggatgcagagatatctctgacgaatctatcatgttactggcagattcctgtaaagacagtctcaagaacttgaggatggattggtgcttgaatatatctgactcttcccttagctgcattctcaagcagtgcaagaacttggaggctctagatattggttgctgtgaagaggtcacagacactgctttccgggatttagggagcgacgatgttttgggattgaaggttttaaaggttagcaactgcacgaagatcacagtaacagggataggcaagcttttggacaaatgcagttccctggagtatatagatgtaaggtctcttccacatgtgacagaagtgagatgcagtgaagctggtttggagttcccaaaatgttgtaaagttaacttttcaggtagtttaaccgagccagatgttctgctttgatcgttgctgttgggatctcgttacttgtctgttgggaaattctggtaaccctaaaccttctgtgatctctctatctgtctcgtgtatgggcacactcatagcttatagttcatcagtgagtcttctctcaagctcttgtatatttttgtgcattaaatatttggttgtagcggctgcttgattattcttcagttgctttgcaaagtgtgtgtagttgttgttgaacctgcttctccttaagagtaaaaaaaggtcagcacttgatatttgtaaactctgattctcaatgtactgatttctt

SEQ ID NO: 41025 - protein, 405 aa, Arabidopsis thaliana
  peptide (1)..(405): Ceres Seq. ID no. 12562539
MSSVCVNEALTDDELRWVLSRLDSDKDKEVFGLVCKRWLNLQSTDRKKLAARAGPHMLRRLASRFTQIVELDLSQSISRSFYPGVTDSDLAVISEGFKFLRVLNLHNCKGITDTGLASIGRCLSLLQFLDVSYCRKLSDKGLSAVAEGCHDLRALHLAGCRFITDESLKSLSERCRDLEALGLQGCTNITDSGLADLVKGCRKIKSLDINKCSNVGDAGVSSVAKACASSLKTLKLLDCYKVGNESISSLAQFCKNLETLIIGGCRDISDESIMLLADSCKDSLKNLRMDWCLNISDSSLSCILKQCKNLEALDIGCCEEVTDTAFRDLGSDDVLGLKVLKVSNCTKITVTGIGKLLDKCSSLEYIDVRSLPHVTEVRCSEAGLEFPKCCKVNFSGSLTEPDVLL

SEQ ID NO: 41026 - protein, 349 aa, Arabidopsis thaliana
  peptide (1)..(349): Ceres Seq. ID no. 12562540
MLRRLASRFTQIVELDLSQSISRSFYPGVTDSDLAVISEGFKFLRVLNLHNCKGITDTGLASIGRCLSLLQFLDVSYCRKLSDKGLSAVAEGCHDLRALHLAGCRFITDESLKSLSERCRDLEALGLQGCTNITDSGLADLVKGCRKIKSLDINKCSNVGDAGVSSVAKACASSLKTLKLLDCYKVGNESISSLAQFCKNLETLIIGGCRDISDESIMLLADSCKDSLKNLRMDWCLNISDSSLSCILKQCKNLEALDIGCCEEVTDTAFRDLGSDDVLGLKVLKVSNCTKITVTGIGKLLDKCSSLEYIDVRSLPHVTEVRCSEAGLEFPKCCKVNFSGSLTEPDVLL

SEQ ID NO: 41027 - DNA, 930 bp, Arabidopsis thaliana
  misc_feature (1)..(930): Ceres Seq. ID no. 13497557
  misc_feature (1)..(930): Ortholog of  Ceres SEQ ID NO 14307654 as cited in SEQ ID NO 54606
  misc_feature (1)..(930): Ortholog of  Ceres SEQ ID NO 15168370 as cited in SEQ ID NO 55687
  misc_feature (1)..(930): Ortholog of  Ceres SEQ ID NO 12620302 as cited in SEQ ID NO 65999
atctccgatttagatagaaacaacaatcctccggtggtcactcgctaatctccgtttgatctcgccgacactcgagccttttaccgatgaaggatggagattccttaccaataagcacttcttccgtcgcggcgacgacggtgaccggaaagaaggaaaccggttattccgctctcttctcgaaaggccggtacaagttttgggccttagctgcgattctgttactcgctttctggtcaatgctcactggcacggtcaatctccgttggtctgccggtaacattaaccatttcaccgacgatctcgtctttcccatccacgaggatctcgatgttcttgaaatggaggagagggagaaagtggtgaagcacatgtgggatgtgtataacaatggccgtcgtatcagattacctaggttttggcaagaggccttcgaggctgcttacgaggagcttaccagtgatgtacctgatgtggttgaggctgccatttccgagatcgctaggatgtctattcgctccattgttatagatccgcctccgcttcattccacgaatgtacgagaattgacaaagactctaaaacttgcggacaaaggaagagcaactcaaatatcaaaaccaagcagccgtcgattgaaatagctatggaggctttacgaaaaaggtagtgtagcagtcagccgtcgtggcgtgaccatacatatacttgatgtcagaaagatcaatcaacctcatccctagaatatatgtccatcattagtgttattttttcttccactaggggcattaatcctttcactatcatcatcatctcttctataaacaaaattttgaggaagctttttatccacaccttattagctctgaacggtaatgtcttttattttggatttatgaaatatttcatatgtagttagcccatacattt

SEQ ID NO: 41028 - protein, 185 aa, Arabidopsis thaliana
  peptide (1)..(185): Ceres Seq. ID no. 13497558
MKDGDSLPISTSSVAATTVTGKKETGYSALFSKGRYKFWALAAILLLAFWSMLTGTVNLRWSAGNINHFTDDLVFPIHEDLDVLEMEEREKVVKHMWDVYNNGRRIRLPRFWQEAFEAAYEELTSDVPDVVEAAISEIARMSIRSIVIDPPPLHSTNVRELTKTLKLADKGRATQISKPSSRRLK

SEQ ID NO: 41029 - protein, 134 aa, Arabidopsis thaliana
  peptide (1)..(134): Ceres Seq. ID no. 13497559
MLTGTVNLRWSAGNINHFTDDLVFPIHEDLDVLEMEEREKVVKHMWDVYNNGRRIRLPRFWQEAFEAAYEELTSDVPDVVEAAISEIARMSIRSIVIDPPPLHSTNVRELTKTLKLADKGRATQISKPSSRRLK

SEQ ID NO: 41030 - protein, 100 aa, Arabidopsis thaliana; identical to SEQ ID NO: 37003
  peptide (1)..(100): Ceres Seq. ID no. 13497560

SEQ ID NO: 41031 - DNA, 542 bp, Arabidopsis thaliana
  misc_feature (1)..(542): Ceres Seq. ID no. 12562252
  misc_feature (1)..(542): Ortholog of  Ceres SEQ ID NO 12562293 as cited in SEQ ID NO 20690
atcacttacttaacatactaagagagttattagaacttgcaaaaaatggcttccaaggctttgattctgttaggtctcttctcagttcttctcgtcgtctccgaagtgtctgccgcaaggcaatcgggcatggtgaagccagagagtgaggaaactgtgcaacctgaaggttatggcggtggccacggaggacatggtggtcacggagggggaggaggccacggacatggaggacacaacggaggagggggccacggacttgacggatacggaggaggtggaggacactatggaggaggtggaggacactacggaggaggtggaggacactacggaggaggtggaggacactacggaggaggtggtggaggacacggaggtggaggacactacggaggtggaggccacgggctaaacgaacctgttcagactaagccgggtgtttaaaactatataatatcttcactaccatgcatgattgcatatatatatatacgcttatgtattatctatatgcctataaataaaccatggtgagtttg

SEQ ID NO: 41032 - protein, 133 aa, Arabidopsis thaliana
  peptide (1)..(133): Ceres Seq. ID no. 12562253
MASKALILLGLFSVLLVVSEVSAARQSGMVKPESEETVQPEGYGGGHGGHGGHGGGGGHGHGGHNGGGGHGLDGYGGGGGHYGGGGGHYGGGGGHYGGGGGHYGGGGGGHGGGGHYGGGGHGLNEPVQTKPGV

SEQ ID NO: 41033 - protein, 105 aa, Arabidopsis thaliana
  peptide (1)..(105): Ceres Seq. ID no. 12562254
MVKPESEETVQPEGYGGGHGGHGGHGGGGGHGHGGHNGGGGHGLDGYGGGGGHYGGGGGHYGGGGGHYGGGGGHYGGGGGGHGGGGHYGGGGHGLNEPVQTKPGV

SEQ ID NO: 41034 - protein, 80 aa, Arabidopsis thaliana
  peptide (1)..(80): Ceres Seq. ID no. 12562255
MAVATEDMVVTEGEEATDMEDTTEEGATDLTDTEEVEDTMEEVEDTTEEVEDTTEEVEDTTEEVVEDTEVEDTTEVEATG

SEQ ID NO: 41035 - DNA, 1819 bp, Arabidopsis thaliana
  misc_feature (1)..(1819): Ceres Seq. ID no. 13488907
  misc_feature (1)..(1819): Ortholog of  Ceres SEQ ID NO 12609146 as cited in SEQ ID NO 52118
  misc_feature (1)..(1819): Ortholog of  Ceres SEQ ID NO 13638136 as cited in SEQ ID NO 58644
  misc_feature (1)..(1819): Ortholog of  Ceres SEQ ID NO 14302836 as cited in SEQ ID NO 65013
gatatttattcaactgcgtggtataaccaaaaaaaaaaagaaacactattcgactctttttttgtttttgtaataaacataaaataaattttggagagagatatttcgtcggaaattaattgacgttcaaaagattcgttaccggaatatttagtagaggcggcgatcgagttatggcggatatttgttatgaagacgagacgtcggcttgtgaatcaagaccgttgtggtctagccggaagtggaggatcggtgtccagcgattcaggatgtctccgtcggagatgaatcccacggcgtcgacgacggaggaggaggataaatctgaagggatttataataagcgaaataaacaagaagagtacgattttatgaactgtgcatcgtcgtcaccttctcaaagctctcctgaagaagagagtgtatcacttgaagacagtgacgtctctatctccgatggaaattcatcggttaatgatgttgcagttattccgtcgaagaagacggttaaagagacggatctgaggccgagatacggcgtcgcatcggtgtgcgggagaagaagagatatggaagatgcggttgcgttacatccgtcttttgtacggaaacaaacggagttttctcgaacaagatggcactattttggtgtttacgacggccatggctgttctcacgttgcggctaggtgtaaagagagacttcacgagttagtgcaagaagaagcgttgtcggataagaaagaagaatggaagaagatgatggagcgtagcttcacacgtatggacaaagaggttgttcgttggggtgaaactgtgatgagtgctaattgtaggtgtgagcttcaaacgccggactgtgacgctgttggatccaccgccgttgtctccgtcattacgccggagaagatcattgttgcgaattgcggtgactcaagagcagttctttgtaggaatggtaaagcagtacctctttctacagatcataagcctgatcgtccggatgagctggatcgaatccaagaagcaggaggacgagtgatatactgggacggtgcaagagtcttaggcgttttagccatgtcacgagccataggagacaattatttaaaaccgtacgtcacttcggagccggaagtgacggttacggatcggactgaggaagatgagtttctgattctagcgacggacgggctatgggacgtagtgacgaacgaggcagcgtgtacgatggtgcgcatgtgtctcaacagaaaaagtggtcgtggaagacggcgaggagaaacacagactccggggaggaggagtgaagaagaagggaaagaagaagaggagaaggtggtggggtcaagaaagaacgggaagagaggagagatcacggacaaagcatgtacggaggcgtcagtattgctgacgaagctggcgttggcaaaacacagtagtgacaacgtaagcgtcgtcgttattgatctcagaagaagaagaaagagacacgttgcttgacactaatctcctcatcactcttactccaccgttttttgtgttgtttaaaatgattcttttaccttgggacgaaggtagctcaaatctttgaacccaaaagagagaaaaaaaaagcattaggtctaaaaaaaaaaccccggtttactgaaagcggttaaaccgggtatggttgggtcttttttgttctgaacctttttttcttgccttttttcggtgtgtaatgaacaaacagaaaaggaagccggaatgtgtcactgtctaggtggaatcagttcagaattcaattaataaaaaagtatgtatatgttttcttggcc

SEQ ID NO: 41036 - protein, 442 aa, Arabidopsis thaliana
  peptide (1)..(442): Ceres Seq. ID no. 13488908
MADICYEDETSACESRPLWSSRKWRIGVQRFRMSPSEMNPTASTTEEEDKSEGIYNKRNKQEEYDFMNCASSSPSQSSPEEESVSLEDSDVSISDGNSSVNDVAVIPSKKTVKETDLRPRYGVASVCGRRRDMEDAVALHPSFVRKQTEFSRTRWHYFGVYDGHGCSHVAARCKERLHELVQEEALSDKKEEWKKMMERSFTRMDKEVVRWGETVMSANCRCELQTPDCDAVGSTAVVSVITPEKIIVANCGDSRAVLCRNGKAVPLSTDHKPDRPDELDRIQEAGGRVIYWDGARVLGVLAMSRAIGDNYLKPYVTSEPEVTVTDRTEEDEFLILATDGLWDVVTNEAACTMVRMCLNRKSGRGRRRGETQTPGRRSEEEGKEEEEKVVGSRKNGKRGEITDKACTEASVLLTKLALAKHSSDNVSVVVIDLRRRRKRHVA

SEQ ID NO: 41037 - protein, 410 aa, Arabidopsis thaliana
  peptide (1)..(410): Ceres Seq. ID no. 13488909
MSPSEMNPTASTTEEEDKSEGIYNKRNKQEEYDFMNCASSSPSQSSPEEESVSLEDSDVSISDGNSSVNDVAVIPSKKTVKETDLRPRYGVASVCGRRRDMEDAVALHPSFVRKQTEFSRTRWHYFGVYDGHGCSHVAARCKERLHELVQEEALSDKKEEWKKMMERSFTRMDKEVVRWGETVMSANCRCELQTPDCDAVGSTAVVSVITPEKIIVANCGDSRAVLCRNGKAVPLSTDHKPDRPDELDRIQEAGGRVIYWDGARVLGVLAMSRAIGDNYLKPYVTSEPEVTVTDRTEEDEFLILATDGLWDVVTNEAACTMVRMCLNRKSGRGRRRGETQTPGRRSEEEGKEEEEKVVGSRKNGKRGEITDKACTEASVLLTKLALAKHSSDNVSVVVIDLRRRRKRHVA

SEQ ID NO: 41038 - protein, 405 aa, Arabidopsis thaliana
  peptide (1)..(405): Ceres Seq. ID no. 13488910
MNPTASTTEEEDKSEGIYNKRNKQEEYDFMNCASSSPSQSSPEEESVSLEDSDVSISDGNSSVNDVAVIPSKKTVKETDLRPRYGVASVCGRRRDMEDAVALHPSFVRKQTEFSRTRWHYFGVYDGHGCSHVAARCKERLHELVQEEALSDKKEEWKKMMERSFTRMDKEVVRWGETVMSANCRCELQTPDCDAVGSTAVVSVITPEKIIVANCGDSRAVLCRNGKAVPLSTDHKPDRPDELDRIQEAGGRVIYWDGARVLGVLAMSRAIGDNYLKPYVTSEPEVTVTDRTEEDEFLILATDGLWDVVTNEAACTMVRMCLNRKSGRGRRRGETQTPGRRSEEEGKEEEEKVVGSRKNGKRGEITDKACTEASVLLTKLALAKHSSDNVSVVVIDLRRRRKRHVA

SEQ ID NO: 41039 - DNA, 2160 bp, Arabidopsis thaliana
  misc_feature (1)..(2160): Ceres Seq. ID no. 13487429
  misc_feature (1)..(2160): Ortholog of  Ceres SEQ ID NO 13595567 as cited in SEQ ID NO 56760
  misc_feature (1)..(2160): Ortholog of  Ceres SEQ ID NO 13597380 as cited in SEQ ID NO 64054
  misc_feature (1)..(2160): Ortholog of  Ceres SEQ ID NO 12625474 as cited in SEQ ID NO 64169
  misc_feature (1)..(2160): Ortholog of  Ceres SEQ ID NO 13597502 as cited in SEQ ID NO 64681
agatctgaatcaacctcttaagaagaagagaaaggaatgatgattagtgaaagagatgattttagtctcactggaccattacacttaacatctatagattgggctaatgaacatcatcgacgatccgtagctggatctttggttcaaggaatctatgtagctgagcgtgaccgtcagctacaaagagaaggtcctgagttagctttatctccaatatggtctgagtttttccatttccgcctcattcgtaagtttgtcgatgacgcggataactctatcttcggaggaatctatgagtacaaactgccgcaacagctctctcaaaccgtcaaatcaatggaatttagtccacgttttgtgattgctttcagaggaacggttacaaaagtggactccatttcccgtgacatcgagcatgacatccatgttattagaaacgggcttcacacgacaacacggtttgagatagctatccaagcagtgagaaacattgttgcttcggttggtggttctagtgtttggcttgctggtcattctcttggtgcatctatggcattacttaccgggaaaaccatcgctagaaccgggttttttcctgagtgtttcgcattcaatccgccgtttttgtctgcccctatcgaaaaaattaaggataagaggattaaacatgggatacgcattgcaggcagtgtgatcacagctggacttgctctagccaaaaaagccacccaacactacagccaaaacgaccgtgcattacccgcacctcctgatccatttgaagctttatccgactggttcccgcggctgtatgtcaaccctggtgaccacttatgctcagagtatgttggttactttgagcaccgaaacaagatggaagaaatcgggattgggtttgtagagcgggtagcgacgcagcactcgttgggcggtatgctgttaggaggacaagagccggtacatctgattccatcttcggttttgacggtgaacttaagctcctcgagagatttcaaacaagctcatgggattcatcagtggtggagggaagataacaagtttgagactaaaccttcgattccgccgtttttacctccatcgccgtcgcgcagagcacaatctccgacggtgaagccgtctttgccatttgtaccggcgttgttcgttttcggagattcctcagtcgatagcggaaccaataactttcttggaaccttagcgagagcagatcggcttccctacggtcgcgatttcgatacgcatcaaccaacgggaaggttttgcaatggaagaatcccagttgattatctagctgatcgtttaggcttaccattcgttcctagctatcttggacaaactgggactgttgaagacatgtttcaaggagtaaactatgcatcagctggtgctggaatcatcttatcaagtggatctgaattgggccagcgggtttcatttgcgatgcaagttgagcagtttgttgatacgtttcagcagatgatactgagtattggggagaaagcttcggaacgtttagtgtcaaactcggttttctacatatcgattggagtgaatgattacatacatttctacatcagaaacatctccaatgtgcagaatctctatactccatggaattttaatcagttcttggcttctaatatgagacaggagctcaagaccttgtacaatgtcaaggtgaggaggatggtggtgatgggactgccacctattggctgtgcaccatactacatgtggaaatacagaagccagaacggagaatgtgcagaagaagtgaacagcatgatcatggaatccaactttgtcatgagatacactgtagataaactcaaccgtgagcttccaggggcatccattatctactgtgacgtgttccaaagcgctatggacattctcaggaaccaccaacactacggttttaatgagacgacagatgcgtgttgtgggctagggaggtacaaaggatggcttccatgcatctcgccggagatggcttgctctgacgcctccggtcacctctggtgggaccagtttcatcctacagacgccgttaacgccattctagccgacaatgtatggaatggtcgccacgtggacatgtgttaccctactaacctagaaactatgcttcattcttaa

SEQ ID NO: 41040 - protein, 707 aa, Arabidopsis thaliana
  peptide (1)..(707): Ceres Seq. ID no. 13487430
MMISERDDFSLTGPLHLTSIDWANEHHRRSVAGSLVQGIYVAERDRQLQREGPELALSPIWSEFFHFRLIRKFVDDADNSIFGGIYEYKLPQQLSQTVKSMEFSPRFVIAFRGTVTKVDSISRDIEHDIHVIRNGLHTTTRFEIAIQAVRNIVASVGGSSVWLAGHSLGASMALLTGKTIARTGFFPECFAFNPPFLSAPIEKIKDKRIKHGIRIAGSVITAGLALAKKATQHYSQNDRALPAPPDPFEALSDWFPRLYVNPGDHLCSEYVGYFEHRNKMEEIGIGFVERVATQHSLGGMLLGGQEPVHLIPSSVLTVNLSSSRDFKQAHGIHQWWREDNKFETKPSIPPFLPPSPSRRAQSPTVKPSLPFVPALFVFGDSSVDSGTNNFLGTLARADRLPYGRDFDTHQPTGRFCNGRIPVDYLADRLGLPFVPSYLGQTGTVEDMFQGVNYASAGAGIILSSGSELGQRVSFAMQVEQFVDTFQQMILSIGEKASERLVSNSVFYISIGVNDYIHFYIRNISNVQNLYTPWNFNQFLASNMRQELKTLYNVKVRRMVVMGLPPIGCAPYYMWKYRSQNGECAEEVNSMIMESNFVMRYTVDKLNRELPGASIIYCDVFQSAMDILRNHQHYGFNETTDACCGLGRYKGWLPCISPEMACSDASGHLWWDQFHPTDAVNAILADNVWNGRHVDMCYPTNLETMLHS

SEQ ID NO: 41041 - protein, 706 aa, Arabidopsis thaliana
  peptide (1)..(706): Ceres Seq. ID no. 13487431
MISERDDFSLTGPLHLTSIDWANEHHRRSVAGSLVQGIYVAERDRQLQREGPELALSPIWSEFFHFRLIRKFVDDADNSIFGGIYEYKLPQQLSQTVKSMEFSPRFVIAFRGTVTKVDSISRDIEHDIHVIRNGLHTTTRFEIAIQAVRNIVASVGGSSVWLAGHSLGASMALLTGKTIARTGFFPECFAFNPPFLSAPIEKIKDKRIKHGIRIAGSVITAGLALAKKATQHYSQNDRALPAPPDPFEALSDWFPRLYVNPGDHLCSEYVGYFEHRNKMEEIGIGFVERVATQHSLGGMLLGGQEPVHLIPSSVLTVNLSSSRDFKQAHGIHQWWREDNKFETKPSIPPFLPPSPSRRAQSPTVKPSLPFVPALFVFGDSSVDSGTNNFLGTLARADRLPYGRDFDTHQPTGRFCNGRIPVDYLADRLGLPFVPSYLGQTGTVEDMFQGVNYASAGAGIILSSGSELGQRVSFAMQVEQFVDTFQQMILSIGEKASERLVSNSVFYISIGVNDYIHFYIRNISNVQNLYTPWNFNQFLASNMRQELKTLYNVKVRRMVVMGLPPIGCAPYYMWKYRSQNGECAEEVNSMIMESNFVMRYTVDKLNRELPGASIIYCDVFQSAMDILRNHQHYGFNETTDACCGLGRYKGWLPCISPEMACSDASGHLWWDQFHPTDAVNAILADNVWNGRHVDMCYPTNLETMLHS

SEQ ID NO: 41042 - protein, 607 aa, Arabidopsis thaliana
  peptide (1)..(607): Ceres Seq. ID no. 13487432
MEFSPRFVIAFRGTVTKVDSISRDIEHDIHVIRNGLHTTTRFEIAIQAVRNIVASVGGSSVWLAGHSLGASMALLTGKTIARTGFFPECFAFNPPFLSAPIEKIKDKRIKHGIRIAGSVITAGLALAKKATQHYSQNDRALPAPPDPFEALSDWFPRLYVNPGDHLCSEYVGYFEHRNKMEEIGIGFVERVATQHSLGGMLLGGQEPVHLIPSSVLTVNLSSSRDFKQAHGIHQWWREDNKFETKPSIPPFLPPSPSRRAQSPTVKPSLPFVPALFVFGDSSVDSGTNNFLGTLARADRLPYGRDFDTHQPTGRFCNGRIPVDYLADRLGLPFVPSYLGQTGTVEDMFQGVNYASAGAGIILSSGSELGQRVSFAMQVEQFVDTFQQMILSIGEKASERLVSNSVFYISIGVNDYIHFYIRNISNVQNLYTPWNFNQFLASNMRQELKTLYNVKVRRMVVMGLPPIGCAPYYMWKYRSQNGECAEEVNSMIMESNFVMRYTVDKLNRELPGASIIYCDVFQSAMDILRNHQHYGFNETTDACCGLGRYKGWLPCISPEMACSDASGHLWWDQFHPTDAVNAILADNVWNGRHVDMCYPTNLETMLHS

SEQ ID NO: 41043 - DNA, 1253 bp, Arabidopsis thaliana
  misc_feature (1)..(1253): Ceres Seq. ID no. 12422100
  misc_feature (1)..(1253): Ortholog of  Ceres SEQ ID NO 12636774 as cited in SEQ ID NO 372
  misc_feature (1)..(1253): Ortholog of  Ceres SEQ ID NO 14311866 as cited in SEQ ID NO 51178
  misc_feature (1)..(1253): Ortholog of  Ceres SEQ ID NO 15174842 as cited in SEQ ID NO 53054
  misc_feature (1)..(1253): Ortholog of  Ceres SEQ ID NO 14310917 as cited in SEQ ID NO 53231
  misc_feature (1)..(1253): Ortholog of  Ceres SEQ ID NO 15170037 as cited in SEQ ID NO 55447
  misc_feature (1)..(1253): Ortholog of  Ceres SEQ ID NO 13582350 as cited in SEQ ID NO 56734
  misc_feature (1)..(1253): Ortholog of  Ceres SEQ ID NO 12476493 as cited in SEQ ID NO 58163
  misc_feature (1)..(1253): Ortholog of  Ceres SEQ ID NO 12582113 as cited in SEQ ID NO 58349
  misc_feature (1)..(1253): Ortholog of  Ceres SEQ ID NO 14310807 as cited in SEQ ID NO 58696
  misc_feature (1)..(1253): Ortholog of  Ceres SEQ ID NO 15175861 as cited in SEQ ID NO 59381
  misc_feature (1)..(1253): Ortholog of  Ceres SEQ ID NO 12615466 as cited in SEQ ID NO 62761
  misc_feature (1)..(1253): Ortholog of  Ceres SEQ ID NO 14314080 as cited in SEQ ID NO 63105
  misc_feature (1)..(1253): Ortholog of  Ceres SEQ ID NO 13597295 as cited in SEQ ID NO 63743
  misc_feature (1)..(1253): Ortholog of  Ceres SEQ ID NO 12617090 as cited in SEQ ID NO 64005
  misc_feature (1)..(1253): Ortholog of  Ceres SEQ ID NO 13597439 as cited in SEQ ID NO 64081
  misc_feature (1)..(1253): Ortholog of  Ceres SEQ ID NO 13597233 as cited in SEQ ID NO 64370
  misc_feature (1)..(1253): Ortholog of  Ceres SEQ ID NO 13598327 as cited in SEQ ID NO 68040
  misc_feature (1)..(1253): Ortholog of  Ceres SEQ ID NO 13599438 as cited in SEQ ID NO 0
caaagagcaaagagctaaagtccaaaaccaaacacaaaaacaaaaatctaaatttctttcttggtctgctttcaatatggctcctctacctatttcttcgattagagttgggaaaatagatgatgttcaagaactcataaaatccaaaccaaacaaagttccagagagattcattagagaagagtatgagagaggagtcgttgtgtcgtctcttaagactcatcatcttcatcatcagattcctgttattgatctctctaagctctctaaacccgacaatgatgattttttctttgagattcttaagctctcacaagcttgtgaagactggggatttttccaggttataaatcatgggatagaagtggaggttgtggaagatatagaggaagtggcttcagagttctttgatatgccattggaggagaagaagaagtatccaatggagccaggtaccgtacaaggttatggtcaagctttcatattctccgaagatcagaaacttgattggtgcaacatgtttgcccttggtgttcatcctccacaaattcgcaaccccaaactatggccctctaaaccggcccggttcagtgaaagtcttgaaggttactcaaaagagataagggaactatgcaaaaggttgttgaagtatatagcaataagcttgggtctaaaagaagagagatttgaggaaatgtttggggaggcagtgcaagcagtgaggatgaattattaccctccatgttcaagtcctgatcttgtcttaggacttagtccacattctgatggaagtgctctcactgttcttcaacagagcaagaacagttgtgttggccttcagatcctcaaagacaacacttgggtccctgttaaacctcttcccaatgcccttgtcatcaacattggtgataccattgaggtgctaagtaatgggaaatacaagagtgtagagcatagggcagtaacaaacagggaaaaggagaggcttacaatagtgacattctatgcaccaaactatgaggttgaaatagaaccaatgagtgagttggttgatgatgagaccaacccatgcaagtatagaagctacaatcatggtgactatagttatcactatgtctccaacaagctccaaggcaagaagtcccttgattttgccaagattctcaattaaactattattaatttcaccccatcaaatctccattaactagttaccacttaatttgctttctttaataagaaaaattatttgt

SEQ ID NO: 41044 - protein, 389 aa, Arabidopsis thaliana
  peptide (1)..(389): Ceres Seq. ID no. 12422101
KEQRAKVQNQTQKQKSKFLSWSAFNMAPLPISSIRVGKIDDVQELIKSKPNKVPERFIREEYERGVVVSSLKTHHLHHQIPVIDLSKLSKPDNDDFFFEILKLSQACEDWGFFQVINHGIEVEVVEDIEEVASEFFDMPLEEKKKYPMEPGTVQGYGQAFIFSEDQKLDWCNMFALGVHPPQIRNPKLWPSKPARFSESLEGYSKEIRELCKRLLKYIAISLGLKEERFEEMFGEAVQAVRMNYYPPCSSPDLVLGLSPHSDGSALTVLQQSKNSCVGLQILKDNTWVPVKPLPNALVINIGDTIEVLSNGKYKSVEHRAVTNREKERLTIVTFYAPNYEVEIEPMSELVDDETNPCKYRSYNHGDYSYHYVSNKLQGKKSLDFAKILN

SEQ ID NO: 41045 - protein, 364 aa, Arabidopsis thaliana
  peptide (1)..(364): Ceres Seq. ID no. 12422102
MAPLPISSIRVGKIDDVQELIKSKPNKVPERFIREEYERGVVVSSLKTHHLHHQIPVIDLSKLSKPDNDDFFFEILKLSQACEDWGFFQVINHGIEVEVVEDIEEVASEFFDMPLEEKKKYPMEPGTVQGYGQAFIFSEDQKLDWCNMFALGVHPPQIRNPKLWPSKPARFSESLEGYSKEIRELCKRLLKYIAISLGLKEERFEEMFGEAVQAVRMNYYPPCSSPDLVLGLSPHSDGSALTVLQQSKNSCVGLQILKDNTWVPVKPLPNALVINIGDTIEVLSNGKYKSVEHRAVTNREKERLTIVTFYAPNYEVEIEPMSELVDDETNPCKYRSYNHGDYSYHYVSNKLQGKKSLDFAKILN

SEQ ID NO: 41046 - protein, 252 aa, Arabidopsis thaliana
  peptide (1)..(252): Ceres Seq. ID no. 12422103
MPLEEKKKYPMEPGTVQGYGQAFIFSEDQKLDWCNMFALGVHPPQIRNPKLWPSKPARFSESLEGYSKEIRELCKRLLKYIAISLGLKEERFEEMFGEAVQAVRMNYYPPCSSPDLVLGLSPHSDGSALTVLQQSKNSCVGLQILKDNTWVPVKPLPNALVINIGDTIEVLSNGKYKSVEHRAVTNREKERLTIVTFYAPNYEVEIEPMSELVDDETNPCKYRSYNHGDYSYHYVSNKLQGKKSLDFAKILN

SEQ ID NO: 41047 - DNA, 738 bp, Arabidopsis thaliana
  misc_feature (1)..(738): Ceres Seq. ID no. 13575763
  misc_feature (1)..(738): Ortholog of  Ceres SEQ ID NO 13594962 as cited in SEQ ID NO 56140
  misc_feature (1)..(738): Ortholog of  Ceres SEQ ID NO 13598378 as cited in SEQ ID NO 62631
gtttcgtgtttggtcatcggtgttccgtgtttctcccaaacttttattacacgaacacaacaaaacaacacaagtgagagaaccctagattcttcttctattcccttcttccttcaagtcctttttatttctctaccaacctcgaaaacgaatcaagagattagcatcttatcgagatttaaaccatcaattaatcggctgccatggctgggagactacttgcaaatttgattgtgatgggttctgggatcattggtcgtgctgtctttcaagcctatcgtcaagcacttgctaatgcgtctaaatctggtgttgcgcaggaagcaatgcaaaatggagtacgtcaagcagggaaagccatcactgagcaagaggctaggcagattcttggtgtaaccgagaagacctcttgggaagagatattacagaaatatgacaaactgtttgagaataatgcgaaagcagggagcttttaccttcaatctaaagttcatcgagccaaagaatgtctagaagttgtgtacagaagccaaggcaacggtacacctagttaagaccttactctttttgttttccagactcaaaattcttgctcttaatgtaaaatcaagacgagttcatggtttctttgagatgatgtggaacttacaaaacggccatagttttcttcacacattaaattagtaataactaagacaggtttgctctgatcagttgatcagtgtcaaagaacctctg

SEQ ID NO: 41048 - protein, 116 aa, Arabidopsis thaliana; identical to SEQ ID NO: 37830
  peptide (1)..(116): Ceres Seq. ID no. 13575764

SEQ ID NO: 41049 - protein, 105 aa, Arabidopsis thaliana; identical to SEQ ID NO: 37831
  peptide (1)..(105): Ceres Seq. ID no. 13575765

SEQ ID NO: 41050 - protein, 76 aa, Arabidopsis thaliana
  peptide (1)..(76): Ceres Seq. ID no. 13575766
VSCLVIGVPCFSQTFITRTQQNNTSERTLDSSSIPFFLQVLFISLPTSKTNQEISILSRFKPSINRLPWLGDYLQI

SEQ ID NO: 41051 - DNA, 707 bp, Arabidopsis thaliana
  misc_feature (1)..(707): Ceres Seq. ID no. 12466508
  misc_feature (1)..(707): Ortholog of  Ceres SEQ ID NO 13595067 as cited in SEQ ID NO 55857
  misc_feature (1)..(707): Ortholog of  Ceres SEQ ID NO 12635516 as cited in SEQ ID NO 0
agagatcatcgagagggcaagagagaaaaatgggaaaggcacgtacggtgggagtgggaatggactattctccgacgagcaaattagctctccggtgggcggcggagaatctccttgaagacggcgacaccgtcatcttgattcacgtccaaccacaaaacgccgatcatacccgcaaaatcctcttcgaggaaaccggttcaccgctaattcctttggaggaatttagagaggttaatttgtctaaacagtatggacttgcttacgatcctgaggttcttgatgttcttgatactctctctagggctaaaaaggtgaaggttgtagcaaaggtgtattggggagatccaagggagaaactttgtgatgctgtcgaaaatctaaaactcgattccattgttcttggcagtcgaggtttgggttctctcaaaaggccgaatcataatggattcatgatcattatgtttgatcatagcctagttggacttgtatccctagatcatgatcaaagtgggcttataaacatggccgagatgggtagttctaaatcaatttgttggatcagaagaaatcaagaaagagacagtcgttggagcttttctgatctgcttttggatgatcacccattagattgaaaattaaatttttcattctccgctcgatggctgatttgtaaacttgttccttcatgatagaaatttatgggc

SEQ ID NO: 41052 - protein, 210 aa, Arabidopsis thaliana
  peptide (1)..(210): Ceres Seq. ID no. 12466509
RSSRGQERKMGKARTVGVGMDYSPTSKLALRWAAENLLEDGDTVILIHVQPQNADHTRKILFEETGSPLIPLEEFREVNLSKQYGLAYDPEVLDVLDTLSRAKKVKVVAKVYWGDPREKLCDAVENLKLDSIVLGSRGLGSLKRPNHNGFMIIMFDHSLVGLVSLDHDQSGLINMAEMGSSKSICWIRRNQERDSRWSFSDLLLDDHPLD

SEQ ID NO: 41053 - protein, 201 aa, Arabidopsis thaliana
  peptide (1)..(201): Ceres Seq. ID no. 12466510
MGKARTVGVGMDYSPTSKLALRWAAENLLEDGDTVILIHVQPQNADHTRKILFEETGSPLIPLEEFREVNLSKQYGLAYDPEVLDVLDTLSRAKKVKVVAKVYWGDPREKLCDAVENLKLDSIVLGSRGLGSLKRPNHNGFMIIMFDHSLVGLVSLDHDQSGLINMAEMGSSKSICWIRRNQERDSRWSFSDLLLDDHPLD

SEQ ID NO: 41054 - protein, 191 aa, Arabidopsis thaliana
  peptide (1)..(191): Ceres Seq. ID no. 12466511
MDYSPTSKLALRWAAENLLEDGDTVILIHVQPQNADHTRKILFEETGSPLIPLEEFREVNLSKQYGLAYDPEVLDVLDTLSRAKKVKVVAKVYWGDPREKLCDAVENLKLDSIVLGSRGLGSLKRPNHNGFMIIMFDHSLVGLVSLDHDQSGLINMAEMGSSKSICWIRRNQERDSRWSFSDLLLDDHPLD

SEQ ID NO: 41055 - DNA, 1841 bp, Arabidopsis thaliana
  misc_feature (1)..(1841): Ceres Seq. ID no. 12329409
  misc_feature (1)..(1841): Ortholog of  Ceres SEQ ID NO 14304867 as cited in SEQ ID NO 54375
aatctctgtttgtatatatattatctttgcgatttttatccaaatcttccaaagcttagctttttttttttttcaatttctctcttgcgttttcgattttattacaagaactttgttttgggcttcatccatcgttcaaggttcgttgaaaactatgaagaaagttgagttttttatgctccttctctgcttcatcgcagcgtcatctctagtgtctgctgatccaccaacatgtcctgctgatttgggaggcaagtgtagtgattctgatgactggcaaggtgatttcttccctgaaatccccaagattaagtatgagggaccttcgagtaagaacccacttgcttacaggtggtataacgctgaagaagagattcttgggaagaaaatgaaggattggtttagattcagtgttgcgttttggcatactttccgtgggactggaggtgatccatttggtgctgctactaagtattggccttgggaagatggtactaactctgtgtctatggctaagagaagaatgagagctaactttgagttcttgaagaaacttggagttgattagtggtgttttcatgacagagacatagcacctgatggcactacacttgaggaatctaacaaaaacttggatgaagttatcgaactcgccaaagaactccaaaaggggagcaaaatcaaaccattgtggggaacagctcagcttttcttgcatcctcgttacatgcacggaggagcgaccagctctgaagttggagtgtatgcttacgctgctgctcaggtgaagaaagccatggaggtaacacattacttaggtggtgaaaactacgttttttggggtggtcgtgaaggttatcagacactcttgaacactgatatgggaagagagcttgatcatctagccaggttctttgaagctgctgttgcttacaagaagaagattggattcaaaggtaagtctactgcttctttttcttgtcctgtattcagtcttatgggagttattgcacaataatcttctttttatcaggcacgcttttaatcgagcccaagcctcaagaacccaccaagcaccagtatgactgggatgctgcaacagctgccaatttcttgaggaaatatggtcttattgatgagtttaagctcaacattgagtgtaaccatgccacgctctctggtcacacttgtcatcacgagcttgaaactgcaagaattaatggtttacttggcaacattgatgcaaacactggcgatgctcaaactggatgggatacagatcagtttcttacagatgttggagaagcaaccatggttatgatgagtgtcatcaaaaatggtgggattgctccaggcggcttcaactttgacgctaaactgcgaagagagagtacagacgtggaagacttattcattgctcatattagtggaatggatacaatggctcgtggactgagaaacgcagtcaagatcttggaggagggaagtctaagtgaattggtacgcaagcgatatgcaacttgggactctgagcttgggaagcaaatagaagaaggaaaagctgattttgagtatcttgagaagaaagctaaagagtttggagaaccaaaggtttcttctgctaaacaggaactcgctgagatgatcttccaatctgcaatgtaagaagaagaacaagaaggctttttatgtttattaaaagtatcgtcttctttagtttccctcgcatctttgagaagtttgaaaaccaaaacattggaaaataagatgattagagaggttggtttcattatttcagttgatgtactatggtttcacactctaattactttaaattgaat

SEQ ID NO: 41056 - protein, 188 aa, Arabidopsis thaliana
  peptide (1)..(188): Ceres Seq. ID no. 12329410
ISVCIYIIFAIFIQIFQSLAFFFFQFLSCVFDFITRTLFWASSIVQGSLKTMKKVEFFMLLLCFIAASSLVSADPPTCPADLGGKCSDSDDWQGDFFPEIPKIKYEGPSSKNPLAYRWYNAEEEILGKKMKDWFRFSVAFWHTFRGTGGDPFGAATKYWPWEDGTNSVSMAKRRMRANFEFLKKLGVD

SEQ ID NO: 41057 - protein, 137 aa, Arabidopsis thaliana
  peptide (1)..(137): Ceres Seq. ID no. 12329411
MKKVEFFMLLLCFIAASSLVSADPPTCPADLGGKCSDSDDWQGDFFPEIPKIKYEGPSSKNPLAYRWYNAEEEILGKKMKDWFRFSVAFWHTFRGTGGDPFGAATKYWPWEDGTNSVSMAKRRMRANFEFLKKLGVD

SEQ ID NO: 41058 - protein, 130 aa, Arabidopsis thaliana
  peptide (1)..(130): Ceres Seq. ID no. 12329412
MLLLCFIAASSLVSADPPTCPADLGGKCSDSDDWQGDFFPEIPKIKYEGPSSKNPLAYRWYNAEEEILGKKMKDWFRFSVAFWHTFRGTGGDPFGAATKYWPWEDGTNSVSMAKRRMRANFEFLKKLGVD

SEQ ID NO: 41059 - DNA, 1650 bp, Arabidopsis thaliana
  misc_feature (1)..(1650): Ceres Seq. ID no. 12330640
  misc_feature (1)..(1650): Ortholog of  Ceres SEQ ID NO 14310803 as cited in SEQ ID NO 58463
  misc_feature (1)..(1650): Ortholog of  Ceres SEQ ID NO 13663769 as cited in SEQ ID NO 60793
aaaattgggatcattttgataggagcgactctgttccttcgccgccgatacgcactcttcttcatcggatttgttcctctggggttcgcttctggaagaaatatgggtgagactctcatcaccaccctgtctatggagaactatcacccgtcaacactgctatccatggattcaggtgcttttactcatgaagaatcagagagggctatgaatgggtctctcatacttactggaccgcctgatattaatctaccactctcttctgaagctaggccatctctgcttttgtggaacgaacactgtgacatcttagacgttggacttggacctcagctatatgagcctgaggctgttgttcatgtgcctaaggttgctaagaagtacaacaagcgtgttgatagtgcatggggtgcttggcttttcttcagtttctacttcaaacctgttttggatgagaagtctaaaagtaagttaacgagggacagcaatggcttgtctgggtatgataaatctgatttgcagctcgactcgttcttggttcagcatgacatggagaatatgtacatgtgggtgttcaaggaaaagcctgaaaatgcccttggcaagatgcagctgcggagctacatgaacggacactcacgcgagggtgagcgtcctttcccttttagtgtggacaaaggttttgtccgctctcataggatgcagaggaaacattaccgtggtctctctaacccacagtgcctccatggaatcgaagttgtttattcacccaacctttctgtactcagcgaggatgaaaagaagaagtggacagaactcacaggtcgagatgtgaactttgctattccagctgaagctagtgattacggttcatggaggaatctcccaaacaccgaatttgaggctgagagacctcttcctctggctaaagctaacgggcacacccacctgaaaaagctgaatggtacctgtctaaatctgtctacacattccccagaccatgcagttgatacagtggaagttcaactcgctggtagcaataaacgcaaagggattgtcttgctctaggaaactgcgatgactcgagctcaagtgagaaatctctggacatgaaaatccatgcaacggagctgccttggtcaaatgattttagcggggtgatgaagaatgtgtacggtccagtcacagccgcaaaaacgatatatgaagacgacagagggttcttgatagttatgagcctgccattttttgattccggaagggtgaaagtgacatggaggaatacaccagcacatggaatagtgaagatatcatgtgtaagtacagcatgtgagccattcatcaagagacatgatagaacatttaagctaacagatccaacaccagagcattgcccaccgggggaatttgtccgcgaagtctccctgccgaacaggattccagatgacgccaagcttgaagcttaccgggacgaaacaggaacaacactagaggttttagtgcctaaacaccgaatgggaccagaggagcatgaggttcgcgtctgtctccgaccgttcgtgctagagtgagattgtagcgcataacttcttaaaagaattttattgttcatgtatcattggattattcatatttaatcatatttactcc

SEQ ID NO: 41060 - protein, 355 aa, Arabidopsis thaliana
  peptide (1)..(355): Ceres Seq. ID no. 12330641
KIGIILIGATLFLRRRYALFFIGFVPLGFASGRNMGETLITTLSMENYHPSTLLSMDSGAFTHEESERAMNGSLILTGPPDINLPLSSEARPSLLLWNEHCDILDVGLGPQLYEPEAVVHVPKVAKKYNKRVDSAWGAWLFFSFYFKPVLDEKSKSKLTRDSNGLSGYDKSDLQLDSFLVQHDMENMYMWVFKEKPENALGKMQLRSYMNGHSREGERPFPFSVDKGFVRSHRMQRKHYRGLSNPQCLHGIEVVYSPNLSVLSEDEKKKWTELTGRDVNFAIPAEASDYGSWRNLPNTEFEAERPLPLAKANGHTHLKKLNGTCLNLSTHSPDHAVDTVEVQLAGSNKRKGIVLL

SEQ ID NO: 41061 - protein, 321 aa, Arabidopsis thaliana
  peptide (1)..(321): Ceres Seq. ID no. 12330642
MGETLITTLSMENYHPSTLLSMDSGAFTHEESERAMNGSLILTGPPDINLPLSSEARPSLLLWNEHCDILDVGLGPQLYEPEAVVHVPKVAKKYNKRVDSAWGAWLFFSFYFKPVLDEKSKSKLTRDSNGLSGYDKSDLQLDSFLVQHDMENMYMWVFKEKPENALGKMQLRSYMNGHSREGERPFPFSVDKGFVRSHRMQRKHYRGLSNPQCLHGIEVVYSPNLSVLSEDEKKKWTELTGRDVNFAIPAEASDYGSWRNLPNTEFEAERPLPLAKANGHTHLKKLNGTCLNLSTHSPDHAVDTVEVQLAGSNKRKGIVLL

SEQ ID NO: 41062 - protein, 311 aa, Arabidopsis thaliana
  peptide (1)..(311): Ceres Seq. ID no. 12330643
MENYHPSTLLSMDSGAFTHEESERAMNGSLILTGPPDINLPLSSEARPSLLLWNEHCDILDVGLGPQLYEPEAVVHVPKVAKKYNKRVDSAWGAWLFFSFYFKPVLDEKSKSKLTRDSNGLSGYDKSDLQLDSFLVQHDMENMYMWVFKEKPENALGKMQLRSYMNGHSREGERPFPFSVDKGFVRSHRMQRKHYRGLSNPQCLHGIEVVYSPNLSVLSEDEKKKWTELTGRDVNFAIPAEASDYGSWRNLPNTEFEAERPLPLAKANGHTHLKKLNGTCLNLSTHSPDHAVDTVEVQLAGSNKRKGIVLL

SEQ ID NO: 41063 - DNA, 1280 bp, Arabidopsis thaliana
  misc_feature (1)..(1280): Ceres Seq. ID no. 12329398
  misc_feature (1)..(1280): Ortholog of  Ceres SEQ ID NO 12364737 as cited in SEQ ID NO 51089
  misc_feature (1)..(1280): Ortholog of  Ceres SEQ ID NO 14311515 as cited in SEQ ID NO 51680
  misc_feature (1)..(1280): Ortholog of  Ceres SEQ ID NO 13595567 as cited in SEQ ID NO 56760
  misc_feature (1)..(1280): Ortholog of  Ceres SEQ ID NO 13655302 as cited in SEQ ID NO 63307
  misc_feature (1)..(1280): Ortholog of  Ceres SEQ ID NO 13597380 as cited in SEQ ID NO 64054
  misc_feature (1)..(1280): Ortholog of  Ceres SEQ ID NO 12625474 as cited in SEQ ID NO 64169
  misc_feature (1)..(1280): Ortholog of  Ceres SEQ ID NO 13597502 as cited in SEQ ID NO 64681
gaaagagataaagatagtaaccaagcatgaaaagtttgttgatttgtcttgtgttgttagagcttgtctggttaggcaatggccaatctagagatcatcaacctcttgctccagctttctttgtctttggagattctttagttgatagtggaaacaacaattacattccaactcttgcacgagctaattatttcccttatggaattgattttggcttccccactggtcgtttctgcaatggccgtaccgttgttgattatggagcaacgtacctcggcttgccattggtgccaccatacttatctcctttatccattgggcaaaatgccttacgaggggttaactacgcatctgcagcagctgggattttagatgaaaccggtcgacattatggagcaagaactacatttaatggacagatatcgcagtttgagattacgatcgagttacgcctccggcgtttctttcaaaaccctgcagatctgagaaagtatcttgcaaaatcgataattgggatcaatataggaagcaatgactatatcaacaactaccttatgcctgagagatactccaccagccaaacctacagtggagaagattatgcagatctcttgatcaagactctctcagctcaaatatccagactatacaacttaggtgcaagaaaaatggtgttagctgggtcaggaccattaggttgcatacctagtcagctatctatggtaactggcaacaacaccagcgggtgtgtgacaaaaatcaacaatatggtttcaatgttcaatagccgtctgaaagatctagcaaatactctcaacacaactctgccaggatctttctttgtctatcaaaacgtctttgatctatttcatgatatggttgtgaatccttctagatatggtcttgtagtatcaaacgaagcgtgctgcggtaacgggagatatggaggagccttaacatgccttccattgcagcaaccttgcttggataggaatcaatatgtcttttgggatgcatttcatccaacagaaactgccaacaaaataatagctcacaataccttcagcaagtctgcaaactactcctaccctatcagtgtctatgaattagctaaattgtagagaaatgtatctcaaagctagattacctccccatttcaagagtctcctcggttttctagtttctagttagaagacattaagtatgggatttgtatgtaccaattgcccaaatgtttaagatcacatctatattccaatgttataacttaaaactttctc

SEQ ID NO: 41064 - protein, 364 aa, Arabidopsis thaliana
  peptide (1)..(364): Ceres Seq. ID no. 12329399
MKSLLICLVLLELVWLGNGQSRDHQPLAPAFFVFGDSLVDSGNNNYIPTLARANYFPYGIDFGFPTGRFCNGRTVVDYGATYLGLPLVPPYLSPLSIGQNALRGVNYASAAAGILDETGRHYGARTTFNGQISQFEITIELRLRRFFQNPADLRKYLAKSIIGINIGSNDYINNYLMPERYSTSQTYSGEDYADLLIKTLSAQISRLYNLGARKMVLAGSGPLGCIPSQLSMVTGNNTSGCVTKINNMVSMFNSRLKDLANTLNTTLPGSFFVYQNVFDLFHDMVVNPSRYGLVVSNEACCGNGRYGGALTCLPLQQPCLDRNQYVFWDAFHPTETANKIIAHNTFSKSANYSYPISVYELAKL

SEQ ID NO: 41065 - protein, 188 aa, Arabidopsis thaliana
  peptide (1)..(188): Ceres Seq. ID no. 12329400
MPERYSTSQTYSGEDYADLLIKTLSAQISRLYNLGARKMVLAGSGPLGCIPSQLSMVTGNNTSGCVTKINNMVSMFNSRLKDLANTLNTTLPGSFFVYQNVFDLFHDMVVNPSRYGLVVSNEACCGNGRYGGALTCLPLQQPCLDRNQYVFWDAFHPTETANKIIAHNTFSKSANYSYPISVYELAKL

SEQ ID NO: 41066 - DNA, 777 bp, Arabidopsis thaliana
  misc_feature (1)..(777): Ceres Seq. ID no. 12396300
  misc_feature (1)..(777): Ortholog of  Ceres SEQ ID NO 15173263 as cited in SEQ ID NO 64606
ctctctcttaggttttttttcccttctcccaatctcatcttctccgaaaacctttcttctctcaaatttctgtgaaaacatgtctgacgacgagcaccactttgaggccagcgaatccggagcttccaagacctatcctcaatcagccggtaacatccgtaaaggtggtcacatcgtcatcaaaaaccgtccctgcaaggttgttgaggtttcgacttccaaaactggcaagcacggtcacgccaaatgtcactttgttgctattgatatcttcactgctaagaagcttgaagatattgttccatcttcccacaattgtgatgttccacatgtgaaccgtgttgattaccagttgattgatatcactgaggatggcttcgtgagccttctcactgacagtggtggcaccaaggatgatctcaagcttcccaccgatgatggtctcaccgcccagttgttgtgttttgttaatgcacatgaggcttggattcgatgagggaaaggatattgtggtgtctgtcatgtcttccatgggagaggagcagatctgtgccgtcaaggaagttggtggtggcaagtaaacaagtatcattcgatatattattaccagtttgacaacggacgtcaatgttataagaaccaaaagatgtttttctttttcctaatttagaccctttgtgtgtgtttcttgttgcaagacaaccatatctattggttttggattgttggaaaagtttgtgttgaaacattcaaagtttcttatgagatgttattctc

SEQ ID NO: 41067 - protein, 164 aa, Arabidopsis thaliana
  peptide (1)..(164): Ceres Seq. ID no. 12396301
SLLGFFSLLPISSSPKTFLLSNFCENMSDDEHHFEASESGASKTYPQSAGNIRKGGHIVIKNRPCKVVEVSTSKTGKHGHAKCHFVAIDIFTAKKLEDIVPSSHNCDVPHVNRVDYQLIDITEDGFVSLLTDSGGTKDDLKLPTDDGLTAQLLCFVNAHEAWIR

SEQ ID NO: 41068 - protein, 138 aa, Arabidopsis thaliana
  peptide (1)..(138): Ceres Seq. ID no. 12396302
MSDDEHHFEASESGASKTYPQSAGNIRKGGHIVIKNRPCKVVEVSTSKTGKHGHAKCHFVAIDIFTAKKLEDIVPSSHNCDVPHVNRVDYQLIDITEDGFVSLLTDSGGTKDDLKLPTDDGLTAQLLCFVNAHEAWIR

SEQ ID NO: 41069 - DNA, 883 bp, Arabidopsis thaliana
  misc_feature (1)..(883): Ceres Seq. ID no. 12371464
  misc_feature (1)..(883): Ortholog of  Ceres SEQ ID NO 12619999 as cited in SEQ ID NO 66123
  misc_feature (1)..(883): Ortholog of  Ceres SEQ ID NO 13656436 as cited in SEQ ID NO 69154
aaaacaaaagaggaacttgagaattttatgcttgagacaaaatggcagaagatacgtacgaggaagagtgcgactacttgtttaaggcggtgttgatcggagactcagccgtcggaaaatcaaacctcttgtctagattttctaaagacgagttccggtttgactctaaaccaaccatcggagtagagtttgcttaccggaatgttcacgtcggagataaaatcatcaaggctcagatttgggacaccgccggccaagaaagatttcgagcaatcacaagttcgtactaccgtggagcattaggggcattactgatttacgacatcactagacgaacaactttcgacaacatcaagaaatggcttttcgagcttagagacttcgccaatcccgaaaccgtcgttgtcctcgtcggaaacaaatctgatctccgacaatctagagaagttgaagaagacgagggtaagactctagcagaatcagaaggtctctacttcctcgagacttcggctttagagaatgttaacgtcgaagaagcgtttctagtgatgatcggacggatacatgaggttgttactcagaggatagcttcggaaaacaaatccaacggtgctgcgacgcctcacattaacggtaatgggaacggtacggtccttccggttggtaaagaaattgtgaatatacacgaagtcactgctactcaacccttattaagctcatcttccaactgttgttttaagtaaataattaatgtatttttttcgtttattgttttggaatactttgatgatgtttttatttgcctgtgtattcgtgaaaattttgccttggttgagtacatgaatttaaatcatacaattatatccaaataaatatgaaaatc

SEQ ID NO: 41070 - protein, 233 aa, Arabidopsis thaliana
  peptide (1)..(233): Ceres Seq. ID no. 12371465
MAEDTYEEECDYLFKAVLIGDSAVGKSNLLSRFSKDEFRFDSKPTIGVEFAYRNVHVGDKIIKAQIWDTAGQERFRAITSSYYRGALGALLIYDITRRTTFDNIKKWLFELRDFANPETVVVLVGNKSDLRQSREVEEDEGKTLAESEGLYFLETSALENVNVEEAFLVMIGRIHEVVTQRIASENKSNGAATPHINGNGNGTVLPVGKEIVNIHEVTATQPLLSSSSNCCFK

SEQ ID NO: 41071 - DNA, 1168 bp, Arabidopsis thaliana
  misc_feature (1)..(1168): Ceres Seq. ID no. 13499832
  misc_feature (1)..(1168): Ortholog of  Ceres SEQ ID NO 13594671 as cited in SEQ ID NO 51800
  misc_feature (1)..(1168): Ortholog of  Ceres SEQ ID NO 12784099 as cited in SEQ ID NO 66784
aacttgagatttgagaataagaaaagttgaaatttgtaaaagatatgagaaattagtaaattccagaaacttattagaagcggcggatcgaattcgcgacgagcgttccattagggtttcgaatcaacatcaacaaacgacgagagaaaactttttaaaacatgtacggaggcgattttgacggcaacgctgctttcgccggcggcggcttcatgccttctcaggcgactacgcaagcccatgaatcctcatcttccctcaagaaccgcgatgtacgtaccttgcttcccctgacactgaagcagttgagcagcgcatcaaccactggcgaatcaaatttctctattgatggcgttgatattaaaactgttgtaatcgttggacggatttctagaatggagaacagaatcactcaggtcgattttgttgttgatgacggtacaggctgggttgattgtgtcagatggtgtcacgctcggcaagaaactgaagaaatggaagcagtcaagctgggaatgtatgttcgcttacatggacacctgaaaatttttcaagggaaacgatctgtgaatgttttttcagtcaggcctgtcactgacttcaatgagattgtacaccactttaccgagtgtatgtatgtccacatgtacaacaccaagttacggggtggttctattactcaagatactgctactcctaggccccaaatgccatattcaacaatgccaacccctgcaaagccctaccaaaccggtccatctaatcagttcccgaaccaattcaatgattcaatgcatggtgtaaagcagacggtcttgaattacctgaatcaacctatgcacattgtatctgaagctggagttcactgtgatataattgcccgtgaactcaggattccgctgcttcaagtcaaggaagcgttagaacagctctcaaacgatggttgcatatactcgactttggacgagacatgcttcaaatcgactgctaacgcttgatgaaaattgatttatatgtcaacacatatcaatcctcctctcatgttcaaaagtcttttgtataggccctaaggtagaacaatatgtagttttaagactaaaaatctttcttatggcttttggatttttttaaagggaactaaactcaaaagttcaaaatcattttcgcc

SEQ ID NO: 41072 - protein, 278 aa, Arabidopsis thaliana
  peptide (1)..(278): Ceres Seq. ID no. 13499833
MYGGDFDGNAAFAGGGFMPSQATTQAHESSSSLKNRDVRTLLPLTLKQLSSASTTGESNFSIDGVDIKTVVIVGRISRMENRITQVDFVVDDGTGWVDCVRWCHARQETEEMEAVKLGMYVRLHGHLKIFQGKRSVNVFSVRPVTDFNEIVHHFTECMYVHMYNTKLRGGSITQDTATPRPQMPYSTMPTPAKPYQTGPSNQFPNQFNDSMHGVKQTVLNYLNQPMHIVSEAGVHCDIIARELRIPLLQVKEALEQLSNDGCIYSTLDETCFKSTANA

SEQ ID NO: 41073 - protein, 261 aa, Arabidopsis thaliana
  peptide (1)..(261): Ceres Seq. ID no. 13499834
MPSQATTQAHESSSSLKNRDVRTLLPLTLKQLSSASTTGESNFSIDGVDIKTVVIVGRISRMENRITQVDFVVDDGTGWVDCVRWCHARQETEEMEAVKLGMYVRLHGHLKIFQGKRSVNVFSVRPVTDFNEIVHHFTECMYVHMYNTKLRGGSITQDTATPRPQMPYSTMPTPAKPYQTGPSNQFPNQFNDSMHGVKQTVLNYLNQPMHIVSEAGVHCDIIARELRIPLLQVKEALEQLSNDGCIYSTLDETCFKSTANA

SEQ ID NO: 41074 - protein, 200 aa, Arabidopsis thaliana
  peptide (1)..(200): Ceres Seq. ID no. 13499835
MENRITQVDFVVDDGTGWVDCVRWCHARQETEEMEAVKLGMYVRLHGHLKIFQGKRSVNVFSVRPVTDFNEIVHHFTECMYVHMYNTKLRGGSITQDTATPRPQMPYSTMPTPAKPYQTGPSNQFPNQFNDSMHGVKQTVLNYLNQPMHIVSEAGVHCDIIARELRIPLLQVKEALEQLSNDGCIYSTLDETCFKSTANA

SEQ ID NO: 41075 - DNA, 1276 bp, Arabidopsis thaliana
  misc_feature (1)..(1276): Ceres Seq. ID no. 12482073
  misc_feature (1)..(1276): Ortholog of  Ceres SEQ ID NO 14304623 as cited in SEQ ID NO 52909
agtaattagaaaactcatcgtcctcattgagctgcagatcccataatctctctcgccaatcatctcccttgcatcttaatcaaaggtgtattatatccgcaacaagatcattagagaaggctgttacaagtttgttttatgaccgcgtaacagctcacttaataattgatgtggcctctttgttttctgcttaacaagctattaagagttgaggagaggaatcaggggatattagacggaaatggagattcgacttttccgaaatactgcctattcgatgatcccttggtgagtgatggaaagtacagagatgcagggttgccatcctcgtcccacatggatgtccctcatgtacatcagttagcttcatgggattgcggtctcgcttgtgttcttatggttctcagagcaagtggcatcgcaagctgcactcttgaggatttggctgagatatgctccacaaatagcatttggactgtcgatctcgcatatttactgcagaagttctgtgtggaattttcatattacacgataacatttggagcaaacccgaattattccatagaggaattttacaaggagcagctccctgaagatctggtgcgtgtcgatttgctcttcaggaaagcacatgaatctggcattattatacagtgcagatcagttagtatccatgagatttcttgtttgctattgtcggggaactatattgccattgcgttagtcgaccaggacaagctaagcaagtcttggttggaggaagtgcttgtctctggtcttcactccagcaattcttgttacactggtcactatgtcgtgatatgtggctatgatgctgttagggatgagttcgagatcagagatcccgccagttccaagatacatgagaggatctcgtcaaaatgcctggagaatgcccggaaatcgtttggcacagacgaagatcttctcctgataaacttggagaatatgaggaaccagaacggatattagaatagttgtcatcatcatcatcaaatcagttctggatgagaatgaaacctgagtgttttctcccagaagaacatgaggtgaaaagtatacgtctctatacatacgtctttacatatggatgctgccaaagaagaaggaaaagatatacatatgtcatgaaatatctcagtatctgtttgcgtttatgagattcttgtgttggcagttataattccttgttgtacaaattggtgaatagaaaagatttgattgattaaagtgttcgagcaataagagtgattcc

SEQ ID NO: 41076 - protein, 274 aa, Arabidopsis thaliana
  peptide (1)..(274): Ceres Seq. ID no. 12482074
MWPLCFLLNKLLRVEERNQGILDGNGDSTFPKYCLFDDPLVSDGKYRDAGLPSSSHMDVPHVHQLASWDCGLACVLMVLRASGIASCTLEDLAEICSTNSIWTVDLAYLLQKFCVEFSYYTITFGANPNYSIEEFYKEQLPEDLVRVDLLFRKAHESGIIIQCRSVSIHEISCLLLSGNYIAIALVDQDKLSKSWLEEVLVSGLHSSNSCYTGHYVVICGYDAVRDEFEIRDPASSKIHERISSKCLENARKSFGTDEDLLLINLENMRNQNGY

SEQ ID NO: 41077 - protein, 218 aa, Arabidopsis thaliana
  peptide (1)..(218): Ceres Seq. ID no. 12482075
MDVPHVHQLASWDCGLACVLMVLRASGIASCTLEDLAEICSTNSIWTVDLAYLLQKFCVEFSYYTITFGANPNYSIEEFYKEQLPEDLVRVDLLFRKAHESGIIIQCRSVSIHEISCLLLSGNYIAIALVDQDKLSKSWLEEVLVSGLHSSNSCYTGHYVVICGYDAVRDEFEIRDPASSKIHERISSKCLENARKSFGTDEDLLLINLENMRNQNGY

SEQ ID NO: 41078 - protein, 198 aa, Arabidopsis thaliana
  peptide (1)..(198): Ceres Seq. ID no. 12482076
MVLRASGIASCTLEDLAEICSTNSIWTVDLAYLLQKFCVEFSYYTITFGANPNYSIEEFYKEQLPEDLVRVDLLFRKAHESGIIIQCRSVSIHEISCLLLSGNYIAIALVDQDKLSKSWLEEVLVSGLHSSNSCYTGHYVVICGYDAVRDEFEIRDPASSKIHERISSKCLENARKSFGTDEDLLLINLENMRNQNGY

SEQ ID NO: 41079 - DNA, 1595 bp, Arabidopsis thaliana
  misc_feature (1)..(1595): Ceres Seq. ID no. 12558455
  misc_feature (1)..(1595): Ortholog of  Ceres SEQ ID NO 13646499 as cited in SEQ ID NO 20565
gttagtagaaaaggagaagacacaactgtggaattgaaactgaacagcgaaggaggagccgcttgaagaagaacggggcatgggtcgactctcatgggccagtccgattcagagattccgtttcttctcttacttatctcagctgaatggaagaagaagcgttttggcttgctctggctatgaaaatcgttatctttcgtctttagttgaagcttcagattgtgaacttgatgaagttccagatgatagaaaagtagcggagaaagacactgctctacatttagcattgtcacagctttcaggtgattttgataaagactctaagttgtcattgcagcggttttacagaaaaaggagagtttctgtgatatccacgggttccctcaaccttgatctagctcttggagttggaggattgccaaagggaagaatggttgaggtttacggaaaagaagcatctggaaagacaactctagctctgcatatcatcaaggaagctcaaaagcttggaggttattgcgcttatcttgatgcagagaatgccatggatccttctctagcagaatcaataggtgtgaacacagaagagcttctgatatcacgacctagttctgctgaaaagatgctaaatattgttgatgtgctgaccaagagtgggtcagtagacgtaattgtggtagacagtgttgctgctcttgcccctcaatgtgaacttgatgctcctgtaggagaaagatacagagacacacaatcaagaataatgacacaggcgctcagaaaaatccattactcagttggctattctcagacactgatcgtttttcttaatcaggtcagatcacatgtgaaatctaacatgcatttcccgcacgccgaagaagtgacttgtggaggaaacgcattaccgtttcatgcagctatacgtctcaaaatgataagaaccgggctaataaagactgccaataagataagtggtctcaatgtctgcgtccaagtggtgaagaataaactggcgcccggaaagaagaaatctgaattggggattcactttggtcatggtttctacgtggagcgagaggtattagaattggcttgtgagcatggagttatcttaagagaaggaactagctatttcattgaaggcgaggtcattgaagggaaagacgcagctgagaagtatctggtggaaaataaagaggctctcgatactgtcgttgcaatcctgaggaaccagctcttcaagatgtgacagagggaatgtatttcgagttctccaaacaaatgtgtatgtttcgataaagccaaaaaccaattgagcttttcatcaaccctgacgtccctattaaacaacgtggaagggacagaagcagttagggaatgctaactaaaaggaggatcagagaagatgtgcaaaagctggttgtcattagatgatatcatcatagtcattgttcttgttagagattctccatcatgtatactgcagagattccggtttccttaatgggtttgaaccgttttatcaagcattctttccttttgtcttgaaccaatcatcagttcatttattggcttatggaaagcagtttttcttg

SEQ ID NO: 41080 - protein, 389 aa, Arabidopsis thaliana
  peptide (1)..(389): Ceres Seq. ID no. 12558456
MGRLSWASPIQRFRFFSYLSQLNGRRSVLACSGYENRYLSSLVEASDCELDEVPDDRKVAEKDTALHLALSQLSGDFDKDSKLSLQRFYRKRRVSVISTGSLNLDLALGVGGLPKGRMVEVYGKEASGKTTLALHIIKEAQKLGGYCAYLDAENAMDPSLAESIGVNTEELLISRPSSAEKMLNIVDVLTKSGSVDVIVVDSVAALAPQCELDAPVGERYRDTQSRIMTQALRKIHYSVGYSQTLIVFLNQVRSHVKSNMHFPHAEEVTCGGNALPFHAAIRLKMIRTGLIKTANKISGLNVCVQVVKNKLAPGKKKSELGIHFGHGFYVEREVLELACEHGVILREGTSYFIEGEVIEGKDAAEKYLVENKEALDTVVAILRNQLFKM

SEQ ID NO: 41081 - protein, 272 aa, Arabidopsis thaliana
  peptide (1)..(272): Ceres Seq. ID no. 12558457
MVEVYGKEASGKTTLALHIIKEAQKLGGYCAYLDAENAMDPSLAESIGVNTEELLISRPSSAEKMLNIVDVLTKSGSVDVIVVDSVAALAPQCELDAPVGERYRDTQSRIMTQALRKIHYSVGYSQTLIVFLNQVRSHVKSNMHFPHAEEVTCGGNALPFHAAIRLKMIRTGLIKTANKISGLNVCVQVVKNKLAPGKKKSELGIHFGHGFYVEREVLELACEHGVILREGTSYFIEGEVIEGKDAAEKYLVENKEALDTVVAILRNQLFKM

SEQ ID NO: 41082 - protein, 234 aa, Arabidopsis thaliana
  peptide (1)..(234): Ceres Seq. ID no. 12558458
MDPSLAESIGVNTEELLISRPSSAEKMLNIVDVLTKSGSVDVIVVDSVAALAPQCELDAPVGERYRDTQSRIMTQALRKIHYSVGYSQTLIVFLNQVRSHVKSNMHFPHAEEVTCGGNALPFHAAIRLKMIRTGLIKTANKISGLNVCVQVVKNKLAPGKKKSELGIHFGHGFYVEREVLELACEHGVILREGTSYFIEGEVIEGKDAAEKYLVENKEALDTVVAILRNQLFKM

SEQ ID NO: 41083 - DNA, 1205 bp, Arabidopsis thaliana
  misc_feature (1)..(1205): Ceres Seq. ID no. 12348459
  misc_feature (1)..(1205): Ortholog of  Ceres SEQ ID NO 13532807 as cited in SEQ ID NO 53012
  misc_feature (1)..(1205): Ortholog of  Ceres SEQ ID NO 15176375 as cited in SEQ ID NO 53238
  misc_feature (1)..(1205): Ortholog of  Ceres SEQ ID NO 14316507 as cited in SEQ ID NO 57397
  misc_feature (1)..(1205): Ortholog of  Ceres SEQ ID NO 13663060 as cited in SEQ ID NO 60964
  misc_feature (1)..(1205): Ortholog of  Ceres SEQ ID NO 13598532 as cited in SEQ ID NO 65204
  misc_feature (1)..(1205): Ortholog of  Ceres SEQ ID NO 13656849 as cited in SEQ ID NO 65764
  misc_feature (1)..(1205): Ortholog of  Ceres SEQ ID NO 13655298 as cited in SEQ ID NO 68914
  misc_feature (1)..(1205): Ortholog of  Ceres SEQ ID NO 13656501 as cited in SEQ ID NO 69206
acatcatcttcattaatctgatcaaataatagggttaatcaaaagtccagaaaccaacacagttcaattttacgaaaactctcagaaatggagaagtacgagaagctagagaaggtcggagaaggaacatacgggaaagtctacaaagcgatggagaaaggaactggtaagcttgttgctctgaagaaaactcgtctcgagatggacgaagaaggtattccaccaactgctcttcgtgagatctcgcttctccagatgttatcaacatcgatctatgttgttcgattactctgcgtcgaacatgttcatcaaccatcaaccaaatctcaatctaccaaatccaatctctatctcgttttcgagtatctcgatactgatcttaagaaattcatcgattcgtataggaaaggacctaatcctaagcctcttgagccttttttgattcagaagttgatgtttcagctttgtaaaggtgttgcgcattgtcatagtcatggtgtgcttcaccgtgatcttaaaccgcagaatcttcttctggtgaaagataaagagcttcttaagattgctgatttgggtcttggtcgtgcttttactgttcctcttaagtcttatacgcatgagattgttactctttggtatagagctcctgaagttcttcttggatctactcattattcaactggtgttgacatgtggtctgttggttgtatctttgctgagatggttcggaggcaagctcttttccctggtgattctgagtttcgacaattgcttcatatcttcaggttgctaggaacaccaactgagcagcaatggccgggtgtttccacactgcgtgactggcatgtttaccctaagtgggagccgcaagacttaactcttgctgttccttctctttcacctcaaggagttgatcttctcacgaaaatgctcaagtacaatccagccgaaagaatttcagcaaaaacagcacttgatcacccatattttgacagccttgacaagtctcagttctgaagttcattgctgtatctgttgtcatcgtcttggtgaatttaaacatttgatctatctttgtttccgacacattagtgtcttatgtttggtttagagatttgtagtctttcagaagaaactggtaaagcttgtattctcaagtgaatgtaaaacacaatggtgtggtagcaatgagatgattttctatc

SEQ ID NO: 41084 - protein, 309 aa, Arabidopsis thaliana
  peptide (1)..(309): Ceres Seq. ID no. 12348460
MEKYEKLEKVGEGTYGKVYKAMEKGTGKLVALKKTRLEMDEEGIPPTALREISLLQMLSTSIYVVRLLCVEHVHQPSTKSQSTKSNLYLVFEYLDTDLKKFIDSYRKGPNPKPLEPFLIQKLMFQLCKGVAHCHSHGVLHRDLKPQNLLLVKDKELLKIADLGLGRAFTVPLKSYTHEIVTLWYRAPEVLLGSTHYSTGVDMWSVGCIFAEMVRRQALFPGDSEFRQLLHIFRLLGTPTEQQWPGVSTLRDWHVYPKWEPQDLTLAVPSLSPQGVDLLTKMLKYNPAERISAKTALDHPYFDSLDKSQF

SEQ ID NO: 41085 - protein, 288 aa, Arabidopsis thaliana
  peptide (1)..(288): Ceres Seq. ID no. 12348461
MEKGTGKLVALKKTRLEMDEEGIPPTALREISLLQMLSTSIYVVRLLCVEHVHQPSTKSQSTKSNLYLVFEYLDTDLKKFIDSYRKGPNPKPLEPFLIQKLMFQLCKGVAHCHSHGVLHRDLKPQNLLLVKDKELLKIADLGLGRAFTVPLKSYTHEIVTLWYRAPEVLLGSTHYSTGVDMWSVGCIFAEMVRRQALFPGDSEFRQLLHIFRLLGTPTEQQWPGVSTLRDWHVYPKWEPQDLTLAVPSLSPQGVDLLTKMLKYNPAERISAKTALDHPYFDSLDKSQF

SEQ ID NO: 41086 - protein, 271 aa, Arabidopsis thaliana
  peptide (1)..(271): Ceres Seq. ID no. 12348462
MDEEGIPPTALREISLLQMLSTSIYVVRLLCVEHVHQPSTKSQSTKSNLYLVFEYLDTDLKKFIDSYRKGPNPKPLEPFLIQKLMFQLCKGVAHCHSHGVLHRDLKPQNLLLVKDKELLKIADLGLGRAFTVPLKSYTHEIVTLWYRAPEVLLGSTHYSTGVDMWSVGCIFAEMVRRQALFPGDSEFRQLLHIFRLLGTPTEQQWPGVSTLRDWHVYPKWEPQDLTLAVPSLSPQGVDLLTKMLKYNPAERISAKTALDHPYFDSLDKSQF

SEQ ID NO: 41087 - DNA, 1085 bp, Arabidopsis thaliana
  misc_feature (1)..(1085): Ceres Seq. ID no. 12329021
  misc_feature (1)..(1085): Ortholog of  Ceres SEQ ID NO 12617391 as cited in SEQ ID NO 64114
  misc_feature (1)..(1085): Ortholog of  Ceres SEQ ID NO 13595922 as cited in SEQ ID NO 69293
  misc_feature (1)..(1085): Ortholog of  Ceres SEQ ID NO 12635496 as cited in SEQ ID NO 0
gatcaacatctccttgaagttgtttcataagaataagagctataaaagaggataaaaccaaaatttgaatttttttcttctatctctctccccaagatatatagcacaagaaaatgaagataccatcaattggctatgtctttttccttatcttcatctctattacaattgtttcgagttcaccagatcatggagaagttgaggacgaaacgcagtttaactacgagaagaaaggagagaaggggccagagaactggggaagactaaagccagagtgggcaatgtgtggaaaaggcaacatgcagtctccgattgatcttacggacaaaagagtcttgattgatcataatcttggataccttcgtagccagtatttaccttcaaatgccaccattaagaacagaggccatgatatcatgatgaaatttgaaggaggaaatgcaggtttaggtatcactattaatggtactgaatataaacttcaacagattcattggcactctccttccgaacacacactcaatgccaaaaggtttgttcttgaggaacacatggttcatcagagcaaagatggacgcaacgctgttgtcgctttcttttacaaattgggaaaacctgactattttctcctcacgttggaaagatacttgaagaggataactgatacacacgaatcccaggaatttgtcgagatggttcatcctagaacattcggttttgaatcaaaacactattatagatttatcggatcacttacaactccaccgtgttctgaaaatgtgatttggacgatttccaaagagatgaggactgtgacattaaaacaattgatcatgcttcgagtgactgtacacgatcaatctaactcaaatgctagaccgcttcagcgtaaaaatgagcgtccggtggcactttacataccaacatggcatagtaaactatattaaatatttaagtttggtttatattctttctagtaatctttgaaatattgtaagagataatgcttctaataaataacattggatttattggaattaatgtattgaaaaaactatgcaaatactacagtgtattttggaacg

SEQ ID NO: 41088 - protein, 277 aa, Arabidopsis thaliana
  peptide (1)..(277): Ceres Seq. ID no. 12329022
MKIPSIGYVFFLIFISITIVSSSPDHGEVEDETQFNYEKKGEKGPENWGRLKPEWAMCGKGNMQSPIDLTDKRVLIDHNLGYLRSQYLPSNATIKNRGHDIMMKFEGGNAGLGITINGTEYKLQQIHWHSPSEHTLNAKRFVLEEHMVHQSKDGRNAVVAFFYKLGKPDYFLLTLERYLKRITDTHESQEFVEMVHPRTFGFESKHYYRFIGSLTTPPCSENVIWTISKEMRTVTLKQLIMLRVTVHDQSNSNARPLQRKNERPVALYIPTWHSKLY

SEQ ID NO: 41089 - protein, 221 aa, Arabidopsis thaliana
  peptide (1)..(221): Ceres Seq. ID no. 12329023
MCGKGNMQSPIDLTDKRVLIDHNLGYLRSQYLPSNATIKNRGHDIMMKFEGGNAGLGITINGTEYKLQQIHWHSPSEHTLNAKRFVLEEHMVHQSKDGRNAVVAFFYKLGKPDYFLLTLERYLKRITDTHESQEFVEMVHPRTFGFESKHYYRFIGSLTTPPCSENVIWTISKEMRTVTLKQLIMLRVTVHDQSNSNARPLQRKNERPVALYIPTWHSKLY

SEQ ID NO: 41090 - protein, 215 aa, Arabidopsis thaliana
  peptide (1)..(215): Ceres Seq. ID no. 12329024
MQSPIDLTDKRVLIDHNLGYLRSQYLPSNATIKNRGHDIMMKFEGGNAGLGITINGTEYKLQQIHWHSPSEHTLNAKRFVLEEHMVHQSKDGRNAVVAFFYKLGKPDYFLLTLERYLKRITDTHESQEFVEMVHPRTFGFESKHYYRFIGSLTTPPCSENVIWTISKEMRTVTLKQLIMLRVTVHDQSNSNARPLQRKNERPVALYIPTWHSKLY

SEQ ID NO: 41091 - DNA, 1172 bp, Arabidopsis thaliana
  misc_feature (1)..(1172): Ceres Seq. ID no. 12327612
  misc_feature (1)..(1172): Ortholog of  Ceres SEQ ID NO 13583327 as cited in SEQ ID NO 62047
tttcctctgcttctcaacatctctaagctttcattgaacaaggaatatgaaatcttctccaagatcagaaggaagaaagttcattatcccttctttcttcttcatcatagctctttgtgtactagctttcatcaacgggatcagattcgatagcttattgagttttggaagatgtgctttgtcaaatgttcctatgaataatggttcatcagagactccattgttgtcttcttctcctgttgatgatgagattaggattcttattggaatccttacacttcctgatcagtattcacgtcgccattttctccggatgatctacgggacacaaaatgttccggacggtgttaaggttgatgtgaagtttgtgttctgtaatttgactaaagaagaccagaaagtgcttgttgctttggagattatgcgttatgatgacatcattatactcaactgcaatgagaatatgaacaaaggcaagacttacacatacttctcaagcttaccagacatattcaatgagaccgatgcacaaaaaccaccgtaccattacgtaatgaaagccgacgacgacacatacataagactagaaagtctcgttgcatctttgagaccactccctcgagaagatctttactacggctatgtaattccatgtccaagcatggacccatttgttcattacatgtcaggaatgggttacttagtgtcatgggatattgcggtttggctcaaagactcggaaattcccaagaaacatctagaaggtcctgaagacaaagtgtttggcgattggattcgagaaggaagacgaggaaaaaaccggtttaacgctaagtggtccatgtataatttccctgagccaccgactagatgcacacatgagctttggccagacactattgccgttcatttgttaaagaaccaagagaagtggatacgtacattgaactatttcaatgttactagcaatctcaagccttctaaactataccacataccgtagatagtctttttgtttgcttttaccggattcttatatttatactttacattgtttctcttgaaattggtaagaaatgttctttaataatcgattttttgggagggatttgtagtacactaattaaggattgttcaaacatgtttaatagtcaatctggttgggttttttc

SEQ ID NO: 41092 - protein, 318 aa, Arabidopsis thaliana
  peptide (1)..(318): Ceres Seq. ID no. 12327613
MKSSPRSEGRKFIIPSFFFIIALCVLAFINGIRFDSLLSFGRCALSNVPMNNGSSETPLLSSSPVDDEIRILIGILTLPDQYSRRHFLRMIYGTQNVPDGVKVDVKFVFCNLTKEDQKVLVALEIMRYDDIIILNCNENMNKGKTYTYFSSLPDIFNETDAQKPPYHYVMKADDDTYIRLESLVASLRPLPREDLYYGYVIPCPSMDPFVHYMSGMGYLVSWDIAVWLKDSEIPKKHLEGPEDKVFGDWIREGRRGKNRFNAKWSMYNFPEPPTRCTHELWPDTIAVHLLKNQEKWIRTLNYFNVTSNLKPSKLYHIP

SEQ ID NO: 41093 - protein, 269 aa, Arabidopsis thaliana
  peptide (1)..(269): Ceres Seq. ID no. 12327614
MNNGSSETPLLSSSPVDDEIRILIGILTLPDQYSRRHFLRMIYGTQNVPDGVKVDVKFVFCNLTKEDQKVLVALEIMRYDDIIILNCNENMNKGKTYTYFSSLPDIFNETDAQKPPYHYVMKADDDTYIRLESLVASLRPLPREDLYYGYVIPCPSMDPFVHYMSGMGYLVSWDIAVWLKDSEIPKKHLEGPEDKVFGDWIREGRRGKNRFNAKWSMYNFPEPPTRCTHELWPDTIAVHLLKNQEKWIRTLNYFNVTSNLKPSKLYHIP

SEQ ID NO: 41094 - protein, 229 aa, Arabidopsis thaliana
  peptide (1)..(229): Ceres Seq. ID no. 12327615
MIYGTQNVPDGVKVDVKFVFCNLTKEDQKVLVALEIMRYDDIIILNCNENMNKGKTYTYFSSLPDIFNETDAQKPPYHYVMKADDDTYIRLESLVASLRPLPREDLYYGYVIPCPSMDPFVHYMSGMGYLVSWDIAVWLKDSEIPKKHLEGPEDKVFGDWIREGRRGKNRFNAKWSMYNFPEPPTRCTHELWPDTIAVHLLKNQEKWIRTLNYFNVTSNLKPSKLYHIP

SEQ ID NO: 41095 - DNA, 906 bp, Arabidopsis thaliana
  misc_feature (1)..(906): Ceres Seq. ID no. 13576756
  misc_feature (1)..(906): Ortholog of  Ceres SEQ ID NO 14301944 as cited in SEQ ID NO 0
aatcgaaaaattcttcttcttcttcttcttccattgtctcttgggttgagattccgatctcaatgtcgatcaatatcggagaaatctcaattccagaccttcctatcttcttctccatgttcttaaccatctacctaatcgcttacttcatcgtcttccgcaattggaaaccacaaatccgtcccgaagcttcaagctgcctgatctcaatcttccatggatctccagcggttttcctcgccacacgcgcagttttctcctcctccgaacgctccttcgcctccgcaaacaccgccgcacaaaacaccgtcctcgatttcagcgtcgcttacttcctcaccgatctcttccactacatcgtcttcaaccctaacgacgtactcttcatcggccatcacgtagccactctattcgtcttcctaacctgcagattcctcgtcttccacggggcttgcgccatcttaggcctcctgattctagctgaagtaacaagcgcgtgtaagaacgcgtggacgctcgccggagcaaggaagaatgatccggaatcacgattagctgtgaaagtgtacgatctcttgtctcctccgttttacgccttctacagtatcgttaggggtgtgttgggacctttgtttttcgggaaaatggtagcgttttacgctcgaggtggtgctcatggtgtgatacctaattggttgtggatttcttgggcaattgttgttggaactgctattactgttagtatactttggatttggaatctctggatagaattgtttagtgaaaggaaagctaacaaaatcagagtagacaagaaaattagatagtttcttctttcttctctagatcattgtttgatcttccttttcatgtactatatataatatatataccattattattctc

SEQ ID NO: 41096 - protein, 274 aa, Arabidopsis thaliana
  peptide (1)..(274): Ceres Seq. ID no. 13576757
SKNSSSSSSSIVSWVEIPISMSINIGEISIPDLPIFFSMFLTIYLIAYFIVFRNWKPQIRPEASSCLISIFHGSPAVFLATRAVFSSSERSFASANTAAQNTVLDFSVAYFLTDLFHYIVFNPNDVLFIGHHVATLFVFLTCRFLVFHGACAILGLLILAEVTSACKNAWTLAGARKNDPESRLAVKVYDLLSPPFYAFYSIVRGVLGPLFFGKMVAFYARGGAHGVIPNWLWISWAIVVGTAITVSILWIWNLWIELFSERKANKIRVDKKIR

SEQ ID NO: 41097 - protein, 254 aa, Arabidopsis thaliana
  peptide (1)..(254): Ceres Seq. ID no. 13576758
MSINIGEISIPDLPIFFSMFLTIYLIAYFIVFRNWKPQIRPEASSCLISIFHGSPAVFLATRAVFSSSERSFASANTAAQNTVLDFSVAYFLTDLFHYIVFNPNDVLFIGHHVATLFVFLTCRFLVFHGACAILGLLILAEVTSACKNAWTLAGARKNDPESRLAVKVYDLLSPPFYAFYSIVRGVLGPLFFGKMVAFYARGGAHGVIPNWLWISWAIVVGTAITVSILWIWNLWIELFSERKANKIRVDKKIR

SEQ ID NO: 41098 - protein, 236 aa, Arabidopsis thaliana
  peptide (1)..(236): Ceres Seq. ID no. 13576759
MFLTIYLIAYFIVFRNWKPQIRPEASSCLISIFHGSPAVFLATRAVFSSSERSFASANTAAQNTVLDFSVAYFLTDLFHYIVFNPNDVLFIGHHVATLFVFLTCRFLVFHGACAILGLLILAEVTSACKNAWTLAGARKNDPESRLAVKVYDLLSPPFYAFYSIVRGVLGPLFFGKMVAFYARGGAHGVIPNWLWISWAIVVGTAITVSILWIWNLWIELFSERKANKIRVDKKIR

SEQ ID NO: 41099 - DNA, 1349 bp, Arabidopsis thaliana
  misc_feature (1)..(1349): Ceres Seq. ID no. 12395579
  misc_feature (1)..(1349): Ortholog of  Ceres SEQ ID NO 13593955 as cited in SEQ ID NO 54278
  misc_feature (1)..(1349): Ortholog of  Ceres SEQ ID NO 13655302 as cited in SEQ ID NO 63307
  misc_feature (1)..(1349): Ortholog of  Ceres SEQ ID NO 13597380 as cited in SEQ ID NO 64054
  misc_feature (1)..(1349): Ortholog of  Ceres SEQ ID NO 12625474 as cited in SEQ ID NO 64169
  misc_feature (1)..(1349): Ortholog of  Ceres SEQ ID NO 13597502 as cited in SEQ ID NO 64681
  misc_feature (1)..(1349): Ortholog of  Ceres SEQ ID NO 13600397 as cited in SEQ ID NO 0
attaactacacgagctaaatctgttttagtcagaagcaaaaaattgaaaaaacttgtgtaaaaagcatgcagcgaaacagagttcttgcgttcttgttgctagcagctcagctcttggtgaagatacctgaaacgtgtgcaaaatttcccgcacttatcgtatttggtgactcaactgttgattcaggcaacaacaaccagatttctactgttctgaagagcaatttccagccatatggccgggattactttgacggcaaagcgactgggagattttcaaatggccggattgcaccagacttcatttctgaaggtttgggactcaagaacgcagtccctgcctacctagatccagcatacaacattgcagactttgccactggtgtctgtttcgcttcagctggaaccggcttagacaatgcaacctctgccgtgttatctgtaatgccgctatggaaggaagtggaatactacaaagaataccaaaccaggctaagaagctacttgggtgaagagaaagctaatgagattattagtgaatcactttacctgattagtatcggaaccaacgatttcctggagaattactatcttcttccccgcaagttacggaagtactcagtgaacgagtaccaatatttcctgataggaatagcagcagatttcgtgacagatatatacagactcggagctcggaagatgtctttgtcgggactctctccttttggatgcttacccctggaaagaacaactcagctcttttatggaagcaaatgtattgaagaatacaacattgtggctagagatttcaacatcaagatggaagagaaagtcttccagttgaacagagatctgaacggaatccagctggtgttttcaaatccatatgaccttgtttcagaaatcatataccatcctgaagcattcggtttcgaaaacgtaagaagtgcgtgttgcggaacgggatactatgagatgagctacttgtgtgataaaatgaacccattcacatgttcggatgcaagcaaatatgtattttgggactcatttcacccaacagagaagacaaacgccatcgtagcaaatcatgttctgaaatacgacttatctcggtttcagtgataaaataagaaattgctacaccacaagcactatagttattagttaacctactaaattctttcctccacaacatatatatttttttctgtgagtttcttgtctagatatcactcaaatcaagcttccaaaatgttgtacaagaaccattcttcttactctatgttcgtgtgactacataaagatgctactgtgatgttataaaaatggacaagatcaaactttaaaat

SEQ ID NO: 41100 - protein, 351 aa, Arabidopsis thaliana; identical to SEQ ID NO: 26354
  peptide (1)..(351): Ceres Seq. ID no. 12395580

SEQ ID NO: 41101 - protein, 225 aa, Arabidopsis thaliana; identical to SEQ ID NO: 26355
  peptide (1)..(225): Ceres Seq. ID no. 12395581

SEQ ID NO: 41102 - DNA, 1071 bp, Arabidopsis thaliana
  misc_feature (1)..(1071): Ceres Seq. ID no. 12559556
  misc_feature (1)..(1071): Ortholog of  Ceres SEQ ID NO 14307111 as cited in SEQ ID NO 54586
  misc_feature (1)..(1071): Ortholog of  Ceres SEQ ID NO 13655720 as cited in SEQ ID NO 63418
  misc_feature (1)..(1071): Ortholog of  Ceres SEQ ID NO 15176165 as cited in SEQ ID NO 0
ctgcaactcagccatggaagaagcagatcagttatgtttagctgctaaatccggcgacttgaaaaaggttcaaactttaatttactccggcgccgacgttactcactttgataacgacggtttaacgccgttaatgcacgccgctaaaatcggaaacgcagagatagtaacggcgttactcgaatccggagctccatggaacgcattatctccatcgaatctctcagcaggagatttcgccatggaagcaggacatcaagaaactttcgatcttcttctcaaaaccgggatccaatcagagctaatcttaggaacaatcgcaagaaaccaaacaaagaacgaatattctaatcaagaatatcttcaagatagagttagtttcagtgaagacaagttaatggatagtgaaagcaaagggtgtgatgatggcttgggaaaaacccttaatggaagctccccgctaaagctatttgtctcaacggtggtcacattcttaacgttggtttcggtatgggacttgtcgatacagcgattcaaccgatacaatccggttaaacacacgatcattgaagctcatcctgaagtttataagccgtatgattgaatctggttggggagagaaagaaaatgtgaagattggtttttggaagatggcaagaaggtcttgataagcttgatgataattcttttgatgggatcttttttgatacttatggtgagtattataaagatttaagagagtttcatcagcatcttccgaggctgttgaagcctgatggtttttattcgtatttcaatgggttttgtggaagcaacgccttttttcatgttgtgtattgcaatttggtgactttggagattgagaatttagggtttagcactcagttgattccattgccggttaaggattgtcttggggatgaagtttgggaaggtgtcaagcaaaagtattggcagcttgatacttattatctccctgtttgtcagtttagtgactgaagaagttttatgataccagcaattttgcgatattgtaatttttcttactcataaaaagtagattttttattc

SEQ ID NO: 41103 - protein, 200 aa, Arabidopsis thaliana
  peptide (1)..(200): Ceres Seq. ID no. 12559557
CNSAMEEADQLCLAAKSGDLKKVQTLIYSGADVTHFDNDGLTPLMHAAKIGNAEIVTALLESGAPWNALSPSNLSAGDFAMEAGHQETFDLLLKTGIQSELILGTIARNQTKNEYSNQEYLQDRVSFSEDKLMDSESKGCDDGLGKTLNGSSPLKLFVSTVVTFLTLVSVWDLSIQRFNRYNPVKHTIIEAHPEVYKPYD

SEQ ID NO: 41104 - protein, 196 aa, Arabidopsis thaliana
  peptide (1)..(196): Ceres Seq. ID no. 12559558
MEEADQLCLAAKSGDLKKVQTLIYSGADVTHFDNDGLTPLMHAAKIGNAEIVTALLESGAPWNALSPSNLSAGDFAMEAGHQETFDLLLKTGIQSELILGTIARNQTKNEYSNQEYLQDRVSFSEDKLMDSESKGCDDGLGKTLNGSSPLKLFVSTVVTFLTLVSVWDLSIQRFNRYNPVKHTIIEAHPEVYKPYD

SEQ ID NO: 41105 - protein, 156 aa, Arabidopsis thaliana
  peptide (1)..(156): Ceres Seq. ID no. 12559559
MHAAKIGNAEIVTALLESGAPWNALSPSNLSAGDFAMEAGHQETFDLLLKTGIQSELILGTIARNQTKNEYSNQEYLQDRVSFSEDKLMDSESKGCDDGLGKTLNGSSPLKLFVSTVVTFLTLVSVWDLSIQRFNRYNPVKHTIIEAHPEVYKPYD

SEQ ID NO: 41106 - DNA, 2799 bp, Arabidopsis thaliana; identical to SEQ ID NO: 29864
  misc_feature (1)..(2799): Ceres Seq. ID no. 12329264
  misc_feature (1)..(2799): Ortholog of  Ceres SEQ ID NO 14312844 as cited in SEQ ID NO 55601
  misc_feature (1)..(2799): Ortholog of  Ceres SEQ ID NO 14312866 as cited in SEQ ID NO 55630
  misc_feature (1)..(2799): Ortholog of  Ceres SEQ ID NO 13597376 as cited in SEQ ID NO 64002
  misc_feature (1)..(2799): Ortholog of  Ceres SEQ ID NO 13503573 as cited in SEQ ID NO 65402
  misc_feature (1)..(2799): Ortholog of  Ceres SEQ ID NO 13659615 as cited in SEQ ID NO 67248

SEQ ID NO: 41107 - protein, 378 aa, Arabidopsis thaliana; identical to SEQ ID NO: 29865
  peptide (1)..(378): Ceres Seq. ID no. 12329265

SEQ ID NO: 41108 - protein, 351 aa, Arabidopsis thaliana; identical to SEQ ID NO: 29866
  peptide (1)..(351): Ceres Seq. ID no. 12329266

SEQ ID NO: 41109 - protein, 350 aa, Arabidopsis thaliana; identical to SEQ ID NO: 29867
  peptide (1)..(350): Ceres Seq. ID no. 12329267

SEQ ID NO: 41110 - DNA, 1173 bp, Arabidopsis thaliana
  misc_feature (1)..(1173): Ceres Seq. ID no. 13509224
  misc_feature (1)..(1173): Ortholog of  Ceres SEQ ID NO 14316165 as cited in SEQ ID NO 52560
  misc_feature (1)..(1173): Ortholog of  Ceres SEQ ID NO 13597076 as cited in SEQ ID NO 63571
aacggacggcaaaactcggagtcggagatcgtaccggaggacggcgaatctttcatcttctgtcctttcgttttttatacgcgtcagatgagtctttaacttccgattagctttgtaaacaatcgcgattagtcgggattacatctaaaggattcgttgatggcggcgtcgtggcaatgggaaaatgccaccgccggcgccgtcgctggattcgccaccgtagctgctatgcaccctcttgatgttgttcgtacgagattccaagtcaacgatggtagagggtcaagtctcccaacgtacaagaacactgctcacgctgtcttcaccattgcccgtctcgagggtttgagagggctttatgcaggcttcttccctgcagttatcggttctactgtttcctggggcttatacttctttttttatggaagagccaagcagagatacgctagaggcagggatgatgagaaactcagccctgctctccaccttgcttctgctgctgaagcaggggccttggtctgtttatgcacaaatcctatttggcttgtcaaaacaaggttacagcttcagacacctcttcatcaaactcaaccatactcagggcttttagatgcctttagaaccatagtgaaagaggaaggacccagggcgctctacaagggtattgtccctggtcttgtactggtttctcatggtgctattcagttcacagcttatgaggaactccgtaaaatcattgtggatttgaaagaaaggagaagaaagtccgaatccactgataatctattgaactcagcagattacgctgcacttggcggctcctccaaagtcgctgcagttctacttacgtatccatttcaagttattcgagcacgattacagcaacgacctagtaccaacggaatcccaagatatatagacagcttacatgtcgtcagagaaaccgcaagatatgaaggtctcaggggtttctacaggggactaacggctaatcttttgaaaaatgttcctgcgtcttccatcacattcatcgtctatgaaaacgttttgaaattgctaaaacagcatccaacaacaaaagattagatccttcctcttcctttatcgttatttcttagactcaacaagcacgcggttgacttgtcactcctaatactaaagaattattctttg

SEQ ID NO: 41111 - protein, 308 aa, Arabidopsis thaliana
  peptide (1)..(308): Ceres Seq. ID no. 13509225
MAASWQWENATAGAVAGFATVAAMHPLDVVRTRFQVNDGRGSSLPTYKNTAHAVFTIARLEGLRGLYAGFFPAVIGSTVSWGLYFFFYGRAKQRYARGRDDEKLSPALHLASAAEAGALVCLCTNPIWLVKTRLQLQTPLHQTQPYSGLLDAFRTIVKEEGPRALYKGIVPGLVLVSHGAIQFTAYEELRKIIVDLKERRRKSESTDNLLNSADYAALGGSSKVAAVLLTYPFQVIRARLQQRPSTNGIPRYIDSLHVVRETARYEGLRGFYRGLTANLLKNVPASSITFIVYENVLKLLKQHPTTKD

SEQ ID NO: 41112 - protein, 285 aa, Arabidopsis thaliana
  peptide (1)..(285): Ceres Seq. ID no. 13509226
MHPLDVVRTRFQVNDGRGSSLPTYKNTAHAVFTIARLEGLRGLYAGFFPAVIGSTVSWGLYFFFYGRAKQRYARGRDDEKLSPALHLASAAEAGALVCLCTNPIWLVKTRLQLQTPLHQTQPYSGLLDAFRTIVKEEGPRALYKGIVPGLVLVSHGAIQFTAYEELRKIIVDLKERRRKSESTDNLLNSADYAALGGSSKVAAVLLTYPFQVIRARLQQRPSTNGIPRYIDSLHVVRETARYEGLRGFYRGLTANLLKNVPASSITFIVYENVLKLLKQHPTTKD

SEQ ID NO: 41113 - DNA, 1147 bp, Arabidopsis thaliana
  misc_feature (1)..(1147): Ceres Seq. ID no. 12395398
  misc_feature (1)..(1147): Ortholog of  Ceres SEQ ID NO 12593170 as cited in SEQ ID NO 63263
  misc_feature (1)..(1147): Ortholog of  Ceres SEQ ID NO 14301882 as cited in SEQ ID NO 64381
  misc_feature (1)..(1147): Ortholog of  Ceres SEQ ID NO 13597851 as cited in SEQ ID NO 64869
  misc_feature (1)..(1147): Ortholog of  Ceres SEQ ID NO 13662420 as cited in SEQ ID NO 68680
atctccaatcgctctctctctctctctctctctctcgctcggtgtgatccgtgtagagagattggatttgctgagtaacggtgcaatgtctcgctaccagtctcattcctttgatgacggagaaattaatccttttgcgaatcctacaagtgtcccagctgcaacgtcaaagctttctcctcttccccctgagccgtacgaccgtggtgccacaatggatattcctcttgactctggaaaggatctgaaagctaaggagaaggaactccgggaaaaggaggctgaattgaagaggcgggagcaggaaatcaagcggaaagaagatgctatagcacaggccggaattgtgatagaagagaaaaactggccaccgttttttcctctcatccatcatgacatttcaaatgagatacccatccatctgcagagaatccaatatgttgctttcacatcaatgctgggtcttgtggtgtgcctgttatggaacattgtcgcagttactactgcgtggattaagggagaaggtccaacaatatggtttctagctattatctatttcatatcaggggttcctggagcgtatgttatgtggtatcgccctctttatcgtgccatgaggactgatagtgctctgaattttgggtggtttttcttcacgtatctgtttcacatagcgttttgtgtgtttgcggcggtggctcctccaattatcttcaagggaaaatcgctgacaggaatattgccggcgatcgacgtattgagtgggaatatcttggtcgggatattttacttcattgggtttgggttcttctgtctggagtcactcgtcagcatctgggttattcagcaagtgtacatgtacttcagggggagcgggaaagcagcagagatgaagcaggaggccacaagacgagcaatgatggcagctctctgaccaatgaccacatacacacaccttttaacccatctccaattttttcccatttaacatacaaacaaacagtgaacgttagatcctcttgaagggattgattatactccgctactcacttcatttttgttttcctcccgatttcatttaactaagattccagtgaactcaacttcttacttttttttggtaaaaggtgaagtcaacttcttactc

SEQ ID NO: 41114 - protein, 310 aa, Arabidopsis thaliana
  peptide (1)..(310): Ceres Seq. ID no. 12395399
SPIALSLSLSLSLGVIRVERLDLLSNGAMSRYQSHSFDDGEINPFANPTSVPAATSKLSPLPPEPYDRGATMDIPLDSGKDLKAKEKELREKEAELKRREQEIKRKEDAIAQAGIVIEEKNWPPFFPLIHHDISNEIPIHLQRIQYVAFTSMLGLVVCLLWNIVAVTTAWIKGEGPTIWFLAIIYFISGVPGAYVMWYRPLYRAMRTDSALNFGWFFFTYLFHIAFCVFAAVAPPIIFKGKSLTGILPAIDVLSGNILVGIFYFIGFGFFCLESLVSIWVIQQVYMYFRGSGKAAEMKQEATRRAMMAAL

SEQ ID NO: 41115 - protein, 282 aa, Arabidopsis thaliana
  peptide (1)..(282): Ceres Seq. ID no. 12395400
MSRYQSHSFDDGEINPFANPTSVPAATSKLSPLPPEPYDRGATMDIPLDSGKDLKAKEKELREKEAELKRREQEIKRKEDAIAQAGIVIEEKNWPPFFPLIHHDISNEIPIHLQRIQYVAFTSMLGLVVCLLWNIVAVTTAWIKGEGPTIWFLAIIYFISGVPGAYVMWYRPLYRAMRTDSALNFGWFFFTYLFHIAFCVFAAVAPPIIFKGKSLTGILPAIDVLSGNILVGIFYFIGFGFFCLESLVSIWVIQQVYMYFRGSGKAAEMKQEATRRAMMAAL

SEQ ID NO: 41116 - protein, 239 aa, Arabidopsis thaliana
  peptide (1)..(239): Ceres Seq. ID no. 12395401
MDIPLDSGKDLKAKEKELREKEAELKRREQEIKRKEDAIAQAGIVIEEKNWPPFFPLIHHDISNEIPIHLQRIQYVAFTSMLGLVVCLLWNIVAVTTAWIKGEGPTIWFLAIIYFISGVPGAYVMWYRPLYRAMRTDSALNFGWFFFTYLFHIAFCVFAAVAPPIIFKGKSLTGILPAIDVLSGNILVGIFYFIGFGFFCLESLVSIWVIQQVYMYFRGSGKAAEMKQEATRRAMMAAL

SEQ ID NO: 41117 - DNA, 1236 bp, Arabidopsis thaliana
  misc_feature (1)..(1236): Ceres Seq. ID no. 13497425
  misc_feature (1)..(1236): Ortholog of  Ceres SEQ ID NO 15175700 as cited in SEQ ID NO 58584
  misc_feature (1)..(1236): Ortholog of  Ceres SEQ ID NO 13598714 as cited in SEQ ID NO 62656
  misc_feature (1)..(1236): Ortholog of  Ceres SEQ ID NO 13596969 as cited in SEQ ID NO 63375
  misc_feature (1)..(1236): Ortholog of  Ceres SEQ ID NO 13597519 as cited in SEQ ID NO 64759
  misc_feature (1)..(1236): Ortholog of  Ceres SEQ ID NO 13597870 as cited in SEQ ID NO 64982
  misc_feature (1)..(1236): Ortholog of  Ceres SEQ ID NO 13656123 as cited in SEQ ID NO 65212
atcctgtctctcttcagtgacacaaacccaaagaaaagtagtgagaaacaaaatcgaggtaactactagatgaagacgatgacgcaattaaatattgcggttgtggttgtagtgacggttcttattggaatgttgagatcatcggaggctcaacttcaaatgaatttctacgcgaagagctgtccaaacgcagagaaaatcatttcagatcatattcaaaatcatatccacaatggtccttctcttgcagctcctctcatccgaatgcacttccatgattgcttcgttaggggatgtgacggatcggtgttgataaattcaacatctggtaacgcagagagagatgcaccaccgaatctaacacttagaggattcggtttcgtggaaaggattaaggctcttcttgaaaaagtgtgtcctaagactgtttcttgcgcagatatcattgctttgactgctagagacacagttgtcgccaccggaggtccttcatggagtgttccaacgggaagaagagacggtaggatctcaaatttgaaggaggctacgaataacattccacctccaacgagtaatttcacgactttacgacgacttttcaaaaaccaaggccttaatctcaaggaccttgttctgctctctggggctcacacgattggtgtctcacattgttcttccatgaatactcgtctctacaacttctcgactacagtcaaacaagatccatctctcgatagccagtacgcagctaatctaaaggctaacaaatgtaagagcctaaacgacaatagcaccatcctggagatggatcccggtagtagcagaagcttcgatctcagttattataggcttgtcttgaagaggagaggcttgttccaatctgattctgccttgacaacgaactcagcgacgttgaaggtgatcaacgacttggtcaacggttctgaaaagaagtttttcaaagcttttgctaagtcaatrggagaagatggggagagttaawgtgacagactggctcagctggtgtgatcaggacacggtgttctgtcgctggaagttagtaagcttggtcggaatgtggtgtgttatggtcattgttgttttgtgtgactttcggaaaaaacaaatgttgttaatttaattttgttgttgtttgatttgtgtttatgcacccaagaatgatgtgttatggttcaattaatatgtgaatcatttaaatttacaataattcttatt

SEQ ID NO: 41118 - protein, 310 aa, Arabidopsis thaliana
  peptide (1)..(310): Ceres Seq. ID no. 15223011
  misc_feature (304)..(304): Xaa is any aa, unknown or other
MKTMTQLNIAVVVVVTVLIGMLRSSEAQLQMNFYAKSCPNAEKIISDHIQNHIHNGPSLAAPLIRMHFHDCFVRGCDGSVLINSTSGNAERDAPPNLTLRGFGFVERIKALLEKVCPKTVSCADIIALTARDTVVATGGPSWSVPTGRRDGRISNLKEATNNIPPPTSNFTTLRRLFKNQGLNLKDLVLLSGAHTIGVSHCSSMNTRLYNFSTTVKQDPSLDSQYAANLKANKCKSLNDNSTILEMDPGSSRSFDLSYYRLVLKRRGLFQSDSALTTNSATLKVINDLVNGSEKKFFKAFAKSXGEDGES

SEQ ID NO: 41119 - protein, 307 aa, Arabidopsis thaliana
  peptide (1)..(307): Ceres Seq. ID no. 15223012
  misc_feature (301)..(301): Xaa is any aa, unknown or other
MTQLNIAVVVVVTVLIGMLRSSEAQLQMNFYAKSCPNAEKIISDHIQNHIHNGPSLAAPLIRMHFHDCFVRGCDGSVLINSTSGNAERDAPPNLTLRGFGFVERIKALLEKVCPKTVSCADIIALTARDTVVATGGPSWSVPTGRRDGRISNLKEATNNIPPPTSNFTTLRRLFKNQGLNLKDLVLLSGAHTIGVSHCSSMNTRLYNFSTTVKQDPSLDSQYAANLKANKCKSLNDNSTILEMDPGSSRSFDLSYYRLVLKRRGLFQSDSALTTNSATLKVINDLVNGSEKKFFKAFAKSXGEDGES

SEQ ID NO: 41120 - protein, 290 aa, Arabidopsis thaliana
  peptide (1)..(290): Ceres Seq. ID no. 15223013
  misc_feature (284)..(284): Xaa is any aa, unknown or other
MLRSSEAQLQMNFYAKSCPNAEKIISDHIQNHIHNGPSLAAPLIRMHFHDCFVRGCDGSVLINSTSGNAERDAPPNLTLRGFGFVERIKALLEKVCPKTVSCADIIALTARDTVVATGGPSWSVPTGRRDGRISNLKEATNNIPPPTSNFTTLRRLFKNQGLNLKDLVLLSGAHTIGVSHCSSMNTRLYNFSTTVKQDPSLDSQYAANLKANKCKSLNDNSTILEMDPGSSRSFDLSYYRLVLKRRGLFQSDSALTTNSATLKVINDLVNGSEKKFFKAFAKSXGEDGES

SEQ ID NO: 41121 - DNA, 2066 bp, Arabidopsis thaliana
  misc_feature (1)..(2066): Ceres Seq. ID no. 13575096
  misc_feature (1)..(2066): Ortholog of  Ceres SEQ ID NO 12613725 as cited in SEQ ID NO 68196
aatagctaaactaagcaaatctctaagacttgttctcattttgtttgttcaaaatcccattaaaaaaaaacacaatgcaaccttaaattatttccgtttagtctctctcttcacagtcctgacctctctcaactctcacaacattaccaaatacatcccataaaaaaacaattctttaaaaaaaaaatattttgatataaacagaaaaaacaattaatggaggctgcaaaagtttacacacaagatggcaccgtcgacctccaaggccgtcccgtcctcgcctccaagaccggtcgttggagagcttgctctttcctcctcgggtatgaagcgtttgagaggatggcgttttatggaatagcgtcgaacttagtgaattatttgactaaaagacttcacgaagatacgatctcttcggttagaaatgtgaataattggtccggtgcggtttggatcactcccatagccggagcttacatcgctgactcatacatcggtcgcttctggacttttactgcctcctctctcatctacgtcctggggatgattctcttgacaatggcggtaacagtaaaatccctaagaccgacatgcgaaaacggggtatgcaacaaggcctcctcgttacaagtaacatttttctacatatccctctataccatagctattggagccggtggaacaaaacctaacatttccacatttggagcggaccaattcgacagttatagcattgaagaaaaaaagcaaaaggtttcattcttcaattggtggatgtttagctctttcttaggcgcgttgtttgcgacattggggctcgtctacatccaagagaatctcggatggggtttaggttatggcatccctaccgtaggactcttggtttctctcgttgtgttctatattggaacaccattttacaggcataaggttatcaaaacagacaatttggcgaaagatttggttcaagttcctatcgcggcattcaaaaaccgaaagcttcagtgtcctgatgaccacttggagctttatgagcttgactctcattattacaaaagcaatggtaagcatcaagttcatcacacgcccgtcttcaggttcttggataaagcggccattaagacaagttcaagagtgccatgtacggtgacaaaagtggaagtggcaaagcgtgtgctaggacttatctttatatggcttgtcactttgatcccaagcaccttgtgggcacaagtcaacactctcttcgtcaaacaagggaccacgctggaccgaaaaattggatccaacttccagatccccgcggcttcattgggaagctttgttacgctctccatgcttctctctgtgcccatgtacgaccaatcctttgttcccttcatgcgcaagaaaaccggaaaccctagagggattactttactccaaagactaggggtagggtttgcgatacaaattgttgcaatcgcgattgcttcggctgtggaggtcaagaggatgcgcgtgataaaggaatttcacataactagtccgacacaagttgtgcctatgagcattttctggttgctccctcagtactctcttctaggcattggggatgtgtttaacgcaattggtttgcttgagtttttctatgatcagtcacctgaggagatgcagagccttggaacaacgtttttcacgagtggaatcggtcttgggaatttcttgaacagctttttggtgacaatgattgataagatcacgagtaaaggtggagggaagagttggattgggaataatttgaatgattcgaggcttgattactattatggatttctagtggtgatttcgatagtgaacatgggacttttcgtgtgggcagcgagtaagtatgtttacaagagtgatgatgacaccaaggagtttagtggaggaggatgtgttcaaatggaggccaaagccttagacacatctcctcttagtatctaattatagcaatgagagatgtgtatatatggttttcaagaaaatttgaagttgtgctattctaattaacatgatgaataaaacttgaagttggaagtacc

SEQ ID NO: 41122 - protein, 583 aa, Arabidopsis thaliana
  peptide (1)..(583): Ceres Seq. ID no. 15222613
MEAAKVYTQDGTVDLQGRPVLASKTGRWRACSFLLGYEAFERMAFYGIASNLVNYLTKRLHEDTISSVRNVNNWSGAVWITPIAGAYIADSYIGRFWTFTASSLIYVLGMILLTMAVTVKSLRPTCENGVCNKASSLQVTFFYISLYTIAIGAGGTKPNISTFGADQFDSYSIEEKKQKVSFFNWWMFSSFLGALFATLGLVYIQENLGWGLGYGIPTVGLLVSLVVFYIGTPFYRHKVIKTDNLAKDLVQVPIAAFKNRKLQCPDDHLELYELDSHYYKSNGKHQVHHTPVFRFLDKAAIKTSSRVPCTVTKVEVAKRVLGLIFIWLVTLIPSTLWAQVNTLFVKQGTTLDRKIGSNFQIPAASLGSFVTLSMLLSVPMYDQSFVPFMRKKTGNPRGITLLQRLGVGFAIQIVAIAIASAVEVKRMRVIKEFHITSPTQVVPMSIFWLLPQYSLLGIGDVFNAIGLLEFFYDQSPEEMQSLGTTFFTSGIGLGNFLNSFLVTMIDKITSKGGGKSWIGNNLNDSRLDYYYGFLVVISIVNMGLFVWAASKYVYKSDDDTKEFSGGGCVQMEAKALDTSPLSI

SEQ ID NO: 41123 - protein, 541 aa, Arabidopsis thaliana
  peptide (1)..(541): Ceres Seq. ID no. 15222614
MAFYGIASNLVNYLTKRLHEDTISSVRNVNNWSGAVWITPIAGAYIADSYIGRFWTFTASSLIYVLGMILLTMAVTVKSLRPTCENGVCNKASSLQVTFFYISLYTIAIGAGGTKPNISTFGADQFDSYSIEEKKQKVSFFNWWMFSSFLGALFATLGLVYIQENLGWGLGYGIPTVGLLVSLVVFYIGTPFYRHKVIKTDNLAKDLVQVPIAAFKNRKLQCPDDHLELYELDSHYYKSNGKHQVHHTPVFRFLDKAAIKTSSRVPCTVTKVEVAKRVLGLIFIWLVTLIPSTLWAQVNTLFVKQGTTLDRKIGSNFQIPAASLGSFVTLSMLLSVPMYDQSFVPFMRKKTGNPRGITLLQRLGVGFAIQIVAIAIASAVEVKRMRVIKEFHITSPTQVVPMSIFWLLPQYSLLGIGDVFNAIGLLEFFYDQSPEEMQSLGTTFFTSGIGLGNFLNSFLVTMIDKITSKGGGKSWIGNNLNDSRLDYYYGFLVVISIVNMGLFVWAASKYVYKSDDDTKEFSGGGCVQMEAKALDTSPLSI

SEQ ID NO: 41124 - protein, 474 aa, Arabidopsis thaliana
  peptide (1)..(474): Ceres Seq. ID no. 15222615
MILLTMAVTVKSLRPTCENGVCNKASSLQVTFFYISLYTIAIGAGGTKPNISTFGADQFDSYSIEEKKQKVSFFNWWMFSSFLGALFATLGLVYIQENLGWGLGYGIPTVGLLVSLVVFYIGTPFYRHKVIKTDNLAKDLVQVPIAAFKNRKLQCPDDHLELYELDSHYYKSNGKHQVHHTPVFRFLDKAAIKTSSRVPCTVTKVEVAKRVLGLIFIWLVTLIPSTLWAQVNTLFVKQGTTLDRKIGSNFQIPAASLGSFVTLSMLLSVPMYDQSFVPFMRKKTGNPRGITLLQRLGVGFAIQIVAIAIASAVEVKRMRVIKEFHITSPTQVVPMSIFWLLPQYSLLGIGDVFNAIGLLEFFYDQSPEEMQSLGTTFFTSGIGLGNFLNSFLVTMIDKITSKGGGKSWIGNNLNDSRLDYYYGFLVVISIVNMGLFVWAASKYVYKSDDDTKEFSGGGCVQMEAKALDTSPLSI

SEQ ID NO: 41125 - DNA, 1844 bp, Arabidopsis thaliana
  misc_feature (1)..(1844): Ceres Seq. ID no. 13494023
  misc_feature (1)..(1844): Ortholog of  Ceres SEQ ID NO 15179918 as cited in SEQ ID NO 57077
aacggcttgaaccaccggcaatagccgcgggattgcggcggaggattaatcaaaaaacgcaccacctgaaatctctctgtgtacgctaatggctccgacgatattcgttgatcactgtatcctcacaacaacgtttgtcgcatccttgttcgcgtttctgcttctatacgtcctgcgtcgccggagcaagacgattcatgggtctgtcaatgtccgtaacggaaccctaacggtgaaatctggaacagacgttgatattatcattgtcggtgctggtgtcgccggcgctgcccttgctcataccctcggcaaggaaggaagaagagttcacgttatagaaagagacttaacggagcctgatcgaattgtcggtgaattacttcagcctggtggttacttgaagttaatcgaactcgggcttgaagattgtgtgaaggatatagatgcgcagagagttcttggttatgctctctttaaagatgggaaacacactaaactctcttacccgttggatcagtttgattccgatgttgcgggtcgtagctttcacaatgggagatttgtgcagaggatgcgagagaaagcttctttacttcccaatgttcgaatggagcaaggaacagtgacatcgttggtggaagaaaacggaataatcaaaggtgttcaatacaaaaccaaagatggccaagagcttaagtcatttgctcctctcactattgtatgtgatggttgtttctccaacttgcgtcgatctctctgcaaacctaaggtggaggtgccatccaatttcgttggtctggtattggagaattgcgaactcccgtttccgaaccacgggcacgttgttcttggcgatccgtcacccattttattctatcctatcagcagctcggaagtccgttgcttggtagatgtaccaggttcaaaacttccttcagttgcaagtggtgaaatggctcaccatctcaaaacaatggttgcaccgcaggtaccacctcagatccgtgatgctttcatttctgcagtcgaaaaaggtaacataagaacaatgccgaacagaagcatgccagctgatccaattcatacacctggagctttgcttttaggtgatgcgttcaacatgcgccatcctcttactggaggtggtatgaccgttgcattgtctgatatagtcatcctccgtgatctattgaacccgctcgtcgacttaaccaacaaagagtccttatccaaatacatagaatcattctacacattgcggaaaccggttgcttcgactatcaatacactcgcaggcgctctttacaaagtctttttagcatctccagacgatgcaagaagcgaaatgcgtcgagcttgcttcgattatcttagcctcggaggggtttgctcatcaggacctgtggctttgctatctggtttgaacccacgacctatgagccttgttcttcatttcttcgcagttgcgattttcggggttggtcgtttgcttgtacctctcccgtccgttaaacggttatggcttggagctagactaatctcgagtgcttcagggatcatatttccaataataaaagcagaaggtgtgaggcaaatgttcttccctcgaactattcctgccatttacagagctcctcctactccttcttcttcttctcctcaatgatgaatcagaaacattgctttgaagatttctcaggtgttgtaagaatagctactttgcgattatggtacgaatgaaccgggtggtttgatttggtttttacgaactttggtttgaaatttgtactcagtccattacagacaaaatcatcaagtaaataagtatctctttgttaattgtt

SEQ ID NO: 41126 - protein, 525 aa, Arabidopsis thaliana
  peptide (1)..(525): Ceres Seq. ID no. 13494024
MAPTIFVDHCILTTTFVASLFAFLLLYVLRRRSKTIHGSVNVRNGTLTVKSGTDVDIIIVGAGVAGAALAHTLGKEGRRVHVIERDLTEPDRIVGELLQPGGYLKLIELGLEDCVKDIDAQRVLGYALFKDGKHTKLSYPLDQFDSDVAGRSFHNGRFVQRMREKASLLPNVRMEQGTVTSLVEENGIIKGVQYKTKDGQELKSFAPLTIVCDGCFSNLRRSLCKPKVEVPSNFVGLVLENCELPFPNHGHVVLGDPSPILFYPISSSEVRCLVDVPGSKLPSVASGEMAHHLKTMVAPQVPPQIRDAFISAVEKGNIRTMPNRSMPADPIHTPGALLLGDAFNMRHPLTGGGMTVALSDIVILRDLLNPLVDLTNKESLSKYIESFYTLRKPVASTINTLAGALYKVFLASPDDARSEMRRACFDYLSLGGVCSSGPVALLSGLNPRPMSLVLHFFAVAIFGVGRLLVPLPSVKRLWLGARLISSASGIIFPIIKAEGVRQMFFPRTIPAIYRAPPTPSSSSPQ

SEQ ID NO: 41127 - protein, 364 aa, Arabidopsis thaliana
  peptide (1)..(364): Ceres Seq. ID no. 13494025
MREKASLLPNVRMEQGTVTSLVEENGIIKGVQYKTKDGQELKSFAPLTIVCDGCFSNLRRSLCKPKVEVPSNFVGLVLENCELPFPNHGHVVLGDPSPILFYPISSSEVRCLVDVPGSKLPSVASGEMAHHLKTMVAPQVPPQIRDAFISAVEKGNIRTMPNRSMPADPIHTPGALLLGDAFNMRHPLTGGGMTVALSDIVILRDLLNPLVDLTNKESLSKYIESFYTLRKPVASTINTLAGALYKVFLASPDDARSEMRRACFDYLSLGGVCSSGPVALLSGLNPRPMSLVLHFFAVAIFGVGRLLVPLPSVKRLWLGARLISSASGIIFPIIKAEGVRQMFFPRTIPAIYRAPPTPSSSSPQ

SEQ ID NO: 41128 - protein, 352 aa, Arabidopsis thaliana
  peptide (1)..(352): Ceres Seq. ID no. 13494026
MEQGTVTSLVEENGIIKGVQYKTKDGQELKSFAPLTIVCDGCFSNLRRSLCKPKVEVPSNFVGLVLENCELPFPNHGHVVLGDPSPILFYPISSSEVRCLVDVPGSKLPSVASGEMAHHLKTMVAPQVPPQIRDAFISAVEKGNIRTMPNRSMPADPIHTPGALLLGDAFNMRHPLTGGGMTVALSDIVILRDLLNPLVDLTNKESLSKYIESFYTLRKPVASTINTLAGALYKVFLASPDDARSEMRRACFDYLSLGGVCSSGPVALLSGLNPRPMSLVLHFFAVAIFGVGRLLVPLPSVKRLWLGARLISSASGIIFPIIKAEGVRQMFFPRTIPAIYRAPPTPSSSSPQ

SEQ ID NO: 41129 - DNA, 1627 bp, Arabidopsis thaliana
  misc_feature (1)..(1627): Ceres Seq. ID no. 12395267
  misc_feature (1)..(1627): Ortholog of  Ceres SEQ ID NO 15174513 as cited in SEQ ID NO 58979
  misc_feature (1)..(1627): Ortholog of  Ceres SEQ ID NO 13584616 as cited in SEQ ID NO 65234
  misc_feature (1)..(1627): Ortholog of  Ceres SEQ ID NO 14302742 as cited in SEQ ID NO 66899
  misc_feature (1)..(1627): Ortholog of  Ceres SEQ ID NO 14313536 as cited in SEQ ID NO 67925
  misc_feature (1)..(1627): Ortholog of  Ceres SEQ ID NO 15178939 as cited in SEQ ID NO 0
attaccagagctcaacgagctctcactttctttacgcacacttgttggaacgaaatatattcatagagaagaagaatctcgaaactcttgaatctaaaacaactcggagactctgttttccctttccggagatcagatcggatcaagatgcagacaaccaacggctcagattcgacgttggcaacttccggagccacaccgccgaatcaacaaacccctcctccacctcagcagtggcagcagcagcaacagcaacagtggatggctgccatgcaatatccaccagcggcggcgatgatgatgatgcagcagcaacagatgctgatgtatcctcatcaatatgttccgtataatcaaggtccttatcagcagcatcatcctcagcttcaccaatacgggtcttatcaacagcaccagcaccagcaacacaaggctattgaccgtggatctggagatgatgtcaagactctttgggttggtgatcttcttcattggatggatgagacttatctccattcttgcttttctcacaccggcgaggtttcttctgtgaaagttatacgtaacaagctcacttctcaatcagaagggtatgggtttgttgagtttctttcacgtgctgcagctgaagaagttcttcagaactatagtggttcagtgatgccaaactcggaccaacccttccgtataaactgggcatcttttagtactggtgaaaaaagagcagtggaaaatggtccagacctatctgtttttgtgggagacttgtctccagatgtcactgacgttttattgcatgagaccttttctgatagatatccttctgtcaaaagcgccaaagttgtgattgattccaacaccggccggtccaaaggttatggttttgtgaggttcggtgatgaaaatgagaggtcaagggctttgacagaaatgaatggagcttactgttcgaacaggcaaatgcgtgtaggtattgcaactcccaaaagagcgattgctaatcagcaacaacattcttcacaagctgtgattctggctggtggacatggatcaaatggttccatgggttatggttcgcagtctgatggcgaatcaactaacgcaacaatatttgttggcggcattgaccctgatgttattgatgaagacctcagacaacctttttcccagtttggagaggttgtttcagtgaagatcccagtagggaaaggatgtggatttgtccaatttgctgacaggaagagtgctgaagatgctatcgagagtttgaacgggacagtcatcggcaagaacactgtcagactctcctggggaagaagcccaaacaagcagtggagaggagactcagggcagcagtggaatggaggatactcacgaggacatggttacaacaatggaggaggatatgctaaccaccacgactccaacaactatcatggggagaattgaagagactcatcaagtgatcatcttcatcatggtttcacatatcaaagctaaaacctgtagtcgaaagaagaattttgttagatggatttgattttgatagacttgttgtttggaggagattcaaaaattttggttactggtttgtctcagactaatataaatggttgcaacttgttgg

SEQ ID NO: 41130 - protein, 433 aa, Arabidopsis thaliana
  peptide (1)..(433): Ceres Seq. ID no. 12395268
MQTTNGSDSTLATSGATPPNQQTPPPPQQWQQQQQQQWMAAMQYPPAAAMMMMQQQQMLMYPHQYVPYNQGPYQQHHPQLHQYGSYQQHQHQQHKAIDRGSGDDVKTLWVGDLLHWMDETYLHSCFSHTGEVSSVKVIRNKLTSQSEGYGFVEFLSRAAAEEVLQNYSGSVMPNSDQPFRINWASFSTGEKRAVENGPDLSVFVGDLSPDVTDVLLHETFSDRYPSVKSAKVVIDSNTGRSKGYGFVRFGDENERSRALTEMNGAYCSNRQMRVGIATPKRAIANQQQHSSQAVILAGGHGSNGSMGYGSQSDGESTNATIFVGGIDPDVIDEDLRQPFSQFGEVVSVKIPVGKGCGFVQFADRKSAEDAIESLNGTVIGKNTVRLSWGRSPNKQWRGDSGQQWNGGYSRGHGYNNGGGYANHHDSNNYHGEN

SEQ ID NO: 41131 - protein, 395 aa, Arabidopsis thaliana
  peptide (1)..(395): Ceres Seq. ID no. 12395269
MAAMQYPPAAAMMMMQQQQMLMYPHQYVPYNQGPYQQHHPQLHQYGSYQQHQHQQHKAIDRGSGDDVKTLWVGDLLHWMDETYLHSCFSHTGEVSSVKVIRNKLTSQSEGYGFVEFLSRAAAEEVLQNYSGSVMPNSDQPFRINWASFSTGEKRAVENGPDLSVFVGDLSPDVTDVLLHETFSDRYPSVKSAKVVIDSNTGRSKGYGFVRFGDENERSRALTEMNGAYCSNRQMRVGIATPKRAIANQQQHSSQAVILAGGHGSNGSMGYGSQSDGESTNATIFVGGIDPDVIDEDLRQPFSQFGEVVSVKIPVGKGCGFVQFADRKSAEDAIESLNGTVIGKNTVRLSWGRSPNKQWRGDSGQQWNGGYSRGHGYNNGGGYANHHDSNNYHGEN

SEQ ID NO: 41132 - protein, 392 aa, Arabidopsis thaliana
  peptide (1)..(392): Ceres Seq. ID no. 12395270
MQYPPAAAMMMMQQQQMLMYPHQYVPYNQGPYQQHHPQLHQYGSYQQHQHQQHKAIDRGSGDDVKTLWVGDLLHWMDETYLHSCFSHTGEVSSVKVIRNKLTSQSEGYGFVEFLSRAAAEEVLQNYSGSVMPNSDQPFRINWASFSTGEKRAVENGPDLSVFVGDLSPDVTDVLLHETFSDRYPSVKSAKVVIDSNTGRSKGYGFVRFGDENERSRALTEMNGAYCSNRQMRVGIATPKRAIANQQQHSSQAVILAGGHGSNGSMGYGSQSDGESTNATIFVGGIDPDVIDEDLRQPFSQFGEVVSVKIPVGKGCGFVQFADRKSAEDAIESLNGTVIGKNTVRLSWGRSPNKQWRGDSGQQWNGGYSRGHGYNNGGGYANHHDSNNYHGEN

SEQ ID NO: 41133 - DNA, 1416 bp, Arabidopsis thaliana
  misc_feature (1)..(1416): Ceres Seq. ID no. 12482142
  misc_feature (1)..(1416): Ortholog of  Ceres SEQ ID NO 13599602 as cited in SEQ ID NO 0
tcttttgattctcatcatctctgcattttctgaattggctcagacataatttcttcggtgacttccatggctccgcctgtctctgatgattccctacagcctcgagatgtttgtgttgtgggagtggcgcgaacgcctataggggacttccttggctccctctcgtctttgactgctacaagacttgggtccatagccatccaagccgcacttaagagagcacatgttgatccggcccttgtggaagaggtcttctttggcaatgtcttaactgccaatcttgggcaagcaccagcaagacaggctgcacttggtgctgggattccctattctgtgatctgcaccactatcaacaaagtttgtgctgcaggaatgaaatctgtaatgctagcgtctcaaagtatccagctcggcttgaatgatattgttgttgctggtgggatggagagcatgtcaaacgtacctaagtacctcccggacgcaagaaggggttctcgattaggtcatgatactgttgttgatggtatgatgaaagatggactttgggatgtctataatgactttggaatgggagtttgtggagaaatatgcgctgaccagtaccgtattacaagagaagaacaggatgcttatgctatccagagctttgagcgtggtattgctgcgcaaaacactcagttgttcgcttgggaaattgttccggtcgaagtttccactggaagagggaggccttcagttgttattgacaaggatgaaggattggggaagtttgatgcagccaagttaaaaaagcttagaccaagtttcaaggaggatgggggatcagtcactgctggaaatgcatcaagcataagtgatggtgcggcagcgttagtgctagtgagtggagagaaggctcttgagcttggactgcatgttatcgctaagattagaggatacgctgatgctgctcaggcaccagagttattcacaaccacgccagctcttgctattcctaaagctataaagcgggctggtttggatgcatctcaagtggattattatgaaataaacgaagcattttctgtggtagctctagccaatcagaaactactgggattagatcctgaacggctcaatgcgcatggaggggctgtttcactgggacatccattgggctgtagcggtgctcgtatcttggtcacattattgggggtgttgagagcaaagaagggaaagtatggagtggcatcaatatgcaacggaggaggaggagcatcagcacttgtccttgagttcatgtcggagaagacaatcggatattcggcactctgaagctaagagctgttgttttataacgcaaagcttatgtatatggttcatgtgtgtgtcacaagactgtaactttgtacttgagagagatgcaataaaagtgtg

SEQ ID NO: 41134 - protein, 415 aa, Arabidopsis thaliana; identical to SEQ ID NO: 38067
  peptide (1)..(415): Ceres Seq. ID no. 12482143

SEQ ID NO: 41135 - protein, 313 aa, Arabidopsis thaliana; identical to SEQ ID NO: 38068
  peptide (1)..(313): Ceres Seq. ID no. 12482144

SEQ ID NO: 41136 - protein, 309 aa, Arabidopsis thaliana
  peptide (1)..(309): Ceres Seq. ID no. 12482145
MLASQSIQLGLNDIVVAGGMESMSNVPKYLPDARRGSRLGHDTVVDGMMKDGLWDVYNDFGMGVCGEICADQYRITREEQDAYAIQSFERGIAAQNTQLFAWEIVPVEVSTGRGRPSVVIDKDEGLGKFDAAKLKKLRPSFKEDGGSVTAGNASSISDGAAALVLVSGEKALELGLHVIAKIRGYADAAQAPELFTTTPALAIPKAIKRAGLDASQVDYYEINEAFSVVALANQKLLGLDPERLNAHGGAVSLGHPLGCSGARILVTLLGVLRAKKGKYGVASICNGGGGASALVLEFMSEKTIGYSAL

SEQ ID NO: 41137 - DNA, 3623 bp, Arabidopsis thaliana
  misc_feature (1)..(3623): Ceres Seq. ID no. 13489161
  misc_feature (1)..(3623): Ortholog of  Ceres SEQ ID NO 15179424 as cited in SEQ ID NO 1138
atgggtttgaatctgaatccaatattgagacaagaactggctaatcttgacaaagacacagagagtcgtaaatcagcaatgaaagctcttaaatcttatgtgaaggacttggattcaaaggctattcctggttttctagctcaagttttcgagactaaagaaaccaactctttgtccggtgaatacacgatttcgctttatgaaatccttgctcgtgttcatggacctaacattgtgcctcagattgatacaatcatgtccactattgtcaagactttggcttctagtgctggttctttccctcttcaacaagcgtgttcgaaagttattccggcgattgctcgatatgggatcgatccgactactacagaagacaagaaacgagttataatccactctttgtgtaagcctcttacggattctctattggcctctcaagagagccttacttcaggggctgctttgtgtttgaaggctcttgtggatagtgacaattggcggtttgcttcggatgagatggtgaacagggtttgtcaaaatgtggtagttgcgttggactcaaactccaaccaaacacatcttcaaatgggtttggttatgtcacttgccaagcataatcctttgattgttgaagcttatgcaaggttgctgatacacacggggttgcgaattctaggatttggagtatctgaaggaaactcgcagaaacgattatcagcagtccaaatgttgaacttccttatgaagtgcttggatccgagaagcatatactcggaagttgagttgataataaaagaaatggagaggtgtcaatctgaccaaatggcttatgttagaggagctgcttatgaagcaatgatgacttcaaaaagaatagcggcagagctcgagtcgaagatggagaaaggttgtcgttctgttactggttcgaatttcagtcgaagaaactgttcgtccattgttcctgattactccttatcacctgaatcacagactctaggctcttttagcgggtatgattctccggttgagtcctcgcctatttctcatacttcttgtaactctgaatttgatcggaggagtgtgaaccgcaaactttggagacgtgatgagaatggaggagtggttgatatctctttaaaggatggtcttttctcccgtgtaactaaaggaagcaccactgtctctgattcacctcttgtaccgtatgatacttgtgaaaatggagatgaatttgaagggtttctaatggaaagtttgagaaacaccactcctagtcctcagagacagcgttcacgtcgcatcaatgctgaagatttcaacatcttcagcactccacggaagctaatcagctctcttcaatatcctgatgatgttgatttagatcattcagacatccaaagtccaatactgagaggcgagagagagaaaaccataggatctcgcaagaatcctaaactcagaaagcaatttccaaccatggtggaaacaatgtcatcaactatcacagttagtgaagacacagctcaaacacagatgataaccggtaagaagaagaagaagaagatgagctatgccaaactcgttattgcgatatcttttgttgtggtggctctcttcgcaactgtgatattgatgaaccggttcaaggttgataattttttccggtttaatcaaaccggttcgagcaatttattagcttcgagaaaaggaacaatttattcactcgttaagggttttgcgcacatccgcctcatgatgacaaactccgattccgaccactgtactccggcgaaaacctcaatttctggggatggattagaaaaagagagcgactttaagaagcaactgaactctgagatagatccacaagcttcttcctcgcaaaacgatgcaataactatggaagatggagccgtctctgtaaacaatagggatctgcaagagataaaggaatcatccttctctaaaggaagtgagcaatatcgagttgatggagcccttgaagaaagtttgaattttgaggagaaggaacaagaatctgaagctcagagactattggaagcagagaagagaagattgctggctgaaatcgaacttgggtcaatctttaggaagagtgttgatgtggatacgttgcctaagatcgaagagacgatggataatgatgttgataagattgaattggttgatcatactgcgttggttgatgttgttcatcatcctaagagaccagggactgctcaaaatgagaaggatacacctagaaagcttaagaaaattggagataagagaaatgttattgaggggagtggagtagaaaacaatgggaagcagtttaggagattgtacactaggaaacaattggagtcaatgaggtttgcccacattgtgaatcagaagaacctgtggagtgagatgtattctaggattctacctgaggtggtgactgagtatgaaagtttagtttatgtgaagaattacaagagttcaaagtctaatcgtgttcgtgggcgaacggagagtggcaatgaagaaaatttggggactgaagaaggaacggaggaccctgaagactacactgacgataatgatgattacaatagcattttgagacctgcgtttgaagtagatggagaacctgattttagtactggaccaccagaagatgggcttgaatatttaagacgagtcaggtgggaggctaagggaattccgaatgtaagagtagccaagatagatgaaagcacgtacataaagaaagagcaaagtgtttatatgccactaattcctgaaatccccaaatgtccagagtacctgttacccatgaaggaatgggaggactcgttgcttttggactttgtacaccttcgccagactctaacacaaagtgccaacagctgtgaggatgagataatatcaagtcagtgtgtagaagatttgcttgtggagatgttcaataagcatctccacacagaggaggatgagtcttttggtgaggtggtaacagacatacaaggaatggactcggtgacgcgggtatcaaagctgaaaaagcgtatatgtttggttgagaaggagagcggtttacagagtagcgattgcaaatgggtagtagcgttgtgtgcatcattggagactcctttggatgccgatacttgtgcttgtctaaggggtcttctgaggaagtgtgctagtgttcgtgcagagacatcattagaggttggagatgaagaagttatcaccatggcaaatatgctcatcaccatcgccggcagatactttggccaaatgggacagtaataagtgaagaagagagtggacatgacatgcccttacttttctctcatatgtgcttttgaatcttacatgagctttaatgccattttttgtagtgtcccctttgttatgtcatctgtgatgttcggaatcatcgtatttgtgcgaagtaagctctttttttttgggatcttgttgaggttattgagatcttcacaacttccgtggatcggctagatagagtcttcttatcataccgagttctatcattgtcattgttgaaggaaattacaagaactacgttgctgtagtggtttcaatttgttacaattcagtttaagtgc

SEQ ID NO: 41138 - protein, 1100 aa, Arabidopsis thaliana
  peptide (1)..(1100): Ceres Seq. ID no. 13489162
MGLNLNPILRQELANLDKDTESRKSAMKALKSYVKDLDSKAIPGFLAQVFETKETNSLSGEYTISLYEILARVHGPNIVPQIDTIMSTIVKTLASSAGSFPLQQACSKVIPAIARYGIDPTTTEDKKRVIIHSLCKPLTDSLLASQESLTSGAALCLKALVDSDNWRFASDEMVNRVCQNVVVALDSNSNQTHLQMGLVMSLAKHNPLIVEAYARLLIHTGLRILGFGVSEGNSQKRLSAVQMLNFLMKCLDPRSIYSEVELIIKEMERCQSDQMAYVRGAAYEAMMTSKRIAAELESKMEKGCRSVTGSNFSRRNCSSIVPDYSLSPESQTLGSFSGYDSPVESSPISHTSCNSEFDRRSVNRKLWRRDENGGVVDISLKDGLFSRVTKGSTTVSDSPLVPYDTCENGDEFEGFLMESLRNTTPSPQRQRSRRINAEDFNIFSTPRKLISSLQYPDDVDLDHSDIQSPILRGEREKTIGSRKNPKLRKQFPTMVETMSSTITVSEDTAQTQMITGKKKKKKMSYAKLVIAISFVVVALFATVILMNRFKVDNFFRFNQTGSSNLLASRKGTIYSLVKGFAHIRLMMTNSDSDHCTPAKTSISGDGLEKESDFKKQLNSEIDPQASSSQNDAITMEDGAVSVNNRDLQEIKESSFSKGSEQYRVDGALEESLNFEEKEQESEAQRLLEAEKRRLLAEIELGSIFRKSVDVDTLPKIEETMDNDVDKIELVDHTALVDVVHHPKRPGTAQNEKDTPRKLKKIGDKRNVIEGSGVENNGKQFRRLYTRKQLESMRFAHIVNQKNLWSEMYSRILPEVVTEYESLVYVKNYKSSKSNRVRGRTESGNEENLGTEEGTEDPEDYTDDNDDYNSILRPAFEVDGEPDFSTGPPEDGLEYLRRVRWEAKGIPNVRVAKIDESTYIKKEQSVYMPLIPEIPKCPEYLLPMKEWEDSLLLDFVHLRQTLTQSANSCEDEIISSQCVEDLLVEMFNKHLHTEEDESFGEVVTDIQGMDSVTRVSKLKKRICLVEKESGLQSSDCKWVVALCASLETPLDADTCACLRGLLRKCASVRAETSLEVGDEEVITMANMLITIAGRYFGQMGQ

SEQ ID NO: 41139 - protein, 1074 aa, Arabidopsis thaliana
  peptide (1)..(1074): Ceres Seq. ID no. 13489163
MKALKSYVKDLDSKAIPGFLAQVFETKETNSLSGEYTISLYEILARVHGPNIVPQIDTIMSTIVKTLASSAGSFPLQQACSKVIPAIARYGIDPTTTEDKKRVIIHSLCKPLTDSLLASQESLTSGAALCLKALVDSDNWRFASDEMVNRVCQNVVVALDSNSNQTHLQMGLVMSLAKHNPLIVEAYARLLIHTGLRILGFGVSEGNSQKRLSAVQMLNFLMKCLDPRSIYSEVELIIKEMERCQSDQMAYVRGAAYEAMMTSKRIAAELESKMEKGCRSVTGSNFSRRNCSSIVPDYSLSPESQTLGSFSGYDSPVESSPISHTSCNSEFDRRSVNRKLWRRDENGGVVDISLKDGLFSRVTKGSTTVSDSPLVPYDTCENGDEFEGFLMESLRNTTPSPQRQRSRRINAEDFNIFSTPRKLISSLQYPDDVDLDHSDIQSPILRGEREKTIGSRKNPKLRKQFPTMVETMSSTITVSEDTAQTQMITGKKKKKKMSYAKLVIAISFVVVALFATVILMNRFKVDNFFRFNQTGSSNLLASRKGTIYSLVKGFAHIRLMMTNSDSDHCTPAKTSISGDGLEKESDFKKQLNSEIDPQASSSQNDAITMEDGAVSVNNRDLQEIKESSFSKGSEQYRVDGALEESLNFEEKEQESEAQRLLEAEKRRLLAEIELGSIFRKSVDVDTLPKIEETMDNDVDKIELVDHTALVDVVHHPKRPGTAQNEKDTPRKLKKIGDKRNVIEGSGVENNGKQFRRLYTRKQLESMRFAHIVNQKNLWSEMYSRILPEVVTEYESLVYVKNYKSSKSNRVRGRTESGNEENLGTEEGTEDPEDYTDDNDDYNSILRPAFEVDGEPDFSTGPPEDGLEYLRRVRWEAKGIPNVRVAKIDESTYIKKEQSVYMPLIPEIPKCPEYLLPMKEWEDSLLLDFVHLRQTLTQSANSCEDEIISSQCVEDLLVEMFNKHLHTEEDESFGEVVTDIQGMDSVTRVSKLKKRICLVEKESGLQSSDCKWVVALCASLETPLDADTCACLRGLLRKCASVRAETSLEVGDEEVITMANMLITIAGRYFGQMGQ

SEQ ID NO: 41140 - protein, 1015 aa, Arabidopsis thaliana
  peptide (1)..(1015): Ceres Seq. ID no. 13489164
MSTIVKTLASSAGSFPLQQACSKVIPAIARYGIDPTTTEDKKRVIIHSLCKPLTDSLLASQESLTSGAALCLKALVDSDNWRFASDEMVNRVCQNVVVALDSNSNQTHLQMGLVMSLAKHNPLIVEAYARLLIHTGLRILGFGVSEGNSQKRLSAVQMLNFLMKCLDPRSIYSEVELIIKEMERCQSDQMAYVRGAAYEAMMTSKRIAAELESKMEKGCRSVTGSNFSRRNCSSIVPDYSLSPESQTLGSFSGYDSPVESSPISHTSCNSEFDRRSVNRKLWRRDENGGVVDISLKDGLFSRVTKGSTTVSDSPLVPYDTCENGDEFEGFLMESLRNTTPSPQRQRSRRINAEDFNIFSTPRKLISSLQYPDDVDLDHSDIQSPILRGEREKTIGSRKNPKLRKQFPTMVETMSSTITVSEDTAQTQMITGKKKKKKMSYAKLVIAISFVVVALFATVILMNRFKVDNFFRFNQTGSSNLLASRKGTIYSLVKGFAHIRLMMTNSDSDHCTPAKTSISGDGLEKESDFKKQLNSEIDPQASSSQNDAITMEDGAVSVNNRDLQEIKESSFSKGSEQYRVDGALEESLNFEEKEQESEAQRLLEAEKRRLLAEIELGSIFRKSVDVDTLPKIEETMDNDVDKIELVDHTALVDVVHHPKRPGTAQNEKDTPRKLKKIGDKRNVIEGSGVENNGKQFRRLYTRKQLESMRFAHIVNQKNLWSEMYSRILPEVVTEYESLVYVKNYKSSKSNRVRGRTESGNEENLGTEEGTEDPEDYTDDNDDYNSILRPAFEVDGEPDFSTGPPEDGLEYLRRVRWEAKGIPNVRVAKIDESTYIKKEQSVYMPLIPEIPKCPEYLLPMKEWEDSLLLDFVHLRQTLTQSANSCEDEIISSQCVEDLLVEMFNKHLHTEEDESFGEVVTDIQGMDSVTRVSKLKKRICLVEKESGLQSSDCKWVVALCASLETPLDADTCACLRGLLRKCASVRAETSLEVGDEEVITMANMLITIAGRYFGQMGQ

SEQ ID NO: 41141 - DNA, 742 bp, Arabidopsis thaliana
  misc_feature (1)..(742): Ceres Seq. ID no. 12325739
  misc_feature (1)..(742): Ortholog of  Ceres SEQ ID NO 15175519 as cited in SEQ ID NO 1110
  misc_feature (1)..(742): Ortholog of  Ceres SEQ ID NO 13637980 as cited in SEQ ID NO 58973
  misc_feature (1)..(742): Ortholog of  Ceres SEQ ID NO 12624081 as cited in SEQ ID NO 61729
  misc_feature (1)..(742): Ortholog of  Ceres SEQ ID NO 13599435 as cited in SEQ ID NO 0
aaaaaacattcagagagaaaattcagcatttttgatagctcaagcacttgattctttccaaaggggtttcctgaggccaagtaacaatggcgaaaggagttgcagttttgaacagcagtgagggtgttacggggactatctttttcacccaggaaggcgatggtgtgaccactgtgagtggaacagtttctggccttaagcctggtcttcatggtttccatgtccatgctcttggtgacaccactaacggttgcatgtctactggtccacatttcaaccccgatggtaaaacacacggtgcccctgaggatgctaatcgacatgctggtgatctaggaaacatcactgttggagatgatggaactgccaccttcacaatcactgattgccagattcctcttactggaccaaactctattgttggtagggctgttgttgtccatgcagaccctgatgacctcggaaagggaggccatgaactcagcctggctactggaaacgcaggcggccgtgttgcttgcggcatcattggtctccagggctaaagctgctacgtttccaaagaagagattgatgtaataaggaggtccaaccttagacctgggtttggtagttgtgtgtatcttctggtgtgtggctaaaaacctttgagcttagtgtggctcaaagcatctttaattcagacagaaaacagagaaaattccgtacttttattatttcatgaataaaaaagagttggttt

SEQ ID NO: 41142 - protein, 152 aa, Arabidopsis thaliana; identical to SEQ ID NO: 22423
  peptide (1)..(152): Ceres Seq. ID no. 12325740

SEQ ID NO: 41143 - protein, 96 aa, Arabidopsis thaliana; identical to SEQ ID NO: 22424
  peptide (1)..(96): Ceres Seq. ID no. 12325741

SEQ ID NO: 41144 - DNA, 1124 bp, Arabidopsis thaliana
  misc_feature (1)..(1124): Ceres Seq. ID no. 13499879
  misc_feature (1)..(1124): Ortholog of  Ceres SEQ ID NO 15168318 as cited in SEQ ID NO 58281
aaaacaacaacatcaacaacaaaactctttaaaaagcaagaaaactttcactagtagttgaagaatttctctcttcctctacttattattattatcaactggtgatttgatttctctctctctctctcacaatggattcattaggatcaagaagaaggacacataatagccgtagggttccttcaatgggaatagaaggggacgaagagtttcaagaagaagatgtgtggtcagttttacgagaaggagaaacttcaagtcctgaaatgaaaatacccaaaagtcatttctcttcctcatcatcttcttcctcttcaccatggaacattcgtagaagcaaggaggtctcaggagtgaaacaatcatcagcacctatgaatgtccctgattggtccaaggtttatggtgactcaaagagcaacagaaggagtagccatttgcattctcatgctgctgacgatgatgatgaagatgatgatggttgcatggttcctccacatgaatgggttgcaagaaagctagcaagaacacagatctcttctttctctatgtgtgaaggagttggaagaacacttaaaggaagagatctaagcaaagtgagaaatgctgtcttgtcaaaaactggtttcttggagtaagtaggataaaatatctcatcatcatcatcaccataattatcatccatgtgcatggaatatgaatcccataactcttgtttaacattatcatcatgaaaaactcaactttatggtatccacatcatcatcattatcaatgtcattgtcgtcatcatcatgtggggatcactataccaagagtctttttgttaagttttttttttctttattgttgttattatttttcaatgtgttatttagagtagataagtatcatagtgatgatgatgacttgtcagccccatgcatgggtcccgttttatgttcttctgttgtttttggtttctctttgaaggtttttttatgatcttaaattagagcctagagaggggcatctcctttagaacctttaattggagttgagttctttaccatgttttggtgaaagattttgtcgtttgctatcgacaatgttatatataaattagatatctttctttctttgtt

SEQ ID NO: 41145 - protein, 168 aa, Arabidopsis thaliana
  peptide (1)..(168): Ceres Seq. ID no. 13499880
MDSLGSRRRTHNSRRVPSMGIEGDEEFQEEDVWSVLREGETSSPEMKIPKSHFSSSSSSSSSPWNIRRSKEVSGVKQSSAPMNVPDWSKVYGDSKSNRRSSHLHSHAADDDDEDDDGCMVPPHEWVARKLARTQISSFSMCEGVGRTLKGRDLSKVRNAVLSKTGFLE

SEQ ID NO: 41146 - protein, 150 aa, Arabidopsis thaliana
  peptide (1)..(150): Ceres Seq. ID no. 13499881
MGIEGDEEFQEEDVWSVLREGETSSPEMKIPKSHFSSSSSSSSSPWNIRRSKEVSGVKQSSAPMNVPDWSKVYGDSKSNRRSSHLHSHAADDDDEDDDGCMVPPHEWVARKLARTQISSFSMCEGVGRTLKGRDLSKVRNAVLSKTGFLE

SEQ ID NO: 41147 - protein, 123 aa, Arabidopsis thaliana
  peptide (1)..(123): Ceres Seq. ID no. 13499882
MKIPKSHFSSSSSSSSSPWNIRRSKEVSGVKQSSAPMNVPDWSKVYGDSKSNRRSSHLHSHAADDDDEDDDGCMVPPHEWVARKLARTQISSFSMCEGVGRTLKGRDLSKVRNAVLSKTGFLE

SEQ ID NO: 41148 - DNA, 1439 bp, Arabidopsis thaliana
  misc_feature (1)..(1439): Ceres Seq. ID no. 13497231
  misc_feature (1)..(1439): Ortholog of  Ceres SEQ ID NO 14311755 as cited in SEQ ID NO 57271
  misc_feature (1)..(1439): Ortholog of  Ceres SEQ ID NO 15171156 as cited in SEQ ID NO 58259
  misc_feature (1)..(1439): Ortholog of  Ceres SEQ ID NO 14302212 as cited in SEQ ID NO 66507
  misc_feature (1)..(1439): Ortholog of  Ceres SEQ ID NO 13653980 as cited in SEQ ID NO 69253
ttacatgaaaatgaggaggtagactcatgtaacataactcttaccaatagaggaagaagaaaaagttagcaagagtcggttacttgtgagaaattccaacaaatgccggaggatttatgcacatcttggagcatctgataagaggaaaaaattatgttcgctctcacatttctaaatccaaatccaagacttccatctccattgttccttgccaagtctactcctgaatcagcgttgagcagaagaagcagagctttttcatcttctaactcttatccttggagaccgaaccttagatttaatggcttcaagctcaagtcagctacagttccggagaatgtggaaggaggagatttggaatctggaagtttggttaaagggttgaagctaggaggcatgtttggagtttggtaccttctcaatatctactacaacattttcaacaaacaggtacttagggtttatccatatccagcgactgtaacagcatttcaattagggtgtggaacgttgatgattgctataatgtggctccttaaactccatccacgccccaaattttctccttctcagtttacggtgatcgtacaactagcagtagctcacacgttagggaacttgttaacaaatgtgagcttaggaagagtaaatgtctctttcacccacactatcaaagcaatggagcctttcttcaccgtcttgctttctgttctcttgctcggtgagtggccgagtctgtggattgtttgttcgttgttacctattgtcgctggagtctctttagcatctttcacagaagcttctttcaattggattggtttctgcagtgcaatggcttctaatgtgacgaatcaatcacgcaatgtcctcagtaaaaaattcatggttggaaaggacgctttggacaacatcaaccttttctctataataaccattatctcctttatcttactggttcctttagcaatcctcatcgatgggttcaaggttactccttcgcatttacaagtagcaacaagccagggtttgtcggtaaaagagttttgcatcatgtctctacttgctggtgtttgcttgcatagctaccaacaggtatcgtatatgatattggagatggtgtctccagtaacacactctgtagggaactgcgtgaagcgtgtggtggttattacatcatccattcttttcttcaaaactccagtctcacctcttaactctataggtaccgcgactgcactagctggagtatatttgtacagcagagccaaacgagtccaagtcaaaccaaatccaaaaatgtcttgaattttgtatatagaagctcttagtttattatttatgcgaaaaatgttgatatttttgttcatccatgtcgtttttacatgacactattaacttttgttaaattcaactaatctcattaaataattctattcttt

SEQ ID NO: 41149 - protein, 383 aa, Arabidopsis thaliana
  peptide (1)..(383): Ceres Seq. ID no. 13497232
MFALTFLNPNPRLPSPLFLAKSTPESALSRRSRAFSSSNSYPWRPNLRFNGFKLKSATVPENVEGGDLESGSLVKGLKLGGMFGVWYLLNIYYNIFNKQVLRVYPYPATVTAFQLGCGTLMIAIMWLLKLHPRPKFSPSQFTVIVQLAVAHTLGNLLTNVSLGRVNVSFTHTIKAMEPFFTVLLSVLLLGEWPSLWIVCSLLPIVAGVSLASFTEASFNWIGFCSAMASNVTNQSRNVLSKKFMVGKDALDNINLFSIITIISFILLVPLAILIDGFKVTPSHLQVATSQGLSVKEFCIMSLLAGVCLHSYQQVSYMILEMVSPVTHSVGNCVKRVVVITSSILFFKTPVSPLNSIGTATALAGVYLYSRAKRVQVKPNPKMS

SEQ ID NO: 41150 - protein, 302 aa, Arabidopsis thaliana
  peptide (1)..(302): Ceres Seq. ID no. 13497233
MFGVWYLLNIYYNIFNKQVLRVYPYPATVTAFQLGCGTLMIAIMWLLKLHPRPKFSPSQFTVIVQLAVAHTLGNLLTNVSLGRVNVSFTHTIKAMEPFFTVLLSVLLLGEWPSLWIVCSLLPIVAGVSLASFTEASFNWIGFCSAMASNVTNQSRNVLSKKFMVGKDALDNINLFSIITIISFILLVPLAILIDGFKVTPSHLQVATSQGLSVKEFCIMSLLAGVCLHSYQQVSYMILEMVSPVTHSVGNCVKRVVVITSSILFFKTPVSPLNSIGTATALAGVYLYSRAKRVQVKPNPKMS

SEQ ID NO: 41151 - protein, 263 aa, Arabidopsis thaliana
  peptide (1)..(263): Ceres Seq. ID no. 13497234
MIAIMWLLKLHPRPKFSPSQFTVIVQLAVAHTLGNLLTNVSLGRVNVSFTHTIKAMEPFFTVLLSVLLLGEWPSLWIVCSLLPIVAGVSLASFTEASFNWIGFCSAMASNVTNQSRNVLSKKFMVGKDALDNINLFSIITIISFILLVPLAILIDGFKVTPSHLQVATSQGLSVKEFCIMSLLAGVCLHSYQQVSYMILEMVSPVTHSVGNCVKRVVVITSSILFFKTPVSPLNSIGTATALAGVYLYSRAKRVQVKPNPKMS

SEQ ID NO: 41152 - DNA, 814 bp, Arabidopsis thaliana
  misc_feature (1)..(814): Ceres Seq. ID no. 12326835
  misc_feature (1)..(814): Ortholog of  Ceres SEQ ID NO 15173263 as cited in SEQ ID NO 64606
accttcctcttcccctcctatataaaaaaaatcgacatcgcttttgctcacttctctctcttaggttttttttcccttctcccaatctcatcttctccgaaaacctttcttctctcaaatttctgtgaaaacatgtctgacgacgagcaccactttgaggccagcgaatccggagcttccaagacctatcctcaatcagccggtaacatccgtaaaggtggtcacatcgtcatcaaaaaccgtccctgcaaggttgttgaggtttcgacttccaaaactggcaagcacggtcacgccaaatgtcactttgttgctattgatatcttcactgctaagaagcttgaagatattgttccatcttcccacaattgtgatgttccacatgtgaaccgtgttgattaccagttgattgatatcactgaggatggcttcgtgagccttctcactgacagtggtggcaccaaggatgatctcaagcttcccaccgatgatggtctcaccgcccagatgaggcttggattcgatgagggaaaggatattgtggtgtctgtcatgtcttccatgggagaggagcagatctgtgccgtcaaggaagttggtggtggcaagtaaacaagtatcattcgatatattattaccagtttgacaacggacgtcaatgttataagaaccaaaagatgtttttctttttcctaatttagaccctttgtgtgtgtttcttgttgcaagacaaccatatctattggttttggattgttggaaaagtttgtgttgaaacattcaaagtttcttatgagatgttattcttaaaacc

SEQ ID NO: 41153 - protein, 203 aa, Arabidopsis thaliana
  peptide (1)..(203): Ceres Seq. ID no. 12326836
TFLFPSYIKKIDIAFAHFSLLGFFSLLPISSSPKTFLLSNFCENMSDDEHHFEASESGASKTYPQSAGNIRKGGHIVIKNRPCKVVEVSTSKTGKHGHAKCHFVAIDIFTAKKLEDIVPSSHNCDVPHVNRVDYQLIDITEDGFVSLLTDSGGTKDDLKLPTDDGLTAQMRLGFDEGKDIVVSVMSSMGEEQICAVKEVGGGK

SEQ ID NO: 41154 - protein, 159 aa, Arabidopsis thaliana
  peptide (1)..(159): Ceres Seq. ID no. 12326837
MSDDEHHFEASESGASKTYPQSAGNIRKGGHIVIKNRPCKVVEVSTSKTGKHGHAKCHFVAIDIFTAKKLEDIVPSSHNCDVPHVNRVDYQLIDITEDGFVSLLTDSGGTKDDLKLPTDDGLTAQMRLGFDEGKDIVVSVMSSMGEEQICAVKEVGGGK

SEQ ID NO: 41155 - DNA, 1260 bp, Arabidopsis thaliana
  misc_feature (1)..(1260): Ceres Seq. ID no. 12329888
  misc_feature (1)..(1260): Ortholog of  Ceres SEQ ID NO 14307404 as cited in SEQ ID NO 54231
  misc_feature (1)..(1260): Ortholog of  Ceres SEQ ID NO 14315052 as cited in SEQ ID NO 56951
aacgaaaaacaaaaaaaaaaagacagaagacaaaaaaaaatcacgaaatctgattttcctctcttttgctcgaagccaagtctctgcttttactttgatccaccaacttcatcttcaacctctcgattttaggtaagattcttagagtgattttgacttatctaagaatggagctaaagagcattaaggatgcgtttgatcgtgttgcgacaaagcagaagctctcttatagcaaaactaatgagattgttcatatgttgtctcaagaaatcgataaggctttgagcatattagaggagacaccatcatcagatactatgcttcttgatcatagatctatcctcgctgatgtgaagaaagtgtttatggagattgctccaatcactcaacttgaagctactgagaaagagctacatgcggctttgaccaagtaccctaaagttcttgagaaacagctgaatccagacatatcaaaggcttatagacacaatgttgagtttgatactcatatcgttaaccagattatcgccaactttttctaccgtcaaggaatgtttgacattggtgactgttttgttgctgaaactggtgaatctgaatgttctacaagacaatctttcgtggagatgtatcggatactagaagctatgaagagacgagatcttgaaccggctcttaattgggctgtttcgaactctgacaaactaaaggaagcaaggtctgatcttgagatgaagcttcatagtctacactttctggaaatagcacgaggcaaaaactccaaagaagctatcgactatgcgagaaagcatatcgccacgtttgcagatagctgcctcccggagatccagaagctcatgtgttctctcttatggaacagaaaactcgataaatcaccatactccgagtttctctcccccgctctgtggaacaatgcagtcaaagagctaacccgacagtactgcaacctactcggtgaatcatctgaaagcccgttgagtataacagtaacagcgggcacacaagcgttaccagtactattgaaatacatgaacgtggtgatggcgaataagaagcttgattggcagaccatggaacaacttcctgttgatgcgcaactatccgaggagtttcagtttcattcggtgtttgtctgtccagtctctaaagaacagtcaagtgatgataaccctccgatgatgatgtcttgtggacatgtgctttgcaagcagacgatcaacaaaatgtcaaagaatggct

SEQ ID NO: 41156 - protein, 364 aa, Arabidopsis thaliana
  peptide (1)..(364): Ceres Seq. ID no. 12329889
MELKSIKDAFDRVATKQKLSYSKTNEIVHMLSQEIDKALSILEETPSSDTMLLDHRSILADVKKVFMEIAPITQLEATEKELHAALTKYPKVLEKQLNPDISKAYRHNVEFDTHIVNQIIANFFYRQGMFDIGDCFVAETGESECSTRQSFVEMYRILEAMKRRDLEPALNWAVSNSDKLKEARSDLEMKLHSLHFLEIARGKNSKEAIDYARKHIATFADSCLPEIQKLMCSLLWNRKLDKSPYSEFLSPALWNNAVKELTRQYCNLLGESSESPLSITVTAGTQALPVLLKYMNVVMANKKLDWQTMEQLPVDAQLSEEFQFHSVFVCPVSKEQSSDDNPPMMMSCGHVLCKQTINKMSKNG

SEQ ID NO: 41157 - protein, 335 aa, Arabidopsis thaliana
  peptide (1)..(335): Ceres Seq. ID no. 12329890
MLSQEIDKALSILEETPSSDTMLLDHRSILADVKKVFMEIAPITQLEATEKELHAALTKYPKVLEKQLNPDISKAYRHNVEFDTHIVNQIIANFFYRQGMFDIGDCFVAETGESECSTRQSFVEMYRILEAMKRRDLEPALNWAVSNSDKLKEARSDLEMKLHSLHFLEIARGKNSKEAIDYARKHIATFADSCLPEIQKLMCSLLWNRKLDKSPYSEFLSPALWNNAVKELTRQYCNLLGESSESPLSITVTAGTQALPVLLKYMNVVMANKKLDWQTMEQLPVDAQLSEEFQFHSVFVCPVSKEQSSDDNPPMMMSCGHVLCKQTINKMSKNG

SEQ ID NO: 41158 - protein, 314 aa, Arabidopsis thaliana
  peptide (1)..(314): Ceres Seq. ID no. 12329891
MLLDHRSILADVKKVFMEIAPITQLEATEKELHAALTKYPKVLEKQLNPDISKAYRHNVEFDTHIVNQIIANFFYRQGMFDIGDCFVAETGESECSTRQSFVEMYRILEAMKRRDLEPALNWAVSNSDKLKEARSDLEMKLHSLHFLEIARGKNSKEAIDYARKHIATFADSCLPEIQKLMCSLLWNRKLDKSPYSEFLSPALWNNAVKELTRQYCNLLGESSESPLSITVTAGTQALPVLLKYMNVVMANKKLDWQTMEQLPVDAQLSEEFQFHSVFVCPVSKEQSSDDNPPMMMSCGHVLCKQTINKMSKNG

SEQ ID NO: 41159 - DNA, 1038 bp, Arabidopsis thaliana
  misc_feature (1)..(1038): Ceres Seq. ID no. 12323926
  misc_feature (1)..(1038): Ortholog of  Ceres SEQ ID NO 12474640 as cited in SEQ ID NO 129
  misc_feature (1)..(1038): Ortholog of  Ceres SEQ ID NO 12627370 as cited in SEQ ID NO 61162
  misc_feature (1)..(1038): Ortholog of  Ceres SEQ ID NO 13598268 as cited in SEQ ID NO 69313
agttcttttcttctctcctcctctttcttcttcctgattggaattttagggcttttgaaagcacgaacgcgtgaagctctaatcgagaaaaaaatggaggttttggataggagagacgatgagatcagggactcgggaaacatggacagcatcaagtcacactatgttaccgactctgtttccgaggaacgccgctctcgtgagctcaaggatggagaccatcctttacggtacaagttttcgatatggtacactcgtcgcacaccaggggttcggaaccagtcttatgaagataacatcaagaagatggtagaattcagcacggttgaaggattttgggcctgctactgtcaccttgctcgttcttctctcttgcctagtccaacagatcttcatttctttaaggatgggattcgtccattgtgggaggatggtgccaactgcaatggaggaaagtggatcatacgtttctcaaaagttgtatctgctcgcttctgggaggatctgcttcttgcgttggtaggcgaccagcttgatgatgctgataacatatgtggggcagtactgagtgtccgtttcaacgaggacatcattagtgtatggaatcgcaatgcttctgaccatcaggcagtgatgggtttgagagactcaatcaagcggcatttgaagttgcctcatgcatatgtcatggaatacaagccacacgatgcttctctccgcgacaactcttcctacagaaacacatggctgagaggataggcccaaagtcgatgattgtatcatgtaatgtggagaagatttgggaagctcatctgcaacctgggaagatatctggattgaaccctgtatccaataccatactgtaccggaggcttacaatatcagaaaaaacaaaatccgggctacttctgtgtcagtatgtgttcatttcgtttttcttttacagtacatcttgttaacttcaatggtttgactcttgatcaaaactataaggatgtattttcaatgaaaactggaaattacgttctggtttacatt

SEQ ID NO: 41160 - protein, 252 aa, Arabidopsis thaliana
  peptide (1)..(252): Ceres Seq. ID no. 12323927
SSFLLSSSFFFLIGILGLLKARTREALIEKKMEVLDRRDDEIRDSGNMDSIKSHYVTDSVSEERRSRELKDGDHPLRYKFSIWYTRRTPGVRNQSYEDNIKKMVEFSTVEGFWACYCHLARSSLLPSPTDLHFFKDGIRPLWEDGANCNGGKWIIRFSKVVSARFWEDLLLALVGDQLDDADNICGAVLSVRFNEDIISVWNRNASDHQAVMGLRDSIKRHLKLPHAYVMEYKPHDASLRDNSSYRNTWLRG

SEQ ID NO: 41161 - protein, 221 aa, Arabidopsis thaliana
  peptide (1)..(221): Ceres Seq. ID no. 12323928
MEVLDRRDDEIRDSGNMDSIKSHYVTDSVSEERRSRELKDGDHPLRYKFSIWYTRRTPGVRNQSYEDNIKKMVEFSTVEGFWACYCHLARSSLLPSPTDLHFFKDGIRPLWEDGANCNGGKWIIRFSKVVSARFWEDLLLALVGDQLDDADNICGAVLSVRFNEDIISVWNRNASDHQAVMGLRDSIKRHLKLPHAYVMEYKPHDASLRDNSSYRNTWLRG

SEQ ID NO: 41162 - protein, 205 aa, Arabidopsis thaliana
  peptide (1)..(205): Ceres Seq. ID no. 12323929
MDSIKSHYVTDSVSEERRSRELKDGDHPLRYKFSIWYTRRTPGVRNQSYEDNIKKMVEFSTVEGFWACYCHLARSSLLPSPTDLHFFKDGIRPLWEDGANCNGGKWIIRFSKVVSARFWEDLLLALVGDQLDDADNICGAVLSVRFNEDIISVWNRNASDHQAVMGLRDSIKRHLKLPHAYVMEYKPHDASLRDNSSYRNTWLRG

SEQ ID NO: 41163 - DNA, 1501 bp, Arabidopsis thaliana
  misc_feature (1)..(1501): Ceres Seq. ID no. 12327967
  misc_feature (1)..(1501): Ortholog of  Ceres SEQ ID NO 13502943 as cited in SEQ ID NO 65097
aaaaacaacatcaatggcaatgcacactgttcgattgtcgccggcgactcaacttcacggcggtatctctagcaatctgtcaccacccaatcgaaaacctaataattccatcgtccgatacggatgcggatcttcgaagcgtttccgtatcgtaacggtcttggcgtcactccgggaaaacgatgcaaacggaagggataactccgtgagagctatggaagtgaagaagatctttgaagactcgcctctgcttcctaagccgttatcatcgaaccagctcacggaatctgtctctaatggctcccgcgttcgtgttgcgtatcagggagtacgaggtgcatacagcgaatcagctgctgagaaggcttatccaaactgtgaagctgttccatgcgaagagtttgacactgcttttgaggcggttgagcggtggcttgttgacagagctgttttaccgattgagaactctttaggtggaagcatccatagaaattatgatcttctgctgcgacacaatttgcatattgtaggcgaagtcaagctagctgttcggcactgtttgttggctaaccacggtgtaaatattgaagatttgagaagggtgcttagccatccacaggctcttgcccaatgtgaaaacacgttaaccaaattggggttggtcagagaagcagtagatgatactgctggcgctgcgaagcaaattgcattcgaaaatttaaatgatgcagctgcagttgccagtgaaaaagctgcaaagatatatggtttgaacatagtcgctaaagatatccaggatgactgtgataatgttacaaggtttctaatgctcgcaagagaacccattatccctggaactaacagactctttaagacaagtatagttttctcgttagaggaagggcctggagtacttttcaaagcgcttgctgtgtttgcccttcggcaaatcaacctcacaaagattgaaagccgccctttaaggaaacatcctctccgagcatctggaggactaaaatactttgactatcttttctatgtggactttgaagcatctatggctgatgaagttgctcaaaacgcacttaggcatctcgaggagtttgctacctttttgcgggtactgggaagctacccagtggacactacaatgctctaaacatttcaaacatcttcttgtttgtgacagagatccgcttgatgatatcataatcctggtataaggagctatatccctgaggtgaggtctgagaggagtcaccaccttacaagacattccgctcttgttacaaattctgtttagttttccaaaaaagatcatctttgtttttagtaagaatgtagtcactaagtcagatatcaatgacaaataccaaagaactagtgttttttcgtgtttcatccatacatagatacttatcctgtgtcttttttagaaatttctttttgtatgacgtttcaaaattttgattgactattgttagtggtatatctttgagtt

SEQ ID NO: 41164 - protein, 385 aa, Arabidopsis thaliana
  peptide (1)..(385): Ceres Seq. ID no. 12327968
KTTSMAMHTVRLSPATQLHGGISSNLSPPNRKPNNSIVRYGCGSSKRFRIVTVLASLRENDANGRDNSVRAMEVKKIFEDSPLLPKPLSSNQLTESVSNGSRVRVAYQGVRGAYSESAAEKAYPNCEAVPCEEFDTAFEAVERWLVDRAVLPIENSLGGSIHRNYDLLLRHNLHIVGEVKLAVRHCLLANHGVNIEDLRRVLSHPQALAQCENTLTKLGLVREAVDDTAGAAKQIAFENLNDAAAVASEKAAKIYGLNIVAKDIQDDCDNVTRFLMLAREPIIPGTNRLFKTSIVFSLEEGPGVLFKALAVFALRQINLTKIESRPLRKHPLRASGGLKYFDYLFYVDFEASMADEVAQNALRHLEEFATFLRVLGSYPVDTTML

SEQ ID NO: 41165 - protein, 381 aa, Arabidopsis thaliana
  peptide (1)..(381): Ceres Seq. ID no. 12327969
MAMHTVRLSPATQLHGGISSNLSPPNRKPNNSIVRYGCGSSKRFRIVTVLASLRENDANGRDNSVRAMEVKKIFEDSPLLPKPLSSNQLTESVSNGSRVRVAYQGVRGAYSESAAEKAYPNCEAVPCEEFDTAFEAVERWLVDRAVLPIENSLGGSIHRNYDLLLRHNLHIVGEVKLAVRHCLLANHGVNIEDLRRVLSHPQALAQCENTLTKLGLVREAVDDTAGAAKQIAFENLNDAAAVASEKAAKIYGLNIVAKDIQDDCDNVTRFLMLAREPIIPGTNRLFKTSIVFSLEEGPGVLFKALAVFALRQINLTKIESRPLRKHPLRASGGLKYFDYLFYVDFEASMADEVAQNALRHLEEFATFLRVLGSYPVDTTML

SEQ ID NO: 41166 - protein, 379 aa, Arabidopsis thaliana
  peptide (1)..(379): Ceres Seq. ID no. 12327970
MHTVRLSPATQLHGGISSNLSPPNRKPNNSIVRYGCGSSKRFRIVTVLASLRENDANGRDNSVRAMEVKKIFEDSPLLPKPLSSNQLTESVSNGSRVRVAYQGVRGAYSESAAEKAYPNCEAVPCEEFDTAFEAVERWLVDRAVLPIENSLGGSIHRNYDLLLRHNLHIVGEVKLAVRHCLLANHGVNIEDLRRVLSHPQALAQCENTLTKLGLVREAVDDTAGAAKQIAFENLNDAAAVASEKAAKIYGLNIVAKDIQDDCDNVTRFLMLAREPIIPGTNRLFKTSIVFSLEEGPGVLFKALAVFALRQINLTKIESRPLRKHPLRASGGLKYFDYLFYVDFEASMADEVAQNALRHLEEFATFLRVLGSYPVDTTML

SEQ ID NO: 41167 - DNA, 1129 bp, Arabidopsis thaliana
  misc_feature (1)..(1129): Ceres Seq. ID no. 12422151
  misc_feature (1)..(1129): Ortholog of  Ceres SEQ ID NO 12598859 as cited in SEQ ID NO 62872
  misc_feature (1)..(1129): Ortholog of  Ceres SEQ ID NO 12617350 as cited in SEQ ID NO 63777
  misc_feature (1)..(1129): Ortholog of  Ceres SEQ ID NO 13598749 as cited in SEQ ID NO 64341
  misc_feature (1)..(1129): Ortholog of  Ceres SEQ ID NO 15176153 as cited in SEQ ID NO 0
  misc_feature (1)..(1129): Ortholog of  Ceres SEQ ID NO 15179157 as cited in SEQ ID NO 0
atacaggcatcactactacctcaaagtcctttcgtacttatcaaagctttattagtctctttgttttcttgcttctacattacagaaattaaatggcttcttttgtgatgggatacttcttattgttcgctgttgctttcatgtgtttggatgcgagaacggacaaaacgcaagattatacgtcgtttcagtaccataaaggagctctcctcaccggagacgtttccatcaacctaatctggtacggtaagtttaaaccgtcgcagcgtgcaatcgtaaccgatttcgttgcttccctctcgtcttcccggagatcgaccatggctcaaaatccctcagtcgccacgtggtggaagacggtggagaagtattaccaattccgcaagatgaccacgacacgtggactcagtctctccctcggagaacagatcctcgaccaaggatactcaatgggaaaatctttaacagagaaaaacctcaaagacttggccgcaaaaggtggccaaagctacgcggttaacgtcgtgttgacctcagctgacgtgacggtccaaggcttttgcatgaacagatgcgggtcacacgggactggttccgggtcaggcaagaaaggatcaagattcgcttacatctgggttggaaactcagaaacacaatgtccaggacaatgcgcgtggccattccacgcgccggtttacggaccgcaaagcccaccactagtggcaccaaacaacgacgttggtttagacgggatggtgattaacttggcgagtctcatggctgcgacggcaacgaacccgttcggagatggatattaccaagggcctaaaacggcaccgcttgaggctggatcggcttgtactggagtctatgggaaaggttcgtatcctggttatgctggagagttacttgtggatgcaacgaccggtgggagttataacgttaagggactgaatgggagaaaatatttgttaccggctttgtttgaccctaaaacagattcttgctcgactctgttttgaatacctattagtatacgttagatacgatattcttttatttatactttatatattcgtttttgtaatcttctttaatcagtatgtaatgaaattatttgttattgact

SEQ ID NO: 41168 - protein, 309 aa, Arabidopsis thaliana
  peptide (1)..(309): Ceres Seq. ID no. 12422152
MASFVMGYFLLFAVAFMCLDARTDKTQDYTSFQYHKGALLTGDVSINLIWYGKFKPSQRAIVTDFVASLSSSRRSTMAQNPSVATWWKTVEKYYQFRKMTTTRGLSLSLGEQILDQGYSMGKSLTEKNLKDLAAKGGQSYAVNVVLTSADVTVQGFCMNRCGSHGTGSGSGKKGSRFAYIWVGNSETQCPGQCAWPFHAPVYGPQSPPLVAPNNDVGLDGMVINLASLMAATATNPFGDGYYQGPKTAPLEAGSACTGVYGKGSYPGYAGELLVDATTGGSYNVKGLNGRKYLLPALFDPKTDSCSTLF

SEQ ID NO: 41169 - protein, 304 aa, Arabidopsis thaliana
  peptide (1)..(304): Ceres Seq. ID no. 12422153
MGYFLLFAVAFMCLDARTDKTQDYTSFQYHKGALLTGDVSINLIWYGKFKPSQRAIVTDFVASLSSSRRSTMAQNPSVATWWKTVEKYYQFRKMTTTRGLSLSLGEQILDQGYSMGKSLTEKNLKDLAAKGGQSYAVNVVLTSADVTVQGFCMNRCGSHGTGSGSGKKGSRFAYIWVGNSETQCPGQCAWPFHAPVYGPQSPPLVAPNNDVGLDGMVINLASLMAATATNPFGDGYYQGPKTAPLEAGSACTGVYGKGSYPGYAGELLVDATTGGSYNVKGLNGRKYLLPALFDPKTDSCSTLF

SEQ ID NO: 41170 - protein, 293 aa, Arabidopsis thaliana
  peptide (1)..(293): Ceres Seq. ID no. 12422154
MCLDARTDKTQDYTSFQYHKGALLTGDVSINLIWYGKFKPSQRAIVTDFVASLSSSRRSTMAQNPSVATWWKTVEKYYQFRKMTTTRGLSLSLGEQILDQGYSMGKSLTEKNLKDLAAKGGQSYAVNVVLTSADVTVQGFCMNRCGSHGTGSGSGKKGSRFAYIWVGNSETQCPGQCAWPFHAPVYGPQSPPLVAPNNDVGLDGMVINLASLMAATATNPFGDGYYQGPKTAPLEAGSACTGVYGKGSYPGYAGELLVDATTGGSYNVKGLNGRKYLLPALFDPKTDSCSTLF

SEQ ID NO: 41171 - DNA, 1669 bp, Arabidopsis thaliana
  misc_feature (1)..(1669): Ceres Seq. ID no. 12738372
  misc_feature (1)..(1669): Ortholog of  Ceres SEQ ID NO 14302935 as cited in SEQ ID NO 20442
accgtgattactgattactgtgttaattatttttattctgcgtacgttacgtaagagagatattgaggaatggctgcgaagaaggtttttggatcggcggaagcgagtaatttggtgacggagcttcgtcggagttttgatgatggtgtgacacgtggttatgaatggagagtgactcagcttaagaaactgatgattatttgtgataatcatgagcctgagatcgtcgcggctcttcgcgatgatcttggtaagcctgagcttgaatcttctgtttatgaggtatctctactgagaaactctatcaagttggctcttaagcagctaaagaactggatggctccggagaaggcaaagacttctctaacaacgtttcctgcatccgcggagattgtgtctgagcctcttggtgttgtgctagtgatctcggcttggaactatccttttctgttgtctattgatcctgttattggtgcaatttctgctgggaatgctgttgttttaaagccatcagaattggctccagcttcgtcagctctgctcactaagttactggaacagtatcttgatccttctgcggtgcgagttgtcgaaggagctgttaccgaaacaagtgctctgctagagcagaagtgggacaagatattctacacaggtagttcaaaaatcggacgtgtcataatggcggcagctgcgaagcatctcacaccggttgttctagagcttggaggaaaatctcctgtcgttgtagactcggataccgatttgaaagttaccgtcaggcggataatcgtaggcaaatggggttgcaacaacggacaggcgtgcgtttcgccggactatatcttgacgacaaaagaatatgctcctaaattgattgatgccatgaagcttgaattggagaaattttatgggaagaaccctatagagtcgaaagatatgtcacgtatcgtaaactcgaatcactttgatcgcttgtctaagttgttagacgagaaggaagtttctgacaaaattgtctatggtggtgaaaaggacagagaaaacttgaaaattgctccgacaatcttgctcgatgtaccattagattctctgatcatgagtgaagaaatatttggccctctccttccaatcctcacgcttaacaacttggaagagagctttgacgtgattcgttctcgacctaagccacttgcggcatacttgtttacacataacaagaagttgaaagagagattcacagcgacagtctccgctggaggcatagtagtcaatgacatagctgttcatcttgcacttcacacattgccattcggaggagttggtgaaagtggaatgggtgcttaccatggtaaattctcatttgatgcttttagtcacaagaaggcggttctctacagaagccttttcggtgattcagccgtcaggtatccgccatactcgagaggaaagcttagattgttaaaagcccttgtcgacagcaatatattcgatttattcaaagtccttctcggtttagcttaaacggtaaaaagaccgaggacacttccctttgtaccttatttacttgttttatttttcaaacatggacttagttggttaatatgttttggtttggtgttgattctatgaatattgaagttgataaataaaagattttcggttggtt

SEQ ID NO: 41172 - protein, 484 aa, Arabidopsis thaliana; identical to SEQ ID NO: 25927
  peptide (1)..(484): Ceres Seq. ID no. 12738373

SEQ ID NO: 41173 - protein, 443 aa, Arabidopsis thaliana; identical to SEQ ID NO: 25928
  peptide (1)..(443): Ceres Seq. ID no. 12738374

SEQ ID NO: 41174 - protein, 395 aa, Arabidopsis thaliana; identical to SEQ ID NO: 25929
  peptide (1)..(395): Ceres Seq. ID no. 12738375

SEQ ID NO: 41175 - DNA, 1348 bp, Arabidopsis thaliana
  misc_feature (1)..(1348): Ceres Seq. ID no. 12323930
  misc_feature (1)..(1348): Ortholog of  Ceres SEQ ID NO 13596048 as cited in SEQ ID NO 68476
  misc_feature (1)..(1348): Ortholog of  Ceres SEQ ID NO 12589137 as cited in SEQ ID NO 0
gtataaaattctacatctttcctctcattattatctctacacttctcatctctcaatcccattcgcttattatttatccatatgggaaaggttcttgagaaggaggcgtttggattggctgcgaaagacgaatcgggaattctttcgcctttcagtttctctagaagggcgacgggtgaaaaggatgtgaggttcaaagtcttgttctgtggaatttgccacactgatctgagtatggccaaaaacgaatgggggttaactacttatcctcttgtccctgggcatgagattgtgggcgtggtgactgaagttggagccaaagtgaaaaaattcaacgctggagacaaagtcggagttggctatatggccggctcgtgcaggtcatgtgacagctgcaatgatggcgacgagaactactgtccaaagatgatcttaacgtccggagccaaaaactttgacgataccatgacccatggtggatactccgaccacatggtgtgtgctgaggatttcatcatccgtattcctgacaatctcccattagacggtgccgcaccactactctgcgccggggtcacggtctactcccccatgaagtatcacgggctcgacaagcccggtatgcacatcggtgtggtgggactaggcggtttgggccatgtagcagtgaaatttgctaaggctatgggtactaaagttacggttattagtacttcggagcgtaagagagacgaggccgttactcggcttggtgcggatgccttcttggtgagccgtgacccgaaacaaatgaaggatgcaatggggactatggatggtatcattgataccgtatctgcgacccatccacttcttccgctgcttggtttgcttaaaaataagggaaaacttgttatggttggtgcaccagcagaaccgctcgagcttcctgtttttcctctcatctttgggcggaagatggtggtgggtagtatggtaggaggtataaaggagacgcaagagatggtggatttggctggaaaacacaacatcacggcggatattgagctcatctctgcggattatgtcaacaccgccatggaacggcttgcaaaggctgacgttaagtaccgatttgtgattgatgttgccaacacgatgaagccaactccttaactagaaagcttaagaattgaatatccccaaagcttttttcatgtttttgcttgtttgtttgatgttgtttgctggcgactttgtgtgtagtattaccacactgcatgtactttatcagttgaataaacttgaatattgtatttaataagctatctacattagattttggggaagtttgattaaaatttattcc

SEQ ID NO: 41176 - protein, 357 aa, Arabidopsis thaliana
  peptide (1)..(357): Ceres Seq. ID no. 12323931
MGKVLEKEAFGLAAKDESGILSPFSFSRRATGEKDVRFKVLFCGICHTDLSMAKNEWGLTTYPLVPGHEIVGVVTEVGAKVKKFNAGDKVGVGYMAGSCRSCDSCNDGDENYCPKMILTSGAKNFDDTMTHGGYSDHMVCAEDFIIRIPDNLPLDGAAPLLCAGVTVYSPMKYHGLDKPGMHIGVVGLGGLGHVAVKFAKAMGTKVTVISTSERKRDEAVTRLGADAFLVSRDPKQMKDAMGTMDGIIDTVSATHPLLPLLGLLKNKGKLVMVGAPAEPLELPVFPLIFGRKMVVGSMVGGIKETQEMVDLAGKHNITADIELISADYVNTAMERLAKADVKYRFVIDVANTMKPTP

SEQ ID NO: 41177 - protein, 306 aa, Arabidopsis thaliana
  peptide (1)..(306): Ceres Seq. ID no. 12323932
MAKNEWGLTTYPLVPGHEIVGVVTEVGAKVKKFNAGDKVGVGYMAGSCRSCDSCNDGDENYCPKMILTSGAKNFDDTMTHGGYSDHMVCAEDFIIRIPDNLPLDGAAPLLCAGVTVYSPMKYHGLDKPGMHIGVVGLGGLGHVAVKFAKAMGTKVTVISTSERKRDEAVTRLGADAFLVSRDPKQMKDAMGTMDGIIDTVSATHPLLPLLGLLKNKGKLVMVGAPAEPLELPVFPLIFGRKMVVGSMVGGIKETQEMVDLAGKHNITADIELISADYVNTAMERLAKADVKYRFVIDVANTMKPTP

SEQ ID NO: 41178 - protein, 263 aa, Arabidopsis thaliana
  peptide (1)..(263): Ceres Seq. ID no. 12323933
MAGSCRSCDSCNDGDENYCPKMILTSGAKNFDDTMTHGGYSDHMVCAEDFIIRIPDNLPLDGAAPLLCAGVTVYSPMKYHGLDKPGMHIGVVGLGGLGHVAVKFAKAMGTKVTVISTSERKRDEAVTRLGADAFLVSRDPKQMKDAMGTMDGIIDTVSATHPLLPLLGLLKNKGKLVMVGAPAEPLELPVFPLIFGRKMVVGSMVGGIKETQEMVDLAGKHNITADIELISADYVNTAMERLAKADVKYRFVIDVANTMKPTP

SEQ ID NO: 41179 - DNA, 1899 bp, Arabidopsis thaliana
  misc_feature (1)..(1899): Ceres Seq. ID no. 12338360
  misc_feature (1)..(1899): Ortholog of  Ceres SEQ ID NO 13597732 as cited in SEQ ID NO 64810
  misc_feature (1)..(1899): Ortholog of  Ceres SEQ ID NO 14301912 as cited in SEQ ID NO 67786
ccggagctttttttgttgtgatatatcccgtaaaaccctaaacatagtcacttcatcgtctcctccactgtatcattcaatctctgtcttccttctttttagcgacctcgtctccaaagctcacaaattttctacctttccggagtagagagaaagatgcaagcttgttgtggtggtaattcgatggcttctcttcagcaacctggacgggttcaaggatctgtctttcccccaattatgcctccagtgaccaaattttctcagcagttgaagttcaatatttcaaaacctttccgttcttcatttctgaaaagaaacctggtctctgaaatgagagcatcttcagtctcgctacctaatgtcgagataagcagcaaagaaatcccttttgaggactatggtcttggtgaagttgatccagaggtccgaaccatcatcacaaaggagaaagatagacaattcaggagcttggagcttattgcatctgagaatttcacgtctcgagcagttatggaggcggttggctcatgccttaccaacaagtattctgagggactgcctggtaaaagatattatggtggcaatgagtacattgatcagttggagacgctttgccagaaccgggctttggcagccttccgcttagattctacgaaatggggggttaatgttcagccgttatctggttcacctgcaaactttgctgtctacactgcgatacttagccctcatgatcggatcatgggtttggatttacctcacggtggtcatctgtcgcatgggttcatgaccgctaaaaggcgtgtatctggaacttcaatatactttgagtccatgccttatcgacttgatgaatcaacaggcattgttgactacgatatgctcgagaaaactgctacacttttcagaccaaagcttattatcgcaggagctagtgcatacagccgagattttgactatcctcgcatgaggaagatcgcagactcagttggtgcttttctgatgatggatatggctcatatcagtgggcttgtggctgcttctgtggtagctgacccttttgagtattgtgatattgttacaacaacaactcacaagtctttgagaggtccgagaggtggcatgatcttcttcaggaaggatccaattaatggggttgatcttgaatctgccgtgaacaatgctgtcttccctggtttgcagggtggccctcataaccacacaattggaggattagcagtctgcttgaaacacgcacaatcaccggaattcaaggcgtaccagaaaagagttgtgtctaactgtagagctctagctaaccgattggttgaactcgggtttaagctagtttctggtggcagcgataaccacttggttctcgtcgatcttagacccatgggtatggatggtgcgcgggttgagaaaatcttagacatggcatctattactctcaacaagaactctgtccctggggacaaaagtgcgttggtaccagggggaataaggataggatcccccgcgatgacgacaagaggactgtcagagaaagactttgtagtagtggctgacttcatcaaggaaggtgtggagataacaatggaagccaagaaagccgcgccgggttcaaagcttcaagatttcaacaagttcgtgacatctcctgagtttccattgaaagagagagtgaagagtctaaaggagagagtggaaaccttcacatctcgttttcccattcctggcgtttaagctataaacacacacagatatgctcttgttgtaccttaattattcacctttttcatctgtcttttagggtttttacttgcttgtgtcccaagtttaaagttacagttgaatcgagagaaattattttcaaaaataaatttatttgtggaacaa

SEQ ID NO: 41180 - protein, 529 aa, Arabidopsis thaliana
  peptide (1)..(529): Ceres Seq. ID no. 12338361
MQACCGGNSMASLQQPGRVQGSVFPPIMPPVTKFSQQLKFNISKPFRSSFLKRNLVSEMRASSVSLPNVEISSKEIPFEDYGLGEVDPEVRTIITKEKDRQFRSLELIASENFTSRAVMEAVGSCLTNKYSEGLPGKRYYGGNEYIDQLETLCQNRALAAFRLDSTKWGVNVQPLSGSPANFAVYTAILSPHDRIMGLDLPHGGHLSHGFMTAKRRVSGTSIYFESMPYRLDESTGIVDYDMLEKTATLFRPKLIIAGASAYSRDFDYPRMRKIADSVGAFLMMDMAHISGLVAASVVADPFEYCDIVTTTTHKSLRGPRGGMIFFRKDPINGVDLESAVNNAVFPGLQGGPHNHTIGGLAVCLKHAQSPEFKAYQKRVVSNCRALANRLVELGFKLVSGGSDNHLVLVDLRPMGMDGARVEKILDMASITLNKNSVPGDKSALVPGGIRIGSPAMTTRGLSEKDFVVVADFIKEGVEITMEAKKAAPGSKLQDFNKFVTSPEFPLKERVKSLKERVETFTSRFPIPGV

SEQ ID NO: 41181 - protein, 520 aa, Arabidopsis thaliana
  peptide (1)..(520): Ceres Seq. ID no. 12338362
MASLQQPGRVQGSVFPPIMPPVTKFSQQLKFNISKPFRSSFLKRNLVSEMRASSVSLPNVEISSKEIPFEDYGLGEVDPEVRTIITKEKDRQFRSLELIASENFTSRAVMEAVGSCLTNKYSEGLPGKRYYGGNEYIDQLETLCQNRALAAFRLDSTKWGVNVQPLSGSPANFAVYTAILSPHDRIMGLDLPHGGHLSHGFMTAKRRVSGTSIYFESMPYRLDESTGIVDYDMLEKTATLFRPKLIIAGASAYSRDFDYPRMRKIADSVGAFLMMDMAHISGLVAASVVADPFEYCDIVTTTTHKSLRGPRGGMIFFRKDPINGVDLESAVNNAVFPGLQGGPHNHTIGGLAVCLKHAQSPEFKAYQKRVVSNCRALANRLVELGFKLVSGGSDNHLVLVDLRPMGMDGARVEKILDMASITLNKNSVPGDKSALVPGGIRIGSPAMTTRGLSEKDFVVVADFIKEGVEITMEAKKAAPGSKLQDFNKFVTSPEFPLKERVKSLKERVETFTSRFPIPGV

SEQ ID NO: 41182 - protein, 502 aa, Arabidopsis thaliana
  peptide (1)..(502): Ceres Seq. ID no. 12338364
MPPVTKFSQQLKFNISKPFRSSFLKRNLVSEMRASSVSLPNVEISSKEIPFEDYGLGEVDPEVRTIITKEKDRQFRSLELIASENFTSRAVMEAVGSCLTNKYSEGLPGKRYYGGNEYIDQLETLCQNRALAAFRLDSTKWGVNVQPLSGSPANFAVYTAILSPHDRIMGLDLPHGGHLSHGFMTAKRRVSGTSIYFESMPYRLDESTGIVDYDMLEKTATLFRPKLIIAGASAYSRDFDYPRMRKIADSVGAFLMMDMAHISGLVAASVVADPFEYCDIVTTTTHKSLRGPRGGMIFFRKDPINGVDLESAVNNAVFPGLQGGPHNHTIGGLAVCLKHAQSPEFKAYQKRVVSNCRALANRLVELGFKLVSGGSDNHLVLVDLRPMGMDGARVEKILDMASITLNKNSVPGDKSALVPGGIRIGSPAMTTRGLSEKDFVVVADFIKEGVEITMEAKKAAPGSKLQDFNKFVTSPEFPLKERVKSLKERVETFTSRFPIPGV

SEQ ID NO: 41183 - DNA, 658 bp, Arabidopsis thaliana
  misc_feature (1)..(658): Ceres Seq. ID no. 12395876
  misc_feature (1)..(658): Ortholog of  Ceres SEQ ID NO 13495070 as cited in SEQ ID NO 53216
  misc_feature (1)..(658): Ortholog of  Ceres SEQ ID NO 13661333 as cited in SEQ ID NO 61620
  misc_feature (1)..(658): Ortholog of  Ceres SEQ ID NO 13596812 as cited in SEQ ID NO 62283
  misc_feature (1)..(658): Ortholog of  Ceres SEQ ID NO 13623021 as cited in SEQ ID NO 0
  misc_feature (1)..(658): Ortholog of  Ceres SEQ ID NO 14302179 as cited in SEQ ID NO 0
ctctttttcttcattcttcatctctcctcccacaaaagaggacaaaaaaccaaataacgagaagtcccatttctctttgttgtcttaggtgttaccttcatcaaccaaacgcaatggcgaacgcggcgtcggggatggcggtggaggacgagtgtaagctgaagtttttggagctaaaagcgaagagaaactataggttcataatattcaggatagatggacaacaagtggtggtagaaaagctgggaagcccccaagagaactacgacgatttcaccaattacctaccgccaaatgaatgccgctacgccgtttatgacttcgacttcaccactgctgagaatatccagaagagcaagatcttcttcatagcatggtcaccggattcatctagagtaaggatgaagatggtgtatgcgagctcaaaggacaggttcaagagggaattggatggtattcaggtggagttacaagccactgacccgagcgagatgagtctcgacatcatcaaaagtcgaactctctagatctccttgcttttctaattatatatccataatcattgtcattcaaacaatttcctcatcttatgtaactttcgatcttggtttcattcattcttgttcttgactgtttttttctattttatttacatttt

SEQ ID NO: 41184 - protein, 174 aa, Arabidopsis thaliana
  peptide (1)..(174): Ceres Seq. ID no. 12395877
LFLHSSSLLPQKRTKNQITRSPISLCCLRCYLHQPNAMANAASGMAVEDECKLKFLELKAKRNYRFIIFRIDGQQVVVEKLGSPQENYDDFTNYLPPNECRYAVYDFDFTTAENIQKSKIFFIAWSPDSSRVRMKMVYASSKDRFKRELDGIQVELQATDPSEMSLDIIKSRTL

SEQ ID NO: 41185 - protein, 137 aa, Arabidopsis thaliana
  peptide (1)..(137): Ceres Seq. ID no. 12395878
MANAASGMAVEDECKLKFLELKAKRNYRFIIFRIDGQQVVVEKLGSPQENYDDFTNYLPPNECRYAVYDFDFTTAENIQKSKIFFIAWSPDSSRVRMKMVYASSKDRFKRELDGIQVELQATDPSEMSLDIIKSRTL

SEQ ID NO: 41186 - protein, 130 aa, Arabidopsis thaliana
  peptide (1)..(130): Ceres Seq. ID no. 12395879
MAVEDECKLKFLELKAKRNYRFIIFRIDGQQVVVEKLGSPQENYDDFTNYLPPNECRYAVYDFDFTTAENIQKSKIFFIAWSPDSSRVRMKMVYASSKDRFKRELDGIQVELQATDPSEMSLDIIKSRTL

SEQ ID NO: 41187 - DNA, 896 bp, Arabidopsis thaliana
  misc_feature (1)..(896): Ceres Seq. ID no. 12325795
  misc_feature (1)..(896): Ortholog of  Ceres SEQ ID NO 15180374 as cited in SEQ ID NO 0
gcatttacttaaagggcaaaaccctccagcgccgcttggatctctctctcctctgttctctcttcccttatcttcttcttatacccttcgaccaacgaagaaccctagaaatcgattaacaagatgaatagggaaaagttgatgaagatggctaacactgtccgcactggcggaaaggggacagtaagaagaaagaagaaggctgttcacaagaccactacaaccgatgacaagaggctccagagcactcttaagagagttggagtcaattccattcccgccattgaagaagttaacatttttaaggatgatgtagtcattcagttcattaaccctaaagttcaagcttcaattgctgctaacacatgggttgtgagtggtacaccacagacgaaaaaattgcaagacattcttcctcagattatcagccaacttggaccagataacttggacaacctgaagaagctagcagagcaattccagaaacaagctccaggtgcaggtgatgtcccagcaacaatccaagaagaggacgatgatgatgatgtcccagatcttgtagtgggagagactttcgagacccctgctactgaagaggctcccaaagctgctgcttcttagaggaggaggaagaagaaggagaagagctcacctgcaaaacccatcataaaaatgtttgtcgctcgacctcttctgagcactgtcagattcttgttttctctaatgcttgcgaacagaaagacttggttttattatcacttgatgctttttggtccgaacagcaattttccttttattaaggttagatcgctttttgtttaccacctgttcaaatgagtactactatgtcctgtcgcttcatacacttcttgcaacacagtcctttgttttgagcc

SEQ ID NO: 41188 - protein, 165 aa, Arabidopsis thaliana
  peptide (1)..(165): Ceres Seq. ID no. 12325796
MNREKLMKMANTVRTGGKGTVRRKKKAVHKTTTTDDKRLQSTLKRVGVNSIPAIEEVNIFKDDVVIQFINPKVQASIAANTWVVSGTPQTKKLQDILPQIISQLGPDNLDNLKKLAEQFQKQAPGAGDVPATIQEEDDDDDVPDLVVGETFETPATEEAPKAAAS

SEQ ID NO: 41189 - protein, 159 aa, Arabidopsis thaliana
  peptide (1)..(159): Ceres Seq. ID no. 12325797
MKMANTVRTGGKGTVRRKKKAVHKTTTTDDKRLQSTLKRVGVNSIPAIEEVNIFKDDVVIQFINPKVQASIAANTWVVSGTPQTKKLQDILPQIISQLGPDNLDNLKKLAEQFQKQAPGAGDVPATIQEEDDDDDVPDLVVGETFETPATEEAPKAAAS

SEQ ID NO: 41190 - protein, 157 aa, Arabidopsis thaliana
  peptide (1)..(157): Ceres Seq. ID no. 12325798
MANTVRTGGKGTVRRKKKAVHKTTTTDDKRLQSTLKRVGVNSIPAIEEVNIFKDDVVIQFINPKVQASIAANTWVVSGTPQTKKLQDILPQIISQLGPDNLDNLKKLAEQFQKQAPGAGDVPATIQEEDDDDDVPDLVVGETFETPATEEAPKAAAS

SEQ ID NO: 41191 - DNA, 1525 bp, Arabidopsis thaliana
  misc_feature (1)..(1525): Ceres Seq. ID no. 12323934
  misc_feature (1)..(1525): Ortholog of  Ceres SEQ ID NO 15225244 as cited in SEQ ID NO 66088
aaaccttatttcaaatggctaaaaccaaaaatgttatttctttcaaactttctctcatcttccttcttaatattttcatcgtagccaccatcgcagccgcagcggccgttaacgccggtaccaaaggtttggattctcggccgtccaaaaccaggcgtccctggcctttcaagaagctcaacaaaccggtggttttaatgatctcttgcgacggtttccggtttggttaccaatttaaaacggacacaccaaacatcgaccttctcatatccggaggaactgaggccaaacacggtttaatcccggttttccccaccatgacattcccaaaccactactctatcgcaaccggactctacccggcttaccacggtataatcatgaacaagtttaccgatccggttacgggagaggtgttcaacaaaggcttacaaccaaaatggtggttaggtgagccgctgtgggtaaccgcagtaaaccaaggtctcaaggctgtgacctacttttggccaggctctgaagttctaaaaagttcttggacttgccctgaaggatattgtccacatttcaatctttcagttcctttagaagaaagggttgattcggtcttgagccattttgatcaccttgaggacgaagttcctgatttactgatgttgtatttcgatgagccagaccaatcgggtcataactatggtcctgatgatcctcgggttacgactgctgtttctagggttgataaaatgattggtagggtgataaaggggctgaagcagagggagatctttgatgaggttcatgtgatattgcttggtgatcacggaatggtgaccaactgtgagtgtaacgagaaagcgatttacattgatgacttagcggattggatcaagatacccgcggcttggatccaggcttacagcccagtgctagcaatcaatcctcagtgggggaaagatgtcgagaatcaaagcgaaaagaacgcggaagtcgtggcgaagatgaacgaagctttgagctcagggaaagtaaaaaacggagagtttttgaaagtttacttgaaggagaagctaccagagagactgcatttttcagagagttatcggattccaccgatcataggaattgtcggagaaggtctaatggtcagacagaacagaacaaatgctcaagtttgctatggagaccatggttatgacaacgagctcttctcgatgaggactatttttgtcggacatggttctaggtttagtagaggaaaaaaagtgccatcattcgagaatgtgcagatctataacgtcgttgcagagcttcttggactccgaccagctccgaacaatggttcttctttgttccctcggagcattctcttgccttctggagcaacaagggaagtaaaatgaagtaaaatcacttagctcatgaataataagtaagatgataatgagtgactaatctatgtgctcaatcttgtgacccttaatgtttttgaataaccaggtttcgtggactgaagcgacgttaatag

SEQ ID NO: 41192 - protein, 465 aa, Arabidopsis thaliana
  peptide (1)..(465): Ceres Seq. ID no. 12323935
TLFQMAKTKNVISFKLSLIFLLNIFIVATIAAAAAVNAGTKGLDSRPSKTRRPWPFKKLNKPVVLMISCDGFRFGYQFKTDTPNIDLLISGGTEAKHGLIPVFPTMTFPNHYSIATGLYPAYHGIIMNKFTDPVTGEVFNKGLQPKWWLGEPLWVTAVNQGLKAVTYFWPGSEVLKSSWTCPEGYCPHFNLSVPLEERVDSVLSHFDHLEDEVPDLLMLYFDEPDQSGHNYGPDDPRVTTAVSRVDKMIGRVIKGLKQREIFDEVHVILLGDHGMVTNCECNEKAIYIDDLADWIKIPAAWIQAYSPVLAINPQWGKDVENQSEKNAEVVAKMNEALSSGKVKNGEFLKVYLKEKLPERLHFSESYRIPPIIGIVGEGLMVRQNRTNAQVCYGDHGYDNELFSMRTIFVGHGSRFSRGKKVPSFENVQIYNVVAELLGLRPAPNNGSSLFPRSILLPSGATREVK

SEQ ID NO: 41193 - protein, 461 aa, Arabidopsis thaliana
  peptide (1)..(461): Ceres Seq. ID no. 12323936
MAKTKNVISFKLSLIFLLNIFIVATIAAAAAVNAGTKGLDSRPSKTRRPWPFKKLNKPVVLMISCDGFRFGYQFKTDTPNIDLLISGGTEAKHGLIPVFPTMTFPNHYSIATGLYPAYHGIIMNKFTDPVTGEVFNKGLQPKWWLGEPLWVTAVNQGLKAVTYFWPGSEVLKSSWTCPEGYCPHFNLSVPLEERVDSVLSHFDHLEDEVPDLLMLYFDEPDQSGHNYGPDDPRVTTAVSRVDKMIGRVIKGLKQREIFDEVHVILLGDHGMVTNCECNEKAIYIDDLADWIKIPAAWIQAYSPVLAINPQWGKDVENQSEKNAEVVAKMNEALSSGKVKNGEFLKVYLKEKLPERLHFSESYRIPPIIGIVGEGLMVRQNRTNAQVCYGDHGYDNELFSMRTIFVGHGSRFSRGKKVPSFENVQIYNVVAELLGLRPAPNNGSSLFPRSILLPSGATREVK

SEQ ID NO: 41194 - protein, 400 aa, Arabidopsis thaliana
  peptide (1)..(400): Ceres Seq. ID no. 12323937
MISCDGFRFGYQFKTDTPNIDLLISGGTEAKHGLIPVFPTMTFPNHYSIATGLYPAYHGIIMNKFTDPVTGEVFNKGLQPKWWLGEPLWVTAVNQGLKAVTYFWPGSEVLKSSWTCPEGYCPHFNLSVPLEERVDSVLSHFDHLEDEVPDLLMLYFDEPDQSGHNYGPDDPRVTTAVSRVDKMIGRVIKGLKQREIFDEVHVILLGDHGMVTNCECNEKAIYIDDLADWIKIPAAWIQAYSPVLAINPQWGKDVENQSEKNAEVVAKMNEALSSGKVKNGEFLKVYLKEKLPERLHFSESYRIPPIIGIVGEGLMVRQNRTNAQVCYGDHGYDNELFSMRTIFVGHGSRFSRGKKVPSFENVQIYNVVAELLGLRPAPNNGSSLFPRSILLPSGATREVK

SEQ ID NO: 41195 - DNA, 1034 bp, Arabidopsis thaliana
  misc_feature (1)..(1034): Ceres Seq. ID no. 12328122
  misc_feature (1)..(1034): Ortholog of  Ceres SEQ ID NO 14308727 as cited in SEQ ID NO 58726
  misc_feature (1)..(1034): Ortholog of  Ceres SEQ ID NO 13663517 as cited in SEQ ID NO 66850
aaaaaccctataaaataaatatcccaacgaaggcgataaaacccagattttccagatcttaaattctctcctcccccaattccatcttcgcaaattctccagattcttccgtcaatctttgagtttggtagagaaatggatcaacaaggacaatcatcagctatgaactatggttcaaacccatatcaaaccaacgccatgaccactacaccaaccggttcagaccatccagcttaccatcagatccaccagcaacaacaacaacagctcactcaacagcttcaatctttctgggagactcaattcaaagagattgagaaaaccactgatttcaagaaccatagccttccattggcaagaatcaagaaaatcatgaaagctgatgaagatgtgcgtatgatctcggccgaggcgcctgttgtgttcgccagggcctgcgagatgtttattctggagcttacgttaaggtcttggaaccatactgaggagaacaagagaaggacgttgcagaagaatgatatcgcggctgcggtgactagaactgatatttttgattttcttgtggatattgttcctcgggaggatcttcgtgatgaagtcttgggtggtgttggtgctgaagctgctacagctgcgggttatccgtatggatacttgcctcctggaacagctccaattgggaacccgggaatggttatgggtaacccgggcgcgtatccgccgaacccgtatatgggtcagccaatgtggcaacaaccaggacctgagcagcaggatcctgacaattagcttggcctaataaactagccgtctaattcgaagctctccccggtggatctactcaagaagaagaatgttaatagaaaactattgcgacataaaaagtttggtgtagtagaataatttctgttttatgatccatggatttatctattgttattcagtttggtttatcttgtcatcaaactgttttcggtcaatgtaacaaattcataaactgagaattgaacttacaaaaggctagattactactt

SEQ ID NO: 41196 - protein, 217 aa, Arabidopsis thaliana; identical to SEQ ID NO: 23371
  peptide (1)..(217): Ceres Seq. ID no. 12328123

SEQ ID NO: 41197 - protein, 208 aa, Arabidopsis thaliana; identical to SEQ ID NO: 23372
  peptide (1)..(208): Ceres Seq. ID no. 12328124

SEQ ID NO: 41198 - protein, 196 aa, Arabidopsis thaliana
  peptide (1)..(196): Ceres Seq. ID no. 12328125
MTTTPTGSDHPAYHQIHQQQQQQLTQQLQSFWETQFKEIEKTTDFKNHSLPLARIKKIMKADEDVRMISAEAPVVFARACEMFILELTLRSWNHTEENKRRTLQKNDIAAAVTRTDIFDFLVDIVPREDLRDEVLGGVGAEAATAAGYPYGYLPPGTAPIGNPGMVMGNPGAYPPNPYMGQPMWQQPGPEQQDPDN

SEQ ID NO: 41199 - DNA, 1115 bp, Arabidopsis thaliana
  misc_feature (1)..(1115): Ceres Seq. ID no. 12328126
  misc_feature (1)..(1115): Ortholog of  Ceres SEQ ID NO 12617197 as cited in SEQ ID NO 63406
  misc_feature (1)..(1115): Ortholog of  Ceres SEQ ID NO 13597804 as cited in SEQ ID NO 64182
  misc_feature (1)..(1115): Ortholog of  Ceres SEQ ID NO 13598565 as cited in SEQ ID NO 65250
  misc_feature (1)..(1115): Ortholog of  Ceres SEQ ID NO 13598597 as cited in SEQ ID NO 65496
  misc_feature (1)..(1115): Ortholog of  Ceres SEQ ID NO 13596284 as cited in SEQ ID NO 68273
aaatcacaatctcaatatcacattcgttgcagagacaaagatgtctgagtatttggtaactggaggaacaggtttcattgcttcttacatcatcaaatcacttctcgaactcggacacaccgttcgaacaactgtccgaaacccacgtgatgaagaaaaggttggatttttatgggaatttcaaggagcaaaacagaggctaaagattctccaagctgatctaacggtagaaggaagttttgatgaagcagtgaatggtgttgatggagtattccacactgcttctcctgttcttgttccacaggatcataacattcaggagactttggttgatcctattataaagggtacaacaaatgtgatgagctcttgtgccaagtctaaagccacattgaaaaggattgttcttacgtcttcttgctcttcgatacgctaccgtttcgatgcaactgaagcttctcctctcaatgagtctcattggagtgatcctgaatattgcaaacgtttcaatctttggtatggatatgcaaagactttaggagaaagagaggcttggaggatagctgaagagaaaggattagacttggttgttgtgaatccttcgtttgtggttggtccattgcttggaccaaaaccaacaagtactctgcttatgattcttgctattgctaaaggtcttgctggagagtatccaaatttcactgtcgggtttgtgcatatagatgatgttgttgctgcacatgtattggctatggaagagcctaaagcatcagggagaatcatatgttcgagttctgttgctcattggtctgagatcattgagttgatgagaaataagtatcctaattacccatttgagaacaagtgtagtaacaaagaaggagacaatagtccacatagtatggatacaaggaagatacatgagttgggatttggatccttcaagtcactacctgagatgtttgatgattgcatcatcagttttcagaagaagggtctgctctaaatatatacattttcatacatcgacaatgatttcaatgtattggactcttgccaagtagtaactggtttttaatttctgcctctagtataaattcaataagctggtgttg

SEQ ID NO: 41200 - protein, 334 aa, Arabidopsis thaliana
  peptide (1)..(334): Ceres Seq. ID no. 12328127
NHNLNITFVAETKMSEYLVTGGTGFIASYIIKSLLELGHTVRTTVRNPRDEEKVGFLWEFQGAKQRLKILQADLTVEGSFDEAVNGVDGVFHTASPVLVPQDHNIQETLVDPIIKGTTNVMSSCAKSKATLKRIVLTSSCSSIRYRFDATEASPLNESHWSDPEYCKRFNLWYGYAKTLGEREAWRIAEEKGLDLVVVNPSFVVGPLLGPKPTSTLLMILAIAKGLAGEYPNFTVGFVHIDDVVAAHVLAMEEPKASGRIICSSSVAHWSEIIELMRNKYPNYPFENKCSNKEGDNSPHSMDTRKIHELGFGSFKSLPEMFDDCIISFQKKGLL

SEQ ID NO: 41201 - protein, 321 aa, Arabidopsis thaliana
  peptide (1)..(321): Ceres Seq. ID no. 12328128
MSEYLVTGGTGFIASYIIKSLLELGHTVRTTVRNPRDEEKVGFLWEFQGAKQRLKILQADLTVEGSFDEAVNGVDGVFHTASPVLVPQDHNIQETLVDPIIKGTTNVMSSCAKSKATLKRIVLTSSCSSIRYRFDATEASPLNESHWSDPEYCKRFNLWYGYAKTLGEREAWRIAEEKGLDLVVVNPSFVVGPLLGPKPTSTLLMILAIAKGLAGEYPNFTVGFVHIDDVVAAHVLAMEEPKASGRIICSSSVAHWSEIIELMRNKYPNYPFENKCSNKEGDNSPHSMDTRKIHELGFGSFKSLPEMFDDCIISFQKKGLL

SEQ ID NO: 41202 - protein, 214 aa, Arabidopsis thaliana
  peptide (1)..(214): Ceres Seq. ID no. 12328129
MSSCAKSKATLKRIVLTSSCSSIRYRFDATEASPLNESHWSDPEYCKRFNLWYGYAKTLGEREAWRIAEEKGLDLVVVNPSFVVGPLLGPKPTSTLLMILAIAKGLAGEYPNFTVGFVHIDDVVAAHVLAMEEPKASGRIICSSSVAHWSEIIELMRNKYPNYPFENKCSNKEGDNSPHSMDTRKIHELGFGSFKSLPEMFDDCIISFQKKGLL

SEQ ID NO: 41203 - DNA, 1669 bp, Arabidopsis thaliana
  misc_feature (1)..(1669): Ceres Seq. ID no. 12367017
  misc_feature (1)..(1669): Ortholog of  Ceres SEQ ID NO 14311862 as cited in SEQ ID NO 51654
  misc_feature (1)..(1669): Ortholog of  Ceres SEQ ID NO 13597334 as cited in SEQ ID NO 64244
  misc_feature (1)..(1669): Ortholog of  Ceres SEQ ID NO 14303165 as cited in SEQ ID NO 65181
  misc_feature (1)..(1669): Ortholog of  Ceres SEQ ID NO 15224550 as cited in SEQ ID NO 0
atttctaatatctctttccatttcttgaaatggtcctcctctcaccttaactttataagaatctgaccacctctcaggtttccagtttcttcactttctcgttctctggacactgaatgtgatacatatatagaagaagaaagctataagagattgatcgatggaggtgaatgttcttgcatccaagagaagtcttctcctttttcttcttattgtaagtctctctttgagccagaaggtcagacatatctctgcctttaacgacaccaaaccatacagacaagtcagtagcttgagacttgcgaggatccaaaagcacttgaacaagatcaacaagtctcctgtcttcaccattcagagtccagatggtgatgtaatagattgtgtacccaaaagaaagcagccagctttggatcatccactcttaaagcatcacaagattcagaaagcaccgaagaaaatgccgaagatgaagggaaaagatgatgatgttaaagaagcagagaatgtattggaaggtgcatggcaaatgtggcacgtgaacggcacgaggtgccctaaggggaccgttcccatacgacgcaacacaatgaacgatgtgctcagagccaagtctttgtttgactttggcaaaaagcgacggagtatttaccttgatcaacggacagaaaagcctgatgcccttggtaccaatggacatgagcatgcgatcgcttatacagaatcatcgtcggagatatatggagcaaaggcgactataaacgtttgggatccaaagatagaagaagtgaatgagtttagtctctctcagatttggattctttctggatctttcgtaggtcctgatctcaatagtattgaagctggctggcaggtcagtccggagctgtatggtgacaacagaccaagattgttcacttattggacgagtgattcatatcaagcaacaggatgttacaatcttctatgttcgggatttatccaaacaaataacaagattgccattggagcagccatatctcctctttctactttcaaaggaaaccagtttgatatcacaatactcatttggaaggatccgaaaatggggaattggtggatgggtttaggggatagcacactagtcgggtattggccagccgagctattcacgcacttggccgaccacgcgactaccgtggaatggggcggtgaagtcgtcaacacacgtgcttcaggcaggcacacgacgacccaaatgggctctggtcattttccagacgaagggtttgggaaagcaagttattttcggaatttggaagttgtggattcggacaacagtctcgtaccggtgcatgatgtcaagatactagccgagaacaccgaatgttacgacattaagagttcgtatagtaatgaatggggaacttatttttactatggtgggccggggtttaatcctaggtgtaattgaaattaaagtgtacatagttcgggttggaggagtggaggaaaaaaaagagggggtcgaaatatgtaatttttttcaagtatgggtagtgaaagattgaatattggcttattgtttttgatttgtcatattgttggttgaaatctagtaatttattgccctcataggaaaaagaagtgtgtatgcaataatgaaagtatgagacaattttttctttgc

SEQ ID NO: 41204 - protein, 430 aa, Arabidopsis thaliana
  peptide (1)..(430): Ceres Seq. ID no. 12367018
MEVNVLASKRSLLLFLLIVSLSLSQKVRHISAFNDTKPYRQVSSLRLARIQKHLNKINKSPVFTIQSPDGDVIDCVPKRKQPALDHPLLKHHKIQKAPKKMPKMKGKDDDVKEAENVLEGAWQMWHVNGTRCPKGTVPIRRNTMNDVLRAKSLFDFGKKRRSIYLDQRTEKPDALGTNGHEHAIAYTESSSEIYGAKATINVWDPKIEEVNEFSLSQIWILSGSFVGPDLNSIEAGWQVSPELYGDNRPRLFTYWTSDSYQATGCYNLLCSGFIQTNNKIAIGAAISPLSTFKGNQFDITILIWKDPKMGNWWMGLGDSTLVGYWPAELFTHLADHATTVEWGGEVVNTRASGRHTTTQMGSGHFPDEGFGKASYFRNLEVVDSDNSLVPVHDVKILAENTECYDIKSSYSNEWGTYFYYGGPGFNPRCN

SEQ ID NO: 41205 - protein, 330 aa, Arabidopsis thaliana
  peptide (1)..(330): Ceres Seq. ID no. 12367019
MPKMKGKDDDVKEAENVLEGAWQMWHVNGTRCPKGTVPIRRNTMNDVLRAKSLFDFGKKRRSIYLDQRTEKPDALGTNGHEHAIAYTESSSEIYGAKATINVWDPKIEEVNEFSLSQIWILSGSFVGPDLNSIEAGWQVSPELYGDNRPRLFTYWTSDSYQATGCYNLLCSGFIQTNNKIAIGAAISPLSTFKGNQFDITILIWKDPKMGNWWMGLGDSTLVGYWPAELFTHLADHATTVEWGGEVVNTRASGRHTTTQMGSGHFPDEGFGKASYFRNLEVVDSDNSLVPVHDVKILAENTECYDIKSSYSNEWGTYFYYGGPGFNPRCN

SEQ ID NO: 41206 - protein, 327 aa, Arabidopsis thaliana
  peptide (1)..(327): Ceres Seq. ID no. 12367020
MKGKDDDVKEAENVLEGAWQMWHVNGTRCPKGTVPIRRNTMNDVLRAKSLFDFGKKRRSIYLDQRTEKPDALGTNGHEHAIAYTESSSEIYGAKATINVWDPKIEEVNEFSLSQIWILSGSFVGPDLNSIEAGWQVSPELYGDNRPRLFTYWTSDSYQATGCYNLLCSGFIQTNNKIAIGAAISPLSTFKGNQFDITILIWKDPKMGNWWMGLGDSTLVGYWPAELFTHLADHATTVEWGGEVVNTRASGRHTTTQMGSGHFPDEGFGKASYFRNLEVVDSDNSLVPVHDVKILAENTECYDIKSSYSNEWGTYFYYGGPGFNPRCN

SEQ ID NO: 41207 - DNA, 1484 bp, Arabidopsis thaliana
  misc_feature (1)..(1484): Ceres Seq. ID no. 13576563
  misc_feature (1)..(1484): Ortholog of  Ceres SEQ ID NO 13502573 as cited in SEQ ID NO 60342
ctctttcttcgcattcttctcctcctatcggactttgccacaccagatcggaaaatcccaatcctcttttcctttgttttttttgctatcttcaatcaaaaactctccgacagattcaatgaagcagcaaaagagataaaaccctaacaaaagtaaacaatcggagttttaatcttcttcttcttcggagccggagttttgtctgatctgtcggagaggacgtgtcggcatctattaaaatcctagctggacttccacatcactttactcaattagaagctgttttgagtaacacaagtaagtagtaagcttataaaacaatgggaacgagcgaagacaagatgccatttaagactaccaaaccaacatcttcggctcaggaagttcctcccacaccgtatccagattggcaaaattcaatgcaggcttattatggcggaggaggtactccaaatccttttttcccatccccagttggatctcctagtcctcacccctatatgtggggtgctcaacaccatatgatgccgccttatggcaccccagttccgtacccagcaatgtatcccccgggggcagtctatgctcatcctagcatgcccatgcctcctaattctggtcctaccaacaaggagcctgcgaaggaccaagcttctggcaagaagtcaaaggggaactcgaaaaaaaaggctgaaggaggtgataaagcgctctctggttcagggaacgatggtgcctctcatagtgatgaaagtgtcacagcgggttcatctgatgaaaatgatgagaatgccaatcaacaggaacagggttcaattcgaaagccaagctttggacagatgcttgctgacgcaagttctcaaagtacgactggtgaaatccaaggttcggtgcccatgaagccggtagccccggggactaatctgaatatcgggatggacttatggtcttcccaagctggtgtaccagtgaaggatgaacgagagctcaagcggcagaagaggaaacaatctaaccgtgaatccgctaggcggtctagattgcggaagcaggccgaatgcgaacaacttcaacaaagagtagagagtttgtcgaacgagaatcaaagcctgagagatgagctacagagactctcaagcgaatgtgataagctcaagtctgagaacaactcaatccaggatgagttgcagagagtacttggagcagaggctgtagctaatctagaacagaatgctgctgggtcgaaagatggtgaaggaacaaattaacacttaggaaaattggaactttacaacggattattgggatttttcaacaccggataaaaaaaactgagtccaaagtcatttgagattacgtaactatacaatcgtttgacatttttgtgtaatagagatttgacctacaagactgtagaagctgcaaaagctacgattacactttgttttattagtcttcgtgattggaatcggattctgaatccg

SEQ ID NO: 41208 - protein, 315 aa, Arabidopsis thaliana
  peptide (1)..(315): Ceres Seq. ID no. 13576564
MGTSEDKMPFKTTKPTSSAQEVPPTPYPDWQNSMQAYYGGGGTPNPFFPSPVGSPSPHPYMWGAQHHMMPPYGTPVPYPAMYPPGAVYAHPSMPMPPNSGPTNKEPAKDQASGKKSKGNSKKKAEGGDKALSGSGNDGASHSDESVTAGSSDENDENANQQEQGSIRKPSFGQMLADASSQSTTGEIQGSVPMKPVAPGTNLNIGMDLWSSQAGVPVKDERELKRQKRKQSNRESARRSRLRKQAECEQLQQRVESLSNENQSLRDELQRLSSECDKLKSENNSIQDELQRVLGAEAVANLEQNAAGSKDGEGTN

SEQ ID NO: 41209 - protein, 308 aa, Arabidopsis thaliana
  peptide (1)..(308): Ceres Seq. ID no. 13576565
MPFKTTKPTSSAQEVPPTPYPDWQNSMQAYYGGGGTPNPFFPSPVGSPSPHPYMWGAQHHMMPPYGTPVPYPAMYPPGAVYAHPSMPMPPNSGPTNKEPAKDQASGKKSKGNSKKKAEGGDKALSGSGNDGASHSDESVTAGSSDENDENANQQEQGSIRKPSFGQMLADASSQSTTGEIQGSVPMKPVAPGTNLNIGMDLWSSQAGVPVKDERELKRQKRKQSNRESARRSRLRKQAECEQLQQRVESLSNENQSLRDELQRLSSECDKLKSENNSIQDELQRVLGAEAVANLEQNAAGSKDGEGTN

SEQ ID NO: 41210 - protein, 282 aa, Arabidopsis thaliana
  peptide (1)..(282): Ceres Seq. ID no. 13576566
MQAYYGGGGTPNPFFPSPVGSPSPHPYMWGAQHHMMPPYGTPVPYPAMYPPGAVYAHPSMPMPPNSGPTNKEPAKDQASGKKSKGNSKKKAEGGDKALSGSGNDGASHSDESVTAGSSDENDENANQQEQGSIRKPSFGQMLADASSQSTTGEIQGSVPMKPVAPGTNLNIGMDLWSSQAGVPVKDERELKRQKRKQSNRESARRSRLRKQAECEQLQQRVESLSNENQSLRDELQRLSSECDKLKSENNSIQDELQRVLGAEAVANLEQNAAGSKDGEGTN

SEQ ID NO: 41211 - DNA, 1134 bp, Arabidopsis thaliana
  misc_feature (1)..(1134): Ceres Seq. ID no. 13488413
  misc_feature (1)..(1134): Ortholog of  Ceres SEQ ID NO 12784064 as cited in SEQ ID NO 66982
  misc_feature (1)..(1134): Ortholog of  Ceres SEQ ID NO 15177907 as cited in SEQ ID NO 0
ctatctttcgagcattgaaatgataaaaaaaaaattagtggtgttttcaacatagatcatgacaggcaaaccctagattttacttcacctacttgaggttaaaaaacttaattgcaagtaggccagacatcggatcttctctcttaagggctaagcaaaacccatctctcctctttcttatatcttctttctcttccttctctcttctcttgtataaactccactgagctctgtttttgtttttaccgtagatcgtttcgagtctctttaatctttggcgggttccgtaaaaaaaaaaatggcctcttctagattccaatctgggttttgtcctatctcttcgtgtccctctcttgagaatttcatcgaaaggattaaagacgcatgtcgtttcaccctctccgctgttctagggacaattctctcggcggtcttgactttcttcttcgctttagtgggcacattgcttggagcacttactggagctttgataggccaagaaaccgaaagtgggtttatccgaggagcggcggttggagccatttcgggagctgttttctctatcgaagtctttgagtcatctcttgttctttggaaatctaatgagtcacgttttggatgtctcctctacttgattgatgtcattgttagtctgataagtggtagacttgtgcgggaacgaataggtccagcaatgctaagtgcggttcaaagtcagatgggagctgtggattcaactttcgaagagctctcgagtattttcgataccggtggctcaaaggggttaacaggagatttggttgataaaatacctaaaatcaaaatcactggcaaaaacaacttagatgcttctggcaacaaagactcatgttctgtttgtcttcaggattttcaacttggtgaaacggtgagaagcttgccacattgtcatcacatgtttcacttgccttgcatagacaattggctcttcaggcacggatcttgtccaatgtgtagacgcgatctgtaatctcttttcttaccatttgcacagcctcttccctctctctccttcttcttgtatggtcgtaaattcgtaatcatgtggttagagtctctatatatgtacaaagaaatgaaaaaaaaaaagttttg

SEQ ID NO: 41212 - protein, 236 aa, Arabidopsis thaliana
  peptide (1)..(236): Ceres Seq. ID no. 13488414
MASSRFQSGFCPISSCPSLENFIERIKDACRFTLSAVLGTILSAVLTFFFALVGTLLGALTGALIGQETESGFIRGAAVGAISGAVFSIEVFESSLVLWKSNESRFGCLLYLIDVIVSLISGRLVRERIGPAMLSAVQSQMGAVDSTFEELSSIFDTGGSKGLTGDLVDKIPKIKITGKNNLDASGNKDSCSVCLQDFQLGETVRSLPHCHHMFHLPCIDNWLFRHGSCPMCRRDL

SEQ ID NO: 41213 - DNA, 1349 bp, Arabidopsis thaliana
  misc_feature (1)..(1349): Ceres Seq. ID no. 12329597
  misc_feature (1)..(1349): Ortholog of  Ceres SEQ ID NO 15176317 as cited in SEQ ID NO 52865
  misc_feature (1)..(1349): Ortholog of  Ceres SEQ ID NO 13518893 as cited in SEQ ID NO 58108
  misc_feature (1)..(1349): Ortholog of  Ceres SEQ ID NO 12617152 as cited in SEQ ID NO 63555
aatcaaagtttgggataatagtcttatctctttcatccacactaatataaataggatacatacacaacacattacaagaagataaatccaaacttttctttctctctctttcgtttcccattttttctcttatcactcatagatcctgattgatctgaaaaaatggtgaagaagcaatcgccattacacgttgtcggtgtgtctgttttgatggtgttgttatgcagtgttaattacagtctgtgtgaaaagatcaaaacgtataagctcacaagaggaagcttaagtgttactttcactaactatggtgctgtcatgacgtctcttctcctccctgacagacatggaaaacaagacgatgttgttcttggatttgatactgttgatggttacaagaatgatacaacatattttggagcaattgtgggaagagtggctaatagaataggaggtgctaaattcaagttaaatggtcatctctacaaaaccgatcccaacgaaggccataacactctccatggtggttcaaagggatttagtgatgtgatttggtcagtccaaaagtatgttcccactagtcacattactttcacatacgatagcttcgacggtgaagaaggttttccggggaatgtgacggtgaaagtgacgtacatgttgatcggagaaaacaaactcggtgtaaaaatggaagcaaagccactcaacaaacctacaccaatcaacttagctctccacacttactggaacctccacagccacaactccgggaacatcctctcccacaaaattcaactcctcgccggaaaaatcactcccgtcgacgacaaactcatccccaccggcgaaatcacctccattgccggaactccttacgattttctcgagcctcgcgagatcggaagccggatccacgaattacccggaggttacgacatcaattacgtgatcgatggaccgatcgggaaacatctgaggaaaactgcggttgtgacggaggaagtcaccggaaggaagatggagctgtggacgaatcagcctggtgttcagttttacacgagtaatatgatgaaacgtgtcgtcggtaaaggtaaagccgtttatgagaaatacggtggcttgtgtttggagactcaaggcttcccagattccgtcaatcacaagaactttccgtcgcagattgttaatcccggcgagagttatttgcatgttatgctcttcagattcactgctcactaatcgggtcgggtcgggtcgggtcgggtttttagggtttaatttttccgaatactcgccaacgtcgttgtaatgcaaaattgcaaatgccaataaaaatattcgacttttgc

SEQ ID NO: 41214 - protein, 358 aa, Arabidopsis thaliana
  peptide (1)..(358): Ceres Seq. ID no. 12329598
MVKKQSPLHVVGVSVLMVLLCSVNYSLCEKIKTYKLTRGSLSVTFTNYGAVMTSLLLPDRHGKQDDVVLGFDTVDGYKNDTTYFGAIVGRVANRIGGAKFKLNGHLYKTDPNEGHNTLHGGSKGFSDVIWSVQKYVPTSHITFTYDSFDGEEGFPGNVTVKVTYMLIGENKLGVKMEAKPLNKPTPINLALHTYWNLHSHNSGNILSHKIQLLAGKITPVDDKLIPTGEITSIAGTPYDFLEPREIGSRIHELPGGYDINYVIDGPIGKHLRKTAVVTEEVTGRKMELWTNQPGVQFYTSNMMKRVVGKGKAVYEKYGGLCLETQGFPDSVNHKNFPSQIVNPGESYLHVMLFRFTAH

SEQ ID NO: 41215 - protein, 342 aa, Arabidopsis thaliana
  peptide (1)..(342): Ceres Seq. ID no. 12329599
MVLLCSVNYSLCEKIKTYKLTRGSLSVTFTNYGAVMTSLLLPDRHGKQDDVVLGFDTVDGYKNDTTYFGAIVGRVANRIGGAKFKLNGHLYKTDPNEGHNTLHGGSKGFSDVIWSVQKYVPTSHITFTYDSFDGEEGFPGNVTVKVTYMLIGENKLGVKMEAKPLNKPTPINLALHTYWNLHSHNSGNILSHKIQLLAGKITPVDDKLIPTGEITSIAGTPYDFLEPREIGSRIHELPGGYDINYVIDGPIGKHLRKTAVVTEEVTGRKMELWTNQPGVQFYTSNMMKRVVGKGKAVYEKYGGLCLETQGFPDSVNHKNFPSQIVNPGESYLHVMLFRFTAH

SEQ ID NO: 41216 - protein, 307 aa, Arabidopsis thaliana
  peptide (1)..(307): Ceres Seq. ID no. 12329600
MTSLLLPDRHGKQDDVVLGFDTVDGYKNDTTYFGAIVGRVANRIGGAKFKLNGHLYKTDPNEGHNTLHGGSKGFSDVIWSVQKYVPTSHITFTYDSFDGEEGFPGNVTVKVTYMLIGENKLGVKMEAKPLNKPTPINLALHTYWNLHSHNSGNILSHKIQLLAGKITPVDDKLIPTGEITSIAGTPYDFLEPREIGSRIHELPGGYDINYVIDGPIGKHLRKTAVVTEEVTGRKMELWTNQPGVQFYTSNMMKRVVGKGKAVYEKYGGLCLETQGFPDSVNHKNFPSQIVNPGESYLHVMLFRFTAH

SEQ ID NO: 41217 - DNA, 1211 bp, Arabidopsis thaliana
  misc_feature (1)..(1211): Ceres Seq. ID no. 12395390
  misc_feature (1)..(1211): Ortholog of  Ceres SEQ ID NO 14313548 as cited in SEQ ID NO 68496
aaatctcatttttgtctccttaaaattttctcagaaacatttccgtcatttgttccttagttttgtaatcaatcttcacgattcctcaggtaccatcctccaaggtcatatgagaacaggatcggtgttctctatcgaacgagcggtgttgtgtcttaagtggggatggcttcaacaccttgtgcagcatgtaagctcttgaggcgtaaatgcactcaagaatgtgtgtttgcgccgtattttccaccaactaatcctcaaaagtttatctttgttcaccgagtttttggagcaagcaatgtaaccaagatcctcaacgatcttccacctgatcaacgcgaagacactgttaattccctcttttatgaagcggaagcgcgtatccgtgacccaatctatggatgtgttggtctcatttcttttttacaacaatacctcaagaaaattcaacaagatcttctcactgctaaagaagagcttgttggttacatgggacccgatgctgtgattccgccgccttatcttcctcctataggtaacaatcctcctcccaatttcatgatgtctatggaaggaatgccaccaggagtgatccctcaaggagaacctttgatgatacgcgaaccaaacatgtctcagcaacatcatcatcaacaaccgcaagatgagcagttgcaattcatagcttctgatgcacagagaatggctgcaatgatgttggagagaggagatcaacaagggatgttcaatggttacggaatagacaacaatggttcggttacagccacgggttttaaccaaatggatgtgaatgatcaaggtgctggtggttcgttgtctggaccatctcttgctttaggaagctttggtgatgcttatcagatgggtcaagagacagagcatggtcatatcaaccatgatcagcttcagacacagcttatgcttcagcctccattacaagaaggtcaagaacaaacagaggaaggacagttcttgatgcaaccaatgggacaagagaatcttcatgacgaagaggaggaggaagagcttgagccaccggttaaatggaggaagcctgagaacaaggaagctagtttttaagacctaaatgcatttaggagaacaaaaaaaattcttattttcttggatagtttacttaactcttgaggatctatttggtttttttttttaataatcaaatggtattattc

SEQ ID NO: 41218 - protein, 311 aa, Arabidopsis thaliana
  peptide (1)..(311): Ceres Seq. ID no. 12395391
MASTPCAACKLLRRKCTQECVFAPYFPPTNPQKFIFVHRVFGASNVTKILNDLPPDQREDTVNSLFYEAEARIRDPIYGCVGLISFLQQYLKKIQQDLLTAKEELVGYMGPDAVIPPPYLPPIGNNPPPNFMMSMEGMPPGVIPQGEPLMIREPNMSQQHHHQQPQDEQLQFIASDAQRMAAMMLERGDQQGMFNGYGIDNNGSVTATGFNQMDVNDQGAGGSLSGPSLALGSFGDAYQMGQETEHGHINHDQLQTQLMLQPPLQEGQEQTEEGQFLMQPMGQENLHDEEEEEELEPPVKWRKPENKEASF

SEQ ID NO: 41219 - protein, 203 aa, Arabidopsis thaliana
  peptide (1)..(203): Ceres Seq. ID no. 12395392
MGPDAVIPPPYLPPIGNNPPPNFMMSMEGMPPGVIPQGEPLMIREPNMSQQHHHQQPQDEQLQFIASDAQRMAAMMLERGDQQGMFNGYGIDNNGSVTATGFNQMDVNDQGAGGSLSGPSLALGSFGDAYQMGQETEHGHINHDQLQTQLMLQPPLQEGQEQTEEGQFLMQPMGQENLHDEEEEEELEPPVKWRKPENKEASF

SEQ ID NO: 41220 - protein, 180 aa, Arabidopsis thaliana
  peptide (1)..(180): Ceres Seq. ID no. 12395393
MMSMEGMPPGVIPQGEPLMIREPNMSQQHHHQQPQDEQLQFIASDAQRMAAMMLERGDQQGMFNGYGIDNNGSVTATGFNQMDVNDQGAGGSLSGPSLALGSFGDAYQMGQETEHGHINHDQLQTQLMLQPPLQEGQEQTEEGQFLMQPMGQENLHDEEEEEELEPPVKWRKPENKEASF

SEQ ID NO: 41221 - DNA, 1244 bp, Arabidopsis thaliana
  misc_feature (1)..(1244): Ceres Seq. ID no. 13494070
  misc_feature (1)..(1244): Ortholog of  Ceres SEQ ID NO 13639514 as cited in SEQ ID NO 55736
  misc_feature (1)..(1244): Ortholog of  Ceres SEQ ID NO 14312254 as cited in SEQ ID NO 59148
  misc_feature (1)..(1244): Ortholog of  Ceres SEQ ID NO 13662804 as cited in SEQ ID NO 65394
  misc_feature (1)..(1244): Ortholog of  Ceres SEQ ID NO 13656519 as cited in SEQ ID NO 69226
agccgccgctttcacttacctcttcctcttccttcttcttcttctaccttcttctcgtaaaggttttgctacacactggagctcgcaaatctggctatcgaaaaccacaatcacaaactcaacttcggggccttcaaggccaatcacaagaaagtcatgggaccaatgataagaacagaggaagaagaagactatacaagtccaccgtggctaatgccaatgctacgagggagttacttcgtcccttgttccatccatgtcgattcaaacaaaaacgaatgcaatttgttctgtcttgattgtgctggaaatgccttttgctcttactgtttagtcaaacataaagaccatcgtgttgttcagatacgaagatcttcgtaccataacgttgtgagagtgaatgagatacagaagttcatagacatcgcttgtgttcagacatatattatcaacagcgcaaagatcgtgttcctcaatgaaagacctcagcctagaatcggtaaaggtgttacaaacacttgtgaaatctgttgcagaagtctccttgattctttcaggttctgctctctcggctgcaagcttggaggaatgaggagaggagatttatctctaaccttctctttgaaaggaaagcatgggagagagtaccttggtgggtcggaatcagatgaagctactacaccgactaagatgcgtaagaccaatgctttcaaccgtctgatgagtggtctctcgatctcaaccgttagattcgatgactacggtcccaatggtgatcaaaggtcttcaagctctggtgatgaaggtggttttagtttctctccgggaacacctccgatctataatcaccggaattcaagcagacgaaagggtgtccctcaccgtgctccgttctaagaaaagataattactaaatttccaaccccatagtaattaattatatatatatatatatagataatggtataatacaatgtataacttggggtgaaatttaggatgtagtcataatgttgtaaatgtgtattatttctttttatagtttttctaaaagataaaggtgaaataattagaacacatacataaatacattttttataagtatagaagaattaggttttatagtggaagtgtttgatgtttagtttgtttaaaaggcatggctttgtcttgtgttgtaatgtaatgtgtacattaaatttttgttcatacaataataatatcaaggtgaatgatatattatg

SEQ ID NO: 41222 - protein, 246 aa, Arabidopsis thaliana
  peptide (1)..(246): Ceres Seq. ID no. 13494071
MGPMIRTEEEEDYTSPPWLMPMLRGSYFVPCSIHVDSNKNECNLFCLDCAGNAFCSYCLVKHKDHRVVQIRRSSYHNVVRVNEIQKFIDIACVQTYIINSAKIVFLNERPQPRIGKGVTNTCEICCRSLLDSFRFCSLGCKLGGMRRGDLSLTFSLKGKHGREYLGGSESDEATTPTKMRKTNAFNRLMSGLSISTVRFDDYGPNGDQRSSSSGDEGGFSFSPGTPPIYNHRNSSRRKGVPHRAPF

SEQ ID NO: 41223 - protein, 243 aa, Arabidopsis thaliana
  peptide (1)..(243): Ceres Seq. ID no. 13494072
MIRTEEEEDYTSPPWLMPMLRGSYFVPCSIHVDSNKNECNLFCLDCAGNAFCSYCLVKHKDHRVVQIRRSSYHNVVRVNEIQKFIDIACVQTYIINSAKIVFLNERPQPRIGKGVTNTCEICCRSLLDSFRFCSLGCKLGGMRRGDLSLTFSLKGKHGREYLGGSESDEATTPTKMRKTNAFNRLMSGLSISTVRFDDYGPNGDQRSSSSGDEGGFSFSPGTPPIYNHRNSSRRKGVPHRAPF

SEQ ID NO: 41224 - protein, 227 aa, Arabidopsis thaliana
  peptide (1)..(227): Ceres Seq. ID no. 13494073
MPMLRGSYFVPCSIHVDSNKNECNLFCLDCAGNAFCSYCLVKHKDHRVVQIRRSSYHNVVRVNEIQKFIDIACVQTYIINSAKIVFLNERPQPRIGKGVTNTCEICCRSLLDSFRFCSLGCKLGGMRRGDLSLTFSLKGKHGREYLGGSESDEATTPTKMRKTNAFNRLMSGLSISTVRFDDYGPNGDQRSSSSGDEGGFSFSPGTPPIYNHRNSSRRKGVPHRAPF

SEQ ID NO: 41225 - DNA, 1145 bp, Arabidopsis thaliana
  misc_feature (1)..(1145): Ceres Seq. ID no. 13492480
  misc_feature (1)..(1145): Ortholog of  Ceres SEQ ID NO 13595164 as cited in SEQ ID NO 56222
  misc_feature (1)..(1145): Ortholog of  Ceres SEQ ID NO 13595665 as cited in SEQ ID NO 59902
  misc_feature (1)..(1145): Ortholog of  Ceres SEQ ID NO 14302438 as cited in SEQ ID NO 62982
  misc_feature (1)..(1145): Ortholog of  Ceres SEQ ID NO 13591068 as cited in SEQ ID NO 69043
  misc_feature (1)..(1145): Ortholog of  Ceres SEQ ID NO 13623041 as cited in SEQ ID NO 0
actaataattcgtttaaacgcaaagaccaacatggaagatcggtgcttgatcaagaacgatgtcactgaattgattggtaacacaccaatggtgtatctgaacaatgttgttgatggttgcgtggctcgtatcgctgcaaagcttgagatgatggagccttgttctagcgtcaaagacagaatcgcgtatagtatgatcaaagatgcagaagaaaaaggattgattactcccggaaagagtacattgatagagccaactgctggtaacaccgggattggtttagcttgcatgggagctgcaagaggctataaagtgatccttgtgatgccttcaactatgagcttagagagaagaatcattctgagggcactaggtgcagagcttcatctctcggaccagcgcataggccttaaaggaatgttggagaaaactgaagcgattttaagcaaaactcctggtggttacattccacaacaatttgaaaatcctgcaaaccccgagattcattaccgaaccacgggaccggaaatatggagagattcagccgggaaagtagatatattggtcgctggcgtagggactggtggaactgctactggagtagggaagttcctcaaggagcagaacaaagacatcaaggtttgtgtggtggaaccagtagaaagtccggtacttagcggaggtcaaccaggtccacatttgattcagggaattggctctggtatcgtcccattcaatttggacttaaccattgttgatgaaattattcaagtggcaggtgaagaggctattgaaacagccaagcttcttgccctcaaagaaggattactggtgggaatatcctctggagccgcagcagcggctgcgttaaaggttgcaaagcggccagaaaacgcggggaaactcattgtggtggtttttcctagtggaggagaacgttatttatcgactaaactgttcgattcgattagatatgaagcagagaatttgcctattgaatgaatgttggacgtgtgccggtttcgtgtgtaataagagacgttcgttccaagagtccaagatttcaatttgcttattactggtcaatgtgaaatgtataaaaagttgcatattcgattatgaataattttagttgactacttcc

SEQ ID NO: 41226 - protein, 333 aa, Arabidopsis thaliana
  peptide (1)..(333): Ceres Seq. ID no. 13492481
LIIRLNAKTNMEDRCLIKNDVTELIGNTPMVYLNNVVDGCVARIAAKLEMMEPCSSVKDRIAYSMIKDAEEKGLITPGKSTLIEPTAGNTGIGLACMGAARGYKVILVMPSTMSLERRIILRALGAELHLSDQRIGLKGMLEKTEAILSKTPGGYIPQQFENPANPEIHYRTTGPEIWRDSAGKVDILVAGVGTGGTATGVGKFLKEQNKDIKVCVVEPVESPVLSGGQPGPHLIQGIGSGIVPFNLDLTIVDEIIQVAGEEAIETAKLLALKEGLLVGISSGAAAAAALKVAKRPENAGKLIVVVFPSGGERYLSTKLFDSIRYEAENLPIE

SEQ ID NO: 41227 - protein, 323 aa, Arabidopsis thaliana
  peptide (1)..(323): Ceres Seq. ID no. 13492482
MEDRCLIKNDVTELIGNTPMVYLNNVVDGCVARIAAKLEMMEPCSSVKDRIAYSMIKDAEEKGLITPGKSTLIEPTAGNTGIGLACMGAARGYKVILVMPSTMSLERRIILRALGAELHLSDQRIGLKGMLEKTEAILSKTPGGYIPQQFENPANPEIHYRTTGPEIWRDSAGKVDILVAGVGTGGTATGVGKFLKEQNKDIKVCVVEPVESPVLSGGQPGPHLIQGIGSGIVPFNLDLTIVDEIIQVAGEEAIETAKLLALKEGLLVGISSGAAAAAALKVAKRPENAGKLIVVVFPSGGERYLSTKLFDSIRYEAENLPIE

SEQ ID NO: 41228 - protein, 304 aa, Arabidopsis thaliana
  peptide (1)..(304): Ceres Seq. ID no. 13492483
MVYLNNVVDGCVARIAAKLEMMEPCSSVKDRIAYSMIKDAEEKGLITPGKSTLIEPTAGNTGIGLACMGAARGYKVILVMPSTMSLERRIILRALGAELHLSDQRIGLKGMLEKTEAILSKTPGGYIPQQFENPANPEIHYRTTGPEIWRDSAGKVDILVAGVGTGGTATGVGKFLKEQNKDIKVCVVEPVESPVLSGGQPGPHLIQGIGSGIVPFNLDLTIVDEIIQVAGEEAIETAKLLALKEGLLVGISSGAAAAAALKVAKRPENAGKLIVVVFPSGGERYLSTKLFDSIRYEAENLPIE

SEQ ID NO: 41229 - DNA, 1428 bp, Arabidopsis thaliana
  misc_feature (1)..(1428): Ceres Seq. ID no. 12384806
  misc_feature (1)..(1428): Ortholog of  Ceres SEQ ID NO 14302287 as cited in SEQ ID NO 68134
  misc_feature (1)..(1428): Ortholog of  Ceres SEQ ID NO 14309328 as cited in SEQ ID NO 0
aaagaaaccaaaagagtaaaacaaacacagagaagcttcttcttaaacgatgccgtactataccagagatgacaacgacgtcgacgatttcgatgagtttgatccaacgccgtacagtggtggttacgacatcacggtgatctacggccgtccgattccaccttccgatgagacttgttatcctctctcatctggtgtcgatgatgatttcgaatacgagagacctgaatttactcagatccatgagccttctgcttacggtgatgaagctcttaacacagagtacagtagctattctcgacccaagccacgacccgcatttcgacccgatcctggttatggatctgaatccggttatgggaggaaaccggaatctgagtacggatctggctatggtggacaaacggaggtggagtatggtcggagacctgagcagagttatggatctggttatggtggaaggacggagactgaatcggagtatggatctggtggtggtggaagaactgaggttgagtatggtaggagacctgaatcagggcttggatctggttatggtgggagatcggagtctgagtatgagcgtaagcctagctatggaaggtctgaggaacaagaagaaggttataggaagcctagctatggaagatctgaagaacaggaggaaggttacaggaagccaagttatggaagatctgaggagcaggaagaaggatatagaaagcctagctatggaagatctgaggaggaacaagaggaaggttataggaagcctagctatggaagatctgaggaacaagaggaaggaagttacaggaaacctagttatgggaggtctgatgatcaggtggagagttacattaagcctagctatggaagatctgaggaacaggaggagggaagttacaggaagcctagttatgggaggtctgaggaacaggaagaggggagttacaggaagcagcctagctatggccgtggcaatgacgatgatgatgatgagcagcgtaggaaccgttctggttctggtgatgatgaggaagggagctatggccgcaagaaatatggtggcaatgactctgatgaggatgaggagaagaagaagcaccgtcacaagcatcaccaccagaagcgtcgtgacgaagacgatgagtaaactaaaccctctctgtgctagagagtgtaatgagaatgtgtgtttgcttagcctcaaaaatctactaaataaagagctaagtcacatacctttctacataatatcttccgacgttggtgttgtgtttgtttgaatctctgtattattactacagagtcttcgtactggttcataataagacctttaagtggtattgggtcaccatgtaactgttgctactctgtttcgttttctatctatcgttttgtgttatgatttacttttctatcctt

SEQ ID NO: 41230 - protein, 373 aa, Arabidopsis thaliana; identical to SEQ ID NO: 30758
  peptide (1)..(373): Ceres Seq. ID no. 12384807

SEQ ID NO: 41231 - protein, 368 aa, Arabidopsis thaliana; identical to SEQ ID NO: 30759
  peptide (1)..(368): Ceres Seq. ID no. 12384808

SEQ ID NO: 41232 - protein, 362 aa, Arabidopsis thaliana; identical to SEQ ID NO: 30760
  peptide (1)..(362): Ceres Seq. ID no. 12384809

SEQ ID NO: 41233 - DNA, 1487 bp, Arabidopsis thaliana
  misc_feature (1)..(1487): Ceres Seq. ID no. 12395245
  misc_feature (1)..(1487): Ortholog of  Ceres SEQ ID NO 13582619 as cited in SEQ ID NO 56520
  misc_feature (1)..(1487): Ortholog of  Ceres SEQ ID NO 13660872 as cited in SEQ ID NO 60830
  misc_feature (1)..(1487): Ortholog of  Ceres SEQ ID NO 12616221 as cited in SEQ ID NO 63291
atacttttattttcatttcctttaactgcatagttcttcctcaaattgctcatacctttgcttctctttctttctttattcaacctcttatttcttcttcagcaccaacgtgtatctgcagtaaacacatatccatcgatcgatctcctcaaaaagttattgttttcttgaaggatttttcttgttcttgatcaagcatacatatatatagatggtggaagaaggcggcgtagttgtgaatcaaggaggagatcaggaggtggtggatttgcctccggggtttcggtttcaccctactgatgaagagataataactcactacctcaaagagaaggtcttcaacatccgatttaccgcggcagcgattggtcaagccgacctcaacaagaacgagccatgggatctaccaaagattgcaaagatgggggagaaggagttttactttttctgccagagggatcggaagtatccgaccgggatgaggacgaaccgtgcgaccgtgtctggttattggaaggcgaccgggaaggacaaggagatctttagaggcaaaggttgtcttgttgggatgaagaaaacacttgttttctatacaggaagagctccaaaaggtgaaaagaccaattgggttatgcatgaatatcgtcttgatggaaaatattcttatcataacctccccaaaaccgcaagggatgaatgggtggtgtgtagggtttttcacaagaacgctcctagtactacaatcactactacaaaacaactctcaaggattgattctcttgataacattgatcatctcttagacttctcatctctccctcctctcatagatccgggtttcttgggtcaacccggcccaagcttctccggtgcccgtcaacaacacgatctcaaacctgttctccaccatcctacaaccgcaccagtcgacaacacttaccttcctacccaagctctcaatttcccttaccactcggtccataattccggatctgatttcggctacggggcaggttcaggcaataataacaaaggtatgatcaagttggagcattctcttgtgagtgtgtctcaagaaaccggtttgagttccgatgtgaacacaaccgcaacgccagagatatcttcttatccaatgatgatgaatccggcaatgatggatggtagcaagtcagcgtgtgatggtcttgatgacttgatcttctgggaagatttatatactagctaaatttgggaaaaggttatttgttaattgtgattgaagagtggcatattgattactcgtctagtgtttttaatcgtgtaattagttcgtatataatatacatgtacataagatcattaggtttattaggcattggactttagttcggtgattgcttacctagtttttagcttgagaaaaaaggctgtcattggggttatgtttctttgtgattaacttgtacatatatacatttaaattattcgtatggtttatttcgttt

SEQ ID NO: 41234 - protein, 338 aa, Arabidopsis thaliana
  peptide (1)..(338): Ceres Seq. ID no. 12395246
MVEEGGVVVNQGGDQEVVDLPPGFRFHPTDEEIITHYLKEKVFNIRFTAAAIGQADLNKNEPWDLPKIAKMGEKEFYFFCQRDRKYPTGMRTNRATVSGYWKATGKDKEIFRGKGCLVGMKKTLVFYTGRAPKGEKTNWVMHEYRLDGKYSYHNLPKTARDEWVVCRVFHKNAPSTTITTTKQLSRIDSLDNIDHLLDFSSLPPLIDPGFLGQPGPSFSGARQQHDLKPVLHHPTTAPVDNTYLPTQALNFPYHSVHNSGSDFGYGAGSGNNNKGMIKLEHSLVSVSQETGLSSDVNTTATPEISSYPMMMNPAMMDGSKSACDGLDDLIFWEDLYTS

SEQ ID NO: 41235 - protein, 268 aa, Arabidopsis thaliana
  peptide (1)..(268): Ceres Seq. ID no. 12395247
MGEKEFYFFCQRDRKYPTGMRTNRATVSGYWKATGKDKEIFRGKGCLVGMKKTLVFYTGRAPKGEKTNWVMHEYRLDGKYSYHNLPKTARDEWVVCRVFHKNAPSTTITTTKQLSRIDSLDNIDHLLDFSSLPPLIDPGFLGQPGPSFSGARQQHDLKPVLHHPTTAPVDNTYLPTQALNFPYHSVHNSGSDFGYGAGSGNNNKGMIKLEHSLVSVSQETGLSSDVNTTATPEISSYPMMMNPAMMDGSKSACDGLDDLIFWEDLYTS

SEQ ID NO: 41236 - protein, 249 aa, Arabidopsis thaliana
  peptide (1)..(249): Ceres Seq. ID no. 12395248
MRTNRATVSGYWKATGKDKEIFRGKGCLVGMKKTLVFYTGRAPKGEKTNWVMHEYRLDGKYSYHNLPKTARDEWVVCRVFHKNAPSTTITTTKQLSRIDSLDNIDHLLDFSSLPPLIDPGFLGQPGPSFSGARQQHDLKPVLHHPTTAPVDNTYLPTQALNFPYHSVHNSGSDFGYGAGSGNNNKGMIKLEHSLVSVSQETGLSSDVNTTATPEISSYPMMMNPAMMDGSKSACDGLDDLIFWEDLYTS

SEQ ID NO: 41237 - DNA, 5087 bp, Arabidopsis thaliana
  misc_feature (1)..(5087): Ceres Seq. ID no. 12395233
  misc_feature (1)..(5087): Ortholog of  Ceres SEQ ID NO 15224473 as cited in SEQ ID NO 66479
aaattgatctcatcttcaatcaaattcatcatcttcgatactcgtttcttctctctttggtttcatacagatcccaaatttctagggctcctagtcctttgatttcttcgactggaatcgcaattccccactacgtcaagctggacagacaccgaagggatcgccatgagagtggcggctacgaggattcctaccataaccaccgagcccatcccagaggtccatctcgtccctcagattcacgcttcgaagaggatgatgatgattttcgccgccaccgtcgtcgtcgtggaagcagccctagcaattatcgaattggaattgggggcggaggaggaggtaatggtggtcgacgctgggaagatgacactcctaaggattttgatggtcccggagatggaggtttccggcagatgaatggtcccccagatagagtagattttaagcctatgggtcctcaccatggtggaagttttcggcctatggggtttgcctacgatgatggttttcgtccaatgggtcctaacggtggtgtgggaggagaagggacacggtcaattgttggagctcggtataactatcccgcgaagtatcctccttcagagagtccagacaggaggagatttatcggtaaagcaatggagtctgattattctgtaagaccgactacaccgccggtccagcagcctctttccggtcagaaaagagggtatcctatctcagaccatggcagctttactggaactgatgtctctgatcgtagcagtacagtcaagctttttgttggatctgtaccaaggacagctacagaagaagaaatccgtccctatttcgaacagcatggaaatgttctggaggttgctctgatcaaggacaagagaactggacagcagcaaggtatgtcaatctccattttattaggaaatagtcgtgaattatactttttaaaatttcaggtctccctgaaaaggctgatgggaagcaaccccagtctcatcattggcctccaattgtttgcaacaattttcgggcttattgcttatgcttgccagcgtcttatctgtgttcgattctgtcacagaagaaggctacctgtgctaagaaagggtttatgtacttatgttgggcaaatagatttcgctacttgtgtgtattctagaactttagatgtgtttgaaaagtgtagaatttattgagggtgttttagagttggagttaatgtacagagaactgaattttgctgttgcctttatagtgggaattggttataagaacatcgctattttcctctccctattgaaattcattttctttactcttcctctagatggattgaagatgttgtgtatggtcttgacaggatgaatgtatttttttaagttggtagtttgataaggacatgaggttcaaaagatggtttcttgatttgccactcctgctggtcaaagatttggccgtctttctaattttatcatgttggaggtttggcgtcttcattttctttcatatcaatttatgggtgtgctgtctattggttaatgatggcattccttttacctttttggatgagtgatgctggaatgaatgcgtttctccttttcttttgttgatggcctgaggaactatgatggctatatttctttccactctctttgaatggcctgaaatgtgtgctttctgtatggtcgtccctctcaatttcttggatggcttgtgatgtgatataccatctctcgtcataggtgaatgaatgatttgtttagtagttcttatgtatgtattttgtatgttcccacgtctctattccttggatggcttgtgatgtgatataccatctctcgtcatagatgaatgaatattttgttgagtagctcttatgtctgtatggtggcccttgcagtgctgatcgatatttatgtggaagaaatgtttgatgatagattttttttgtatgctcccttttcgctaatcaagcctttgtgcttgcaaggtgcaactgttattttattattgaatttcctgttctactactccatttagttctgtctctattttgtcagtgtgaagaaatactagacgatgaatggtgtgtttgtacgtgcatagttatttataaattcttgactttccaagaagttattatttctataactgctacacctttgtggatggcagaacaaatgcatctgattgtggtgacataaacacttttgatcgcggttgaatgtactagattccatacaactctttcttcagccttgtgaaatattattatgttaggtggtgcaaacatatggaaggaacctgattgttttagtttcttagaatagtttctgatgttaatacagcatgttgacttcactctcttgcccttgatcaatcagcatcaggcaggggcctaattatgtattacatgaagcaatcgtattcttttctgaattagatttttttccaatgagttatcttgcccataactgtagttctttatttgaagtcttcaaatgcttgatgtatggtgacgaaaatgtgtatatgttttggttttgattatccgctactcatcaattattgagattcttacatactgaatccgttactttggacctatagttatgttttatgttgctaattaacttgtacatgtttctagattttctttcaaatggatcctgcttggacaaatgcagccaccctttgtctgaaaggccctcttgtagatatgttatctgcagatactgactgtgttcaattttttaatatttgtttttgccatattctccatttgaagacattaatttattctctccaacaactttacatcaatatttaagtggaggctgtcagacatgtcttatgattttcctactgaacttatgtgctttgagtagtacatcttgttactagtacaatttgatggtagaaggaaaagttgaaccctgaaacagatagcttaagtatcagtctttaatgcaggctgttgttttgtaaaatatgcaacttcgaaagatgcggatagagccatcagagcactgcacaatcagatcactcttcctgggggaactggtcctgttcaagttcgatatgctgacggggagagagaacgcataggcaccctagagtttaagctttttgttggttcactaaacaagcaagccactgaaaaagaagttgaggagatctttttacaatttggtcatgtggaagatgtctatctcatgcgggatgaatatagacagagtcgtggatgtgggtttgttaaatattcaagcaaagagacggcaatggcagctatcgatggtctcaacggaacttataccatgagaggttgcaatcagccattgattgttcggtttgctgagccaaagaggcctaaacctggcgagtcaagggaaatggcacctcctgttggacttggttcagggcctcgttttcaagcttcaggaccaaggcctacctctaactttggtgactctagtggggatgtaagccacacaaatccttggcgtccagctacttcacgaaacgtaggcccacctagtaacactgggatccgtggtgccggtagtgactttccccctaaaccaggtcaagcaacattgccttcaaatcagggtggcccgttaggtggttatggtgttcctccccttaaccctctcccagtccctggagtttcatcttctgccacattgcaacagcaaaatcgggcagctggccagcatataacaccattaaaaaaacctcttcacagtccacagggtctccctctccccctccgtccgcaaactaatttccctggggcccaggcacccttgcagaatccttatgcttatagcagccagttgcctacctctcagctgccaccacagcaaaacatcagtcgtgcaactgctcctcaaactcctttgaacattaatctacggccaacaactgtgtcttctgcaactgttcaatttccccctcgttcccagcagcaaccgctacaaaagatgcaacatcctccttctgagctagctcagctcttgtcgcagcaaactcagagtctacaagcaacattccaatcgtctcagcaagcaatttctcagctgcagcagcaggtgcagtctatgcagcaaccaaaccaaaatttaccactctcacagaatggccgagctggtaaacaacagtgggctggatctgcaattccaagagtggctagcaccactggttcgacaccagtgagctatgtgcaaacagctgcacctgcagtaagtcagagcgtaggttctgtcaaatgtacctggaccgagcatacctcgcctgatggatttaaatattattacaatggtctaacgggtgaaagcaagtgggaaaaacctgaggaaatgatagtgttcgaacgagagcaacagaaacagcaacaacatcaagagaagccaactatacagcagtcccagacccaattacagccgttgcagcaacaaccacaacaagttcagcagcaatatcagggccagcaattacagcagccgttttattcttcactgtatccaactccaggggccagccataatactcagtatccatcattgccagtaggtcaaaatagccagtttcctatgtcaggaattggtcagaatgctcaggattatgctcggacacatatacccgtgggagctgcttcaatgaatgatatatcaagaactcaacagagccgtcaatctccccaagaactcatgtggaagaataaagcttgaggtacatgagacgaggagctaaactatctcagtagctagatagaaatttctggaactaattagtcaaggagaggaaaagcagcaatggtagtgtccttagtctctgatttttttagttaaccccttcagttataatagataggcgatcgtagaccatctgcattctatcttttctctaatcagatatctcctcctttttcattttaagagctgccaaacaatggcctgttgtaacataactagcgcaagttatgtctcatgttgtgttactagtagtaacttagctgggtaaaccaaactttgatccagattaggagtcatatataattatataaatagaatatgtacattcat

SEQ ID NO: 41238 - protein, 505 aa, Arabidopsis thaliana
  peptide (1)..(505): Ceres Seq. ID no. 12395234
MRDEYRQSRGCGFVKYSSKETAMAAIDGLNGTYTMRGCNQPLIVRFAEPKRPKPGESREMAPPVGLGSGPRFQASGPRPTSNFGDSSGDVSHTNPWRPATSRNVGPPSNTGIRGAGSDFPPKPGQATLPSNQGGPLGGYGVPPLNPLPVPGVSSSATLQQQNRAAGQHITPLKKPLHSPQGLPLPLRPQTNFPGAQAPLQNPYAYSSQLPTSQLPPQQNISRATAPQTPLNINLRPTTVSSATVQFPPRSQQQPLQKMQHPPSELAQLLSQQTQSLQATFQSSQQAISQLQQQVQSMQQPNQNLPLSQNGRAGKQQWAGSAIPRVASTTGSTPVSYVQTAAPAVSQSVGSVKCTWTEHTSPDGFKYYYNGLTGESKWEKPEEMIVFEREQQKQQQHQEKPTIQQSQTQLQPLQQQPQQVQQQYQGQQLQQPFYSSLYPTPGASHNTQYPSLPVGQNSQFPMSGIGQNAQDYARTHIPVGAASMNDISRTQQSRQSPQELMWKNKA

SEQ ID NO: 41239 - protein, 483 aa, Arabidopsis thaliana
  peptide (1)..(483): Ceres Seq. ID no. 12395235
MAAIDGLNGTYTMRGCNQPLIVRFAEPKRPKPGESREMAPPVGLGSGPRFQASGPRPTSNFGDSSGDVSHTNPWRPATSRNVGPPSNTGIRGAGSDFPPKPGQATLPSNQGGPLGGYGVPPLNPLPVPGVSSSATLQQQNRAAGQHITPLKKPLHSPQGLPLPLRPQTNFPGAQAPLQNPYAYSSQLPTSQLPPQQNISRATAPQTPLNINLRPTTVSSATVQFPPRSQQQPLQKMQHPPSELAQLLSQQTQSLQATFQSSQQAISQLQQQVQSMQQPNQNLPLSQNGRAGKQQWAGSAIPRVASTTGSTPVSYVQTAAPAVSQSVGSVKCTWTEHTSPDGFKYYYNGLTGESKWEKPEEMIVFEREQQKQQQHQEKPTIQQSQTQLQPLQQQPQQVQQQYQGQQLQQPFYSSLYPTPGASHNTQYPSLPVGQNSQFPMSGIGQNAQDYARTHIPVGAASMNDISRTQQSRQSPQELMWKNKA

SEQ ID NO: 41240 - protein, 471 aa, Arabidopsis thaliana
  peptide (1)..(471): Ceres Seq. ID no. 12395236
MRGCNQPLIVRFAEPKRPKPGESREMAPPVGLGSGPRFQASGPRPTSNFGDSSGDVSHTNPWRPATSRNVGPPSNTGIRGAGSDFPPKPGQATLPSNQGGPLGGYGVPPLNPLPVPGVSSSATLQQQNRAAGQHITPLKKPLHSPQGLPLPLRPQTNFPGAQAPLQNPYAYSSQLPTSQLPPQQNISRATAPQTPLNINLRPTTVSSATVQFPPRSQQQPLQKMQHPPSELAQLLSQQTQSLQATFQSSQQAISQLQQQVQSMQQPNQNLPLSQNGRAGKQQWAGSAIPRVASTTGSTPVSYVQTAAPAVSQSVGSVKCTWTEHTSPDGFKYYYNGLTGESKWEKPEEMIVFEREQQKQQQHQEKPTIQQSQTQLQPLQQQPQQVQQQYQGQQLQQPFYSSLYPTPGASHNTQYPSLPVGQNSQFPMSGIGQNAQDYARTHIPVGAASMNDISRTQQSRQSPQELMWKNKA

SEQ ID NO: 41241 - DNA, 1180 bp, Arabidopsis thaliana
  misc_feature (1)..(1180): Ceres Seq. ID no. 12395532
  misc_feature (1)..(1180): Ortholog of  Ceres SEQ ID NO 15177654 as cited in SEQ ID NO 59933
  misc_feature (1)..(1180): Ortholog of  Ceres SEQ ID NO 14303600 as cited in SEQ ID NO 64632
  misc_feature (1)..(1180): Ortholog of  Ceres SEQ ID NO 14302776 as cited in SEQ ID NO 66919
acaaataaatacctttgtttccctcttcttctccttcactcacaacatctcaatttcattctctcttctctctccaatttcacaacaatgggagtcaaaagtttcgttgaaggtgggattgcctctgtaatcgccggttgctctactcaccctctcgatctaatcaaggttcgtcttcagcttcacggtgaagcaccttccaccaccaccgtcactctcctccgtccagctctcgctttccccaattcttctcctgcagctttcctggaaacgacttcttcagtccccaaagtaggaccgatctcactcggaatcaacatagtcaaatcggaaggcgccgccgcgttattctcaggagtctccgctacacttctccgtcagacgttatattccaccaccaggatgggtctatacgaagtgcttaagaacaaatggactgatcctgagtcagggaagttgaatctgagtaggaagatcggtgcagggctagtcgctggtggaatcggagccgccgttggaaatccagctgacgtggcgatggttaggatgcaagctgacgggaggttacctttagcgcaacgtcgtaactacgccggagtaggagacgcaatcaggagcatggttaagggagaaggcgtaacgagcttgtggcgaggctcggcgttgacgattaaccgagcgatgattgtgacggcggctcagctagcgtcttacgatcagttcaaggaagggatattggagaatggtgtgatgaatgatgggctagggactcacgtggtagcgagttttgcggcggggtttgttgcttcggttgcgtctaatccggtggatgtgataaagacgagagtgatgaatatgaaggtgggagcgtacgacggcgcgtgggattgtgcggtgaagacggttaaagcggaaggagccatggctctttataaaggctttgttcctacagtttgtaggcaaggtcctttcactgttgttctcttcgttacgttggagcaagttaggaagctgcttcgagatttttgataccattcttttattgatgatgatgatggcgactatttatattgatttattcatttttgaaatagtgaacacaagaaggaactaggaagagggggattcaatatattttttgttcaagcattgttgttaaatacaattcaattttagtttc

SEQ ID NO: 41242 - protein, 342 aa, Arabidopsis thaliana
  peptide (1)..(342): Ceres Seq. ID no. 12395533
TNKYLCFPLLLLHSQHLNFILSSLSNFTTMGVKSFVEGGIASVIAGCSTHPLDLIKVRLQLHGEAPSTTTVTLLRPALAFPNSSPAAFLETTSSVPKVGPISLGINIVKSEGAAALFSGVSATLLRQTLYSTTRMGLYEVLKNKWTDPESGKLNLSRKIGAGLVAGGIGAAVGNPADVAMVRMQADGRLPLAQRRNYAGVGDAIRSMVKGEGVTSLWRGSALTINRAMIVTAAQLASYDQFKEGILENGVMNDGLGTHVVASFAAGFVASVASNPVDVIKTRVMNMKVGAYDGAWDCAVKTVKAEGAMALYKGFVPTVCRQGPFTVVLFVTLEQVRKLLRDF

SEQ ID NO: 41243 - protein, 313 aa, Arabidopsis thaliana
  peptide (1)..(313): Ceres Seq. ID no. 12395534
MGVKSFVEGGIASVIAGCSTHPLDLIKVRLQLHGEAPSTTTVTLLRPALAFPNSSPAAFLETTSSVPKVGPISLGINIVKSEGAAALFSGVSATLLRQTLYSTTRMGLYEVLKNKWTDPESGKLNLSRKIGAGLVAGGIGAAVGNPADVAMVRMQADGRLPLAQRRNYAGVGDAIRSMVKGEGVTSLWRGSALTINRAMIVTAAQLASYDQFKEGILENGVMNDGLGTHVVASFAAGFVASVASNPVDVIKTRVMNMKVGAYDGAWDCAVKTVKAEGAMALYKGFVPTVCRQGPFTVVLFVTLEQVRKLLRDF

SEQ ID NO: 41244 - protein, 208 aa, Arabidopsis thaliana
  peptide (1)..(208): Ceres Seq. ID no. 12395535
MGLYEVLKNKWTDPESGKLNLSRKIGAGLVAGGIGAAVGNPADVAMVRMQADGRLPLAQRRNYAGVGDAIRSMVKGEGVTSLWRGSALTINRAMIVTAAQLASYDQFKEGILENGVMNDGLGTHVVASFAAGFVASVASNPVDVIKTRVMNMKVGAYDGAWDCAVKTVKAEGAMALYKGFVPTVCRQGPFTVVLFVTLEQVRKLLRDF

SEQ ID NO: 41245 - DNA, 1349 bp, Arabidopsis thaliana
  misc_feature (1)..(1349): Ceres Seq. ID no. 12481973
  misc_feature (1)..(1349): Ortholog of  Ceres SEQ ID NO 14311579 as cited in SEQ ID NO 51717
attctcattgaacaaaaataataaattctcagtgatccttcgagagattgattataaaatccggtcggcgacgagacttactttcgccgcaaaatttgttctccggtaccggatatttacgtatctgttctcaaattttaccattcccaccactaaaaccctagattaaaagcttcaattaccggaaaaagtctctacttaagagatttatctgtttgttgtcttaaatcacaggaagagaatggattttcttaaggcaacgattatagttgccctaatttgcaatttcgcctcactggcgtcttctgttcctttcatagttctgcatggaattggggataaatgcagtaatgcaggagtgacacaattcacagagcttttaagcgattggtctggttctcaaggatattgcttggagattgggaatggctcatgggactcatggactatgcctctccttgatcagacatcagttgtttgtgagaaggtgaaaagtatgccagagcttagtgacggttacagcattgtggggctttctcagggtaacatgattggtcgagctctcattgagttttgcgatggagcaccacctgttaagagttttgtttcggtagcgggtcctcatgctggcactgcatcgattccgttctgtggtgctacctggatttgcatcatgttggacagtatgatcaaagcagagatctatagcgactatatgcaggaacatttggctcctagcggttttctcaaaatcccaactgacatagcgggttacatggaaggctgtaggtttctcccaaagctaaacaacgaacttccagtcaaaaactcgacttataaggagaggttctcgagtttggagaatcttgtgcttattatgtttgagcatgacacaatattgatacctaaagaaacctcatggtttggatattatcctgatgggtctttcaagaccattcttccgccgcaagagaccaagctatatactgaagactggattggtttgagaaccttagatgaagctggaaaagtgaagttcgttaacgtctctggaaatcatcttcagatatctcatacagacatgaagaagcatatagtgccatacctctgtgataaatcatcgtcgtcatcatccacaacaatggcagtttccggatcatcttcctcacaccagtggcttccaagtgtagggaacattattatggatcttattggtccagaagtggatcagcttcagcttgtgctacgtcatgtgtaaatctgatgtcctgtgttgttgtttgttctcttactaaacacgatcgtctcgtgatatgtttgtaacttgaagataaaacaagaaaactgtt

SEQ ID NO: 41246 - protein, 338 aa, Arabidopsis thaliana
  peptide (1)..(338): Ceres Seq. ID no. 12481974
MDFLKATIIVALICNFASLASSVPFIVLHGIGDKCSNAGVTQFTELLSDWSGSQGYCLEIGNGSWDSWTMPLLDQTSVVCEKVKSMPELSDGYSIVGLSQGNMIGRALIEFCDGAPPVKSFVSVAGPHAGTASIPFCGATWICIMLDSMIKAEIYSDYMQEHLAPSGFLKIPTDIAGYMEGCRFLPKLNNELPVKNSTYKERFSSLENLVLIMFEHDTILIPKETSWFGYYPDGSFKTILPPQETKLYTEDWIGLRTLDEAGKVKFVNVSGNHLQISHTDMKKHIVPYLCDKSSSSSSTTMAVSGSSSSHQWLPSVGNIIMDLIGPEVDQLQLVLRHV

SEQ ID NO: 41247 - protein, 269 aa, Arabidopsis thaliana
  peptide (1)..(269): Ceres Seq. ID no. 12481975
MPLLDQTSVVCEKVKSMPELSDGYSIVGLSQGNMIGRALIEFCDGAPPVKSFVSVAGPHAGTASIPFCGATWICIMLDSMIKAEIYSDYMQEHLAPSGFLKIPTDIAGYMEGCRFLPKLNNELPVKNSTYKERFSSLENLVLIMFEHDTILIPKETSWFGYYPDGSFKTILPPQETKLYTEDWIGLRTLDEAGKVKFVNVSGNHLQISHTDMKKHIVPYLCDKSSSSSSTTMAVSGSSSSHQWLPSVGNIIMDLIGPEVDQLQLVLRHV

SEQ ID NO: 41248 - protein, 253 aa, Arabidopsis thaliana
  peptide (1)..(253): Ceres Seq. ID no. 12481976
MPELSDGYSIVGLSQGNMIGRALIEFCDGAPPVKSFVSVAGPHAGTASIPFCGATWICIMLDSMIKAEIYSDYMQEHLAPSGFLKIPTDIAGYMEGCRFLPKLNNELPVKNSTYKERFSSLENLVLIMFEHDTILIPKETSWFGYYPDGSFKTILPPQETKLYTEDWIGLRTLDEAGKVKFVNVSGNHLQISHTDMKKHIVPYLCDKSSSSSSTTMAVSGSSSSHQWLPSVGNIIMDLIGPEVDQLQLVLRHV

SEQ ID NO: 41249 - DNA, 1519 bp, Arabidopsis thaliana; identical to SEQ ID NO: 27756
  misc_feature (1)..(1519): Ceres Seq. ID no. 12558479
  misc_feature (1)..(1519): Ortholog of  Ceres SEQ ID NO 15176709 as cited in SEQ ID NO 1148
  misc_feature (1)..(1519): Ortholog of  Ceres SEQ ID NO 13658922 as cited in SEQ ID NO 66316

SEQ ID NO: 41250 - protein, 381 aa, Arabidopsis thaliana; identical to SEQ ID NO: 27757
  peptide (1)..(381): Ceres Seq. ID no. 12558480

SEQ ID NO: 41251 - protein, 363 aa, Arabidopsis thaliana; identical to SEQ ID NO: 27758
  peptide (1)..(363): Ceres Seq. ID no. 12558481

SEQ ID NO: 41252 - protein, 346 aa, Arabidopsis thaliana; identical to SEQ ID NO: 27759
  peptide (1)..(346): Ceres Seq. ID no. 12558482

SEQ ID NO: 41253 - DNA, 1361 bp, Arabidopsis thaliana
  misc_feature (1)..(1361): Ceres Seq. ID no. 12327945
  misc_feature (1)..(1361): Ortholog of  Ceres SEQ ID NO 13595870 as cited in SEQ ID NO 62101
  misc_feature (1)..(1361): Ortholog of  Ceres SEQ ID NO 13590241 as cited in SEQ ID NO 63878
  misc_feature (1)..(1361): Ortholog of  Ceres SEQ ID NO 13657939 as cited in SEQ ID NO 66349
  misc_feature (1)..(1361): Ortholog of  Ceres SEQ ID NO 13660597 as cited in SEQ ID NO 67655
atcagacatctctctgcttctcttcttcttcttcttcttcagctttgagatctattctatcttcaaagatggccaccgatgagccttctcaaactcgctggagctttctgtttgggaggaagaagctgcctgaagaagatgtatcaaacaaggaccaaccagaagatggatcatccaacggtaataacggtgatgtcaacaacaactcttccccagtcaccaatcaggatggtaacacagccttggccaatggcaatgtgattcgcgagaagccgaaaaagtccatgtttcccccgtttgagtctgcggaaactcgtactctcgctgagagtttgagtagggatatcatccgtgggaatccaaatatcaagtgggaaagcatcaaaggtttggagaacgctaaaaagttgctcaaagaagctgtggtgatgcctataaaataccccacgtactttaatggtctactaactccatggaaaggaattcttctttttggtcctcctggtaccggaaagactatgcttgcaaaggctgttgctacagagtgcaatacaacattcttcaacatctcagcctcatctgttgttagcaaatggagaggtgattctgagaagttgataagagttctgttcgatctagctaggcatcatgcaccttcgacaatatttcttgatgagatcgacgcgatcataagccaacgtggtggtgaaggccgcagtgaacatgaagctagcaggcgtctcaaaaccgagctgctcattcagatggatgggttacagaaaacgaatgagctcgtatttgttttagcagcaacaaatctcccctgggaactagatgcagctatgctccggcgtctagagaaacgaattcttgtacctttaccggatccagaagcaagaagaggaatgttcgagatgcttataccgtcacaaccaggtgatgagccattgcctcatgatgtgttggttgagaaatctgagggctactctggttcagacattcgaatactttgtaaggaagctgcgatgcaaccactgagacgcacattggctattttggaagacagagaagatgttgtgcctgaagacgagctgccaaaaattggtcccatcctgccagaagacattgatcgagctctgagcaacactcgaccatcggctcatctgcacgcccatctttacgacaagttcaatgatgattatggtagccaaattctcaagtaaattcgatgtaatatatacatctatgccatctagaacttgctcattatttgtatggaagcatccaaattacggatgctcaatgaacttttctgtcttaaattatgaataaatgctcctagttccttgggactcagtttc

SEQ ID NO: 41254 - protein, 406 aa, Arabidopsis thaliana
  peptide (1)..(406): Ceres Seq. ID no. 12327946
QTSLCFSSSSSSSALRSILSSKMATDEPSQTRWSFLFGRKKLPEEDVSNKDQPEDGSSNGNNGDVNNNSSPVTNQDGNTALANGNVIREKPKKSMFPPFESAETRTLAESLSRDIIRGNPNIKWESIKGLENAKKLLKEAVVMPIKYPTYFNGLLTPWKGILLFGPPGTGKTMLAKAVATECNTTFFNISASSVVSKWRGDSEKLIRVLFDLARHHAPSTIFLDEIDAIISQRGGEGRSEHEASRRLKTELLIQMDGLQKTNELVFVLAATNLPWELDAAMLRRLEKRILVPLPDPEARRGMFEMLIPSQPGDEPLPHDVLVEKSEGYSGSDIRILCKEAAMQPLRRTLAILEDREDVVPEDELPKIGPILPEDIDRALSNTRPSAHLHAHLYDKFNDDYGSQILK

SEQ ID NO: 41255 - protein, 384 aa, Arabidopsis thaliana
  peptide (1)..(384): Ceres Seq. ID no. 12327947
MATDEPSQTRWSFLFGRKKLPEEDVSNKDQPEDGSSNGNNGDVNNNSSPVTNQDGNTALANGNVIREKPKKSMFPPFESAETRTLAESLSRDIIRGNPNIKWESIKGLENAKKLLKEAVVMPIKYPTYFNGLLTPWKGILLFGPPGTGKTMLAKAVATECNTTFFNISASSVVSKWRGDSEKLIRVLFDLARHHAPSTIFLDEIDAIISQRGGEGRSEHEASRRLKTELLIQMDGLQKTNELVFVLAATNLPWELDAAMLRRLEKRILVPLPDPEARRGMFEMLIPSQPGDEPLPHDVLVEKSEGYSGSDIRILCKEAAMQPLRRTLAILEDREDVVPEDELPKIGPILPEDIDRALSNTRPSAHLHAHLYDKFNDDYGSQILK

SEQ ID NO: 41256 - protein, 312 aa, Arabidopsis thaliana
  peptide (1)..(312): Ceres Seq. ID no. 12327948
MFPPFESAETRTLAESLSRDIIRGNPNIKWESIKGLENAKKLLKEAVVMPIKYPTYFNGLLTPWKGILLFGPPGTGKTMLAKAVATECNTTFFNISASSVVSKWRGDSEKLIRVLFDLARHHAPSTIFLDEIDAIISQRGGEGRSEHEASRRLKTELLIQMDGLQKTNELVFVLAATNLPWELDAAMLRRLEKRILVPLPDPEARRGMFEMLIPSQPGDEPLPHDVLVEKSEGYSGSDIRILCKEAAMQPLRRTLAILEDREDVVPEDELPKIGPILPEDIDRALSNTRPSAHLHAHLYDKFNDDYGSQILK

SEQ ID NO: 41257 - DNA, 725 bp, Arabidopsis thaliana
  misc_feature (1)..(725): Ceres Seq. ID no. 12326277
  misc_feature (1)..(725): Ortholog of  Ceres SEQ ID NO 13600689 as cited in SEQ ID NO 0
actaaaccctaaatccatcctctctgtttcctttatatatattctctccttttttcatttttttgatcctcttcttcttctacaatcaaaattcatttttttttcctctgatcatcatcgaaccctagtttcgtcttttggtttcgagttttgtttctcttaatcatcgtagatactaaccgaatcatcatggagaagaactccttcaagctttctaatcctctggagatgagaatggctgagtctactcgtatcagagcgaaataccctgaaagagttcccgtgattgtggaaaaagctggacagagtgatgttcctgacattgacaagaagaagtatcttgtaccagctgatctaaccattggccaatttgtgtacgttgtgaggaaaagaatcaagcttggagctgaaaaagccatctttgtctttgtcaagaacacattaccaccaactgcggcattgatgtctgcaatctacgaagaacacaaagacgaagacgggtttctctacatgacatacagtggagagaacacatttggtggatctttctactgctaattacctcagcttctacgtctgatcctcttgatgattgtacattctcgtcgaccttaataatgtcattttactttcttggtttaaccttttgagctctcttactatctcttgcatttgaagatggtatttgaaacaagattctaatttgactctctagtttctttgtt

SEQ ID NO: 41258 - protein, 122 aa, Arabidopsis thaliana; identical to SEQ ID NO: 20909
  peptide (1)..(122): Ceres Seq. ID no. 12326278

SEQ ID NO: 41259 - protein, 109 aa, Arabidopsis thaliana; identical to SEQ ID NO: 20910
  peptide (1)..(109): Ceres Seq. ID no. 12326279

SEQ ID NO: 41260 - protein, 107 aa, Arabidopsis thaliana; identical to SEQ ID NO: 20911
  peptide (1)..(107): Ceres Seq. ID no. 12326280

SEQ ID NO: 41261 - DNA, 2750 bp, Arabidopsis thaliana
  misc_feature (1)..(2750): Ceres Seq. ID no. 12482170
  misc_feature (1)..(2750): Ortholog of  Ceres SEQ ID NO 13595870 as cited in SEQ ID NO 62101
  misc_feature (1)..(2750): Ortholog of  Ceres SEQ ID NO 13590241 as cited in SEQ ID NO 63878
  misc_feature (1)..(2750): Ortholog of  Ceres SEQ ID NO 13657939 as cited in SEQ ID NO 66349
aaatgtgttgcaatgtcttcctttgatttcctcaatttctagggtttcgaaagaaaaaataatgacttcaatcgaattgctaagtccattgattcacgataagtttcgattctcaacttgttgtagtactagtagtttattgtatttgcatgcttcgagctttttccgagatcgatcttttggttttcgtcagaatccgaatcgattcgtctccaattcatcgattcaacttcctcaatcagttccagggtcgataaaccaggaaaggtttaatctttggcaagggttttcgaggaagaagagtactagtagtagtagaacgattgtgaattgtcaagaaggtgatcagaaagctagctcaagtgaaggagaaggaaagaccaataaggataaaggacggaagcaaggtaagaatgagttatggtggtctaaagggaagaaatggcaatggaaaccgataattcaagcgcaggagattggtgtaatgttactacaattgggtattgttatgtttgttgtgcgattgctccgacccggaatcccgttaccgggttcggagcctcggacacagacgacgtttatgagtgtaccgtatagtgatttcttgagtaaagttaataatgatgaggttcagaaagtggaggtggatggttttcatgttttgtttaagttgaaagatgatgggaatttgcaagagagtgaaactagtagtagtagtattaagctctctgagtcgtctgagactatgcttagaagtgtggctccgactaaaagagttgtgtattccactactaggccgagggatatcaaaacaccgtatgagaaaatgcttgagaataatgtggaattcgggtcgcctgataagcgctctggtggctttttcaactctggattgatagttctgttctacattgcagtgcttgcagggcttctccaccgatttcctgttaacttttcccagagtacaacgggacagctgaggacccgcaagtctggtggtcctggtgggggaaaagtttctggtgatggtgaaacaatcacttttgcagatgttgctggtgttgatgaagcaaaggaagagctggaagagattgtggaatttctcaagaatcctgataggtatgttcgtctaggtgctcgtcctcctcgtggtgtcctactggtcggtcttcctggaacagggaaaacccttcttgcaaaagctgttgctggggaatctgatgttccattcataagttgctctgcaagtgagtttgtagagctgtatgttggcatgggtgcctcacgcgtaagggatctatttgcacgagccaagaaggaggctccgtcaattatatttatagatgagatagatgctgtcgcgaaaagccgtgatggtaaattcagaatggtcagcaatgatgaaagggagcaaaccttgaatcaattgctcactgagatggatggttttgacagtagctctgcagttattgttcttggagctaccaatcgagctgatgtcttagaccctgccctgcgtcggcctgggagatttgatcgtgttgttacggtggaatcacctgacaaagttggaagagaatccattttgaaagtgcatgtttcaaagaaagagcttcctttgggagatgatgtcaacctagctagcattgcctcaatgacaaccggttttactggggcagaccttgcaaacctggttaatgaggctgctttgctagcgggaaggaagagcaagatgactgttgataagattgacttcattcatgctgtcgagcgatctatagcgggcatagagaagaaaacagctaggttaaaaggtagtgagaaagctgtggttgcaaggcatgaagctgggcatgctgttgttggtacagctgttgcaagtcttctttctggacagtcccgtgttgagaaattaagcatattaccaagatcaggaggggcattgggctttacatacattcccccaacgcatgaagacagatatttgctctttattgatgaactacatggccgcttggtaactcttcttggaggtcgtgcagctgaagaggttgtttactcggggcgtatatcaacaggtgcacttgatgatatcaggagagcaaccgacatggcctataaggcagtagctgaatatggtctcaacgagaaaatcggacccgtctctgtggctacgctttctgctggtgggattgatgactctgggggatcaccatggggaagagatcaggggcatctggttgaccttgttcaaagagaggtgacaaatttgttgcaatctgctctggatgttgcgttgactgttgttcgcgctaatccagatgtattagaagggctcggtgctcaactggaagatgaagagaaagtagaaggtgaagagttgcagaaatggttaaatagagtagtaccctcagaggaacttgcagtgttcatcaaaggaaaacaaactgctttacttccagcacaagctagctccagttaacatctacaaagcctataaaatggaaagatgtatgcatcgatgatgattctgcctcacttagaagaatcaaaaagctaaaaggagctgcgaatcctgggcaacgatgacttagtatgtatagaagaaaaaaaaagcttttacttggtatcaaacagagcatgtgttgttgtatttgctacctttttctgcaaagttattggcaattgtattgttgttccacttgtatatatacagagaccatttatgttaatatacaacttcgtatggg

SEQ ID NO: 41262 - protein, 826 aa, Arabidopsis thaliana
  peptide (1)..(826): Ceres Seq. ID no. 12482171
NVLQCLPLISSISRVSKEKIMTSIELLSPLIHDKFRFSTCCSTSSLLYLHASSFFRDRSFGFRQNPNRFVSNSSIQLPQSVPGSINQERFNLWQGFSRKKSTSSSRTIVNCQEGDQKASSSEGEGKTNKDKGRKQGKNELWWSKGKKWQWKPIIQAQEIGVMLLQLGIVMFVVRLLRPGIPLPGSEPRTQTTFMSVPYSDFLSKVNNDEVQKVEVDGFHVLFKLKDDGNLQESETSSSSIKLSESSETMLRSVAPTKRVVYSTTRPRDIKTPYEKMLENNVEFGSPDKRSGGFFNSGLIVLFYIAVLAGLLHRFPVNFSQSTTGQLRTRKSGGPGGGKVSGDGETITFADVAGVDEAKEELEEIVEFLKNPDRYVRLGARPPRGVLLVGLPGTGKTLLAKAVAGESDVPFISCSASEFVELYVGMGASRVRDLFARAKKEAPSIIFIDEIDAVAKSRDGKFRMVSNDEREQTLNQLLTEMDGFDSSSAVIVLGATNRADVLDPALRRPGRFDRVVTVESPDKVGRESILKVHVSKKELPLGDDVNLASIASMTTGFTGADLANLVNEAALLAGRKSKMTVDKIDFIHAVERSIAGIEKKTARLKGSEKAVVARHEAGHAVVGTAVASLLSGQSRVEKLSILPRSGGALGFTYIPPTHEDRYLLFIDELHGRLVTLLGGRAAEEVVYSGRISTGALDDIRRATDMAYKAVAEYGLNEKIGPVSVATLSAGGIDDSGGSPWGRDQGHLVDLVQREVTNLLQSALDVALTVVRANPDVLEGLGAQLEDEEKVEGEELQKWLNRVVPSEELAVFIKGKQTALLPAQASSS

SEQ ID NO: 41263 - protein, 806 aa, Arabidopsis thaliana
  peptide (1)..(806): Ceres Seq. ID no. 12482172
MTSIELLSPLIHDKFRFSTCCSTSSLLYLHASSFFRDRSFGFRQNPNRFVSNSSIQLPQSVPGSINQERFNLWQGFSRKKSTSSSRTIVNCQEGDQKASSSEGEGKTNKDKGRKQGKNELWWSKGKKWQWKPIIQAQEIGVMLLQLGIVMFVVRLLRPGIPLPGSEPRTQTTFMSVPYSDFLSKVNNDEVQKVEVDGFHVLFKLKDDGNLQESETSSSSIKLSESSETMLRSVAPTKRVVYSTTRPRDIKTPYEKMLENNVEFGSPDKRSGGFFNSGLIVLFYIAVLAGLLHRFPVNFSQSTTGQLRTRKSGGPGGGKVSGDGETITFADVAGVDEAKEELEEIVEFLKNPDRYVRLGARPPRGVLLVGLPGTGKTLLAKAVAGESDVPFISCSASEFVELYVGMGASRVRDLFARAKKEAPSIIFIDEIDAVAKSRDGKFRMVSNDEREQTLNQLLTEMDGFDSSSAVIVLGATNRADVLDPALRRPGRFDRVVTVESPDKVGRESILKVHVSKKELPLGDDVNLASIASMTTGFTGADLANLVNEAALLAGRKSKMTVDKIDFIHAVERSIAGIEKKTARLKGSEKAVVARHEAGHAVVGTAVASLLSGQSRVEKLSILPRSGGALGFTYIPPTHEDRYLLFIDELHGRLVTLLGGRAAEEVVYSGRISTGALDDIRRATDMAYKAVAEYGLNEKIGPVSVATLSAGGIDDSGGSPWGRDQGHLVDLVQREVTNLLQSALDVALTVVRANPDVLEGLGAQLEDEEKVEGEELQKWLNRVVPSEELAVFIKGKQTALLPAQASSS

SEQ ID NO: 41264 - protein, 665 aa, Arabidopsis thaliana
  peptide (1)..(665): Ceres Seq. ID no. 12482173
MLLQLGIVMFVVRLLRPGIPLPGSEPRTQTTFMSVPYSDFLSKVNNDEVQKVEVDGFHVLFKLKDDGNLQESETSSSSIKLSESSETMLRSVAPTKRVVYSTTRPRDIKTPYEKMLENNVEFGSPDKRSGGFFNSGLIVLFYIAVLAGLLHRFPVNFSQSTTGQLRTRKSGGPGGGKVSGDGETITFADVAGVDEAKEELEEIVEFLKNPDRYVRLGARPPRGVLLVGLPGTGKTLLAKAVAGESDVPFISCSASEFVELYVGMGASRVRDLFARAKKEAPSIIFIDEIDAVAKSRDGKFRMVSNDEREQTLNQLLTEMDGFDSSSAVIVLGATNRADVLDPALRRPGRFDRVVTVESPDKVGRESILKVHVSKKELPLGDDVNLASIASMTTGFTGADLANLVNEAALLAGRKSKMTVDKIDFIHAVERSIAGIEKKTARLKGSEKAVVARHEAGHAVVGTAVASLLSGQSRVEKLSILPRSGGALGFTYIPPTHEDRYLLFIDELHGRLVTLLGGRAAEEVVYSGRISTGALDDIRRATDMAYKAVAEYGLNEKIGPVSVATLSAGGIDDSGGSPWGRDQGHLVDLVQREVTNLLQSALDVALTVVRANPDVLEGLGAQLEDEEKVEGEELQKWLNRVVPSEELAVFIKGKQTALLPAQASSS

SEQ ID NO: 41265 - DNA, 1206 bp, Arabidopsis thaliana
  misc_feature (1)..(1206): Ceres Seq. ID no. 12330896
  misc_feature (1)..(1206): Ortholog of  Ceres SEQ ID NO 15172958 as cited in SEQ ID NO 51206
  misc_feature (1)..(1206): Ortholog of  Ceres SEQ ID NO 15171139 as cited in SEQ ID NO 60093
gcacgattaaagagcgcctcgaaaattaacttttataggtaggaggagatagaaatcgaatcttatcgccgcgttaatatgccaccggccggagaactccgacatcaatctccatcaaaggagaaactatcttccgttacccaatccgatgaagcagaagcagcgtcagcagcgatatctgcggcagctgcagatgcggaagctgccggattatggacacagatcaaggcggaagctcgccgtgatgctgaggcggagccagctttagctagctatctatattcgacgattctttctcattcgtctcttgaacgatctatctcgtttcatctaggaaacaagctttgttcctcaacgcttttatccacacttttatacgatctgttcttaaacactttttcctccgatccttctcttcgtaacgccaccgtcgcagatctacgcgctgctcgtgttcgtgatcctgcttgtatctcgttctctcattgtctcctcaattacaaaggcttcttagctattcaggcgcatcgtgtatcacacaagctatggacacaatcacggaagccattagcattagctctacactcaagaatctccgatgtattcgctgttgatatccatccagcagcgaagatcggaaaagggatacttctagaccacgcaaccggagttgtagtcggagaaacagcggtgattgggaacaatgtttcaatccttcaccatgtgacactaggtggaacaggtaaagcttgtggagatagacatccgaagatcggtgacggttgtttgattggagctggagcgactattcttggaaatgtgaagattggtgcaggtgctaaagtaggagctggttctgttgtgctgattgacgtgccttgtcgaggtactgcggttgggaatccggcgagacttgtcggagggaaagagaagccaacgattcatgatgaggaatgtcctggagaatcgatggatcatacttcattcatctcggaatggtcagattacatcatataaagttgttgttataattgtttctgtggttttgaaagtgaaaaactttctgaccattcgcttatagagaggtgctgaggtaagtgagctttgttgtatttgtaatttacaaaacatcttacgatgttcaatacaagaaatggccttaatttgatgttattattcaatcattagttatccaagagtttatac

SEQ ID NO: 41266 - protein, 312 aa, Arabidopsis thaliana
  peptide (1)..(312): Ceres Seq. ID no. 12330897
MPPAGELRHQSPSKEKLSSVTQSDEAEAASAAISAAAADAEAAGLWTQIKAEARRDAEAEPALASYLYSTILSHSSLERSISFHLGNKLCSSTLLSTLLYDLFLNTFSSDPSLRNATVADLRAARVRDPACISFSHCLLNYKGFLAIQAHRVSHKLWTQSRKPLALALHSRISDVFAVDIHPAAKIGKGILLDHATGVVVGETAVIGNNVSILHHVTLGGTGKACGDRHPKIGDGCLIGAGATILGNVKIGAGAKVGAGSVVLIDVPCRGTAVGNPARLVGGKEKPTIHDEECPGESMDHTSFISEWSDYII

SEQ ID NO: 41267 - DNA, 1132 bp, Arabidopsis thaliana
  misc_feature (1)..(1132): Ceres Seq. ID no. 12328592
  misc_feature (1)..(1132): Ortholog of  Ceres SEQ ID NO 12474685 as cited in SEQ ID NO 88
  misc_feature (1)..(1132): Ortholog of  Ceres SEQ ID NO 13638574 as cited in SEQ ID NO 51223
  misc_feature (1)..(1132): Ortholog of  Ceres SEQ ID NO 14311531 as cited in SEQ ID NO 51466
  misc_feature (1)..(1132): Ortholog of  Ceres SEQ ID NO 15170465 as cited in SEQ ID NO 52798
  misc_feature (1)..(1132): Ortholog of  Ceres SEQ ID NO 15177112 as cited in SEQ ID NO 55956
  misc_feature (1)..(1132): Ortholog of  Ceres SEQ ID NO 12610790 as cited in SEQ ID NO 56123
  misc_feature (1)..(1132): Ortholog of  Ceres SEQ ID NO 13655636 as cited in SEQ ID NO 63519
  misc_feature (1)..(1132): Ortholog of  Ceres SEQ ID NO 13655896 as cited in SEQ ID NO 64970
acaaacctcctccgtctttcgtaaaaggttctcgagatctaagtctcacttctaaagctctgacaatggcggacgaaatcggattcttccaactcaacaccggagcaaagatcccatcggttggtctcgggacatggcaagctgctcctggcgtcgttggagacgccgtcgccgccgctgtgaagattggatatcagcatattgattgtgcttcaagatatggcaatgaaattgagattgggaaagttctgaagaagttgtttgatgatggcgtagtgaagcgtgagaagctgttcatcacatcaaaaatctggttgactgatcttgaccctccggatgtacaggacgcattgaacagaactcttcaggatctgcagcttgattatgttgatttgtatctcatgcactggcctgttcggttgaagaaaggtactgttgactttaagcctgagaacattatgcctatcgatattccgagcacatggaaagcaatggaagcactggttgattcaggcaaggcaagagccattggcgtaagtaatttctctacaaagaaactctcagatcttgtggaggctgctcgtgttcctcccgctgtaaaccaggtggaatgtcatccttcatggcaacaacataagctacatgagttttgcaagtccaaagggatccacctctcaggatattcgccattgggatctcctggaacaacgtgggtgaaggccgatgttttaaagagtccggttattgaaatgattgctaaagaaatcgggaagtctcccgcacaaaccgcgcttcgatggggacttcaaatgggtcatagtatacttcccaaaagcacaaatgaaggaagaatcagagagaactttgatgtcttgggatggtctattccaaaagaaatgtttgacaagttttccaagatagagcaggctaggttagtccaaggcacgtcgtttgttcatgagacgttgagtccttataaaacacttgaagagctttgggatggtgagatctgaatcaaaagatgtcttttgttgaattttaaagttgaaaaagaacaaagttccactgctttaagctttgatcgagaatgtgtaaacgattcaattttcaataaaagtagaattttgcaggc

SEQ ID NO: 41268 - protein, 336 aa, Arabidopsis thaliana
  peptide (1)..(336): Ceres Seq. ID no. 12328593
KPPPSFVKGSRDLSLTSKALTMADEIGFFQLNTGAKIPSVGLGTWQAAPGVVGDAVAAAVKIGYQHIDCASRYGNEIEIGKVLKKLFDDGVVKREKLFITSKIWLTDLDPPDVQDALNRTLQDLQLDYVDLYLMHWPVRLKKGTVDFKPENIMPIDIPSTWKAMEALVDSGKARAIGVSNFSTKKLSDLVEAARVPPAVNQVECHPSWQQHKLHEFCKSKGIHLSGYSPLGSPGTTWVKADVLKSPVIEMIAKEIGKSPAQTALRWGLQMGHSILPKSTNEGRIRENFDVLGWSIPKEMFDKFSKIEQARLVQGTSFVHETLSPYKTLEELWDGEI

SEQ ID NO: 41269 - protein, 315 aa, Arabidopsis thaliana
  peptide (1)..(315): Ceres Seq. ID no. 12328594
MADEIGFFQLNTGAKIPSVGLGTWQAAPGVVGDAVAAAVKIGYQHIDCASRYGNEIEIGKVLKKLFDDGVVKREKLFITSKIWLTDLDPPDVQDALNRTLQDLQLDYVDLYLMHWPVRLKKGTVDFKPENIMPIDIPSTWKAMEALVDSGKARAIGVSNFSTKKLSDLVEAARVPPAVNQVECHPSWQQHKLHEFCKSKGIHLSGYSPLGSPGTTWVKADVLKSPVIEMIAKEIGKSPAQTALRWGLQMGHSILPKSTNEGRIRENFDVLGWSIPKEMFDKFSKIEQARLVQGTSFVHETLSPYKTLEELWDGEI

SEQ ID NO: 41270 - protein, 203 aa, Arabidopsis thaliana
  peptide (1)..(203): Ceres Seq. ID no. 12328595
MHWPVRLKKGTVDFKPENIMPIDIPSTWKAMEALVDSGKARAIGVSNFSTKKLSDLVEAARVPPAVNQVECHPSWQQHKLHEFCKSKGIHLSGYSPLGSPGTTWVKADVLKSPVIEMIAKEIGKSPAQTALRWGLQMGHSILPKSTNEGRIRENFDVLGWSIPKEMFDKFSKIEQARLVQGTSFVHETLSPYKTLEELWDGEI

SEQ ID NO: 41271 - DNA, 1896 bp, Arabidopsis thaliana
  misc_feature (1)..(1896): Ceres Seq. ID no. 13504759
  misc_feature (1)..(1896): Ortholog of  Ceres SEQ ID NO 13597411 as cited in SEQ ID NO 64125
gcacacacactttctcatcttctttctacaaatgggtttccaaagatctatctcttcttcttctgcattaaaatggcttggatttgtaacagcggtttgggttcaatccatctccggcaacaactacactttttcaaactactccggtgctcttaagtctctcatgaatctcaaccagctcgagctcaacaacctctctgtcgctaaagacgtcggaaaagcctttgggatcctggctggccttgcctctgaccgtcttcccactccggtcatcctccttattggttgctttgaaggtcttcttggttatggtgtacaatggctcgttgttagccgcaccatccaaccaatcccttattggcagatgtgtatattcctctgtatgggagggaacagcacaacgtggatgaacacggcggttctagtgacttgcatacgcaattttcgacgaaaccgtggtccggtctccgggatattgaaaggatatgtcggtttaagcacagctatattcactgatctctgtactgctctgttctcaaacgatccggcgtcgtttttggttttactagccgtggtgccttttgccgtatgtctcacggcggttttcttcctccgtgagatcccaccagcatcttccgcagctgaggagaacgaagagactcgttactttaccatattcaacattgtggccgttgttgtcgccgtgtatcttcagtcttacgacatcattggaatcaaaactggagtgttctctgtcgctttcgcttctatacttctcttcctcttggcttctccaatagccattcctttccactccttcatcaagagcttgaactacggtgaacaagatgacttagaaggacggattcaagaaccgttgcttagatccgagatagcggcagcggagaaagaagtaatagttgtagctgcggtggcagcggaagaggaggagaagaagaggaagaaaccggttttgggagaagaccacactataatggaagcagtgttgaccgttgacttttgggtgctttttgtgtccttcttgtgtggtgtaggaactggtttagctgtgatgaacaatatgggtcagataggtcttgcccttggatacacaaatgtctcaatctttgtctccatgactagtatttggggattcttcggtcgcattctctccggtactctctccgaatactttctcaagaaagctggaacaccaagaccactatggaatgcagcctctcaaatccttatggccgtaggatatatactaatggctttagccgtgcctaattcactctacatcggttcaatggtggttggagtatgttacggtgtccgtctagccataactgtaccaacagcttccgaactctttggtctcaaatactacggtctcatctacaacatcttagtacttaacttgccacttggctcgtttctcttctcgggtctcctcgctggcttcctctacgatgcagaggcaacaccaactcctggtgggggcaacacgtgcgtaggagctcattgctaccgtctcatcttcatagtcatggcattagcttctgttatcggagtcggtttggatcttgtgttggcttataggactaaggagatttacgctaagattcacgctagcaagaagtcaaagaaatctggtggtagccttagttaagacactgtatatctagttccggtgcactacattgttttcagatgctgattttgtatacatgatacaatatcggattcaagatattgttgaacaaaatttcaagtaccagagatcattgttgtagtagcatcgccaatgtatttttttgtctttccgagatttgttcaaaattatataaatgtatgacattttgatagtccaattccaattattttctaagattt

SEQ ID NO: 41272 - protein, 556 aa, Arabidopsis thaliana
  peptide (1)..(556): Ceres Seq. ID no. 13504760
HTHFLIFFLQMGFQRSISSSSALKWLGFVTAVWVQSISGNNYTFSNYSGALKSLMNLNQLELNNLSVAKDVGKAFGILAGLASDRLPTPVILLIGCFEGLLGYGVQWLVVSRTIQPIPYWQMCIFLCMGGNSTTWMNTAVLVTCIRNFRRNRGPVSGILKGYVGLSTAIFTDLCTALFSNDPASFLVLLAVVPFAVCLTAVFFLREIPPASSAAEENEETRYFTIFNIVAVVVAVYLQSYDIIGIKTGVFSVAFASILLFLLASPIAIPFHSFIKSLNYGEQDDLEGRIQEPLLRSEIAAAEKEVIVVAAVAAEEEEKKRKKPVLGEDHTIMEAVLTVDFWVLFVSFLCGVGTGLAVMNNMGQIGLALGYTNVSIFVSMTSIWGFFGRILSGTLSEYFLKKAGTPRPLWNAASQILMAVGYILMALAVPNSLYIGSMVVGVCYGVRLAITVPTASELFGLKYYGLIYNILVLNLPLGSFLFSGLLAGFLYDAEATPTPGGGNTCVGAHCYRLIFIVMALASVIGVGLDLVLAYRTKEIYAKIHASKKSKKSGGSLS

SEQ ID NO: 41273 - protein, 546 aa, Arabidopsis thaliana
  peptide (1)..(546): Ceres Seq. ID no. 13504761
MGFQRSISSSSALKWLGFVTAVWVQSISGNNYTFSNYSGALKSLMNLNQLELNNLSVAKDVGKAFGILAGLASDRLPTPVILLIGCFEGLLGYGVQWLVVSRTIQPIPYWQMCIFLCMGGNSTTWMNTAVLVTCIRNFRRNRGPVSGILKGYVGLSTAIFTDLCTALFSNDPASFLVLLAVVPFAVCLTAVFFLREIPPASSAAEENEETRYFTIFNIVAVVVAVYLQSYDIIGIKTGVFSVAFASILLFLLASPIAIPFHSFIKSLNYGEQDDLEGRIQEPLLRSEIAAAEKEVIVVAAVAAEEEEKKRKKPVLGEDHTIMEAVLTVDFWVLFVSFLCGVGTGLAVMNNMGQIGLALGYTNVSIFVSMTSIWGFFGRILSGTLSEYFLKKAGTPRPLWNAASQILMAVGYILMALAVPNSLYIGSMVVGVCYGVRLAITVPTASELFGLKYYGLIYNILVLNLPLGSFLFSGLLAGFLYDAEATPTPGGGNTCVGAHCYRLIFIVMALASVIGVGLDLVLAYRTKEIYAKIHASKKSKKSGGSLS

SEQ ID NO: 41274 - protein, 502 aa, Arabidopsis thaliana
  peptide (1)..(502): Ceres Seq. ID no. 13504762
MNLNQLELNNLSVAKDVGKAFGILAGLASDRLPTPVILLIGCFEGLLGYGVQWLVVSRTIQPIPYWQMCIFLCMGGNSTTWMNTAVLVTCIRNFRRNRGPVSGILKGYVGLSTAIFTDLCTALFSNDPASFLVLLAVVPFAVCLTAVFFLREIPPASSAAEENEETRYFTIFNIVAVVVAVYLQSYDIIGIKTGVFSVAFASILLFLLASPIAIPFHSFIKSLNYGEQDDLEGRIQEPLLRSEIAAAEKEVIVVAAVAAEEEEKKRKKPVLGEDHTIMEAVLTVDFWVLFVSFLCGVGTGLAVMNNMGQIGLALGYTNVSIFVSMTSIWGFFGRILSGTLSEYFLKKAGTPRPLWNAASQILMAVGYILMALAVPNSLYIGSMVVGVCYGVRLAITVPTASELFGLKYYGLIYNILVLNLPLGSFLFSGLLAGFLYDAEATPTPGGGNTCVGAHCYRLIFIVMALASVIGVGLDLVLAYRTKEIYAKIHASKKSKKSGGSLS

SEQ ID NO: 41275 - DNA, 919 bp, Arabidopsis thaliana
  misc_feature (1)..(919): Ceres Seq. ID no. 12323942
  misc_feature (1)..(919): Ortholog of  Ceres SEQ ID NO 14311894 as cited in SEQ ID NO 51673
aaattttgtttgccagatcgtctctctctcaaaagcttttctctctttttctcctttgtcccctccactttaccgttcacgaagccattccgagctatcacgaaggaatctattgaagattcatagcgctcaatcacaaatgccagaagcacgagatcgaatagagaggcaagttgattacccagccgcatttctcaatagacgctcgcatggtattttacttgacgaaccagcaacacagcacaatttgtttgggtctccggttcagagagtgccatcggaagctacaggaggacttgggtcaattggtcaaggatctatgacgggaagaggtgggcttgtgaggggtaatttcggtattcggcggactggtggtggtagaagaggtcaaattcaatttagatcgccacagggacgagagaacatgagcttgggtgttacaaggcgtggaagggctcgtgcttcaaattctgtcttaccttcttggtatccaagaacgcccctccgtgatatttctgccgttgttagggctattgagagaaggagagctcgtatgggagaaggtgttggccgagatattgagaccccaactccacaacaacttggggttcttgattctctagtaccgttgtcaggtgctcatctcgagcacgactattctatggttactcccggtccatctattggattcaagcgtccttggccaccctcaactgctaaagtccatcagattttgctcgacatcacaagagaaaacacaggggaagaagatgccctcactccagagaagaagctcctcaactctattgataaagtggagaaggttgtgatggaagagattcagaaaatgaagagcactcctagtgctaaaagagcagaaagggagaaaagagttaggacgctaatgtcgatgcgatga

SEQ ID NO: 41276 - protein, 305 aa, Arabidopsis thaliana
  peptide (1)..(305): Ceres Seq. ID no. 12323943
NFVCQIVSLSKAFLSFSPLSPPLYRSRSHSELSRRNLLKIHSAQSQMPEARDRIERQVDYPAAFLNRRSHGILLDEPATQHNLFGSPVQRVPSEATGGLGSIGQGSMTGRGGLVRGNFGIRRTGGGRRGQIQFRSPQGRENMSLGVTRRGRARASNSVLPSWYPRTPLRDISAVVRAIERRRARMGEGVGRDIETPTPQQLGVLDSLVPLSGAHLEHDYSMVTPGPSIGFKRPWPPSTAKVHQILLDITRENTGEEDALTPEKKLLNSIDKVEKVVMEEIQKMKSTPSAKRAEREKRVRTLMSMR

SEQ ID NO: 41277 - protein, 259 aa, Arabidopsis thaliana
  peptide (1)..(259): Ceres Seq. ID no. 12323944
MPEARDRIERQVDYPAAFLNRRSHGILLDEPATQHNLFGSPVQRVPSEATGGLGSIGQGSMTGRGGLVRGNFGIRRTGGGRRGQIQFRSPQGRENMSLGVTRRGRARASNSVLPSWYPRTPLRDISAVVRAIERRRARMGEGVGRDIETPTPQQLGVLDSLVPLSGAHLEHDYSMVTPGPSIGFKRPWPPSTAKVHQILLDITRENTGEEDALTPEKKLLNSIDKVEKVVMEEIQKMKSTPSAKRAEREKRVRTLMSMR

SEQ ID NO: 41278 - protein, 199 aa, Arabidopsis thaliana
  peptide (1)..(199): Ceres Seq. ID no. 12323945
MTGRGGLVRGNFGIRRTGGGRRGQIQFRSPQGRENMSLGVTRRGRARASNSVLPSWYPRTPLRDISAVVRAIERRRARMGEGVGRDIETPTPQQLGVLDSLVPLSGAHLEHDYSMVTPGPSIGFKRPWPPSTAKVHQILLDITRENTGEEDALTPEKKLLNSIDKVEKVVMEEIQKMKSTPSAKRAEREKRVRTLMSMR

SEQ ID NO: 41279 - DNA, 1448 bp, Arabidopsis thaliana
  misc_feature (1)..(1448): Ceres Seq. ID no. 13492867
  misc_feature (1)..(1448): Ortholog of  Ceres SEQ ID NO 14308615 as cited in SEQ ID NO 58538
  misc_feature (1)..(1448): Ortholog of  Ceres SEQ ID NO 13585342 as cited in SEQ ID NO 63601
atctctatgttgtagttcttgaacagttggctctcttttcaagaatcgtcgccgttgacctccgtgcctctccgatcaacttcccattcttttaaatgacgagagattcatcaaggaacagctcattaaagccatggcctcgaaaaaaatttctttttccttctgttgtgattgtcattgttgggataatcgtggcgtttacttatcagtccaagttgaaaccacctccgccgaagctatgtggctcctccggtggtccaccgatcacagcgccgcggataaagcttcaagatgggaggtatttggcttacaaagagcatggacttccaagagagaaagctaaccgcaaaatcgtcttcatccatggatccgattgttgtagacacgatgccgttttcgccactctgctttctccggatttagtagaggaactaggtgtatatatggtttcattcgacagaccgggctattgtgagagtgatccgcatccaagtcgtacaccgcgaagcttggtttcggatattgaagagctagctgatcagttgagtctaggatcgaaattttatgtgctcgggtactcgatgggaggacaagcagcatggggatgtcttaaatacattcctcataggttagccggagtaacactagttgctccagtggttaactattattggaagaacttacctttgaacgtttccactgaaggttttaactttcaacaaaagagagatcaattggcagttcgtgttgctcactatactccttggcttatctattggtggaacacacaaaaatggttccctggttcgagtattgcaaaccgagatcacagtctcttggcacagccggataaagatatcatttcgaagcttggttcttcgaggaaaccacattgggcagaggtaaggcagcaaggaatacatgagagtattaaccgtgacatgatcgttggttttgggaactgggaatttggtcctttagacctcgagaatccgtttttgaataaggaaggctctgtgcatttgtggcaaggagatgaggacatgttagtacctgcgaagctgcagcgttaccttgctcatcagcttccatgggttcactatcatgaggttccgagaagtggccacttcttccactacactaaaggtgtagttgatgacattgtaaagtcgctcttaacctccgatgtaagagcatctagagtttgtatttgatcatttgtagcttccaaaaactctgaaaaaaaatcccaaaaaaatacacggatacaatagagttatgtactagttacatttgtcagtatcgtagtttatttttatttggttacacgtgtaatttaatcgaccaagccttcatcaattgtcttgtcaagcttatcatgttctttaatttgatcttttagcaacatgtgtttggtctttttgttttatattctatgttagtctttt

SEQ ID NO: 41280 - protein, 372 aa, Arabidopsis thaliana
  peptide (1)..(372): Ceres Seq. ID no. 13492868
MTRDSSRNSSLKPWPRKKFLFPSVVIVIVGIIVAFTYQSKLKPPPPKLCGSSGGPPITAPRIKLQDGRYLAYKEHGLPREKANRKIVFIHGSDCCRHDAVFATLLSPDLVEELGVYMVSFDRPGYCESDPHPSRTPRSLVSDIEELADQLSLGSKFYVLGYSMGGQAAWGCLKYIPHRLAGVTLVAPVVNYYWKNLPLNVSTEGFNFQQKRDQLAVRVAHYTPWLIYWWNTQKWFPGSSIANRDHSLLAQPDKDIISKLGSSRKPHWAEVRQQGIHESINRDMIVGFGNWEFGPLDLENPFLNKEGSVHLWQGDEDMLVPAKLQRYLAHQLPWVHYHEVPRSGHFFHYTKGVVDDIVKSLLTSDVRASRVCI

SEQ ID NO: 41281 - protein, 256 aa, Arabidopsis thaliana
  peptide (1)..(256): Ceres Seq. ID no. 13492869
MVSFDRPGYCESDPHPSRTPRSLVSDIEELADQLSLGSKFYVLGYSMGGQAAWGCLKYIPHRLAGVTLVAPVVNYYWKNLPLNVSTEGFNFQQKRDQLAVRVAHYTPWLIYWWNTQKWFPGSSIANRDHSLLAQPDKDIISKLGSSRKPHWAEVRQQGIHESINRDMIVGFGNWEFGPLDLENPFLNKEGSVHLWQGDEDMLVPAKLQRYLAHQLPWVHYHEVPRSGHFFHYTKGVVDDIVKSLLTSDVRASRVCI

SEQ ID NO: 41282 - protein, 210 aa, Arabidopsis thaliana
  peptide (1)..(210): Ceres Seq. ID no. 13492870
MGGQAAWGCLKYIPHRLAGVTLVAPVVNYYWKNLPLNVSTEGFNFQQKRDQLAVRVAHYTPWLIYWWNTQKWFPGSSIANRDHSLLAQPDKDIISKLGSSRKPHWAEVRQQGIHESINRDMIVGFGNWEFGPLDLENPFLNKEGSVHLWQGDEDMLVPAKLQRYLAHQLPWVHYHEVPRSGHFFHYTKGVVDDIVKSLLTSDVRASRVCI

SEQ ID NO: 41283 - DNA, 952 bp, Arabidopsis thaliana
  misc_feature (1)..(952): Ceres Seq. ID no. 13497421
  misc_feature (1)..(952): Ortholog of  Ceres SEQ ID NO 13597839 as cited in SEQ ID NO 64260
atcaacgcgtcgagatattttccccaaatacagagaaaccctaaagtctctgtttttgagaatttttctaccgatagatccaagcgaattgatctagaggaattgatccaacatgggtaacacagataagctgatgaatcagatattcgatttgaaatttacgtcaaagtctctgcaaaggcaatcaaggaagtgtgagaaggaagagaaagcagagaaattgaaggtgaagaaggctatcgagaagggtaatatggatggtgctcggatctacgctgagaacgccattcgtaagcgtagcgagcagatgaactatctccgtctcgcttctcgccttgacgctgttgttgctcgtcttgatactcaggctaagatgaccaccatcaccaaatccatgaccaatatcgtcaaatcccttgagtcttctcttgccacagggaatctacagaagatgtcagagacaatggattcattcgagaagcagtttgtgaacatggaggtccaagctgagttcatggagaatgctatggctggttcaacttcattgtccactccagaaggcgaagtcaacagccttatgcagcaggtggcagatgactatggtttggaagtctctgtggggcttcctcagcctgctggtcatgccattcctactaagactgaggagaaagtcgatgaggatgatttgtcgaggaggcttgcggagcttaaagccagaggataaatgcgctaaccaacattcatgcttggattacctgccactttgcatgcgatccttatcgaattgttgcttctattatccgcaaacacgggcgtatttgtgtatattgctcactttgaaatatgctttgtttataactttatataaaaaaccttcgtgtgtttttagtttttaccatttgaatgatatgctttccttttgagttgttcattaaagagtgttttgctcagc

SEQ ID NO: 41284 - protein, 203 aa, Arabidopsis thaliana
  peptide (1)..(203): Ceres Seq. ID no. 13497422
MGNTDKLMNQIFDLKFTSKSLQRQSRKCEKEEKAEKLKVKKAIEKGNMDGARIYAENAIRKRSEQMNYLRLASRLDAVVARLDTQAKMTTITKSMTNIVKSLESSLATGNLQKMSETMDSFEKQFVNMEVQAEFMENAMAGSTSLSTPEGEVNSLMQQVADDYGLEVSVGLPQPAGHAIPTKTEEKVDEDDLSRRLAELKARG

SEQ ID NO: 41285 - protein, 196 aa, Arabidopsis thaliana
  peptide (1)..(196): Ceres Seq. ID no. 13497423
MNQIFDLKFTSKSLQRQSRKCEKEEKAEKLKVKKAIEKGNMDGARIYAENAIRKRSEQMNYLRLASRLDAVVARLDTQAKMTTITKSMTNIVKSLESSLATGNLQKMSETMDSFEKQFVNMEVQAEFMENAMAGSTSLSTPEGEVNSLMQQVADDYGLEVSVGLPQPAGHAIPTKTEEKVDEDDLSRRLAELKARG

SEQ ID NO: 41286 - protein, 156 aa, Arabidopsis thaliana
  peptide (1)..(156): Ceres Seq. ID no. 13497424
MDGARIYAENAIRKRSEQMNYLRLASRLDAVVARLDTQAKMTTITKSMTNIVKSLESSLATGNLQKMSETMDSFEKQFVNMEVQAEFMENAMAGSTSLSTPEGEVNSLMQQVADDYGLEVSVGLPQPAGHAIPTKTEEKVDEDDLSRRLAELKARG

SEQ ID NO: 41287 - DNA, 711 bp, Arabidopsis thaliana
  misc_feature (1)..(711): Ceres Seq. ID no. 12422392
  misc_feature (1)..(711): Ortholog of  Ceres SEQ ID NO 13599568 as cited in SEQ ID NO 509
  misc_feature (1)..(711): Ortholog of  Ceres SEQ ID NO 15172903 as cited in SEQ ID NO 51839
  misc_feature (1)..(711): Ortholog of  Ceres SEQ ID NO 15177108 as cited in SEQ ID NO 52015
  misc_feature (1)..(711): Ortholog of  Ceres SEQ ID NO 13638595 as cited in SEQ ID NO 52050
  misc_feature (1)..(711): Ortholog of  Ceres SEQ ID NO 13594748 as cited in SEQ ID NO 52114
  misc_feature (1)..(711): Ortholog of  Ceres SEQ ID NO 12623490 as cited in SEQ ID NO 61136
  misc_feature (1)..(711): Ortholog of  Ceres SEQ ID NO 15173596 as cited in SEQ ID NO 63267
  misc_feature (1)..(711): Ortholog of  Ceres SEQ ID NO 12583993 as cited in SEQ ID NO 68098
  misc_feature (1)..(711): Ortholog of  Ceres SEQ ID NO 13654535 as cited in SEQ ID NO 68227
atatttctcatcaatagccatgactactctccaaatctcttcttctcttttcagatcttttcttcttgtgatctgtgtctttgtaatcccatctctctcatctgattctgatcctttacaagacttctgcgtcggcgatctcaaagcttctccttccatcaatggcttcccttgcaaatcatccgtctccgcttctgacttcttcttctccggcttaggtggtcctttaaacacctcgacccctaacggcgtagccgtttcccccgccaatgtcctaacttttccgggtctaaacactttaggactctcgatgaacaacgttgaattcgctccaggcggtgtaaatcctcctcactcgcatccgcgtgcaaccgaagcaggagttgtgatcgaaggctcggtttttgtcgggttcttgactactaacaacactctgttctcgaaggttttgaatgccggagagatgtttgttgtccctagaggattggttcatttccaatggaatgttggtaaagtgaaagcgcgtttgataacctctttcaacagtcagcttccaggatcggctgttctgcctagtactctgtttggctcaaaccctaccattccaaatgctgttttgaccaaaacgtttaggactgatgatgttactgtgaacaaactcaagtccaagtttgctgtttgaatcttttgatattatattatcatgttttc

SEQ ID NO: 41288 - protein, 226 aa, Arabidopsis thaliana
  peptide (1)..(226): Ceres Seq. ID no. 12422393
YFSSIAMTTLQISSSLFRSFLLVICVFVIPSLSSDSDPLQDFCVGDLKASPSINGFPCKSSVSASDFFFSGLGGPLNTSTPNGVAVSPANVLTFPGLNTLGLSMNNVEFAPGGVNPPHSHPRATEAGVVIEGSVFVGFLTTNNTLFSKVLNAGEMFVVPRGLVHFQWNVGKVKARLITSFNSQLPGSAVLPSTLFGSNPTIPNAVLTKTFRTDDVTVNKLKSKFAV

SEQ ID NO: 41289 - protein, 220 aa, Arabidopsis thaliana
  peptide (1)..(220): Ceres Seq. ID no. 12422394
MTTLQISSSLFRSFLLVICVFVIPSLSSDSDPLQDFCVGDLKASPSINGFPCKSSVSASDFFFSGLGGPLNTSTPNGVAVSPANVLTFPGLNTLGLSMNNVEFAPGGVNPPHSHPRATEAGVVIEGSVFVGFLTTNNTLFSKVLNAGEMFVVPRGLVHFQWNVGKVKARLITSFNSQLPGSAVLPSTLFGSNPTIPNAVLTKTFRTDDVTVNKLKSKFAV

SEQ ID NO: 41290 - protein, 123 aa, Arabidopsis thaliana
  peptide (1)..(123): Ceres Seq. ID no. 12422395
MNNVEFAPGGVNPPHSHPRATEAGVVIEGSVFVGFLTTNNTLFSKVLNAGEMFVVPRGLVHFQWNVGKVKARLITSFNSQLPGSAVLPSTLFGSNPTIPNAVLTKTFRTDDVTVNKLKSKFAV

SEQ ID NO: 41291 - DNA, 1231 bp, Arabidopsis thaliana
  misc_feature (1)..(1231): Ceres Seq. ID no. 12328537
  misc_feature (1)..(1231): Ortholog of  Ceres SEQ ID NO 12608620 as cited in SEQ ID NO 60192
  misc_feature (1)..(1231): Ortholog of  Ceres SEQ ID NO 13654314 as cited in SEQ ID NO 67914
ataccgaattacatatatatctcgctcgctctcttctttgttcttgctccttgttctagttcggatttttcttttgaagtgaaatggttaacgctacagttgcgagaaacattgccggcatttgtggaaatgtcatctccttgttcttgttcttatctcccatacctacgttcataaccatatacaagaagaaaaaggtggaggagtacaaagctgacccatacttagccacggttctaaattgcgcactatgggtcttttatggcttaccaatggttcaaccagatagtctccttgtgatcaccataaatggtaccggtttagccattgaggtggtgtatctcgctatcttcttcttcttttctccaactagtcgcaaggtttagtaatttccattcatatctcaattcttttcacttaattttattaaatgttttttccaatcattatctaaacctaaaatcgctattaggtttggcttaaattgaaagctaaaacattatagtaataagaagtggtagactatgattgattctgttttaggatagtgataggcaaaacaaaatgtttgtagattttttttttttctgaaattattttaatcaaattggttcatggtgcaggtgaaagtggggctatggttaataggagagatggtgtttgtaggaatagtagccacatgcacattgctattgttccacacacataaccagagatcttcttttgttggaatcttttgtgtcatttttgttagtctcatgtatattgctcctctcaccatcatgagtaaggtgatcaagaccaaaagtgtgaagtacatgccattctctctctcacttgccaatttcctcaatggtgtcgtttgggttatttatgcacttattaagttcgaccttttcattttgattggaaatggacttggaacggtatcaggagcagtacaacttatactctatgcttgctattacaagacaacaccaaacgatgatgaagatgaagaagatgaggagaatctttctaaggttaactctcagttacaacttagtggcaacagtggacaagctaaacgagtttcagcttgattatatgtttggattcatgagatatgaatttagttttatgtttttttttaaagcttttggctgatttaactttaagtaactctattattttcgcgtttcctttttgtaaaatgcaaactctttttcttctatgaaagatattaactatt

SEQ ID NO: 41292 - protein, 155 aa, Arabidopsis thaliana
  peptide (1)..(155): Ceres Seq. ID no. 12328538
MVQVKVGLWLIGEMVFVGIVATCTLLLFHTHNQRSSFVGIFCVIFVSLMYIAPLTIMSKVIKTKSVKYMPFSLSLANFLNGVVWVIYALIKFDLFILIGNGLGTVSGAVQLILYACYYKTTPNDDEDEEDEENLSKVNSQLQLSGNSGQAKRVSA

SEQ ID NO: 41293 - protein, 142 aa, Arabidopsis thaliana
  peptide (1)..(142): Ceres Seq. ID no. 12328539
MVFVGIVATCTLLLFHTHNQRSSFVGIFCVIFVSLMYIAPLTIMSKVIKTKSVKYMPFSLSLANFLNGVVWVIYALIKFDLFILIGNGLGTVSGAVQLILYACYYKTTPNDDEDEEDEENLSKVNSQLQLSGNSGQAKRVSA

SEQ ID NO: 41294 - protein, 107 aa, Arabidopsis thaliana
  peptide (1)..(107): Ceres Seq. ID no. 12328540
MYIAPLTIMSKVIKTKSVKYMPFSLSLANFLNGVVWVIYALIKFDLFILIGNGLGTVSGAVQLILYACYYKTTPNDDEDEEDEENLSKVNSQLQLSGNSGQAKRVSA

SEQ ID NO: 41295 - DNA, 1466 bp, Arabidopsis thaliana
  misc_feature (1)..(1466): Ceres Seq. ID no. 12371193
  misc_feature (1)..(1466): Ortholog of  Ceres SEQ ID NO 15168965 as cited in SEQ ID NO 20607
  misc_feature (1)..(1466): Ortholog of  Ceres SEQ ID NO 13597454 as cited in SEQ ID NO 64121
  misc_feature (1)..(1466): Ortholog of  Ceres SEQ ID NO 13623385 as cited in SEQ ID NO 0
gatttagcttcttcgtttccttggtaatcgttctgttttttcgttgattactgtttgaggttttcattgaatcttgtctcgacatgggctactataacaatgtctttgatgaatgcaacgaccaaactgatatcggtcgggttatacgcgatggaagggaagtcattctccaagcatataattgggaatctcataaatatgattggtggagaaacttggatggtaaagttcctgacatcgcgaaatccggctttacttctgcatggttgccaccaccatctcagtctcttgcaccggaaggttatcttccacaggacctttattcactaaactcagcatatggctctgagcatctattgaaatccttactgcgcaagatgaaacaatacaaagttagagctatggctgatatagtcatcaatcatcgtgttgggacaactagaggacatggtggaatgtataaccgttatgatggaatttcattaccgtgggatgaacacgccgtgacttcttgtaccggaggactgggtaaccgaagcacaggggataatttcaatggagttccaaatgttgatcacacacagcattttgttaggaaagatataattggatggcttcgttggttacgcaacaccgtcgggtttcaagatttccgttttgactttgctaggggttattcagcaaactatgtgaaggaatacattggcgcagcgaaaccattattctcggttggagaatgttgggattcttgcaattacaatggccatggtctagactataatcaagatagccatagacagcgtataatcagttggatcgatgcgacgggacagatctctgctgcatttgacttcacaactaaaggaattctgcaggaagccgtaaagggtcagtattggcgtttatgtgatgcccaagggaagccaccgggtgtaatgggatggtggccttcaagagctgtcacattccttgataaccatgacactggctctactcaggctcattggccgttcccttcacaccacgttatggagggctatgcatatatacttactcatcccggcattccctgtgtgttctacgatcacttttacgattggggaagctcaatacatgatcagattgtcaaactgattgacattaggaggcgacaagatatccacagtaggtcaactgtccgtgttttaaaagcagaatctaacttatatgcagccattgttggtgagaaaatatgtatgaagcttggagacggctcttggtgcccttctggtagagactggactctagcaacaagtggccatcgctatgccgtctggcacaagtaattcttttgtgtctatctagctttgagtccaaagaaaaatatatgtaattcattttctgtaccgggttttactataatgtcatgcccttacgtcttcatgacgtaagattttataagttatatttatgaatgtaaaatttgc

SEQ ID NO: 41296 - protein, 413 aa, Arabidopsis thaliana
  peptide (1)..(413): Ceres Seq. ID no. 12371194
MGYYNNVFDECNDQTDIGRVIRDGREVILQAYNWESHKYDWWRNLDGKVPDIAKSGFTSAWLPPPSQSLAPEGYLPQDLYSLNSAYGSEHLLKSLLRKMKQYKVRAMADIVINHRVGTTRGHGGMYNRYDGISLPWDEHAVTSCTGGLGNRSTGDNFNGVPNVDHTQHFVRKDIIGWLRWLRNTVGFQDFRFDFARGYSANYVKEYIGAAKPLFSVGECWDSCNYNGHGLDYNQDSHRQRIISWIDATGQISAAFDFTTKGILQEAVKGQYWRLCDAQGKPPGVMGWWPSRAVTFLDNHDTGSTQAHWPFPSHHVMEGYAYILTHPGIPCVFYDHFYDWGSSIHDQIVKLIDIRRRQDIHSRSTVRVLKAESNLYAAIVGEKICMKLGDGSWCPSGRDWTLATSGHRYAVWHK

SEQ ID NO: 41297 - protein, 315 aa, Arabidopsis thaliana
  peptide (1)..(315): Ceres Seq. ID no. 12371195
MKQYKVRAMADIVINHRVGTTRGHGGMYNRYDGISLPWDEHAVTSCTGGLGNRSTGDNFNGVPNVDHTQHFVRKDIIGWLRWLRNTVGFQDFRFDFARGYSANYVKEYIGAAKPLFSVGECWDSCNYNGHGLDYNQDSHRQRIISWIDATGQISAAFDFTTKGILQEAVKGQYWRLCDAQGKPPGVMGWWPSRAVTFLDNHDTGSTQAHWPFPSHHVMEGYAYILTHPGIPCVFYDHFYDWGSSIHDQIVKLIDIRRRQDIHSRSTVRVLKAESNLYAAIVGEKICMKLGDGSWCPSGRDWTLATSGHRYAVWHK

SEQ ID NO: 41298 - protein, 307 aa, Arabidopsis thaliana
  peptide (1)..(307): Ceres Seq. ID no. 12371196
MADIVINHRVGTTRGHGGMYNRYDGISLPWDEHAVTSCTGGLGNRSTGDNFNGVPNVDHTQHFVRKDIIGWLRWLRNTVGFQDFRFDFARGYSANYVKEYIGAAKPLFSVGECWDSCNYNGHGLDYNQDSHRQRIISWIDATGQISAAFDFTTKGILQEAVKGQYWRLCDAQGKPPGVMGWWPSRAVTFLDNHDTGSTQAHWPFPSHHVMEGYAYILTHPGIPCVFYDHFYDWGSSIHDQIVKLIDIRRRQDIHSRSTVRVLKAESNLYAAIVGEKICMKLGDGSWCPSGRDWTLATSGHRYAVWHK

SEQ ID NO: 41299 - DNA, 1290 bp, Arabidopsis thaliana
  misc_feature (1)..(1290): Ceres Seq. ID no. 12328394
  misc_feature (1)..(1290): Ortholog of  Ceres SEQ ID NO 12635167 as cited in SEQ ID NO 0
aggcctaacttttagcccaaaatggtaaccttcgtagtgatcggagggttccaaaaagttgcaataacttaaaaaaattatccgaagaagacgatagacagcaaaaagcgttgggcgagaagaagatgacgtgcttctcttctgctactcctcatcgccatcatcttctactttcttctccatctacttccaaatccctgcttcgatttccctcatcttatctgaaacctagccccagtcttctcttccatggctcatctcgctctctcctctcctgttcagacggcagcaacaaccgtcctcctccctccggtgacaccgtcccaaataacttctgtatcattgagggatcagagacagttcaagactttgtgcagatgcagcttcaggaaatccaagataacataaggagtagacgcaataagatatttctcctcatggaggaagtgaggaggttacgtgtgcagcaacgtatcaagagtgttaaagccatcaatgaggacagtgagctcgaggctaccgagatgcctgagatcacatcttctattcctttcctccctaatgtgacaccaaagactttgaaacaactctattcgaccagcgttgcattgatatcgggaattatcttctttggtggtctcattgcacctaatctggaactgaaggtaggacttggaggaacctcttatgaagattttataaggagcttacatctacccttgcaattaagccaggtagatccaattgtggcatctttttctggcggggccgtgggagtcatttcaaccttgatgctaatcgaagttaacaatgttaaacaacaagagaagaagaggtgcaaatactgccttgggactggatacttgccatgcgctcgatgctcagctagtggtgtgtgtttgagcattgatcccatcacaagacctagagctacaaaccagcttatgcaggtcgcgaccacaaaaagatgtctaaattgttccggcgcaggaaaggtgatgtgtccgacatgtctttgcaccgggatggtaacagctagcgagcatgacccccgctttgaccctttcgattagaaaacaatggcctcctttgaaattggtccttgcaaaagctaagccaagcctatgagaactgaggagagccaaacctcgtcatataaatgttttacataataaaagtaattacataataaaagtaacattagaatttttaacttttgtctatagtaaacatgggaaagtatcggttatgtaaagtacttcttcacaaactaaaaaaattcaccagatg

SEQ ID NO: 41300 - protein, 315 aa, Arabidopsis thaliana
  peptide (1)..(315): Ceres Seq. ID no. 12328395
MTCFSSATPHRHHLLLSSPSTSKSLLRFPSSYLKPSPSLLFHGSSRSLLSCSDGSNNRPPPSGDTVPNNFCIIEGSETVQDFVQMQLQEIQDNIRSRRNKIFLLMEEVRRLRVQQRIKSVKAINEDSELEATEMPEITSSIPFLPNVTPKTLKQLYSTSVALISGIIFFGGLIAPNLELKVGLGGTSYEDFIRSLHLPLQLSQVDPIVASFSGGAVGVISTLMLIEVNNVKQQEKKRCKYCLGTGYLPCARCSASGVCLSIDPITRPRATNQLMQVATTKRCLNCSGAGKVMCPTCLCTGMVTASEHDPRFDPFD

SEQ ID NO: 41301 - protein, 231 aa, Arabidopsis thaliana
  peptide (1)..(231): Ceres Seq. ID no. 12328396
MQLQEIQDNIRSRRNKIFLLMEEVRRLRVQQRIKSVKAINEDSELEATEMPEITSSIPFLPNVTPKTLKQLYSTSVALISGIIFFGGLIAPNLELKVGLGGTSYEDFIRSLHLPLQLSQVDPIVASFSGGAVGVISTLMLIEVNNVKQQEKKRCKYCLGTGYLPCARCSASGVCLSIDPITRPRATNQLMQVATTKRCLNCSGAGKVMCPTCLCTGMVTASEHDPRFDPFD

SEQ ID NO: 41302 - protein, 211 aa, Arabidopsis thaliana
  peptide (1)..(211): Ceres Seq. ID no. 12328397
MEEVRRLRVQQRIKSVKAINEDSELEATEMPEITSSIPFLPNVTPKTLKQLYSTSVALISGIIFFGGLIAPNLELKVGLGGTSYEDFIRSLHLPLQLSQVDPIVASFSGGAVGVISTLMLIEVNNVKQQEKKRCKYCLGTGYLPCARCSASGVCLSIDPITRPRATNQLMQVATTKRCLNCSGAGKVMCPTCLCTGMVTASEHDPRFDPFD

SEQ ID NO: 41303 - DNA, 1329 bp, Arabidopsis thaliana
  misc_feature (1)..(1329): Ceres Seq. ID no. 12395460
  misc_feature (1)..(1329): Ortholog of  Ceres SEQ ID NO 12609146 as cited in SEQ ID NO 52118
  misc_feature (1)..(1329): Ortholog of  Ceres SEQ ID NO 14303397 as cited in SEQ ID NO 54614
  misc_feature (1)..(1329): Ortholog of  Ceres SEQ ID NO 13594056 as cited in SEQ ID NO 55691
  misc_feature (1)..(1329): Ortholog of  Ceres SEQ ID NO 14314186 as cited in SEQ ID NO 57457
  misc_feature (1)..(1329): Ortholog of  Ceres SEQ ID NO 13638136 as cited in SEQ ID NO 58644
  misc_feature (1)..(1329): Ortholog of  Ceres SEQ ID NO 13596868 as cited in SEQ ID NO 62806
  misc_feature (1)..(1329): Ortholog of  Ceres SEQ ID NO 13595885 as cited in SEQ ID NO 69265
  misc_feature (1)..(1329): Ortholog of  Ceres SEQ ID NO 12566239 as cited in SEQ ID NO 0
  misc_feature (1)..(1329): Ortholog of  Ceres SEQ ID NO 13599119 as cited in SEQ ID NO 0
  misc_feature (1)..(1329): Ortholog of  Ceres SEQ ID NO 14308987 as cited in SEQ ID NO 0
gaaaaccaaattagggtttttaatttccagattgttttgtttatttgaataaatctccgcaagtttcaattaggttgcaaaaatcgaagaaattttcttcgattcaaaaaaaatgggaaaattttgttgcttcacttccgcttctgaggttgtgggaggacaatcatcatcacgatcaggtaaaggaagaagtgatgaagggatgatcaagtatggttttagtctagtgaaaggaaaagctaaccatccaatggaagattatcatgttgctaactttatcaacatccaagaccatgaattgggtctttttgctatttatgatggtcatatgggtgatagtgtccctgcttacttgcagaaacgtctcttctccaatatccttaaggagggagagttttgggttgatcctcgaaggtctattgcaaaagcttatgagaagacggaccaagcgattctatcgaatagttctgacttgggtcgtggtggttctactgctgtgactgctatattgattaatgggagaaagttgtggatagctaatgttggtgattcacgagctgttctttctcatggtggcgctataacgcagatgagtacagatcatgagcctcgtactgaaaggtcgagtattgaagatagaggtggatttgtatccaatctaccaggtgatgttcctcgggtgaatggtcaattagctgtgtctcgtgcttttggagataagggacttaagacacacttgagttcagagcctgacataaaagaagctactgtagatagccagacagatgttcttctcttggctagtgatggcatctggaaggtgatgacaaatgaagaggcaatggagatagcgagaagagtgaaagatccacagaaagcggcaaaggaattaacagctgaagcattgagaagagagagtaaagacgacatatcttgtgtcgtggtccgattcagatgacaaactctctgaaaggatacttacggggagatgggttccttatataataatttcaatcaaagattcatcaggacaaaaaagcttgttttcactggattcgactctgatgattctggttcggtttaggaccggtctaagtttcaatttgtgattagctgcttcttgctatagcttatgtgcgttcgttgtgtaaattgtgtgttttaaagacgataagaaaatgaacaaaaaaggagtggggaatggagttttgtggtgggtgatggggggttttgttattataattggttgatttgttatatttaatcatcgggatataaatattaggatgtttttacaaatatgtgaaagtacttttggattaggtttgc

SEQ ID NO: 41304 - protein, 281 aa, Arabidopsis thaliana
  peptide (1)..(281): Ceres Seq. ID no. 12395461
MGKFCCFTSASEVVGGQSSSRSGKGRSDEGMIKYGFSLVKGKANHPMEDYHVANFINIQDHELGLFAIYDGHMGDSVPAYLQKRLFSNILKEGEFWVDPRRSIAKAYEKTDQAILSNSSDLGRGGSTAVTAILINGRKLWIANVGDSRAVLSHGGAITQMSTDHEPRTERSSIEDRGGFVSNLPGDVPRVNGQLAVSRAFGDKGLKTHLSSEPDIKEATVDSQTDVLLLASDGIWKVMTNEEAMEIARRVKDPQKAAKELTAEALRRESKDDISCVVVRFR

SEQ ID NO: 41305 - protein, 251 aa, Arabidopsis thaliana
  peptide (1)..(251): Ceres Seq. ID no. 12395462
MIKYGFSLVKGKANHPMEDYHVANFINIQDHELGLFAIYDGHMGDSVPAYLQKRLFSNILKEGEFWVDPRRSIAKAYEKTDQAILSNSSDLGRGGSTAVTAILINGRKLWIANVGDSRAVLSHGGAITQMSTDHEPRTERSSIEDRGGFVSNLPGDVPRVNGQLAVSRAFGDKGLKTHLSSEPDIKEATVDSQTDVLLLASDGIWKVMTNEEAMEIARRVKDPQKAAKELTAEALRRESKDDISCVVVRFR

SEQ ID NO: 41306 - protein, 235 aa, Arabidopsis thaliana
  peptide (1)..(235): Ceres Seq. ID no. 12395463
MEDYHVANFINIQDHELGLFAIYDGHMGDSVPAYLQKRLFSNILKEGEFWVDPRRSIAKAYEKTDQAILSNSSDLGRGGSTAVTAILINGRKLWIANVGDSRAVLSHGGAITQMSTDHEPRTERSSIEDRGGFVSNLPGDVPRVNGQLAVSRAFGDKGLKTHLSSEPDIKEATVDSQTDVLLLASDGIWKVMTNEEAMEIARRVKDPQKAAKELTAEALRRESKDDISCVVVRFR

SEQ ID NO: 41307 - DNA, 1668 bp, Arabidopsis thaliana
  misc_feature (1)..(1668): Ceres Seq. ID no. 12323946
  misc_feature (1)..(1668): Ortholog of  Ceres SEQ ID NO 13594209 as cited in SEQ ID NO 59089
  misc_feature (1)..(1668): Ortholog of  Ceres SEQ ID NO 13502874 as cited in SEQ ID NO 66298
  misc_feature (1)..(1668): Ortholog of  Ceres SEQ ID NO 12614124 as cited in SEQ ID NO 68392
cctcatacaaagaaaaagaaagagttagcaacaaaaaaaaaacaataattatgtctatgttcctaggtttgctcttcctcttccctctctttttcatcctatttaaaaaccttttacctccgagaaagaagcttcctccgggaccaacgggtcttccgctaataggaaacttgcaccagcttggaagattgcttcacagttctcttcacaagctctctttagaacatggaccagtgatgcttgtccgttggggggtcgtccctatggccgtgttctcttccaacgaagcagctaaagaagttctcaagactcatgacttagagacttgtaaccgtcctaagctggtcgccaacgggttgtttactcacggctataaagacattggtttcactcagtatggtgaggaatggcgagagatgaaaaagttcgtggggcttgagctctttagtccaaaaaaacataagtctttcaggtatatcagagaggaagaaggtgacttgttggtcaagaaaatatcaaattatgctcaaacacaaaccttggtggatttgagaaaatccttgttctcctacaccgccagtatcatatttagagaagcctttggacagaacttccgcgagtgcgattacatcaatatggacaaacttgaagagctggtgcaagagacagaaaccaacgtatgcagcttggcattcactgacttcttccccagaggtctcgggtggcttgtagaccggatctccggtcagcattcgaggatgaacatagccttttccaaactcaccactttctttgaagatgtgatcgatgagcttttgaagactaaacaacttgatgatcactcagacctcgtcactgccatgttggatgtgatcaatagacccagaaaattcggttctttaaagatcacttacgatcatctcatagcaatgatgtcggatgtggttttggcgggagtaaacgctggaacagtaacaatgatatggacgatgacagagcttacaagacatcctagagtgatgaagaaacttcaagaagaaattcgagcaacactcggaccaaacaaagagagaatcacagaagaagatctagagaaagttgagtacttgaatctggtgatcaaagaatcattcagactacatccaccagctcctctcttgctcccaagagaaacaatgtccgacatcgagattcaaggctaccacattcccaagaacgcccatgtaaagatcaacacttatgcgataggacgtgatcctaaacgttggactaaccctgaagaattcaatcctgagaggtttttgaatacctcaatcaactacaagggtcagcattacgagctcttgccctttggagccggtcgtaggaactgtccaggtatgaccttgggaatcaccattcttgagctaggtcttcttaacattctctactacttcgattggagtttacccagtggaatgaccattaaagacattgacatggaagaagacggcgctttgaacatcgccaagaaagtccctctgcagctcgtaccaactcttccataatcactcgtgaataatagtattaaataagatgatcaagatttgtatgtttgcctctatcatactacatttggtttttctttcctttttttcgtgttgccatattaatatatatccatgtttt

SEQ ID NO: 41308 - protein, 514 aa, Arabidopsis thaliana
  peptide (1)..(514): Ceres Seq. ID no. 12323947
SYKEKERVSNKKKTIIMSMFLGLLFLFPLFFILFKNLLPPRKKLPPGPTGLPLIGNLHQLGRLLHSSLHKLSLEHGPVMLVRWGVVPMAVFSSNEAAKEVLKTHDLETCNRPKLVANGLFTHGYKDIGFTQYGEEWREMKKFVGLELFSPKKHKSFRYIREEEGDLLVKKISNYAQTQTLVDLRKSLFSYTASIIFREAFGQNFRECDYINMDKLEELVQETETNVCSLAFTDFFPRGLGWLVDRISGQHSRMNIAFSKLTTFFEDVIDELLKTKQLDDHSDLVTAMLDVINRPRKFGSLKITYDHLIAMMSDVVLAGVNAGTVTMIWTMTELTRHPRVMKKLQEEIRATLGPNKERITEEDLEKVEYLNLVIKESFRLHPPAPLLLPRETMSDIEIQGYHIPKNAHVKINTYAIGRDPKRWTNPEEFNPERFLNTSINYKGQHYELLPFGAGRRNCPGMTLGITILELGLLNILYYFDWSLPSGMTIKDIDMEEDGALNIAKKVPLQLVPTLP

SEQ ID NO: 41309 - protein, 498 aa, Arabidopsis thaliana
  peptide (1)..(498): Ceres Seq. ID no. 12323948
MSMFLGLLFLFPLFFILFKNLLPPRKKLPPGPTGLPLIGNLHQLGRLLHSSLHKLSLEHGPVMLVRWGVVPMAVFSSNEAAKEVLKTHDLETCNRPKLVANGLFTHGYKDIGFTQYGEEWREMKKFVGLELFSPKKHKSFRYIREEEGDLLVKKISNYAQTQTLVDLRKSLFSYTASIIFREAFGQNFRECDYINMDKLEELVQETETNVCSLAFTDFFPRGLGWLVDRISGQHSRMNIAFSKLTTFFEDVIDELLKTKQLDDHSDLVTAMLDVINRPRKFGSLKITYDHLIAMMSDVVLAGVNAGTVTMIWTMTELTRHPRVMKKLQEEIRATLGPNKERITEEDLEKVEYLNLVIKESFRLHPPAPLLLPRETMSDIEIQGYHIPKNAHVKINTYAIGRDPKRWTNPEEFNPERFLNTSINYKGQHYELLPFGAGRRNCPGMTLGITILELGLLNILYYFDWSLPSGMTIKDIDMEEDGALNIAKKVPLQLVPTLP

SEQ ID NO: 41310 - protein, 496 aa, Arabidopsis thaliana
  peptide (1)..(496): Ceres Seq. ID no. 12323949
MFLGLLFLFPLFFILFKNLLPPRKKLPPGPTGLPLIGNLHQLGRLLHSSLHKLSLEHGPVMLVRWGVVPMAVFSSNEAAKEVLKTHDLETCNRPKLVANGLFTHGYKDIGFTQYGEEWREMKKFVGLELFSPKKHKSFRYIREEEGDLLVKKISNYAQTQTLVDLRKSLFSYTASIIFREAFGQNFRECDYINMDKLEELVQETETNVCSLAFTDFFPRGLGWLVDRISGQHSRMNIAFSKLTTFFEDVIDELLKTKQLDDHSDLVTAMLDVINRPRKFGSLKITYDHLIAMMSDVVLAGVNAGTVTMIWTMTELTRHPRVMKKLQEEIRATLGPNKERITEEDLEKVEYLNLVIKESFRLHPPAPLLLPRETMSDIEIQGYHIPKNAHVKINTYAIGRDPKRWTNPEEFNPERFLNTSINYKGQHYELLPFGAGRRNCPGMTLGITILELGLLNILYYFDWSLPSGMTIKDIDMEEDGALNIAKKVPLQLVPTLP

SEQ ID NO: 41311 - DNA, 1599 bp, Arabidopsis thaliana
  misc_feature (1)..(1599): Ceres Seq. ID no. 12395110
  misc_feature (1)..(1599): Ortholog of  Ceres SEQ ID NO 13659759 as cited in SEQ ID NO 67663
aagaaggtattggatcgctgacagataacccgatcagattcagggagtttaatcgatcagatcattttttgtcaatgacgaaaaaggcggtgcttattgggatcaattacccaggaaccaaggcggagttacggggatgcgtcaacgatgttcgtcgtatgtacaaatgtctcgttgaacggtacggcttctccgaggagaacatcaccgttctcatcgacaccgatgaatcctctactcagcctactggcaagaacatccgccgcgcgcttgctgatctcgtcgaatctgccgattccggcgacgttcttgtcgttcattacagtggacacggtacgaggttgccggctgagactggtgaagacgatgacactggtttcgacgagtgtattgttccttgcgacatgaatctgattactgatgatgattttagagatcttgtggacaaggttcctccaggttgcagaatgacaatcatttcagactcttgtcacagtggtggcctaatcgacgaagccaaggagcagattggagagagcactaagaaagaagccgaggacgaagatgaatctgaagaatcttcttcaagattcgggtttaggaagttcttgcgcagcaaagtggaaggcgccatcgagtctcgagggtttcacattggagggaacaagaaggatgaagatgaggcggaagaaatcgagactaaggagattgagcttgaagacggagaaacgatccatgccaaagacaaatctcttcctctgcagaccttgattgatattctcaagcagcaaacagggaatgataatatcgaagttgggaaaatcaggccaagcctttttgatgcgtttggtgatgattcgagcccgaaagtgaagaagtttatgaaagtgatcttaggtaagcttcaggctggaaatggagaagaaggtggattaatgggaatgcttggcaaattggcttcagggtttcttgagggtaaactaaacgatgaagactatgtgaaacccgctatgcagacacacgttgggagtaaagaagaggtttatgctggtggatcaagaggttcggttccgcttccagacagcgggatactgatcagcggttgccaaaccgatcagacctctgctgatgcgactccagcggggaaaccaactgaggcttatggagcgatgagcaattcgatacagacgatattggaggagacagacggtgagatatcaaacagagaaatggttacaagggctaggaaggcattgaagaagcaagggtttactcagcagccaggtttgtattgccatgatggttatgccaacgctcctttcatctgttgaaaacagaggttttattgaatgttttttactacacgttgattgaagtttctggtcgcaaaaataagcctgttttttttttgctgtttgatggcatttatgtaatttacaagttatgtgtgttgtgttctgtgaaacactaaaattcttcttgttttattgagatctattatgttggttgtgaaattatttttttttggttttcttttcttgtttaactcttgtgtattctgatttctgcacatcaataagaaaaagttttttttaacgg

SEQ ID NO: 41312 - protein, 442 aa, Arabidopsis thaliana
  peptide (1)..(442): Ceres Seq. ID no. 12395111
EGIGSLTDNPIRFREFNRSDHFLSMTKKAVLIGINYPGTKAELRGCVNDVRRMYKCLVERYGFSEENITVLIDTDESSTQPTGKNIRRALADLVESADSGDVLVVHYSGHGTRLPAETGEDDDTGFDECIVPCDMNLITDDDFRDLVDKVPPGCRMTIISDSCHSGGLIDEAKEQIGESTKKEAEDEDESEESSSRFGFRKFLRSKVEGAIESRGFHIGGNKKDEDEAEEIETKEIELEDGETIHAKDKSLPLQTLIDILKQQTGNDNIEVGKIRPSLFDAFGDDSSPKVKKFMKVILGKLQAGNGEEGGLMGMLGKLASGFLEGKLNDEDYVKPAMQTHVGSKEEVYAGGSRGSVPLPDSGILISGCQTDQTSADATPAGKPTEAYGAMSNSIQTILEETDGEISNREMVTRARKALKKQGFTQQPGLYCHDGYANAPFIC

SEQ ID NO: 41313 - protein, 418 aa, Arabidopsis thaliana
  peptide (1)..(418): Ceres Seq. ID no. 12395112
MTKKAVLIGINYPGTKAELRGCVNDVRRMYKCLVERYGFSEENITVLIDTDESSTQPTGKNIRRALADLVESADSGDVLVVHYSGHGTRLPAETGEDDDTGFDECIVPCDMNLITDDDFRDLVDKVPPGCRMTIISDSCHSGGLIDEAKEQIGESTKKEAEDEDESEESSSRFGFRKFLRSKVEGAIESRGFHIGGNKKDEDEAEEIETKEIELEDGETIHAKDKSLPLQTLIDILKQQTGNDNIEVGKIRPSLFDAFGDDSSPKVKKFMKVILGKLQAGNGEEGGLMGMLGKLASGFLEGKLNDEDYVKPAMQTHVGSKEEVYAGGSRGSVPLPDSGILISGCQTDQTSADATPAGKPTEAYGAMSNSIQTILEETDGEISNREMVTRARKALKKQGFTQQPGLYCHDGYANAPFIC

SEQ ID NO: 41314 - protein, 390 aa, Arabidopsis thaliana
  peptide (1)..(390): Ceres Seq. ID no. 12395113
MYKCLVERYGFSEENITVLIDTDESSTQPTGKNIRRALADLVESADSGDVLVVHYSGHGTRLPAETGEDDDTGFDECIVPCDMNLITDDDFRDLVDKVPPGCRMTIISDSCHSGGLIDEAKEQIGESTKKEAEDEDESEESSSRFGFRKFLRSKVEGAIESRGFHIGGNKKDEDEAEEIETKEIELEDGETIHAKDKSLPLQTLIDILKQQTGNDNIEVGKIRPSLFDAFGDDSSPKVKKFMKVILGKLQAGNGEEGGLMGMLGKLASGFLEGKLNDEDYVKPAMQTHVGSKEEVYAGGSRGSVPLPDSGILISGCQTDQTSADATPAGKPTEAYGAMSNSIQTILEETDGEISNREMVTRARKALKKQGFTQQPGLYCHDGYANAPFIC

SEQ ID NO: 41315 - DNA, 1527 bp, Arabidopsis thaliana
  misc_feature (1)..(1527): Ceres Seq. ID no. 12330695
  misc_feature (1)..(1527): Ortholog of  Ceres SEQ ID NO 15172446 as cited in SEQ ID NO 60392
aaaaatctttcgggtcaaaatttccgaaccctaactttagccccaaattagagagagatgcagaaacgggagcttgggaaatccggcggtaattccggtggatcttcgggtccaccagcgaagagaggccgtcccttcggtagtacaagtgctaactcagctgctgctgctgcagcggcggcagcagcggacgcgatgtcaccgtcagctttacttggtccttctcttctagttcacaattccttcgtcgagcagaacaatagaagaatagttcttgcgttgcagagtggtttgaagagtgaggtgacatgggcattgaacacacttacgttgctttccttcaaggaaaaagaagatattcgaagagatgtcatgcctcttgctaagatagctggcttgcttgatgcccttctcttaattatagatgattggcgtgacatagctctcccaaaggacctgacaagagggactagagttagaactttaggtacaaatgcttcagttacgggatttggcaatgagtatgatgctctagcctctattcaaccccctggatccgggattggttcttctgctgctgaggcattaggaaaaaagagcactggtaaacatcagtcatctcagtggtggatggaagaggatggtttgtttaatctagacgatgaagggagatcagagaaacaaatgtgtgctattgctgcatcgaacgttatccgcaacttctccttcatgcctgataatgaagttgtaatggctcagcatcgccattgcttagaaactgttttccagtgcatacacgatcatatgaccgaggatgaagagctggtcacaaactcgctagagacaattgtaaacctagcgcatttgatggatcttcgaattttcagctcgcttaagcagtcatacatcaacataaatgaaaagaaagctgttcaagctgtggtcggaatcctcaattcttctgtcaaagcttggaattgtgctgctgctgagttgctagggcgtttgataatcaatccggacaatgaacctttcattagtcctttaattccgcagatacacaagcgactaatcgatcttttgagcatacaagccgttgatgcacaagctgcagctgttggagcactctacaatctcgtggaagttaacatggattgcagattaaagctagcaagtgagagatgggcggttgataggttgctgaaagtgataaagactccgcatccggttccagaagtatgtaggaaagctgcaatgatccttgagaaccttgtctcggagcctcaaaacagaggattgctactcgcgtatgagaatgctttcgctgagctgctttttcaagagggtaagtattctgattcatttgctaggattttgtatgaactcactgctagatctaatagcagagttgcttcagctagaggaatctggggcatgtaaaagtcttctctagattagtgggtttgattaattgattgtgttgtaaactttaatcatttgctatgtattaaaaaagcagtgttgttg

SEQ ID NO: 41316 - protein, 460 aa, Arabidopsis thaliana
  peptide (1)..(460): Ceres Seq. ID no. 12330696
MQKRELGKSGGNSGGSSGPPAKRGRPFGSTSANSAAAAAAAAAADAMSPSALLGPSLLVHNSFVEQNNRRIVLALQSGLKSEVTWALNTLTLLSFKEKEDIRRDVMPLAKIAGLLDALLLIIDDWRDIALPKDLTRGTRVRTLGTNASVTGFGNEYDALASIQPPGSGIGSSAAEALGKKSTGKHQSSQWWMEEDGLFNLDDEGRSEKQMCAIAASNVIRNFSFMPDNEVVMAQHRHCLETVFQCIHDHMTEDEELVTNSLETIVNLAHLMDLRIFSSLKQSYININEKKAVQAVVGILNSSVKAWNCAAAELLGRLIINPDNEPFISPLIPQIHKRLIDLLSIQAVDAQAAAVGALYNLVEVNMDCRLKLASERWAVDRLLKVIKTPHPVPEVCRKAAMILENLVSEPQNRGLLLAYENAFAELLFQEGKYSDSFARILYELTARSNSRVASARGIWGM

SEQ ID NO: 41317 - protein, 414 aa, Arabidopsis thaliana
  peptide (1)..(414): Ceres Seq. ID no. 12330697
MSPSALLGPSLLVHNSFVEQNNRRIVLALQSGLKSEVTWALNTLTLLSFKEKEDIRRDVMPLAKIAGLLDALLLIIDDWRDIALPKDLTRGTRVRTLGTNASVTGFGNEYDALASIQPPGSGIGSSAAEALGKKSTGKHQSSQWWMEEDGLFNLDDEGRSEKQMCAIAASNVIRNFSFMPDNEVVMAQHRHCLETVFQCIHDHMTEDEELVTNSLETIVNLAHLMDLRIFSSLKQSYININEKKAVQAVVGILNSSVKAWNCAAAELLGRLIINPDNEPFISPLIPQIHKRLIDLLSIQAVDAQAAAVGALYNLVEVNMDCRLKLASERWAVDRLLKVIKTPHPVPEVCRKAAMILENLVSEPQNRGLLLAYENAFAELLFQEGKYSDSFARILYELTARSNSRVASARGIWGM

SEQ ID NO: 41318 - protein, 355 aa, Arabidopsis thaliana
  peptide (1)..(355): Ceres Seq. ID no. 12330698
MPLAKIAGLLDALLLIIDDWRDIALPKDLTRGTRVRTLGTNASVTGFGNEYDALASIQPPGSGIGSSAAEALGKKSTGKHQSSQWWMEEDGLFNLDDEGRSEKQMCAIAASNVIRNFSFMPDNEVVMAQHRHCLETVFQCIHDHMTEDEELVTNSLETIVNLAHLMDLRIFSSLKQSYININEKKAVQAVVGILNSSVKAWNCAAAELLGRLIINPDNEPFISPLIPQIHKRLIDLLSIQAVDAQAAAVGALYNLVEVNMDCRLKLASERWAVDRLLKVIKTPHPVPEVCRKAAMILENLVSEPQNRGLLLAYENAFAELLFQEGKYSDSFARILYELTARSNSRVASARGIWGM

SEQ ID NO: 41319 - DNA, 1387 bp, Arabidopsis thaliana; identical to SEQ ID NO: 39947
  misc_feature (1)..(1387): Ceres Seq. ID no. 13575410
  misc_feature (1)..(1387): Ortholog of  Ceres SEQ ID NO 14310896 as cited in SEQ ID NO 53480
  misc_feature (1)..(1387): Ortholog of  Ceres SEQ ID NO 13660685 as cited in SEQ ID NO 67678

SEQ ID NO: 41320 - protein, 396 aa, Arabidopsis thaliana; identical to SEQ ID NO: 39948
  peptide (1)..(396): Ceres Seq. ID no. 13575411

SEQ ID NO: 41321 - protein, 388 aa, Arabidopsis thaliana; identical to SEQ ID NO: 39949
  peptide (1)..(388): Ceres Seq. ID no. 13575412

SEQ ID NO: 41322 - protein, 353 aa, Arabidopsis thaliana; identical to SEQ ID NO: 39950
  peptide (1)..(353): Ceres Seq. ID no. 13575413

SEQ ID NO: 41323 - DNA, 1676 bp, Arabidopsis thaliana
  misc_feature (1)..(1676): Ceres Seq. ID no. 13489621
  misc_feature (1)..(1676): Ortholog of  Ceres SEQ ID NO 15172325 as cited in SEQ ID NO 54668
  misc_feature (1)..(1676): Ortholog of  Ceres SEQ ID NO 13597574 as cited in SEQ ID NO 64677
  misc_feature (1)..(1676): Ortholog of  Ceres SEQ ID NO 13662880 as cited in SEQ ID NO 65422
  misc_feature (1)..(1676): Ortholog of  Ceres SEQ ID NO 12779098 as cited in SEQ ID NO 67698
  misc_feature (1)..(1676): Ortholog of  Ceres SEQ ID NO 13591190 as cited in SEQ ID NO 68044
  misc_feature (1)..(1676): Ortholog of  Ceres SEQ ID NO 13595961 as cited in SEQ ID NO 68223
  misc_feature (1)..(1676): Ortholog of  Ceres SEQ ID NO 13596089 as cited in SEQ ID NO 68373
aagaaaaacgaaatacagatgaaacaatgtccacaagtctgagaatctgatatttatctcagaaacatactcattttaatattctcatagatcggtcacagggaagaaaagaaattggaggaccaaattcggaaagcacgaggcagagcagttcttgtaaattttcgaaatggaggaaaagccggcgggcagaagagtagtgttggttgcagttccagctcaaggacatatctctccaataatgcaacttgcaaaaacacttcacttgaagggtttctcaatcacaatcgctcagacaaagttcaattactttagcccttcagatgacttcactgattttcagtttgtcaccattccagaaagcttaccagagtctgattttgaggatctcgggccaatagagtttctgcataagctcaacaaagagtgtcaggtgagcttcaaagactgtttgggtcagttgttgctgcaacaaggtaatgagatagcctgtgttgtctacgacgagttcatgtactttgctgaagctgcagccaaagagtttaagcttccaaacgtcattttcagcaccacaagtgccacggcttttgtttgccgctctgcattcgacaaactttatgcaaacagtatcctgactcccttgaaagaacccaaaggacaacaaaacgagctagtgccagagtttcatcccctgagatgcaaagactttccggtttcacattgggcatcattagaaagcatgatggagctgtataggaatacagttgacaaacggacagcttcctcggtgataatcaacacagcgagctgtctagagagctcatctctgtctcgtctgcagcaacagctacaaattccagtttatcctataggccctcttcacctggtggcatcagcttctacgagtcttcttgaagagaacaagagctgtattgaatggttgaacaaacaaaagaaaaactctgtgatattcgtaagcttgggaagcttagctttgatggaaatcaatgaggtgatagaaactgctttgggattggatagtagcaagcaacagttcttgtgggtcattcggccagggtcagtacgtggttcggaatggatagagaacttgcctaaggagtttagtaagataatttcgggtcgaggttacattgtgaaatgggctccacagaaggaagtactttctcatcctgcagtaggaggattttggagccattgcggatggaactcgacactagagagcatcggggaaggagttccaatgatttgcaagccgttttccagtgatcaaatggtgaatgcgagatacttggagtgtgtatggaaaattgggattcaagttgagggtgatctagacagaggagcggtcgagagagctgtgaggaggttaatggtggaggaagaaggggaggggatgaggaagagagctatcagtttgaaagagcaacttagagcctctgttataagtggaggttcttcacacaactcgctagaggagtttgtacactacatgaggactctatgaagacttttgtctttactaaaacaccaaaacttcaagattcctctttcaactattccaagttgtttttagagaaagtatcatatcctaaaatatctaagtgatgccaagatgtatttggataaatgaatgaacaaagccatttcattgtgtt

SEQ ID NO: 41324 - protein, 451 aa, Arabidopsis thaliana
  peptide (1)..(451): Ceres Seq. ID no. 13489622
MEEKPAGRRVVLVAVPAQGHISPIMQLAKTLHLKGFSITIAQTKFNYFSPSDDFTDFQFVTIPESLPESDFEDLGPIEFLHKLNKECQVSFKDCLGQLLLQQGNEIACVVYDEFMYFAEAAAKEFKLPNVIFSTTSATAFVCRSAFDKLYANSILTPLKEPKGQQNELVPEFHPLRCKDFPVSHWASLESMMELYRNTVDKRTASSVIINTASCLESSSLSRLQQQLQIPVYPIGPLHLVASASTSLLEENKSCIEWLNKQKKNSVIFVSLGSLALMEINEVIETALGLDSSKQQFLWVIRPGSVRGSEWIENLPKEFSKIISGRGYIVKWAPQKEVLSHPAVGGFWSHCGWNSTLESIGEGVPMICKPFSSDQMVNARYLECVWKIGIQVEGDLDRGAVERAVRRLMVEEEGEGMRKRAISLKEQLRASVISGGSSHNSLEEFVHYMRTL

SEQ ID NO: 41325 - protein, 427 aa, Arabidopsis thaliana
  peptide (1)..(427): Ceres Seq. ID no. 13489623
MQLAKTLHLKGFSITIAQTKFNYFSPSDDFTDFQFVTIPESLPESDFEDLGPIEFLHKLNKECQVSFKDCLGQLLLQQGNEIACVVYDEFMYFAEAAAKEFKLPNVIFSTTSATAFVCRSAFDKLYANSILTPLKEPKGQQNELVPEFHPLRCKDFPVSHWASLESMMELYRNTVDKRTASSVIINTASCLESSSLSRLQQQLQIPVYPIGPLHLVASASTSLLEENKSCIEWLNKQKKNSVIFVSLGSLALMEINEVIETALGLDSSKQQFLWVIRPGSVRGSEWIENLPKEFSKIISGRGYIVKWAPQKEVLSHPAVGGFWSHCGWNSTLESIGEGVPMICKPFSSDQMVNARYLECVWKIGIQVEGDLDRGAVERAVRRLMVEEEGEGMRKRAISLKEQLRASVISGGSSHNSLEEFVHYMRTL

SEQ ID NO: 41326 - protein, 337 aa, Arabidopsis thaliana
  peptide (1)..(337): Ceres Seq. ID no. 13489624
MYFAEAAAKEFKLPNVIFSTTSATAFVCRSAFDKLYANSILTPLKEPKGQQNELVPEFHPLRCKDFPVSHWASLESMMELYRNTVDKRTASSVIINTASCLESSSLSRLQQQLQIPVYPIGPLHLVASASTSLLEENKSCIEWLNKQKKNSVIFVSLGSLALMEINEVIETALGLDSSKQQFLWVIRPGSVRGSEWIENLPKEFSKIISGRGYIVKWAPQKEVLSHPAVGGFWSHCGWNSTLESIGEGVPMICKPFSSDQMVNARYLECVWKIGIQVEGDLDRGAVERAVRRLMVEEEGEGMRKRAISLKEQLRASVISGGSSHNSLEEFVHYMRTL

SEQ ID NO: 41327 - DNA, 1396 bp, Arabidopsis thaliana
  misc_feature (1)..(1396): Ceres Seq. ID no. 12336234
  misc_feature (1)..(1396): Ortholog of  Ceres SEQ ID NO 14312844 as cited in SEQ ID NO 55601
  misc_feature (1)..(1396): Ortholog of  Ceres SEQ ID NO 14312866 as cited in SEQ ID NO 55630
  misc_feature (1)..(1396): Ortholog of  Ceres SEQ ID NO 13597376 as cited in SEQ ID NO 64002
  misc_feature (1)..(1396): Ortholog of  Ceres SEQ ID NO 13503573 as cited in SEQ ID NO 65402
  misc_feature (1)..(1396): Ortholog of  Ceres SEQ ID NO 13659615 as cited in SEQ ID NO 67248
attattatttccagagaagcttctcttttgattctctcgctctctctttcttcatcgcctcttcgagcttcgatggttgggaatattctggtgaccggtggtgctggttacatcggaagtcacacggttcttcagcttcttctcggaggctataacaccgtcgttatagacaacctcgacaattcctctctcgtttcgatccaacgcgtcaaggatctcgccggagatcatggacaaaatctcaccgtccaccaggtggaccttcgcgataaacccgcacttgagaaggttttctccgaaacaaagtttgatgcagtaatgcattttgctggattgaaagcagttggtgagagcgtggcgaaaccacttctgtattataacaataacttgattgcgactattacacttttggaagtaatggctgcacacggatgtaaaaagcttgtattttcttcgtccgctactgtgtatggctggccaaaggaggttccttgtacagaagagtctcccctgtctggaatgagtccttatggacggacaaagctgttcatagaggacatttgccgtgatgtacaacgtggtgatcctgaatggagaatcataatgctgaggtactttaaccctgtgggagctcaccctagcggtcgcattggtgaggatccttgtgggactccaaataatctcatgccttatgtccagcaagtcgttgttgggaggctacctaacctaaaaatttatggaactgactataccactaaagatggcactggtgtacgagactatattcatgttgttgatctagcagatggccatatatttgcgcttcaaaagctagacgatactgaaataggttgtgaggtatacaacctgggaaccggaaaaggaacaacagtgttggagatggttgatgcatttgagaaagcttctggaatgaaaatcccactggtgaaggttggaaggagaccaggtgatgcagaaaccgtctatgcgtcaacagaaaaagctgaacgcgaactaaactggaaggcaaattttggaatcgaagaaatgtgtagggatcagtggaactgggcaagcaacaatcctttcggttacggttcttcaccaaactcaacataacgaagctaacgtatccaacactccattctttttcttttgggtcgtcggctgttatctttatgttacacactcaggttttagctttaaagcctaaacacagtgagggagaagttacttctctattcatatatctgctttctccttttgtaatttatatatatcttatatacgcataggtttaacttaagcggatccttttgttttttggatttgtataatctctcttaggaaattaattgtcatgggattatatttgtattaaatagaaactgaattc

SEQ ID NO: 41328 - protein, 372 aa, Arabidopsis thaliana
  peptide (1)..(372): Ceres Seq. ID no. 12336235
IIISREASLLILSLSLSSSPLRASMVGNILVTGGAGYIGSHTVLQLLLGGYNTVVIDNLDNSSLVSIQRVKDLAGDHGQNLTVHQVDLRDKPALEKVFSETKFDAVMHFAGLKAVGESVAKPLLYYNNNLIATITLLEVMAAHGCKKLVFSSSATVYGWPKEVPCTEESPLSGMSPYGRTKLFIEDICRDVQRGDPEWRIIMLRYFNPVGAHPSGRIGEDPCGTPNNLMPYVQQVVVGRLPNLKIYGTDYTTKDGTGVRDYIHVVDLADGHIFALQKLDDTEIGCEVYNLGTGKGTTVLEMVDAFEKASGMKIPLVKVGRRPGDAETVYASTEKAERELNWKANFGIEEMCRDQWNWASNNPFGYGSSPNST

SEQ ID NO: 41329 - protein, 348 aa, Arabidopsis thaliana
  peptide (1)..(348): Ceres Seq. ID no. 12336236
MVGNILVTGGAGYIGSHTVLQLLLGGYNTVVIDNLDNSSLVSIQRVKDLAGDHGQNLTVHQVDLRDKPALEKVFSETKFDAVMHFAGLKAVGESVAKPLLYYNNNLIATITLLEVMAAHGCKKLVFSSSATVYGWPKEVPCTEESPLSGMSPYGRTKLFIEDICRDVQRGDPEWRIIMLRYFNPVGAHPSGRIGEDPCGTPNNLMPYVQQVVVGRLPNLKIYGTDYTTKDGTGVRDYIHVVDLADGHIFALQKLDDTEIGCEVYNLGTGKGTTVLEMVDAFEKASGMKIPLVKVGRRPGDAETVYASTEKAERELNWKANFGIEEMCRDQWNWASNNPFGYGSSPNST

SEQ ID NO: 41330 - protein, 266 aa, Arabidopsis thaliana
  peptide (1)..(266): Ceres Seq. ID no. 12336237
MHFAGLKAVGESVAKPLLYYNNNLIATITLLEVMAAHGCKKLVFSSSATVYGWPKEVPCTEESPLSGMSPYGRTKLFIEDICRDVQRGDPEWRIIMLRYFNPVGAHPSGRIGEDPCGTPNNLMPYVQQVVVGRLPNLKIYGTDYTTKDGTGVRDYIHVVDLADGHIFALQKLDDTEIGCEVYNLGTGKGTTVLEMVDAFEKASGMKIPLVKVGRRPGDAETVYASTEKAERELNWKANFGIEEMCRDQWNWASNNPFGYGSSPNST

SEQ ID NO: 41331 - DNA, 1269 bp, Arabidopsis thaliana
  misc_feature (1)..(1269): Ceres Seq. ID no. 13491544
  misc_feature (1)..(1269): Ortholog of  Ceres SEQ ID NO 15176423 as cited in SEQ ID NO 53228
accattccaaaatagtcaccgcccaaaaaaaaaaaaatcctttttttctcttcttgagagagagaaagagagagggagacaagtttgttctggataaaaagacaattcatttctattttaattgtctgcaaaattctcacgggccatcggagagaggagacagaggtggtgctgcacaagaatccttcctcctatatcctacaagactttggaatgggaagagaagttgttgaggtgcttatggaccgaaacgccgacgtttcaagcgctagagttcatgttgctcctaagatagctgcagaggagactgatgaggaatttgaagtcaaagaatgcacagaggagaagtctctttctgagaatgcaccaaatgttggatctgctgagagagttggagctcagaaatcacctaaaacccgtaatggaaatgctaaagtttcaaagcaggatgctcctcttctcgcggtgaggaagccattgcaacccgagaacaagaagcatattgatgacgaagataattgctccattgcttcttccgttgcaacttccatgaggatgggtaagtctggattgacttatggaagtgctccaacgtttaggagtgctcaacgtgctgagaaacgcaaggagtattaccaaaagctcgaggagaaaaaccaagcgcttgaagctgagaggaacgagcttgaacagaggcaaaaggatgaacaagaagcagccttgaagcaacttagaaagaatctcaagttcaaggctaaacccgtccccaacttctactacgaggcacctcctgcgaaacctgagctcaagaagcttcctttgacacgtcccaagtcgccaaaactgatcctttctcggagaaaaagcttcagcgacgcagtcagctcgtcttcccgtgaagagattctgaagacagtctctaaccggaaccgacacagcactggaacagttcagaacaaagacgatgatcacaggaacaagaacaccaatgctgcgcacgacagccctcgtgtcagatcaggcaaaggtaaatccggattgaaaccagtgaacgagtcctcagaagaagcttgaaatttcaaaagatgatgctttgttggtctaacttgatcttgccggagaaaatgtaaaatcaaagactctttgtttttcggttatttccggtatacgtttggttcactatgtaactgtctttttttcgattttaagttttaacatgaaaaactttatgttgattgttgaacaactcctcctaatgttgaaatttgt

SEQ ID NO: 41332 - protein, 286 aa, Arabidopsis thaliana
  peptide (1)..(286): Ceres Seq. ID no. 13491545
MGREVVEVLMDRNADVSSARVHVAPKIAAEETDEEFEVKECTEEKSLSENAPNVGSAERVGAQKSPKTRNGNAKVSKQDAPLLAVRKPLQPENKKHIDDEDNCSIASSVATSMRMGKSGLTYGSAPTFRSAQRAEKRKEYYQKLEEKNQALEAERNELEQRQKDEQEAALKQLRKNLKFKAKPVPNFYYEAPPAKPELKKLPLTRPKSPKLILSRRKSFSDAVSSSSREEILKTVSNRNRHSTGTVQNKDDDHRNKNTNAAHDSPRVRSGKGKSGLKPVNESSEEA

SEQ ID NO: 41333 - protein, 277 aa, Arabidopsis thaliana
  peptide (1)..(277): Ceres Seq. ID no. 13491546
MDRNADVSSARVHVAPKIAAEETDEEFEVKECTEEKSLSENAPNVGSAERVGAQKSPKTRNGNAKVSKQDAPLLAVRKPLQPENKKHIDDEDNCSIASSVATSMRMGKSGLTYGSAPTFRSAQRAEKRKEYYQKLEEKNQALEAERNELEQRQKDEQEAALKQLRKNLKFKAKPVPNFYYEAPPAKPELKKLPLTRPKSPKLILSRRKSFSDAVSSSSREEILKTVSNRNRHSTGTVQNKDDDHRNKNTNAAHDSPRVRSGKGKSGLKPVNESSEEA

SEQ ID NO: 41334 - protein, 174 aa, Arabidopsis thaliana
  peptide (1)..(174): Ceres Seq. ID no. 13491547
MRMGKSGLTYGSAPTFRSAQRAEKRKEYYQKLEEKNQALEAERNELEQRQKDEQEAALKQLRKNLKFKAKPVPNFYYEAPPAKPELKKLPLTRPKSPKLILSRRKSFSDAVSSSSREEILKTVSNRNRHSTGTVQNKDDDHRNKNTNAAHDSPRVRSGKGKSGLKPVNESSEEA

SEQ ID NO: 41335 - DNA, 1454 bp, Arabidopsis thaliana
  misc_feature (1)..(1454): Ceres Seq. ID no. 13488793
  misc_feature (1)..(1454): Ortholog of  Ceres SEQ ID NO 14315892 as cited in SEQ ID NO 57776
  misc_feature (1)..(1454): Ortholog of  Ceres SEQ ID NO 13662173 as cited in SEQ ID NO 62002
atggggaaacgtgaaattcattttactccggtgggtcgtcaggtgcagagagttctggaatatccattgcgcttggagaatcgttcgccgatgtcttactcaagaaggtcaagatactctccttcactatctccttatgacaagcgtcgtggaaggtctgtgtcaaggtcattgtctagaagcccgacgaggagtgtctcaagcgatgctgagaatcctggtaacagtttatatgtaactggattgtctcaccgggttactgaaagagatctggaggatcatttcgctaaagaaggaaaggtaactgatgttcaccttgtcctggacccatggactagagaatctcgcggatttggttttatctctatgaaaagtgttggtgatgctaaccgttgcatcagatctctagatcactctgttctgcagggccgcgtcatcactgttgagaaggcaagacgtcgtagaggacgtactccaactccaggaaagtacttggggctgagaactgctcgaggacgacataagtctcctagctactctccccgcaggtctgttagctgctctcgtagtcgtagtcgaagctactcatctgatcggggcagatcttattctccaagctatgggagaagaggaaggtcatcctcgtactcacccttctatcgacgacgcagattctactctccttcgagatctccttcacctgatgatcgttacaacaggagacgcgacagatcatactcaccttactacaggcggagggaccggtccagatcctactcacgtaactgtagagcacgggacagatcaccttactacatgcggaggtacaggtccagatccaggtcatactcgcctcgctacagagcacgtgaccgatcatgctcaccctactacaggggaagagaccggtcttattcaccccactaccaagggagagacagatcctactcacctgaaagtcgttactacagaaggcacaggtcggtatcgggaagcgtaagccctggagggagaagcatgtcacgtagcatatccccaaggaagggaaggaaagagagcagaagcaagtctcggaggcacgacaggcaatcttcaatgtgtcattcgaggagcgcaagatcaagcacctccagatccgtcagcccataacagtctctacttacttgaagttgacatcaatcactcacgtctgttgttgtattaagcattttgggacttgtctattccttgtatttggaattgatgacagtacgtatgttatgttggtttggtgttaggatactttattacttctgtggaaatgttgctttggcgacgagtcgtgagagaaatggaatctcttctttgttacaaaaaatctattttcatgtctttctactccaacaaatttctgttgttgtataattgttccacttacttttccaactttttttcataatcaatagacgattttc

SEQ ID NO: 41336 - protein, 382 aa, Arabidopsis thaliana
  peptide (1)..(382): Ceres Seq. ID no. 13488794
MGKREIHFTPVGRQVQRVLEYPLRLENRSPMSYSRRSRYSPSLSPYDKRRGRSVSRSLSRSPTRSVSSDAENPGNSLYVTGLSHRVTERDLEDHFAKEGKVTDVHLVLDPWTRESRGFGFISMKSVGDANRCIRSLDHSVLQGRVITVEKARRRRGRTPTPGKYLGLRTARGRHKSPSYSPRRSVSCSRSRSRSYSSDRGRSYSPSYGRRGRSSSYSPFYRRRRFYSPSRSPSPDDRYNRRRDRSYSPYYRRRDRSRSYSRNCRARDRSPYYMRRYRSRSRSYSPRYRARDRSCSPYYRGRDRSYSPHYQGRDRSYSPESRYYRRHRSVSGSVSPGGRSMSRSISPRKGRKESRSKSRRHDRQSSMCHSRSARSSTSRSVSP

SEQ ID NO: 41337 - protein, 352 aa, Arabidopsis thaliana
  peptide (1)..(352): Ceres Seq. ID no. 13488795
MSYSRRSRYSPSLSPYDKRRGRSVSRSLSRSPTRSVSSDAENPGNSLYVTGLSHRVTERDLEDHFAKEGKVTDVHLVLDPWTRESRGFGFISMKSVGDANRCIRSLDHSVLQGRVITVEKARRRRGRTPTPGKYLGLRTARGRHKSPSYSPRRSVSCSRSRSRSYSSDRGRSYSPSYGRRGRSSSYSPFYRRRRFYSPSRSPSPDDRYNRRRDRSYSPYYRRRDRSRSYSRNCRARDRSPYYMRRYRSRSRSYSPRYRARDRSCSPYYRGRDRSYSPHYQGRDRSYSPESRYYRRHRSVSGSVSPGGRSMSRSISPRKGRKESRSKSRRHDRQSSMCHSRSARSSTSRSVSP

SEQ ID NO: 41338 - protein, 260 aa, Arabidopsis thaliana
  peptide (1)..(260): Ceres Seq. ID no. 13488796
MKSVGDANRCIRSLDHSVLQGRVITVEKARRRRGRTPTPGKYLGLRTARGRHKSPSYSPRRSVSCSRSRSRSYSSDRGRSYSPSYGRRGRSSSYSPFYRRRRFYSPSRSPSPDDRYNRRRDRSYSPYYRRRDRSRSYSRNCRARDRSPYYMRRYRSRSRSYSPRYRARDRSCSPYYRGRDRSYSPHYQGRDRSYSPESRYYRRHRSVSGSVSPGGRSMSRSISPRKGRKESRSKSRRHDRQSSMCHSRSARSSTSRSVSP

SEQ ID NO: 41339 - DNA, 1128 bp, Arabidopsis thaliana
  misc_feature (1)..(1128): Ceres Seq. ID no. 12395675
  misc_feature (1)..(1128): Ortholog of  Ceres SEQ ID NO 14315662 as cited in SEQ ID NO 53109
  misc_feature (1)..(1128): Ortholog of  Ceres SEQ ID NO 12620168 as cited in SEQ ID NO 66161
acacatacaagactctcctcacagaacgatttagatttaatcgggaaaaagttcagtcagtgacactaatgttcgaatcgaacatggttcttcaaacactatcttcttcttctcctccaattcaccgtctctatcttcaccattctcagattctcccttcttctgggtcacccagcaagatttctcttcagatacatggaaggactttggccattcgatcttttcatgattatgtctttgcagaaatttctgctagaggtttaccggctttgaacaaagcttccttgaagaagctaccaatcaaaggatctacctttctgctggggcagagcttgttgatggtttctgctcacccacagttggcagcagcagcagaaatcataaagcctgaaccgatttacgaagttggagagttatttgaacttagtattcagctttcttacttgctgttactactggggttgcttggagttggtactttctatgtgatccgtcaagtacttgtacgcagagaactagacctctccgctaaagaattgcaggagcaagtaaggagcggagatgcaagtgcaacagagctctttgagcttggtgcagtgatgttgaggaagttttatcctgcagccaacaagtttttgcaacaagctatccagaaatgggacggtgatgatcaagatcttgctcaggtctataacgctcttggagtgagttatgtacgagaggataaacttgacaaaggaattgctcagtttgaaatggcggtgaagctgcaacccggttatgtaacagcttggaacaaccttggggatgcttatgagaagaagaaggagttgcctttggcattgaatgcgtttgaagaagttttgttgtttgatccaaacaataaggtggctcggcctcggcgagatgcgttgaaggatcgcgtgaagctttataaaggtgttgtggctgttaagtctaagaaacggtgacggctcaaacaagatgcaaactctgaaccaagaaccgttggtctctctcccccttgtgtatttttttggtttggtaatatgtatggagattttgtgttaatatgaaaatgaaactttgttgttttttgtaaccaataaaatcagatgtttaaaactt

SEQ ID NO: 41340 - protein, 322 aa, Arabidopsis thaliana
  peptide (1)..(322): Ceres Seq. ID no. 12395676
TYKTLLTERFRFNREKVQSVTLMFESNMVLQTLSSSSPPIHRLYLHHSQILPSSGSPSKISLQIHGRTLAIRSFHDYVFAEISARGLPALNKASLKKLPIKGSTFLLGQSLLMVSAHPQLAAAAEIIKPEPIYEVGELFELSIQLSYLLLLLGLLGVGTFYVIRQVLVRRELDLSAKELQEQVRSGDASATELFELGAVMLRKFYPAANKFLQQAIQKWDGDDQDLAQVYNALGVSYVREDKLDKGIAQFEMAVKLQPGYVTAWNNLGDAYEKKKELPLALNAFEEVLLFDPNNKVARPRRDALKDRVKLYKGVVAVKSKKR

SEQ ID NO: 41341 - protein, 300 aa, Arabidopsis thaliana
  peptide (1)..(300): Ceres Seq. ID no. 12395677
MFESNMVLQTLSSSSPPIHRLYLHHSQILPSSGSPSKISLQIHGRTLAIRSFHDYVFAEISARGLPALNKASLKKLPIKGSTFLLGQSLLMVSAHPQLAAAAEIIKPEPIYEVGELFELSIQLSYLLLLLGLLGVGTFYVIRQVLVRRELDLSAKELQEQVRSGDASATELFELGAVMLRKFYPAANKFLQQAIQKWDGDDQDLAQVYNALGVSYVREDKLDKGIAQFEMAVKLQPGYVTAWNNLGDAYEKKKELPLALNAFEEVLLFDPNNKVARPRRDALKDRVKLYKGVVAVKSKKR

SEQ ID NO: 41342 - protein, 295 aa, Arabidopsis thaliana
  peptide (1)..(295): Ceres Seq. ID no. 12395678
MVLQTLSSSSPPIHRLYLHHSQILPSSGSPSKISLQIHGRTLAIRSFHDYVFAEISARGLPALNKASLKKLPIKGSTFLLGQSLLMVSAHPQLAAAAEIIKPEPIYEVGELFELSIQLSYLLLLLGLLGVGTFYVIRQVLVRRELDLSAKELQEQVRSGDASATELFELGAVMLRKFYPAANKFLQQAIQKWDGDDQDLAQVYNALGVSYVREDKLDKGIAQFEMAVKLQPGYVTAWNNLGDAYEKKKELPLALNAFEEVLLFDPNNKVARPRRDALKDRVKLYKGVVAVKSKKR

SEQ ID NO: 41343 - DNA, 1482 bp, Arabidopsis thaliana
  misc_feature (1)..(1482): Ceres Seq. ID no. 13500025
  misc_feature (1)..(1482): Ortholog of  Ceres SEQ ID NO 12617253 as cited in SEQ ID NO 64065
gaagacgttaaccccatctcgttgaaagagagaagatgctaagatctcaaaacagagtataacaacaccttgacctcgttgaagaagcctttgagattgtctcggggatctgaaaaatgtcaatccttcaagtctctacttcgtctctttcttcttctactcttctctccatatctcccagaaaatctctctcatctaccaagtcatgccggatagttcgatgttccgtcgagggaactactgtaaccgagagaaaagtctcggcaaccagcgagccacttcttctgagagctgttaaaggtgaagttgttgatagacctccggtttggcttatgaggcaagctgggaggtacatgaagagttatcaaactctctgtgagaagtatccttctttcagagatagatcagagaatgcagatcttgtggtggaaatttctttgcagccatggaaggtgtttaagccagatggggtgattctgttctcagacattctcactccattgtctggaatgaacatacctttcgacattgttaaaggaaaaggtcctatcatctttaacccgcctcaatcagctgccgacgttgctcaagttagagaattcgtaccagaggaatctgttccttatgttggagaagcactcagaagattaagaaatgaggtgaacaatgaagccgctgttctgggatttgttggagctccatttacactttcttcgtatgtaatcgaaggtggctcatctaagaacttcacacagataaaaagattagctttttctcaacccaaggttctacatgccttactccagaagttcacaacctcgatgataacgtacatacgctatcaagcagatagcggagctcaagctgtgcaaatattcgactcttgggcaaccgagcttagcccggtggattttgaggagtttagcttaccttatctcaaacagattgtggaagctgtgaaacaaactcacccaaacctacctctcatactttatgctagtggatcaggaggtttgctagagagactggctcggaccggtgtggatgttgtgagcttggactggactgtggacatggctgaaggaagagaccggctaggaagagacatagcagttcaaggaaacgttgatccgggagttctatttggatcgaaagaatttatcacaagccggattcatgatactgtgaagaaagctgggagagataaacacattctcaacttggggcatggtattaaagttggaacccctgaagagaatgtagcacacttctttgaggttgctcaagaaattagatattaagagaaagaatgaatgtgatgattattatgctttgttgttaatttcggccttccatctttttttctttttccatttgagatgtgtaattttatttttatattttaactgtaatttttttttgtagactacttggaagaaagtaatgattaacgtgcaatggatattcatatatgtaggctct

SEQ ID NO: 41344 - protein, 394 aa, Arabidopsis thaliana
  peptide (1)..(394): Ceres Seq. ID no. 13500026
MSILQVSTSSLSSSTLLSISPRKSLSSTKSCRIVRCSVEGTTVTERKVSATSEPLLLRAVKGEVVDRPPVWLMRQAGRYMKSYQTLCEKYPSFRDRSENADLVVEISLQPWKVFKPDGVILFSDILTPLSGMNIPFDIVKGKGPIIFNPPQSAADVAQVREFVPEESVPYVGEALRRLRNEVNNEAAVLGFVGAPFTLSSYVIEGGSSKNFTQIKRLAFSQPKVLHALLQKFTTSMITYIRYQADSGAQAVQIFDSWATELSPVDFEEFSLPYLKQIVEAVKQTHPNLPLILYASGSGGLLERLARTGVDVVSLDWTVDMAEGRDRLGRDIAVQGNVDPGVLFGSKEFITSRIHDTVKKAGRDKHILNLGHGIKVGTPEENVAHFFEVAQEIRY

SEQ ID NO: 41345 - protein, 322 aa, Arabidopsis thaliana
  peptide (1)..(322): Ceres Seq. ID no. 13500027
MRQAGRYMKSYQTLCEKYPSFRDRSENADLVVEISLQPWKVFKPDGVILFSDILTPLSGMNIPFDIVKGKGPIIFNPPQSAADVAQVREFVPEESVPYVGEALRRLRNEVNNEAAVLGFVGAPFTLSSYVIEGGSSKNFTQIKRLAFSQPKVLHALLQKFTTSMITYIRYQADSGAQAVQIFDSWATELSPVDFEEFSLPYLKQIVEAVKQTHPNLPLILYASGSGGLLERLARTGVDVVSLDWTVDMAEGRDRLGRDIAVQGNVDPGVLFGSKEFITSRIHDTVKKAGRDKHILNLGHGIKVGTPEENVAHFFEVAQEIRY

SEQ ID NO: 41346 - protein, 315 aa, Arabidopsis thaliana
  peptide (1)..(315): Ceres Seq. ID no. 13500028
MKSYQTLCEKYPSFRDRSENADLVVEISLQPWKVFKPDGVILFSDILTPLSGMNIPFDIVKGKGPIIFNPPQSAADVAQVREFVPEESVPYVGEALRRLRNEVNNEAAVLGFVGAPFTLSSYVIEGGSSKNFTQIKRLAFSQPKVLHALLQKFTTSMITYIRYQADSGAQAVQIFDSWATELSPVDFEEFSLPYLKQIVEAVKQTHPNLPLILYASGSGGLLERLARTGVDVVSLDWTVDMAEGRDRLGRDIAVQGNVDPGVLFGSKEFITSRIHDTVKKAGRDKHILNLGHGIKVGTPEENVAHFFEVAQEIRY

SEQ ID NO: 41347 - DNA, 1524 bp, Arabidopsis thaliana
  misc_feature (1)..(1524): Ceres Seq. ID no. 12385052
  misc_feature (1)..(1524): Ortholog of  Ceres SEQ ID NO 13594345 as cited in SEQ ID NO 58043
  misc_feature (1)..(1524): Ortholog of  Ceres SEQ ID NO 12614112 as cited in SEQ ID NO 60891
  misc_feature (1)..(1524): Ortholog of  Ceres SEQ ID NO 13597574 as cited in SEQ ID NO 64677
  misc_feature (1)..(1524): Ortholog of  Ceres SEQ ID NO 13662880 as cited in SEQ ID NO 65422
  misc_feature (1)..(1524): Ortholog of  Ceres SEQ ID NO 12779098 as cited in SEQ ID NO 67698
  misc_feature (1)..(1524): Ortholog of  Ceres SEQ ID NO 13591190 as cited in SEQ ID NO 68044
  misc_feature (1)..(1524): Ortholog of  Ceres SEQ ID NO 13596089 as cited in SEQ ID NO 68373
gaatcgtcgttacctcatgtgatgctcgtatcattcccagggcaaggtcacataagccctcttcttcgtctcggaaagatcattgcctctaaaggcttaatcgtcacctttgtaaccacagaggaaccattgggcaagaagatgcgtcaagccaacaatattcaagacggtgtgctcaaaccggtcgggctaggttttctccggttcgagttcttcgaggatggatttgtctacaaagaagactttgatttgttacaaaaatcacttgaagtttccggaaaacgagagatcaagaatcttgtcaagaaatatgagaagcaaccagtgagatgtctcataaataatgcctttgttccatgggtttgtgacatagccgaggagcttcaaatcccatcagctgttctttgggtccagtcttgtgcttgcctcgccgcttattactattaccaccaccagttagttaagtttccgaccgaaaccgagccggaaataaccgttgacgtccctttcaagccattaaaattgaagcatgacgagatccctagctttcttcacccttcctctccgctgtcctctataggaggtaccattttagagcagatcaagcgacttcacaagcctttctctgttctcatcgaaacttttcaagaacttgaaaaagataccattgaccacatgtcccagctctgccctcaagtcaacttcaaccccatcggtccgctttttactatggctaaaaccataaggtctgacatcaagggagacatctccaagccagatagtgactgcatagagtggcttcactcgagagaaccatcctccgttgtttacatctcttttgggactttggctttcttgaagcaaaaccagatcgacgagattgctcacggcattctcaactccgggttgtcctgcttatgggttttgcgtcctcccttagaaggcttagccatagaaccacatgtcttgcctctagagcttgaagagaaagggaagattgtggaatggtgtcaacaagagaaagttttggctcatcctgcggttgcttgcttcttaagtcactgtggatggaactcaaccatggaggctttaacttcaggagttcccgttatttgtttcccgcagtggggagatcaggtgacaaatgcggtgtacctgattggtgttttcaagacaggattgagactcagccgtggagcttctgatgagaggattgttccaagggaggaggttgctgagcgactgcttgaggccaccgttggagagaaggcggtggagctgagagaaaacgctcggaggtggaaggaggaggcggagtctgccgtggcttacggtggaacatcggaaaggaattttcaagagtttgttgacaagttggttgatgtcaagacaatgacaaacattaataatgtcgtgtaagtcgtaaatatcatattgatacttgttattaccggattacgatttttaattgtttaatatgtactaaattgtatgcatcgatataaagtgaacaattttatgttg

SEQ ID NO: 41348 - protein, 472 aa, Arabidopsis thaliana
  peptide (1)..(472): Ceres Seq. ID no. 12385053
ESSLPHVMLVSFPGQGHISPLLRLGKIIASKGLIVTFVTTEEPLGKKMRQANNIQDGVLKPVGLGFLRFEFFEDGFVYKEDFDLLQKSLEVSGKREIKNLVKKYEKQPVRCLINNAFVPWVCDIAEELQIPSAVLWVQSCACLAAYYYYHHQLVKFPTETEPEITVDVPFKPLKLKHDEIPSFLHPSSPLSSIGGTILEQIKRLHKPFSVLIETFQELEKDTIDHMSQLCPQVNFNPIGPLFTMAKTIRSDIKGDISKPDSDCIEWLHSREPSSVVYISFGTLAFLKQNQIDEIAHGILNSGLSCLWVLRPPLEGLAIEPHVLPLELEEKGKIVEWCQQEKVLAHPAVACFLSHCGWNSTMEALTSGVPVICFPQWGDQVTNAVYLIGVFKTGLRLSRGASDERIVPREEVAERLLEATVGEKAVELRENARRWKEEAESAVAYGGTSERNFQEFVDKLVDVKTMTNINNVV

SEQ ID NO: 41349 - protein, 465 aa, Arabidopsis thaliana
  peptide (1)..(465): Ceres Seq. ID no. 12385054
MLVSFPGQGHISPLLRLGKIIASKGLIVTFVTTEEPLGKKMRQANNIQDGVLKPVGLGFLRFEFFEDGFVYKEDFDLLQKSLEVSGKREIKNLVKKYEKQPVRCLINNAFVPWVCDIAEELQIPSAVLWVQSCACLAAYYYYHHQLVKFPTETEPEITVDVPFKPLKLKHDEIPSFLHPSSPLSSIGGTILEQIKRLHKPFSVLIETFQELEKDTIDHMSQLCPQVNFNPIGPLFTMAKTIRSDIKGDISKPDSDCIEWLHSREPSSVVYISFGTLAFLKQNQIDEIAHGILNSGLSCLWVLRPPLEGLAIEPHVLPLELEEKGKIVEWCQQEKVLAHPAVACFLSHCGWNSTMEALTSGVPVICFPQWGDQVTNAVYLIGVFKTGLRLSRGASDERIVPREEVAERLLEATVGEKAVELRENARRWKEEAESAVAYGGTSERNFQEFVDKLVDVKTMTNINNVV

SEQ ID NO: 41350 - protein, 425 aa, Arabidopsis thaliana
  peptide (1)..(425): Ceres Seq. ID no. 12385055
MRQANNIQDGVLKPVGLGFLRFEFFEDGFVYKEDFDLLQKSLEVSGKREIKNLVKKYEKQPVRCLINNAFVPWVCDIAEELQIPSAVLWVQSCACLAAYYYYHHQLVKFPTETEPEITVDVPFKPLKLKHDEIPSFLHPSSPLSSIGGTILEQIKRLHKPFSVLIETFQELEKDTIDHMSQLCPQVNFNPIGPLFTMAKTIRSDIKGDISKPDSDCIEWLHSREPSSVVYISFGTLAFLKQNQIDEIAHGILNSGLSCLWVLRPPLEGLAIEPHVLPLELEEKGKIVEWCQQEKVLAHPAVACFLSHCGWNSTMEALTSGVPVICFPQWGDQVTNAVYLIGVFKTGLRLSRGASDERIVPREEVAERLLEATVGEKAVELRENARRWKEEAESAVAYGGTSERNFQEFVDKLVDVKTMTNINNVV

SEQ ID NO: 41351 - DNA, 1934 bp, Arabidopsis thaliana
  misc_feature (1)..(1934): Ceres Seq. ID no. 12558487
  misc_feature (1)..(1934): Ortholog of  Ceres SEQ ID NO 12372734 as cited in SEQ ID NO 1206
  misc_feature (1)..(1934): Ortholog of  Ceres SEQ ID NO 13584160 as cited in SEQ ID NO 63677
agacagaatcaaaacttgtgtagaccgagaatccatctctcacaaaccccaaaccaaaaaaaaatcaaaaaaaaaaatcaagaacaaatcgaaatctcaactctgtgaaaacctcgtccttgttcttcttctgcttctcccattccttcgatttttgcttcaatggatgtttgatttgctctctgactgcgtttgtttactatactatggaccctgagagtatcatggctgctgatgggactgattctgctcctgcaaatggtggtttagcaatggaaaatgtatgtgttaaagaaaatggggctgtttctgtcgaaaccgtggacactacttcagaaagtcagaatgagaattcggcaaacagttccactttggatacaattgaacacgtcaaggaggcagctgagggcacacaagttgaacatgtagatgattcaaagtgtatgaaaggcgaaaaagctcaacggaagccaaggcatgagaaactatcaggtggtaagaataattcatcggttcacatcaaaaagagcaaagagggcaaaagtgcagatgctaaagtggcagcatcaaatggttctgttgctcctaatgtacagacaacaaatcctcttaagagcaaatcattcaatgggcgagaggcacaagtcacaaagcaagggaagcatgactctgcacctgctgaaagcgctgatggggagaaggtgaaaccaaagtctcaaaagaaacaagcccatgagacatctgaagatgatactcagtcttctaatagtccgaaagcagacgatggaaaacctcgtaaagttggtgcacttccaaattatggattcagtttcaaatgtgaccaacgggctgaaaagagaaaagagttctatgttaagcttgaggagaagactcatgcaaaagaagaggaaattaatagcatgcaagccaagtccaaggaaacacaagaagctgagcttaggatgctaaggaagagtttgaacttcaaagccacacctatgcctagcttttatcaagaacctcagccgcctaaaacagagttaaagaagataccaccaacgagaccaaaatctccaaaactcgggcgaaagaagactgcttctggagcagattctgaagaaactcaaacccctcgccttggtaggctaagcctagatgagagagcttctaaagataacccaactgcaaagggaattatgccaacagttgatctgaagaagcaacctgtgcgcaagtcacttccaagattgccatctcagaaaacagttctccccgatggaaaacccgccccagcaaaagctgccataatcccagcaaaggtaagacctgagaaaaagaaacttgaaaaagatgcagaaaccgtaaaccagacttcacatcccacagaagaggaagcacaagtgacagtatcatccaatgctgatgtagaagattcacatgagactgtatctccaaggatgaatgaagacagagccgacaagtccattgaggtatctgaagcggttgctgttgagcattaaaaactctgcggtacgatcattactctcaagactcatcatatctcttgcattaagtaaggaggacaagagagaaagaaaccgtataatatttatatatatcttcagccaaaacttatatgagaagagatgggtaaaaagagtggacagaatcatgtggatttggttctaaaggttgctgtgcttttatatattcctatgtttgatggtaatgtttttaatcttttaaggtgtttttttctttcttttatgtcaagatcttccttctttttctttttgatgctttcaatcctaaaaggtgaatattcaggagatactgctttcgttctgtctgtgtattcttttcttttccttttttcttatttttgttattatggcttatgtgcaaattcttttgttatataattgattctcttc

SEQ ID NO: 41352 - protein, 437 aa, Arabidopsis thaliana
  peptide (1)..(437): Ceres Seq. ID no. 12558488
MDPESIMAADGTDSAPANGGLAMENVCVKENGAVSVETVDTTSESQNENSANSSTLDTIEHVKEAAEGTQVEHVDDSKCMKGEKAQRKPRHEKLSGGKNNSSVHIKKSKEGKSADAKVAASNGSVAPNVQTTNPLKSKSFNGREAQVTKQGKHDSAPAESADGEKVKPKSQKKQAHETSEDDTQSSNSPKADDGKPRKVGALPNYGFSFKCDQRAEKRKEFYVKLEEKTHAKEEEINSMQAKSKETQEAELRMLRKSLNFKATPMPSFYQEPQPPKTELKKIPPTRPKSPKLGRKKTASGADSEETQTPRLGRLSLDERASKDNPTAKGIMPTVDLKKQPVRKSLPRLPSQKTVLPDGKPAPAKAAIIPAKVRPEKKKLEKDAETVNQTSHPTEEEAQVTVSSNADVEDSHETVSPRMNEDRADKSIEVSEAVAVEH

SEQ ID NO: 41353 - protein, 431 aa, Arabidopsis thaliana
  peptide (1)..(431): Ceres Seq. ID no. 12558489
MAADGTDSAPANGGLAMENVCVKENGAVSVETVDTTSESQNENSANSSTLDTIEHVKEAAEGTQVEHVDDSKCMKGEKAQRKPRHEKLSGGKNNSSVHIKKSKEGKSADAKVAASNGSVAPNVQTTNPLKSKSFNGREAQVTKQGKHDSAPAESADGEKVKPKSQKKQAHETSEDDTQSSNSPKADDGKPRKVGALPNYGFSFKCDQRAEKRKEFYVKLEEKTHAKEEEINSMQAKSKETQEAELRMLRKSLNFKATPMPSFYQEPQPPKTELKKIPPTRPKSPKLGRKKTASGADSEETQTPRLGRLSLDERASKDNPTAKGIMPTVDLKKQPVRKSLPRLPSQKTVLPDGKPAPAKAAIIPAKVRPEKKKLEKDAETVNQTSHPTEEEAQVTVSSNADVEDSHETVSPRMNEDRADKSIEVSEAVAVEH

SEQ ID NO: 41354 - protein, 415 aa, Arabidopsis thaliana
  peptide (1)..(415): Ceres Seq. ID no. 12558490
MENVCVKENGAVSVETVDTTSESQNENSANSSTLDTIEHVKEAAEGTQVEHVDDSKCMKGEKAQRKPRHEKLSGGKNNSSVHIKKSKEGKSADAKVAASNGSVAPNVQTTNPLKSKSFNGREAQVTKQGKHDSAPAESADGEKVKPKSQKKQAHETSEDDTQSSNSPKADDGKPRKVGALPNYGFSFKCDQRAEKRKEFYVKLEEKTHAKEEEINSMQAKSKETQEAELRMLRKSLNFKATPMPSFYQEPQPPKTELKKIPPTRPKSPKLGRKKTASGADSEETQTPRLGRLSLDERASKDNPTAKGIMPTVDLKKQPVRKSLPRLPSQKTVLPDGKPAPAKAAIIPAKVRPEKKKLEKDAETVNQTSHPTEEEAQVTVSSNADVEDSHETVSPRMNEDRADKSIEVSEAVAVEH

SEQ ID NO: 41355 - DNA, 1553 bp, Arabidopsis thaliana
  misc_feature (1)..(1553): Ceres Seq. ID no. 12329896
  misc_feature (1)..(1553): Ortholog of  Ceres SEQ ID NO 12590542 as cited in SEQ ID NO 621
  misc_feature (1)..(1553): Ortholog of  Ceres SEQ ID NO 12421854 as cited in SEQ ID NO 20723
  misc_feature (1)..(1553): Ortholog of  Ceres SEQ ID NO 13597847 as cited in SEQ ID NO 64858
atgaaccaagaaaatatcttcaaattattgaacacaaaagtaagaaaaaagtgagataataaggaaattaaaacaataaattatcctttcggtgggattttttttgtcgtcttctattgtttttgtgagtgtgtgtgtttatataatggtaagagatctctgatctctcaagcttctctatagagagagtttcttctcatgctctttctaccaaggagaagattttctcgttaattttgtttgacttgcctcttcgaagcaacctgattctgtggtctgaatcttttcaagggaagagaagataagctaaacaagagaatggtgacaggttgtgttgatcttcatcaatctttcaaatctgcagattcatcttctgtgccaattcctcctcctcttccatcaaaatctgatggactcaagaaaaaacttgggcatagcagcgtttcgacagccacaagagatatgtgggatcgtcttttcaatgacggatacaaagctgatgtagtcatctatacagataatggcagtatcatctatgctcatgccaacatccttggaactgcttccactgtgatcaaaggcatgttgaagcaagccaagagacatggcaagtggcatacaatatcaatccgaggtgtccctcatgatgctgtgcgagtttttatccgtttcctctactcttcttgctatgagaaagaagaaatgaacgagtttatcatgcatttgctacttctgtcacacgcgtacgtggttcctcagctgaaacgggtctgtgaatggcatctagaacatggtttgcttaccactgagaatgtggttgatgtgttccagcttgcgctgctgtgtgatttccctcggcttagcctcatatctcaccgtatgatcatgaaacactttaacgaactctctgcgacagaagcatggacagctatgaagaaaagccatccctttcttgagaaagaagttagagactcagtaatcatcgaagcaaatacgcggaaagagaggatgagaaaacgcaatgatcagaggatatattcgcagctatacgaagcaatggaagcacttgttcatatatgcagagatggatgtaaaacaatagggccacacgataaagatttcaaaccgaaccatgcaacgtgtaactatgaagcttgcaagggattagaatcactgatccggcatttcgcaggctgtaagctaagagttccaggaggttgcgtgcattgcaagagaatgtggcaactccttgaactgcattcacgtgtttgcgcaggttctgatcaatgtcgagtccctctatgcagaaaccttaaggagaagatggagaaacagagcaagaaagatgagtcgagatggaaacttctggtgaagaatgtattggggagtaagaaaatcggaggctctcctttctttttaccggtgacaaactgttaaaaaacattttgtcaatctcaagaagggcgagttttaagcgtttcttgtgatcctatctttaaaacaagtgtaacataatgagtttgaataaatgacacatattttggtcggccaag

SEQ ID NO: 41356 - protein, 372 aa, Arabidopsis thaliana
  peptide (1)..(372): Ceres Seq. ID no. 12329897
MVTGCVDLHQSFKSADSSSVPIPPPLPSKSDGLKKKLGHSSVSTATRDMWDRLFNDGYKADVVIYTDNGSIIYAHANILGTASTVIKGMLKQAKRHGKWHTISIRGVPHDAVRVFIRFLYSSCYEKEEMNEFIMHLLLLSHAYVVPQLKRVCEWHLEHGLLTTENVVDVFQLALLCDFPRLSLISHRMIMKHFNELSATEAWTAMKKSHPFLEKEVRDSVIIEANTRKERMRKRNDQRIYSQLYEAMEALVHICRDGCKTIGPHDKDFKPNHATCNYEACKGLESLIRHFAGCKLRVPGGCVHCKRMWQLLELHSRVCAGSDQCRVPLCRNLKEKMEKQSKKDESRWKLLVKNVLGSKKIGGSPFFLPVTNC

SEQ ID NO: 41357 - protein, 324 aa, Arabidopsis thaliana
  peptide (1)..(324): Ceres Seq. ID no. 12329898
MWDRLFNDGYKADVVIYTDNGSIIYAHANILGTASTVIKGMLKQAKRHGKWHTISIRGVPHDAVRVFIRFLYSSCYEKEEMNEFIMHLLLLSHAYVVPQLKRVCEWHLEHGLLTTENVVDVFQLALLCDFPRLSLISHRMIMKHFNELSATEAWTAMKKSHPFLEKEVRDSVIIEANTRKERMRKRNDQRIYSQLYEAMEALVHICRDGCKTIGPHDKDFKPNHATCNYEACKGLESLIRHFAGCKLRVPGGCVHCKRMWQLLELHSRVCAGSDQCRVPLCRNLKEKMEKQSKKDESRWKLLVKNVLGSKKIGGSPFFLPVTNC

SEQ ID NO: 41358 - protein, 284 aa, Arabidopsis thaliana
  peptide (1)..(284): Ceres Seq. ID no. 12329899
MLKQAKRHGKWHTISIRGVPHDAVRVFIRFLYSSCYEKEEMNEFIMHLLLLSHAYVVPQLKRVCEWHLEHGLLTTENVVDVFQLALLCDFPRLSLISHRMIMKHFNELSATEAWTAMKKSHPFLEKEVRDSVIIEANTRKERMRKRNDQRIYSQLYEAMEALVHICRDGCKTIGPHDKDFKPNHATCNYEACKGLESLIRHFAGCKLRVPGGCVHCKRMWQLLELHSRVCAGSDQCRVPLCRNLKEKMEKQSKKDESRWKLLVKNVLGSKKIGGSPFFLPVTNC

SEQ ID NO: 41359 - DNA, 1490 bp, Arabidopsis thaliana
  misc_feature (1)..(1490): Ceres Seq. ID no. 12328604
  misc_feature (1)..(1490): Ortholog of  Ceres SEQ ID NO 15169415 as cited in SEQ ID NO 59010
  misc_feature (1)..(1490): Ortholog of  Ceres SEQ ID NO 13656546 as cited in SEQ ID NO 65729
ccgtcttcaccgtttccttccacgcctccgccggcaagctagttttctgactggagttccatcgtggacgccgtaatccctctttttcgtactggtaaattcttttcaatagattatctttgtgatttatatatcaagtctacaatctaaatcggagacgagattcggaaacctcactatcgattccaaacttcaattcagattatcttcctaaaaatgaagattcttacactcgtaatgcttttatgctactcgttcgtctcttctaccggagatacgactatccacacaaacaattgggctgttttggtctgcacttctcgcttctggtttaactaccggcacatggccaatactctgtccctctataggacagtcaagagacttggaataccagatgagaggatcattcttatgctggctgatgatatggcctgtaatgctagaaatgaatatcctgctcaagttttcaacaatgaaaaccacaaacttaacctctatggagataacgttgaggtagattatcgtggatatgaggtaacagttgaaaatttcttacgggttttgactgggcgtcatgagaatgctgttccaaggtcaaagcgtctcctcagtgatgagggtagccatatactactgtacatgactgggcatggaggtgatgaatttttgaagtttcaagatgcagaagaactccagagtcacgatttagcagatgctgtaaaacaaatgaaagagaagcgtagattcaaggagctgatgataatggttgatacttgccaagctgccactctctttaatcagcttcaatctcctggtgttttggctattggtagcagtctaaaaggagagaactcatattcccatcacctggattcagatattggtgtatctgttgtagatcggtttacatattacactcttgcattctttgagaggctcaatatctatgacaatgcatcacttaacagtttatttaggtcctacgatccgagactgctaatgtctactgcctactaccggactgatctttaccaaccacatctggtggaggtaccggtcacaaatttcttcggttcagttatggagaccattcatactgattcagcttacaaagctttctcaagtaaaatctccgaaagaaagatcaattctgagatgccattcaatcaactttccgaacacgatcttaaagaagagcttgagaatacaaacataccaaacgatgagttgatagctgagaagcaaaaatgcccatattcacaaatgcgggcagacctccacgagaaagtggagaagcttgaaaatgtcgatacagtggttaacctcagcatagcattgatggtactcgctgtaatggtctcatcatctttactacgatgaagaactgatataatcatctgcacttcacttaatctatgtagtctgattcactgttgcagcttcacacccattttgtaattttttgcacaatgctataaaaaaaattc

SEQ ID NO: 41360 - protein, 388 aa, Arabidopsis thaliana
  peptide (1)..(388): Ceres Seq. ID no. 12328605
MKILTLVMLLCYSFVSSTGDTTIHTNNWAVLVCTSRFWFNYRHMANTLSLYRTVKRLGIPDERIILMLADDMACNARNEYPAQVFNNENHKLNLYGDNVEVDYRGYEVTVENFLRVLTGRHENAVPRSKRLLSDEGSHILLYMTGHGGDEFLKFQDAEELQSHDLADAVKQMKEKRRFKELMIMVDTCQAATLFNQLQSPGVLAIGSSLKGENSYSHHLDSDIGVSVVDRFTYYTLAFFERLNIYDNASLNSLFRSYDPRLLMSTAYYRTDLYQPHLVEVPVTNFFGSVMETIHTDSAYKAFSSKISERKINSEMPFNQLSEHDLKEELENTNIPNDELIAEKQKCPYSQMRADLHEKVEKLENVDTVVNLSIALMVLAVMVSSSLLR

SEQ ID NO: 41361 - protein, 381 aa, Arabidopsis thaliana
  peptide (1)..(381): Ceres Seq. ID no. 12328606
MLLCYSFVSSTGDTTIHTNNWAVLVCTSRFWFNYRHMANTLSLYRTVKRLGIPDERIILMLADDMACNARNEYPAQVFNNENHKLNLYGDNVEVDYRGYEVTVENFLRVLTGRHENAVPRSKRLLSDEGSHILLYMTGHGGDEFLKFQDAEELQSHDLADAVKQMKEKRRFKELMIMVDTCQAATLFNQLQSPGVLAIGSSLKGENSYSHHLDSDIGVSVVDRFTYYTLAFFERLNIYDNASLNSLFRSYDPRLLMSTAYYRTDLYQPHLVEVPVTNFFGSVMETIHTDSAYKAFSSKISERKINSEMPFNQLSEHDLKEELENTNIPNDELIAEKQKCPYSQMRADLHEKVEKLENVDTVVNLSIALMVLAVMVSSSLLR

SEQ ID NO: 41362 - protein, 345 aa, Arabidopsis thaliana
  peptide (1)..(345): Ceres Seq. ID no. 12328607
MANTLSLYRTVKRLGIPDERIILMLADDMACNARNEYPAQVFNNENHKLNLYGDNVEVDYRGYEVTVENFLRVLTGRHENAVPRSKRLLSDEGSHILLYMTGHGGDEFLKFQDAEELQSHDLADAVKQMKEKRRFKELMIMVDTCQAATLFNQLQSPGVLAIGSSLKGENSYSHHLDSDIGVSVVDRFTYYTLAFFERLNIYDNASLNSLFRSYDPRLLMSTAYYRTDLYQPHLVEVPVTNFFGSVMETIHTDSAYKAFSSKISERKINSEMPFNQLSEHDLKEELENTNIPNDELIAEKQKCPYSQMRADLHEKVEKLENVDTVVNLSIALMVLAVMVSSSLLR

SEQ ID NO: 41363 - DNA, 1377 bp, Arabidopsis thaliana
  misc_feature (1)..(1377): Ceres Seq. ID no. 12330730
  misc_feature (1)..(1377): Ortholog of  Ceres SEQ ID NO 15168355 as cited in SEQ ID NO 57246
acaatgaatttttaaaactggctcaaatgtctttctcttaaggccgatcatcaacctgtatttgtgtttggttggtttcgtcagtagcgctctcacttcagtcacaaagtgaaaccagttacaaaaccagggtgataaaacgaagaagaagagaagacggtgaaaggacgagctgctgatggcctcacgcagagagatttttagcttttctggtccccctccaattccctcttttgactggaacaatttgtaccaccgagcgtcattggtatcatgtttagtgcaaggagtgtacacaatggaacgagataggcaacaaaaccggtgtggttctgactcacaagctagaccttggtgggcgttttacaggttcactttataccaacaacttagggacgcattagatggctccatatacggggccgttttccagaacgacatcaattaccagaatactcccaactcgatagtacctccacgttacattattgcgttacgtggaacgatcttaagcccacaaactatggcttgtgatgttcagcttaacattcgtatcgccttcgagaacctctaccgcgggggtagatttgtgcaggccattcaagcaatgcaatattttgtggccgcatatggaaacacagctatctggattgctggacactctctaggagctggccttgcactactcgcgggaaagatcatggccatgtatggatgccctgtcgaggcttacatcttcaacccacctatctctttgattcctctagagcagctagtggagagtgaggatcttaaatgtgcggtccgactcgctagggatatcctcaaagccggcatagcaagagtcctagatcttaacgagggtcaagaaagccatctatttatgaatttagcttgctggagacctcatttgtttgtgaaccaatcagatccaatctgctcagaatatattggctatttcaaccatagaggcgatatgaatgagctgcaactgggtaggatcgagaggttggctagatactcaattaggagaatattgttcgggggaggagaaagttcgtcgtcgtattcttcagaagaacatcttcattttcttccgtcggccatcgtgatggtgaacacaatcatatcaccggattttcagacagatcatgggattcatcaatggtggaatcctatgcttggacagttttcataccaaattatagcatgacttgcgcttaatttcatcgcttcagttattttcttttcagttgaatcttctatacaaatattgcaaggttttttttgcttcatgtcacatcagactttttcagcattttattttcaattgtattacttcccgaatatactctatttgattaacattattcttct

SEQ ID NO: 41364 - protein, 344 aa, Arabidopsis thaliana
  peptide (1)..(344): Ceres Seq. ID no. 12330731
MASRREIFSFSGPPPIPSFDWNNLYHRASLVSCLVQGVYTMERDRQQNRCGSDSQARPWWAFYRFTLYQQLRDALDGSIYGAVFQNDINYQNTPNSIVPPRYIIALRGTILSPQTMACDVQLNIRIAFENLYRGGRFVQAIQAMQYFVAAYGNTAIWIAGHSLGAGLALLAGKIMAMYGCPVEAYIFNPPISLIPLEQLVESEDLKCAVRLARDILKAGIARVLDLNEGQESHLFMNLACWRPHLFVNQSDPICSEYIGYFNHRGDMNELQLGRIERLARYSIRRILFGGGESSSSYSSEEHLHFLPSAIVMVNTIISPDFQTDHGIHQWWNPMLGQFSYQIIA

SEQ ID NO: 41365 - protein, 304 aa, Arabidopsis thaliana
  peptide (1)..(304): Ceres Seq. ID no. 12330732
MERDRQQNRCGSDSQARPWWAFYRFTLYQQLRDALDGSIYGAVFQNDINYQNTPNSIVPPRYIIALRGTILSPQTMACDVQLNIRIAFENLYRGGRFVQAIQAMQYFVAAYGNTAIWIAGHSLGAGLALLAGKIMAMYGCPVEAYIFNPPISLIPLEQLVESEDLKCAVRLARDILKAGIARVLDLNEGQESHLFMNLACWRPHLFVNQSDPICSEYIGYFNHRGDMNELQLGRIERLARYSIRRILFGGGESSSSYSSEEHLHFLPSAIVMVNTIISPDFQTDHGIHQWWNPMLGQFSYQIIA

SEQ ID NO: 41366 - protein, 229 aa, Arabidopsis thaliana
  peptide (1)..(229): Ceres Seq. ID no. 12330733
MACDVQLNIRIAFENLYRGGRFVQAIQAMQYFVAAYGNTAIWIAGHSLGAGLALLAGKIMAMYGCPVEAYIFNPPISLIPLEQLVESEDLKCAVRLARDILKAGIARVLDLNEGQESHLFMNLACWRPHLFVNQSDPICSEYIGYFNHRGDMNELQLGRIERLARYSIRRILFGGGESSSSYSSEEHLHFLPSAIVMVNTIISPDFQTDHGIHQWWNPMLGQFSYQIIA

SEQ ID NO: 41367 - DNA, 1886 bp, Arabidopsis thaliana
  misc_feature (1)..(1886): Ceres Seq. ID no. 12562541
  misc_feature (1)..(1886): Ortholog of  Ceres SEQ ID NO 15168464 as cited in SEQ ID NO 59187
  misc_feature (1)..(1886): Ortholog of  Ceres SEQ ID NO 15171618 as cited in SEQ ID NO 59968
aaccaccgtgataaaacagtcctctccatttctctactcaacatccatccgaaccaactcgaagatattatttttcatggattgagcaaagaagaggacgataatttcgaaaatatcgcgatacaatggacaagttctcgtacaattcgtatccagattcagctgaatcgtcgccaagatctcgcgatgtcgaatttgaaaatccgtcgccatgggaggaccagcagcagcagaactacaaggtgaagctcatgtgcagctatggcggcaagatccagcctcgtccacacgataaccagcttacttatgtaaacggcgataccaaaatcatgtcggtcgatcgtggtatcagatttccggctttagtatcgaagctctccgccgtctgcagcggtggtggtgatggaggagaaatctcgttcaagtatcagcttccaggtgaagatctagatgcgttgatttcggtgactaatgatgaggatctggagcacatgatgcatgagtacgatcggttgcttcgtttgtctactaaaccagctaggatgcgtttgtttctcttcccgtcttctcccatttccggcggatttggctccgaaggttcgactaaatcggatcgggatacgcttaatccaatccctagccgacctgaatcggagaaatctgtaaccgctcctccgaataatgctgatttcttgtttggatcggagaaagtagctccaattccgccgtcgccagtgaaggttcctcaaccggtaccggaaccagtggtgcttgaaccgccgcagatgttcgtagatcaacggatgttacaaccggaacacggcgtaaatccggcggagattcaaagacaaatccaggaatttcagatgattcaaatcagagaccaagagcaacaaatgcttcatcagaatcagctacatcaacaacagcaacaacaagaggctatacatcaaaatcagcttcatcaccaacaagaggttatacatcagaatcagctgcttcaacaagaggctatacatcagaatcagatgcttcaacaacaacaacaacaagaggctatgtacagaagaaaaaccgaagacgaagccggaagatacttccctccgacatacactcaaaatccggcgccggtgacgaatcaacaacctccggttggctactggcaaggaaacaccaacaacagtaatattcaggggaatatctacacaacaacgtcacagaatctaccggagcaacaacaacaacaacaagtatacatgattccagctcaatctcaagctccagggacattataccaaagcgtcatgagaccaacggtacaaggaaaccaaggttattacccatcacctgttcagcgacttcatcatcctgatgcatacatggaacagcagaaccagccaggttacaacgtggttcaaccacagccaacgttttcaggtggtccacaagttatgactagtgttggtccgcaagttatgactagtgtcggtcctccaatggggttacaggaaccttattcacagatggggaagcctgtgtactatacggtggctggagaaggcatgatggttcaaccgccaccagcccagcctcagcagcagcagcagcagtaccagggaatgggtcaaccggttagtggcatgaccgatctcagaaccggaccggatgggaaagtggcggttaacatggctgcaccacaagtttcagattcggtgtgagtgtgagattgagttaacattgaggttaatgttatgattatccatttctttaaactttatgatatatgtgtaaaagtgtttttttagatcaaactaggaatctggatttctgatgaatcaattgaagcacttttgatgtttttattttattttattttggtaaacttc

SEQ ID NO: 41368 - protein, 530 aa, Arabidopsis thaliana
  peptide (1)..(530): Ceres Seq. ID no. 12562542
MDKFSYNSYPDSAESSPRSRDVEFENPSPWEDQQQQNYKVKLMCSYGGKIQPRPHDNQLTYVNGDTKIMSVDRGIRFPALVSKLSAVCSGGGDGGEISFKYQLPGEDLDALISVTNDEDLEHMMHEYDRLLRLSTKPARMRLFLFPSSPISGGFGSEGSTKSDRDTLNPIPSRPESEKSVTAPPNNADFLFGSEKVAPIPPSPVKVPQPVPEPVVLEPPQMFVDQRMLQPEHGVNPAEIQRQIQEFQMIQIRDQEQQMLHQNQLHQQQQQQEAIHQNQLHHQQEVIHQNQLLQQEAIHQNQMLQQQQQQEAMYRRKTEDEAGRYFPPTYTQNPAPVTNQQPPVGYWQGNTNNSNIQGNIYTTTSQNLPEQQQQQQVYMIPAQSQAPGTLYQSVMRPTVQGNQGYYPSPVQRLHHPDAYMEQQNQPGYNVVQPQPTFSGGPQVMTSVGPQVMTSVGPPMGLQEPYSQMGKPVYYTVAGEGMMVQPPPAQPQQQQQQYQGMGQPVSGMTDLRTGPDGKVAVNMAAPQVSDSV

SEQ ID NO: 41369 - protein, 488 aa, Arabidopsis thaliana
  peptide (1)..(488): Ceres Seq. ID no. 12562543
MCSYGGKIQPRPHDNQLTYVNGDTKIMSVDRGIRFPALVSKLSAVCSGGGDGGEISFKYQLPGEDLDALISVTNDEDLEHMMHEYDRLLRLSTKPARMRLFLFPSSPISGGFGSEGSTKSDRDTLNPIPSRPESEKSVTAPPNNADFLFGSEKVAPIPPSPVKVPQPVPEPVVLEPPQMFVDQRMLQPEHGVNPAEIQRQIQEFQMIQIRDQEQQMLHQNQLHQQQQQQEAIHQNQLHHQQEVIHQNQLLQQEAIHQNQMLQQQQQQEAMYRRKTEDEAGRYFPPTYTQNPAPVTNQQPPVGYWQGNTNNSNIQGNIYTTTSQNLPEQQQQQQVYMIPAQSQAPGTLYQSVMRPTVQGNQGYYPSPVQRLHHPDAYMEQQNQPGYNVVQPQPTFSGGPQVMTSVGPQVMTSVGPPMGLQEPYSQMGKPVYYTVAGEGMMVQPPPAQPQQQQQQYQGMGQPVSGMTDLRTGPDGKVAVNMAAPQVSDSV

SEQ ID NO: 41370 - protein, 462 aa, Arabidopsis thaliana
  peptide (1)..(462): Ceres Seq. ID no. 12562544
MSVDRGIRFPALVSKLSAVCSGGGDGGEISFKYQLPGEDLDALISVTNDEDLEHMMHEYDRLLRLSTKPARMRLFLFPSSPISGGFGSEGSTKSDRDTLNPIPSRPESEKSVTAPPNNADFLFGSEKVAPIPPSPVKVPQPVPEPVVLEPPQMFVDQRMLQPEHGVNPAEIQRQIQEFQMIQIRDQEQQMLHQNQLHQQQQQQEAIHQNQLHHQQEVIHQNQLLQQEAIHQNQMLQQQQQQEAMYRRKTEDEAGRYFPPTYTQNPAPVTNQQPPVGYWQGNTNNSNIQGNIYTTTSQNLPEQQQQQQVYMIPAQSQAPGTLYQSVMRPTVQGNQGYYPSPVQRLHHPDAYMEQQNQPGYNVVQPQPTFSGGPQVMTSVGPQVMTSVGPPMGLQEPYSQMGKPVYYTVAGEGMMVQPPPAQPQQQQQQYQGMGQPVSGMTDLRTGPDGKVAVNMAAPQVSDSV

SEQ ID NO: 41371 - DNA, 1287 bp, Arabidopsis thaliana
  misc_feature (1)..(1287): Ceres Seq. ID no. 13576598
  misc_feature (1)..(1287): Ortholog of  Ceres SEQ ID NO 13595569 as cited in SEQ ID NO 56778
  misc_feature (1)..(1287): Ortholog of  Ceres SEQ ID NO 12611159 as cited in SEQ ID NO 59821
atcatctagaagcatttgtgtatatatatatatgtgtgtatattcctctctagctttaagtcaaaaccctatataaactatacaccaaagctttgaaccttcaaccaaacccaaaatccaagtgccccaccaaatgcttcaatcctcttccactacacaaaaaaaacaacttaatccctttatacccttttagccaaaaccctcgctaaaagccaatccctcaatataaaataacaagtagaattgatctgcctatatataagattttgagacgaaataagatctaaaccacaagaaagaaagtaaacataaaagtatgggaaggtcaccgtgctgtgagaaagctcacacaaacaaaggagcatggacgaaagaagaggacgagaggctcgtcgcctacattaaagctcatggagaaggctgctggagatctctccccaaagccgccggacttcttcgctgtggcaagagctgccgtctccggtggatcaactatctccggcctgaccttaagcgtggaaacttcaccgaggaagaagacgaactcatcatcaagctccatagccttcttggcaacaaatggtcgcttattgccgggagattaccgggaagaacagataacgagataaagaactattggaacacgcatatacgaagaaagcttataaacagagggattgatccaacgagtcatagaccaatccaagaatcatcagcttctcaagattctaaacctacacaactagaaccagttacgagtaataccattaatatctcattcacttctgctccaaaggtcgaaacgttccatgaaagtataagctttccgggaaaatcagagaaaatctcaatgcttacgttcaaagaagaaaaagatgagtgcccagttcaagaaaagttcccagatttgaatcttgagctcagaatcagtcttcctgatgatgttgatcgtcttcaagggcatggaaagtcaacaacgccacgttgtttcaagtgcagcttagggatgataaacggcatggagtgcagatgcggaagaatgagatgcgatgtagtcggaggtagcagcaaggggagtgacatgagcaatggatttgattttttagggttggcaaagaaagagaccacttctcttttgggctttcgaagcttggagatgaaataatattgtcaaattttaggcgtaactgtacaaaacttttgcctagataatttgaaagtatatcttcaacttgtatgagaaatttaactggtgaattataatatatagaatttgtttttttttct

SEQ ID NO: 41372 - protein, 282 aa, Arabidopsis thaliana
  peptide (1)..(282): Ceres Seq. ID no. 13576599
MGRSPCCEKAHTNKGAWTKEEDERLVAYIKAHGEGCWRSLPKAAGLLRCGKSCRLRWINYLRPDLKRGNFTEEEDELIIKLHSLLGNKWSLIAGRLPGRTDNEIKNYWNTHIRRKLINRGIDPTSHRPIQESSASQDSKPTQLEPVTSNTINISFTSAPKVETFHESISFPGKSEKISMLTFKEEKDECPVQEKFPDLNLELRISLPDDVDRLQGHGKSTTPRCFKCSLGMINGMECRCGRMRCDVVGGSSKGSDMSNGFDFLGLAKKETTSLLGFRSLEMK

SEQ ID NO: 41373 - DNA, 1553 bp, Arabidopsis thaliana
  misc_feature (1)..(1553): Ceres Seq. ID no. 12331076
  misc_feature (1)..(1553): Ortholog of  Ceres SEQ ID NO 14316165 as cited in SEQ ID NO 52560
  misc_feature (1)..(1553): Ortholog of  Ceres SEQ ID NO 13597076 as cited in SEQ ID NO 63571
aaaacaaaaaaacacagcctttgttctgtttctctgcgatttcttcgattttcctcttcttcgttttgattttcagatttgtttaactcggtcgttgcgttgacttcaaatttcttaaaagagagagagagagagagaggagatagttcagaaaatctgtcagacttgggatctttctcggcaatgcgacgcttgttcgccgcgaaatccctctcccgagaggatacaacctttttgtcattctcttcttcttcggtgacgcgtttcctcaaggctcttcttcctctccgttcagatccaagagatgtccgctaattctcatcctcctaattccaaaaacgtcctctgtaatgcagccgccggtgccgccgccggggttgttgcggctacgtttgtgtgtcctcttgatgttataaaaacgaggtttcaggttcatgggctgcctaagctcggtgatgcaaacatcaaaggtagtctaattgttggcagtcttgagcagatcttcaagagagaagggatgcgtggcttataccgcggtctttcccctactgtcatggctcttctctccaattgggccatttattttacaatgtatgaccagctcaagagctttctttgttcaaatgatcacaaactcagcgttggagctaacgtattggctgcttcgggagctggagctgcaactaccattgccacaaatcctctttgggtcgtcaagactagacttcagacacaaggaatgagagtgggtatagtgccatacaaaagcacattttctgctttaaggagaatagcttatgaggagggaattcgcggattgtacagtggtcttgtccctgcactagctggtatcagtcatgttgccattcagtttcccacatatgagatgatcaaagtgtacttggccaagaaaggtgataaatcagtcgataacctcaatgctcgtgatgtagcagttgcctcttcgattgcaaagatatttgcatccacattaacttacccgcacgaggtagtacgagctaggcttcaagagcaagggcaccacagtgagaaacgttactcaggagtaagagattgcatcaagaaagtgtttgagaaagatgggttccctggtttttacagaggctgcgccacgaatctactgagaacaactcctgcagcagttataactttcactagcttcgaaatggtgcatcgtttcctcgtcactcatataccttctgagcaaagctctatactttaaatccggttttttttttttgatgatgatgacgattaaaagttatttttacacaggtaaaaaaaagtttccccttttgggaaatgattcaaaatagaagttcttttctggtgacttattatgtctctctgttggagaaatcagaatctgagaatgggttgaaacttgagagacccaaaaaagcagaatattttagtgtaaaaaactgactcttttatttctctgttttttgggccttcatgttactgaaaggaaacatatattatcttcaagaaatgattatactattattctggttttcagagtgttatgg

SEQ ID NO: 41374 - protein, 312 aa, Arabidopsis thaliana
  peptide (1)..(312): Ceres Seq. ID no. 12331077
MSANSHPPNSKNVLCNAAAGAAAGVVAATFVCPLDVIKTRFQVHGLPKLGDANIKGSLIVGSLEQIFKREGMRGLYRGLSPTVMALLSNWAIYFTMYDQLKSFLCSNDHKLSVGANVLAASGAGAATTIATNPLWVVKTRLQTQGMRVGIVPYKSTFSALRRIAYEEGIRGLYSGLVPALAGISHVAIQFPTYEMIKVYLAKKGDKSVDNLNARDVAVASSIAKIFASTLTYPHEVVRARLQEQGHHSEKRYSGVRDCIKKVFEKDGFPGFYRGCATNLLRTTPAAVITFTSFEMVHRFLVTHIPSEQSSIL

SEQ ID NO: 41375 - protein, 241 aa, Arabidopsis thaliana
  peptide (1)..(241): Ceres Seq. ID no. 12331078
MRGLYRGLSPTVMALLSNWAIYFTMYDQLKSFLCSNDHKLSVGANVLAASGAGAATTIATNPLWVVKTRLQTQGMRVGIVPYKSTFSALRRIAYEEGIRGLYSGLVPALAGISHVAIQFPTYEMIKVYLAKKGDKSVDNLNARDVAVASSIAKIFASTLTYPHEVVRARLQEQGHHSEKRYSGVRDCIKKVFEKDGFPGFYRGCATNLLRTTPAAVITFTSFEMVHRFLVTHIPSEQSSIL

SEQ ID NO: 41376 - protein, 229 aa, Arabidopsis thaliana
  peptide (1)..(229): Ceres Seq. ID no. 12331079
MALLSNWAIYFTMYDQLKSFLCSNDHKLSVGANVLAASGAGAATTIATNPLWVVKTRLQTQGMRVGIVPYKSTFSALRRIAYEEGIRGLYSGLVPALAGISHVAIQFPTYEMIKVYLAKKGDKSVDNLNARDVAVASSIAKIFASTLTYPHEVVRARLQEQGHHSEKRYSGVRDCIKKVFEKDGFPGFYRGCATNLLRTTPAAVITFTSFEMVHRFLVTHIPSEQSSIL

SEQ ID NO: 41377 - DNA, 1782 bp, Arabidopsis thaliana
  misc_feature (1)..(1782): Ceres Seq. ID no. 12395516
  misc_feature (1)..(1782): Ortholog of  Ceres SEQ ID NO 13600098 as cited in SEQ ID NO 0
aagtctttcttacttgccctgctctggaacgtgactttggaggtaacgaaactgtgtcgtgagttgatctaagaggggaagtgaggaatcattttgcttttagctttgaaaagtaaatcctggaaatgtctctcaaggcgttagactacgagtccttgaatgaaaacgtgaagaattgtcagtatgcagtcagaggtgaactttatcttcgtgcttctgagcttcagaaagaaggcaaaaagattattttcacaaatgttggaaaccctcatgctttaggacagaaacctctgacttttcctcgtcaggtggtttctttatgccaagcaccatttctgttagatgatccaaatgttggtatgatattcccagcagatgctattgcaagagctaagcattatctttccttgacttctggtggtcttggtgcttacagtgactcaagaggtcttccgggagttcggaaagaagtcgctgagttcattgaacggcgtgatggatatccaagcgatccagaactcatatttctaactgatggagcgagcaaaggtgtgatgcaaatcttgaattgtgtcatacgcggtcagaaagacggaattctggttccagttccacagtatccactctactcggctactatatctctgttaggtggtactcttgttccttactatcttgaagagtctgaaaactggggacttgatgttaacaaccttcgccaatctgttgctcaagctcgctctcaaggaataacagtaagggcaatggtgattattaaccccggaaacccaactggccagtgtcttagcgaagctaacataagagagatactacggttctgttgtgatgagagattagttcttctcggagacgaagtgtatcagcaaaatatataccaagatgaacgtccctttatcagttccaagaaggttttgatggatatgggagcaccgatcagcaaggaagttcagctcatatctttccacaccgtttccaaaggatactggggcgaatgtgggcaacggggaggttactttgagatgacaaatatccctcccaggaccgttgaggagatatacaaggtggcctctatagctctcagccccaacgtctctgcgcagatatttatgggtttaatggttagcccaccaaagcctggagacatttcatatgaccaattcgttcgtgagagcaagggaatactagaatcactgagaagaagagcaaggatgatgactgatggattcaacagctgcaaaaacgtcgtctgtaatttcacagaaggtgctatgtattcattccctcaaataaagttgccgtcgaaagcaatccaagcagcaaaacaagccggaaaagtccctgacgttttctactgccttaagctcttagaagccacaggaatctccacagttccaggctctggatttggacaaaaagaaggggtgtttcatttaaggacaacaattctgccagcagaagaagaaatgccagagattatggacagtttcaaaaagttcaatgatgagtttatgtctcagtacgctgataactttggttactccagaatgtgaaaaagaaaggacttagagtcagagtcagagatcacttcttcttctttcacgacattattattgtctattcacactcttaaaaagcaataagtactggtcctactctgtgtcaaactcttcttggtgctcttaaaacctttgtatctattgttaccaatttgtgtgactcacacacacacacacaaaaatctctaatgttcaattatatggt

SEQ ID NO: 41378 - protein, 481 aa, Arabidopsis thaliana
  peptide (1)..(481): Ceres Seq. ID no. 12395517
MSLKALDYESLNENVKNCQYAVRGELYLRASELQKEGKKIIFTNVGNPHALGQKPLTFPRQVVSLCQAPFLLDDPNVGMIFPADAIARAKHYLSLTSGGLGAYSDSRGLPGVRKEVAEFIERRDGYPSDPELIFLTDGASKGVMQILNCVIRGQKDGILVPVPQYPLYSATISLLGGTLVPYYLEESENWGLDVNNLRQSVAQARSQGITVRAMVIINPGNPTGQCLSEANIREILRFCCDERLVLLGDEVYQQNIYQDERPFISSKKVLMDMGAPISKEVQLISFHTVSKGYWGECGQRGGYFEMTNIPPRTVEEIYKVASIALSPNVSAQIFMGLMVSPPKPGDISYDQFVRESKGILESLRRRARMMTDGFNSCKNVVCNFTEGAMYSFPQIKLPSKAIQAAKQAGKVPDVFYCLKLLEATGISTVPGSGFGQKEGVFHLRTTILPAEEEMPEIMDSFKKFNDEFMSQYADNFGYSRM

SEQ ID NO: 41379 - protein, 403 aa, Arabidopsis thaliana
  peptide (1)..(403): Ceres Seq. ID no. 12395518
MIFPADAIARAKHYLSLTSGGLGAYSDSRGLPGVRKEVAEFIERRDGYPSDPELIFLTDGASKGVMQILNCVIRGQKDGILVPVPQYPLYSATISLLGGTLVPYYLEESENWGLDVNNLRQSVAQARSQGITVRAMVIINPGNPTGQCLSEANIREILRFCCDERLVLLGDEVYQQNIYQDERPFISSKKVLMDMGAPISKEVQLISFHTVSKGYWGECGQRGGYFEMTNIPPRTVEEIYKVASIALSPNVSAQIFMGLMVSPPKPGDISYDQFVRESKGILESLRRRARMMTDGFNSCKNVVCNFTEGAMYSFPQIKLPSKAIQAAKQAGKVPDVFYCLKLLEATGISTVPGSGFGQKEGVFHLRTTILPAEEEMPEIMDSFKKFNDEFMSQYADNFGYSRM

SEQ ID NO: 41380 - protein, 338 aa, Arabidopsis thaliana
  peptide (1)..(338): Ceres Seq. ID no. 12395519
MQILNCVIRGQKDGILVPVPQYPLYSATISLLGGTLVPYYLEESENWGLDVNNLRQSVAQARSQGITVRAMVIINPGNPTGQCLSEANIREILRFCCDERLVLLGDEVYQQNIYQDERPFISSKKVLMDMGAPISKEVQLISFHTVSKGYWGECGQRGGYFEMTNIPPRTVEEIYKVASIALSPNVSAQIFMGLMVSPPKPGDISYDQFVRESKGILESLRRRARMMTDGFNSCKNVVCNFTEGAMYSFPQIKLPSKAIQAAKQAGKVPDVFYCLKLLEATGISTVPGSGFGQKEGVFHLRTTILPAEEEMPEIMDSFKKFNDEFMSQYADNFGYSRM

SEQ ID NO: 41381 - DNA, 1814 bp, Arabidopsis thaliana
  misc_feature (1)..(1814): Ceres Seq. ID no. 12558491
  misc_feature (1)..(1814): Ortholog of  Ceres SEQ ID NO 14315138 as cited in SEQ ID NO 53488
ctttcttcactgcaatttttgtgatttacaacatatattaattcttgcctcctccttcactccagctccaaacacaaatctccgacgaaaaacttctctcaagctttctcttttctaatggcgacacctactcaggaagctattgacaccttcatgaccatcaccggctcttccaatgccgtcgccgttcgtaagctcgaggagtatcgtgggaacctcaatagagctgtgaatgcatactttactcatggagatcaaaattcatatgatgcaatggatatagatgatggtgtgactccagtcctctctgaagctagaacaacggacccgttcccgcttcgtgatccaaactttgggagaagtctatttgataatgatcctgttatgtcgcgtcccccatttgttagtcatccaagggaggccagggagatacctatagaggttaaagacagcaatgggccatcaggtcaatctaatgatgctcctactattgaggatgtgaccgagacagctcaagctcacggtccagctgcccaagaggcggtcattatagatgaagtaagtgatgatgataatcagtctgctccaaccggacaaagtaggcatgctgtacctgttggttctgcagaaaataatatgcaacattacaatgatatagaagaacaaattattcgagctgctattgaggcctccaaaatggagactggtgatgacgtaacaaaatctgtcacagtgcagtcagctgagcgagaagtgttgcgcagtgaaggttggaaggcttcatcctcagaaagagaagcttctgaaatggtttctattccagtacagcagggttcccgagcctcaaatggaagattcgcagcacctagctcactgtctgaggatgatgatgatgatgatgacgatgaccctgattatgttgaggaggaagaggaaccccttgttagccacagaccaagacgtgcggtttctggatctcggagctcacttaatgatgatcttccccggagccctgaagcagaagatgcaactattcattcaccgggtgctggcaatggttttccttctgagtggggaggcatttcttctgaggaacatgatgaagctatcatgctagaggctgccatgtttggtggcatttctgagagtgaatatggtgttccttatgcacattatccgcaaaggacacagcgtccaccctcaccgtcattgacagctcagaggttgattcgagaacagcaggatgatgagtatcttgcatcgctggaagctgacagggtaaaagctgaggctcgtcgattggaggaagaagctgctagagtggaagctattgaagaagcaaagagaaaggaggaagaagctcgcaggaaggtcgaagaggaacaggagctggagaggcaattagtttcaaaggaagcatctctgcctcaagagccaccagccggggaagagaacgccattacacttcaagtcaggctgccagatggcacccgtcatggccgccggttctttaaatccgacaaactccaatcacttttcgactttatagacatctgtagagttgtgaagcccaacacttataggctggtaaggccatatcctcggcgtgcttttggagatggagaatgctcatcgactctaaacgatatcggtttaacgagcaaacaagaagcattgttcttggagctgatctagaattggtattattctattggggttacataatttattcttttatatgtcttcttctttttcttcgtagaatttgttactccctaaacatttattggtctatttaatccaaggctggcttt

SEQ ID NO: 41382 - protein, 525 aa, Arabidopsis thaliana
  peptide (1)..(525): Ceres Seq. ID no. 12558492
MATPTQEAIDTFMTITGSSNAVAVRKLEEYRGNLNRAVNAYFTHGDQNSYDAMDIDDGVTPVLSEARTTDPFPLRDPNFGRSLFDNDPVMSRPPFVSHPREAREIPIEVKDSNGPSGQSNDAPTIEDVTETAQAHGPAAQEAVIIDEVSDDDNQSAPTGQSRHAVPVGSAENNMQHYNDIEEQIIRAAIEASKMETGDDVTKSVTVQSAEREVLRSEGWKASSSEREASEMVSIPVQQGSRASNGRFAAPSSLSEDDDDDDDDDPDYVEEEEEPLVSHRPRRAVSGSRSSLNDDLPRSPEAEDATIHSPGAGNGFPSEWGGISSEEHDEAIMLEAAMFGGISESEYGVPYAHYPQRTQRPPSPSLTAQRLIREQQDDEYLASLEADRVKAEARRLEEEAARVEAIEEAKRKEEEARRKVEEEQELERQLVSKEASLPQEPPAGEENAITLQVRLPDGTRHGRRFFKSDKLQSLFDFIDICRVVKPNTYRLVRPYPRRAFGDGECSSTLNDIGLTSKQEALFLELI

SEQ ID NO: 41383 - protein, 513 aa, Arabidopsis thaliana
  peptide (1)..(513): Ceres Seq. ID no. 12558493
MTITGSSNAVAVRKLEEYRGNLNRAVNAYFTHGDQNSYDAMDIDDGVTPVLSEARTTDPFPLRDPNFGRSLFDNDPVMSRPPFVSHPREAREIPIEVKDSNGPSGQSNDAPTIEDVTETAQAHGPAAQEAVIIDEVSDDDNQSAPTGQSRHAVPVGSAENNMQHYNDIEEQIIRAAIEASKMETGDDVTKSVTVQSAEREVLRSEGWKASSSEREASEMVSIPVQQGSRASNGRFAAPSSLSEDDDDDDDDDPDYVEEEEEPLVSHRPRRAVSGSRSSLNDDLPRSPEAEDATIHSPGAGNGFPSEWGGISSEEHDEAIMLEAAMFGGISESEYGVPYAHYPQRTQRPPSPSLTAQRLIREQQDDEYLASLEADRVKAEARRLEEEAARVEAIEEAKRKEEEARRKVEEEQELERQLVSKEASLPQEPPAGEENAITLQVRLPDGTRHGRRFFKSDKLQSLFDFIDICRVVKPNTYRLVRPYPRRAFGDGECSSTLNDIGLTSKQEALFLELI

SEQ ID NO: 41384 - protein, 473 aa, Arabidopsis thaliana
  peptide (1)..(473): Ceres Seq. ID no. 12558494
MDIDDGVTPVLSEARTTDPFPLRDPNFGRSLFDNDPVMSRPPFVSHPREAREIPIEVKDSNGPSGQSNDAPTIEDVTETAQAHGPAAQEAVIIDEVSDDDNQSAPTGQSRHAVPVGSAENNMQHYNDIEEQIIRAAIEASKMETGDDVTKSVTVQSAEREVLRSEGWKASSSEREASEMVSIPVQQGSRASNGRFAAPSSLSEDDDDDDDDDPDYVEEEEEPLVSHRPRRAVSGSRSSLNDDLPRSPEAEDATIHSPGAGNGFPSEWGGISSEEHDEAIMLEAAMFGGISESEYGVPYAHYPQRTQRPPSPSLTAQRLIREQQDDEYLASLEADRVKAEARRLEEEAARVEAIEEAKRKEEEARRKVEEEQELERQLVSKEASLPQEPPAGEENAITLQVRLPDGTRHGRRFFKSDKLQSLFDFIDICRVVKPNTYRLVRPYPRRAFGDGECSSTLNDIGLTSKQEALFLELI

SEQ ID NO: 41385 - DNA, 1440 bp, Arabidopsis thaliana; identical to SEQ ID NO: 21340
  misc_feature (1)..(1440): Ceres Seq. ID no. 12337386
  misc_feature (1)..(1440): Ortholog of  Ceres SEQ ID NO 15171297 as cited in SEQ ID NO 51458

SEQ ID NO: 41386 - protein, 335 aa, Arabidopsis thaliana; identical to SEQ ID NO: 21341
  peptide (1)..(335): Ceres Seq. ID no. 12337387

SEQ ID NO: 41387 - protein, 318 aa, Arabidopsis thaliana; identical to SEQ ID NO: 21342
  peptide (1)..(318): Ceres Seq. ID no. 12337388

SEQ ID NO: 41388 - protein, 239 aa, Arabidopsis thaliana; identical to SEQ ID NO: 21343
  peptide (1)..(239): Ceres Seq. ID no. 12337389

SEQ ID NO: 41389 - DNA, 1199 bp, Arabidopsis thaliana
  misc_feature (1)..(1199): Ceres Seq. ID no. 12330750
  misc_feature (1)..(1199): Ortholog of  Ceres SEQ ID NO 13593955 as cited in SEQ ID NO 54278
  misc_feature (1)..(1199): Ortholog of  Ceres SEQ ID NO 13597380 as cited in SEQ ID NO 64054
  misc_feature (1)..(1199): Ortholog of  Ceres SEQ ID NO 12625474 as cited in SEQ ID NO 64169
  misc_feature (1)..(1199): Ortholog of  Ceres SEQ ID NO 13597502 as cited in SEQ ID NO 64681
aaatccaccaaaaacaaaaaatgtcgacttctaaagccataaccttaactctcttcattgcaacaacattactagcgccctgcaacgcagccacaaacgcaacaacgaagccgctcttcccagcgattctaatcttcggtgattcaaccgtcgatacaggaaacaacaactaccctttaccaacaatcttcagagctgaacactttccttacggcatggatcttccagacggaaaagctaacggaagattctcaaacggaaaacttatctccgacataatcgcaaccaaactcaacatcaaagagtttattcctcctttcttacaaccaaatctctccgaccaagacattctaaccggagtctgtttcgcatcagctggtgccggttacgacgacctgaccagtctctcgacacaagccattcgtgtctcggaacaaccaaacatgttcaagagttacattgctcgtctcaaaggtatcgtgggagacaagaaagcgatggagatcataaacaatgccttcgtggttgtgagtgcagggcctaacgatttcattttgaactattacgaaattccctcaaggcgtctcgagtatcctttcatttctggttaccaagactttattcttaagaggcttgaaaatttcgtgcgggagctttacagtttaggtgtccggaatgttttggttggaggtttaccgccaatggggtgtttaccgatccatatgactgctaaattccgcaacatttttagattctgcttggaacaccataacaaagactctgttttatacaatgagaaacttcagaatctcttgccccaaatcgaagcatctcttccaggaagcaaattcctttacgccgatgtctataatcctatgatggagatgatccaaaaccctagcaaatacgggttcaaagagacgaagagaggatgttgtggaacagggttcttggagacgggcttcatgtgtaatgtcttttctcctgtgtgtcaaaatcggtcggagtttatgttctttgactcgattcatccatcggaagctacctataatgtcataggcaatcgtctggatcctctaattcgtggaaagttccaggcttaagtcatcacgagttgcaaaactgacacaattaattttcttgtttctttaatgcgactagttgtggactttcgtttatgaatcaaatgtaactttggc

SEQ ID NO: 41390 - protein, 366 aa, Arabidopsis thaliana
  peptide (1)..(366): Ceres Seq. ID no. 12330751
IHQKQKMSTSKAITLTLFIATTLLAPCNAATNATTKPLFPAILIFGDSTVDTGNNNYPLPTIFRAEHFPYGMDLPDGKANGRFSNGKLISDIIATKLNIKEFIPPFLQPNLSDQDILTGVCFASAGAGYDDLTSLSTQAIRVSEQPNMFKSYIARLKGIVGDKKAMEIINNAFVVVSAGPNDFILNYYEIPSRRLEYPFISGYQDFILKRLENFVRELYSLGVRNVLVGGLPPMGCLPIHMTAKFRNIFRFCLEHHNKDSVLYNEKLQNLLPQIEASLPGSKFLYADVYNPMMEMIQNPSKYGFKETKRGCCGTGFLETGFMCNVFSPVCQNRSEFMFFDSIHPSEATYNVIGNRLDPLIRGKFQA

SEQ ID NO: 41391 - protein, 360 aa, Arabidopsis thaliana
  peptide (1)..(360): Ceres Seq. ID no. 12330752
MSTSKAITLTLFIATTLLAPCNAATNATTKPLFPAILIFGDSTVDTGNNNYPLPTIFRAEHFPYGMDLPDGKANGRFSNGKLISDIIATKLNIKEFIPPFLQPNLSDQDILTGVCFASAGAGYDDLTSLSTQAIRVSEQPNMFKSYIARLKGIVGDKKAMEIINNAFVVVSAGPNDFILNYYEIPSRRLEYPFISGYQDFILKRLENFVRELYSLGVRNVLVGGLPPMGCLPIHMTAKFRNIFRFCLEHHNKDSVLYNEKLQNLLPQIEASLPGSKFLYADVYNPMMEMIQNPSKYGFKETKRGCCGTGFLETGFMCNVFSPVCQNRSEFMFFDSIHPSEATYNVIGNRLDPLIRGKFQA

SEQ ID NO: 41392 - protein, 295 aa, Arabidopsis thaliana
  peptide (1)..(295): Ceres Seq. ID no. 12330753
MDLPDGKANGRFSNGKLISDIIATKLNIKEFIPPFLQPNLSDQDILTGVCFASAGAGYDDLTSLSTQAIRVSEQPNMFKSYIARLKGIVGDKKAMEIINNAFVVVSAGPNDFILNYYEIPSRRLEYPFISGYQDFILKRLENFVRELYSLGVRNVLVGGLPPMGCLPIHMTAKFRNIFRFCLEHHNKDSVLYNEKLQNLLPQIEASLPGSKFLYADVYNPMMEMIQNPSKYGFKETKRGCCGTGFLETGFMCNVFSPVCQNRSEFMFFDSIHPSEATYNVIGNRLDPLIRGKFQA

SEQ ID NO: 41393 - DNA, 1299 bp, Arabidopsis thaliana
  misc_feature (1)..(1299): Ceres Seq. ID no. 12385142
  misc_feature (1)..(1299): Ortholog of  Ceres SEQ ID NO 13648449 as cited in SEQ ID NO 171
  misc_feature (1)..(1299): Ortholog of  Ceres SEQ ID NO 15176325 as cited in SEQ ID NO 52802
  misc_feature (1)..(1299): Ortholog of  Ceres SEQ ID NO 15176313 as cited in SEQ ID NO 52831
aaagtttggatatttattgaaccgagtggtttctttcgttgactcgcccaccatggaagctgaaagtacccaagatatcatcatcgtcggagctggaatctccggccttgccactgcacttgggctccacaggcttgggatcagaagcatagtgctggaatcttctgagcagctgagagcaacaggatttgcactttcattatattttaatgcttggaaggccatggaagctctcggtatttctcagcatattcgcagtctcggtgatcgctttcaaggatgggtggtcagacccatttctgcaggagatcctcctaaagaaatgttatttccagaatctgaagaatatgaggttcgatgcatacagaggaagctcttgttagacgctctagcgggcgaattgcctcaagggaccatacggttctcatctaagcttgttcacatcgaattgtccggacactacaagatggttcatctctccgacgggactatacttaaaaccaaggttttggtagggtgtgatggagtgaagtcagtggttggtaagtggctaggcttcaagaatccggttaaaacttcccgtgtagcaatccgcgggatcgctcatttccagacaggccacgaattagggagaaggttctttcagttttatggcaacggtgttcgttccggtttcatctcatgtgaccaaaacactgtctactggttcctaacccacacctctactgatttagataagaaaaatcatcagaagatcaaacagtttgtgctgaccaagatcaaagacttgcctgacaacatcaagagtatcctggagaccactgatcttgatagtttggtgatgaatccactcatgtatcgacctccctgggaacttctttgggcaaacattgcaaaagacaacgtatgtgttgcaggggatgcacttcacccaatgactcctgatattggacaaggtggttgctcggcgatggaggacggagttatcctcgctcgttgtctcggtgaagcaatgaaagctaagaatatgaaaggtgaaacagaagatgagaacgagagttataggcggattgaagatggtttgaagaagtatgcaggatcgaggaaatggagaagcattgatcttataactacatcatatacagtaggtttcatacagcagagcagaggcaagtggatgaccctgtttagagacaagttcatgtcctctttcctttcttggttgcgtgtgaaaaagtctcatttcaactgtggaagacttagccatgaatgattctcaatgagcaagcacaatgttag

SEQ ID NO: 41394 - protein, 423 aa, Arabidopsis thaliana
  peptide (1)..(423): Ceres Seq. ID no. 12385143
KFGYLLNRVVSFVDSPTMEAESTQDIIIVGAGISGLATALGLHRLGIRSIVLESSEQLRATGFALSLYFNAWKAMEALGISQHIRSLGDRFQGWVVRPISAGDPPKEMLFPESEEYEVRCIQRKLLLDALAGELPQGTIRFSSKLVHIELSGHYKMVHLSDGTILKTKVLVGCDGVKSVVGKWLGFKNPVKTSRVAIRGIAHFQTGHELGRRFFQFYGNGVRSGFISCDQNTVYWFLTHTSTDLDKKNHQKIKQFVLTKIKDLPDNIKSILETTDLDSLVMNPLMYRPPWELLWANIAKDNVCVAGDALHPMTPDIGQGGCSAMEDGVILARCLGEAMKAKNMKGETEDENESYRRIEDGLKKYAGSRKWRSIDLITTSYTVGFIQQSRGKWMTLFRDKFMSSFLSWLRVKKSHFNCGRLSHE

SEQ ID NO: 41395 - protein, 406 aa, Arabidopsis thaliana
  peptide (1)..(406): Ceres Seq. ID no. 12385144
MEAESTQDIIIVGAGISGLATALGLHRLGIRSIVLESSEQLRATGFALSLYFNAWKAMEALGISQHIRSLGDRFQGWVVRPISAGDPPKEMLFPESEEYEVRCIQRKLLLDALAGELPQGTIRFSSKLVHIELSGHYKMVHLSDGTILKTKVLVGCDGVKSVVGKWLGFKNPVKTSRVAIRGIAHFQTGHELGRRFFQFYGNGVRSGFISCDQNTVYWFLTHTSTDLDKKNHQKIKQFVLTKIKDLPDNIKSILETTDLDSLVMNPLMYRPPWELLWANIAKDNVCVAGDALHPMTPDIGQGGCSAMEDGVILARCLGEAMKAKNMKGETEDENESYRRIEDGLKKYAGSRKWRSIDLITTSYTVGFIQQSRGKWMTLFRDKFMSSFLSWLRVKKSHFNCGRLSHE

SEQ ID NO: 41396 - protein, 349 aa, Arabidopsis thaliana
  peptide (1)..(349): Ceres Seq. ID no. 12385145
MEALGISQHIRSLGDRFQGWVVRPISAGDPPKEMLFPESEEYEVRCIQRKLLLDALAGELPQGTIRFSSKLVHIELSGHYKMVHLSDGTILKTKVLVGCDGVKSVVGKWLGFKNPVKTSRVAIRGIAHFQTGHELGRRFFQFYGNGVRSGFISCDQNTVYWFLTHTSTDLDKKNHQKIKQFVLTKIKDLPDNIKSILETTDLDSLVMNPLMYRPPWELLWANIAKDNVCVAGDALHPMTPDIGQGGCSAMEDGVILARCLGEAMKAKNMKGETEDENESYRRIEDGLKKYAGSRKWRSIDLITTSYTVGFIQQSRGKWMTLFRDKFMSSFLSWLRVKKSHFNCGRLSHE

SEQ ID NO: 41397 - DNA, 2190 bp, Arabidopsis thaliana
  misc_feature (1)..(2190): Ceres Seq. ID no. 12395334
  misc_feature (1)..(2190): Ortholog of  Ceres SEQ ID NO 13598865 as cited in SEQ ID NO 0
gattcccttccttgcttctttccccgtcgatctcgctgtgtgacctttttatttagtgactcgagattacataaaatcttctatacactggttccacatctgtttcaatcatggcggagaatggtgaagagaagttacttgctgttgcgcgtcacatagccaaaacacttggccacaatgaatccatggccgatgatatcttacagatcttctccaacttcgacggcagattttctcgcgagaagctcgccgaaggtcaagctggagaagatggatccggagtcgccacactcgagcgagctctaaattcaatagacggtcagatctctcgctttgttgctgcggaccaaccaatttgggctgatcctgcagattcagctgctttcctcgacacaatcgatgagctcgttgcaatcattagagagtggagtcccatggcttcagagaaacctatcggcatctgtctaacacgcgccgacgatatgatgcagcaagctatgttccgcatcgaagaagagttcaggtcgcttatggagcgtggagctgagtctttcggacttaatcctcagggagacgctggtgcgatgaatcatcgtttcgattctgaggaagaagaagatgatgacagagacttcaacaacggtgatgatattcagatcccagtggcacagccactcactgactacgatcttatcattgatgctctcccttcggcgacaattaacgatctacacgagatggctaagcgaatgcttggcgctggatttggtaaggcgtgttctcatgtttatagttcttgtaggagagagtttctggaagaaagtatgtcaaggttagggttacagaagctgagtattgaagaagttcataagatgccgtggcaggagttagaagatgagatagataggtggatcaaagctgctaacgttgctctaagaatcctgtttcctagcgaacgtagactctgtgaccgtgtcttcttcggtttctcctctgctgctgatctttcgtttatggaggtttgtcgtggctctaccattcagcttctgaatttcgcagacgcgattgctattggaagcagatcgcctgagagattgtttaaagtgcttgatgtgtttgagacaatgagggatttgatgcctgaatttgagtctgtgttctcggatcagttttgctcagttcttagaaatgaagcagtaactatttggaaacggttgggagaggcgataagaggtatatttatggagcttgagaatttgatccggcgagacccggctaaagctgcggttccgggcggtggtctccacccgatcactcgttatgtgatgaattacctccgtgcggcttgtagatcccggcaaaccttagagcaagtgtttgaggaaagcaatggtgtcccttctaaagattcaactctgttgactgtacagatgtcttggatcatggagcttctagagagtaacttggaagtaaaatctaaagtgtacaaagatccagctttgtgctatgtgtttctgatgaataatgggagatacattgttcagaaagtcaaagatggagacctaggattgctgttaggagatgattggattcggaaacacaatgtcaaagtgaaacaataccatatgaattatcagagaagctcatggaataagatgctggggttgctgaaggtggataatactgcagcaggcatgaacggtttggggaagaccatgaaggagaagctgaagcagttcaatattcagtttgatgagatatgtaaagtgcattcgacgtgggtagtgtttgacgagcagctgaaagaagagctaaagatctcactggccaggcttttggtaccggcatacgggagcttcatcggcaggttccaaaaccttggagacatagggaaaaacgcagacaagtacatcaagtatggagttgaggacatagaggcgcgtattaacgagctgttcaaagggactaccacgggaagaaaatgaaggtaacgaacacaaaaatagcctcttgtaacatcttcgtaacgaaccacctgctaaatgaccaatagcgaagtcttgcagggaggatttgtaacatgtattgtgtatccttttagacagttagctcagctctgttgtgttgttgtgtaatgttgtattgtaactggatcactttttttgtcattgtaaaaagagaaaacagttg

SEQ ID NO: 41398 - protein, 624 aa, Arabidopsis thaliana
  peptide (1)..(624): Ceres Seq. ID no. 12395335
MAENGEEKLLAVARHIAKTLGHNESMADDILQIFSNFDGRFSREKLAEGQAGEDGSGVATLERALNSIDGQISRFVAADQPIWADPADSAAFLDTIDELVAIIREWSPMASEKPIGICLTRADDMMQQAMFRIEEEFRSLMERGAESFGLNPQGDAGAMNHRFDSEEEEDDDRDFNNGDDIQIPVAQPLTDYDLIIDALPSATINDLHEMAKRMLGAGFGKACSHVYSSCRREFLEESMSRLGLQKLSIEEVHKMPWQELEDEIDRWIKAANVALRILFPSERRLCDRVFFGFSSAADLSFMEVCRGSTIQLLNFADAIAIGSRSPERLFKVLDVFETMRDLMPEFESVFSDQFCSVLRNEAVTIWKRLGEAIRGIFMELENLIRRDPAKAAVPGGGLHPITRYVMNYLRAACRSRQTLEQVFEESNGVPSKDSTLLTVQMSWIMELLESNLEVKSKVYKDPALCYVFLMNNGRYIVQKVKDGDLGLLLGDDWIRKHNVKVKQYHMNYQRSSWNKMLGLLKVDNTAAGMNGLGKTMKEKLKQFNIQFDEICKVHSTWVVFDEQLKEELKISLARLLVPAYGSFIGRFQNLGDIGKNADKYIKYGVEDIEARINELFKGTTTGRK

SEQ ID NO: 41399 - protein, 599 aa, Arabidopsis thaliana
  peptide (1)..(599): Ceres Seq. ID no. 12395336
MADDILQIFSNFDGRFSREKLAEGQAGEDGSGVATLERALNSIDGQISRFVAADQPIWADPADSAAFLDTIDELVAIIREWSPMASEKPIGICLTRADDMMQQAMFRIEEEFRSLMERGAESFGLNPQGDAGAMNHRFDSEEEEDDDRDFNNGDDIQIPVAQPLTDYDLIIDALPSATINDLHEMAKRMLGAGFGKACSHVYSSCRREFLEESMSRLGLQKLSIEEVHKMPWQELEDEIDRWIKAANVALRILFPSERRLCDRVFFGFSSAADLSFMEVCRGSTIQLLNFADAIAIGSRSPERLFKVLDVFETMRDLMPEFESVFSDQFCSVLRNEAVTIWKRLGEAIRGIFMELENLIRRDPAKAAVPGGGLHPITRYVMNYLRAACRSRQTLEQVFEESNGVPSKDSTLLTVQMSWIMELLESNLEVKSKVYKDPALCYVFLMNNGRYIVQKVKDGDLGLLLGDDWIRKHNVKVKQYHMNYQRSSWNKMLGLLKVDNTAAGMNGLGKTMKEKLKQFNIQFDEICKVHSTWVVFDEQLKEELKISLARLLVPAYGSFIGRFQNLGDIGKNADKYIKYGVEDIEARINELFKGTTTGRK

SEQ ID NO: 41400 - protein, 516 aa, Arabidopsis thaliana
  peptide (1)..(516): Ceres Seq. ID no. 12395337
MASEKPIGICLTRADDMMQQAMFRIEEEFRSLMERGAESFGLNPQGDAGAMNHRFDSEEEEDDDRDFNNGDDIQIPVAQPLTDYDLIIDALPSATINDLHEMAKRMLGAGFGKACSHVYSSCRREFLEESMSRLGLQKLSIEEVHKMPWQELEDEIDRWIKAANVALRILFPSERRLCDRVFFGFSSAADLSFMEVCRGSTIQLLNFADAIAIGSRSPERLFKVLDVFETMRDLMPEFESVFSDQFCSVLRNEAVTIWKRLGEAIRGIFMELENLIRRDPAKAAVPGGGLHPITRYVMNYLRAACRSRQTLEQVFEESNGVPSKDSTLLTVQMSWIMELLESNLEVKSKVYKDPALCYVFLMNNGRYIVQKVKDGDLGLLLGDDWIRKHNVKVKQYHMNYQRSSWNKMLGLLKVDNTAAGMNGLGKTMKEKLKQFNIQFDEICKVHSTWVVFDEQLKEELKISLARLLVPAYGSFIGRFQNLGDIGKNADKYIKYGVEDIEARINELFKGTTTGRK

SEQ ID NO: 41401 - DNA, 1250 bp, Arabidopsis thaliana
  misc_feature (1)..(1250): Ceres Seq. ID no. 12602683
  misc_feature (1)..(1250): Ortholog of  Ceres SEQ ID NO 13656147 as cited in SEQ ID NO 64422
  misc_feature (1)..(1250): Ortholog of  Ceres SEQ ID NO 13596496 as cited in SEQ ID NO 68639
aaaaccacactcttcttcgtcttctccgttctctctatatttctcctcaccttcaacgcagctttctcgttctcgtctcagatcgtgttactaacaaacaccgtttctccggcgaaaagctctctgttactaaaaactcacagaacctaaaaatggcggatcaagctatgacggatcaagatcaaggagctgttactctctacagcggcacagccattaccgacgcgaagaaaaaccatccgttctctgttaaggtcggattagctcaggtacttcgtggcggcgccattgttgaagtttcctcggttaaccaagctaagctcgctgaatccgccggcgcatgttctgtaatcgtctcagatccggttcgatctcgcggcggtgttcgtcgtatgccggatccggttctcatcaaagaggtaaaacgagctgtgtctgtacctgtgatggcacgagctcgcgttggtcattttgttgaggctcagatcttggaatctcttgcggntgattacattgacgagagcgagattatctctgttgcggatgatgatcatttcatcaacaaacataatttccgatctccgttcatttgtgggtgccggggatacaaggagaagctttgaggagaatcagaagaaaggtgctgctatgattaggatccaaggagatttaaccgcaacaggtaaacaattgcagagactgtgaagaacgttaggtcattgatgggtgaagttagagtcttgaacaacatggatgatgatgaggtgttcacgtttgctaagaagatttcagcaccgtatgatcttgtggctcagactaagcagatgggtagggttccggttgttcagtttgcatcaggtgggatcacgactcctgctgatgcagctttgatgatgcagctaggttgtgatggggtttttgtgggttctgaggtttttgatggtcctgatccgtttaagaaacttaggagcattgttcaagctgttcaacattacaatgatcctcatgtgttggctgagatgagttctggattggagaatgcaatggagagcttaaatgttcgtggtgacaggattcaagactttggccaaggcagtgtttgatgaaaaggttcgaagctgcaaactttttgggacttctaaagtcgtaatcttttttggttttgagtctcaaaatatcggttgttttttgttaatgctggtgcatatgatccgtttggtttaatcgaaacttgcaacaactaaaacctc

SEQ ID NO: 41402 - protein, 206 aa, Arabidopsis thaliana
  peptide (1)..(206): Ceres Seq. ID no. 12602684
  misc_feature (168)..(168): Xaa is any aa, unknown or other
NHTLLRLLRSLYISPHLQRSFLVLVSDRVTNKHRFSGEKLSVTKNSQNLKMADQAMTDQDQGAVTLYSGTAITDAKKNHPFSVKVGLAQVLRGGAIVEVSSVNQAKLAESAGACSVIVSDPVRSRGGVRRMPDPVLIKEVKRAVSVPVMARARVGHFVEAQILESLAXDYIDESEIISVADDDHFINKHNFRSPFICGCRGYKEKL

SEQ ID NO: 41403 - protein, 156 aa, Arabidopsis thaliana
  peptide (1)..(156): Ceres Seq. ID no. 12602685
  misc_feature (118)..(118): Xaa is any aa, unknown or other
MADQAMTDQDQGAVTLYSGTAITDAKKNHPFSVKVGLAQVLRGGAIVEVSSVNQAKLAESAGACSVIVSDPVRSRGGVRRMPDPVLIKEVKRAVSVPVMARARVGHFVEAQILESLAXDYIDESEIISVADDDHFINKHNFRSPFICGCRGYKEKL

SEQ ID NO: 41404 - protein, 151 aa, Arabidopsis thaliana
  peptide (1)..(151): Ceres Seq. ID no. 12602686
  misc_feature (113)..(113): Xaa is any aa, unknown or other
MTDQDQGAVTLYSGTAITDAKKNHPFSVKVGLAQVLRGGAIVEVSSVNQAKLAESAGACSVIVSDPVRSRGGVRRMPDPVLIKEVKRAVSVPVMARARVGHFVEAQILESLAXDYIDESEIISVADDDHFINKHNFRSPFICGCRGYKEKL

SEQ ID NO: 41405 - DNA, 1398 bp, Arabidopsis thaliana
  misc_feature (1)..(1398): Ceres Seq. ID no. 12329358
  misc_feature (1)..(1398): Ortholog of  Ceres SEQ ID NO 13596433 as cited in SEQ ID NO 68721
  misc_feature (1)..(1398): Ortholog of  Ceres SEQ ID NO 13599169 as cited in SEQ ID NO 0
atctaacttttccagataatatattcaaaattttacagagaggaagaagaagttcccgacacttgtgagagactataaaactatacgatctcctcctctcgctctcttcagatcacaaagttttcgtttttagggttctctcatcgatctcggtttgtgatcttcttcttcatcaatggcgtctagtgataaacaaacaagcccaaagcctccaccttcaccgtctcctctccgtaattccaagttttgtcagtcaaatatgagaattttgatctcaggaggagctggattcattggctctcaccttgttgataagctgatggaaaacgaaaagaatgaggtgattgttgctgataactatttcaccggttcaaaggacaatctcaagaagtggattggtcatccgagatttgaggcttatccgtcatgatgtcacagagccacttctgatcgaggttgatcagatttaccatcttgcatgtcctgcttctcctatcttctacaagtacaaccctgtgaagacaatcaagaccaatgtcattggcacactgaacatgctaggtcttgccaagcgtgttggagcaaggattttgcttacctcaacctcggaggtatatggagatcctcttatccatccccagcccgagagctattggggaaatgtcaacccaattggtgttaggagctgttatgatgaaggcaagcgtgttgctgagaccttgatgtttgactaccacaggcagcatggaattgaaatccgcattgccagaatcttcaacacttatggtccacgcatgaacattgatgatggacgtgttgtaagcaacttcattgctcaagcactccgtggtgaggcattgactgttcagaaaccagggacacagactcgcagtttctgttatgtatctgacatggttgatggacttatgcgcctcatggaaggagatgacactggtcccatcaacatcggtaacccaggtgagtttacaatggtggagttggctgagacagtgaaagagctgattaacccgagcatagagataaagatggttgagaacacaccggatgatccaagacagaggaagccatgacatcacaaaggctataagaagttttgggatgggaaccaaaggtgaagcttcgtgaaggcctgccccttatggaagaagacttcaggctaaggctcggagtccacaagaactaaaactccatcaccgatgatcacacgcaaacgtgaatgcactacataacccagttctacacttttcatattccttggtgcaagtggtttgtttcataaaatatgtttctactttccacagtcagaaattattcctagagaaaaataaagattatgaacgaatgctttttatatttaaggaagataaaaattacttt

SEQ ID NO: 41406 - protein, 178 aa, Arabidopsis thaliana
  peptide (1)..(178): Ceres Seq. ID no. 12329359
MLGLAKRVGARILLTSTSEVYGDPLIHPQPESYWGNVNPIGVRSCYDEGKRVAETLMFDYHRQHGIEIRIARIFNTYGPRMNIDDGRVVSNFIAQALRGEALTVQKPGTQTRSFCYVSDMVDGLMRLMEGDDTGPINIGNPGEFTMVELAETVKELINPSIEIKMVENTPDDPRQRKP

SEQ ID NO: 41407 - protein, 122 aa, Arabidopsis thaliana
  peptide (1)..(122): Ceres Seq. ID no. 12329360
MFDYHRQHGIEIRIARIFNTYGPRMNIDDGRVVSNFIAQALRGEALTVQKPGTQTRSFCYVSDMVDGLMRLMEGDDTGPINIGNPGEFTMVELAETVKELINPSIEIKMVENTPDDPRQRKP

SEQ ID NO: 41408 - protein, 98 aa, Arabidopsis thaliana
  peptide (1)..(98): Ceres Seq. ID no. 12329361
MNIDDGRVVSNFIAQALRGEALTVQKPGTQTRSFCYVSDMVDGLMRLMEGDDTGPINIGNPGEFTMVELAETVKELINPSIEIKMVENTPDDPRQRKP

SEQ ID NO: 41409 - DNA, 1401 bp, Arabidopsis thaliana
  misc_feature (1)..(1401): Ceres Seq. ID no. 12574498
  misc_feature (1)..(1401): Ortholog of  Ceres SEQ ID NO 14308598 as cited in SEQ ID NO 60416
  misc_feature (1)..(1401): Ortholog of  Ceres SEQ ID NO 13502952 as cited in SEQ ID NO 62271
  misc_feature (1)..(1401): Ortholog of  Ceres SEQ ID NO 13502973 as cited in SEQ ID NO 68052
  misc_feature (1)..(1401): Ortholog of  Ceres SEQ ID NO 13596000 as cited in SEQ ID NO 68188
aaagaaccagagagaagccatgtctgtgaaactaaacctatcttcctcaatcctattgattctctttgcggcggcggcgagtaaagagatcggattcgatgaatctaatccaatcaaaatggtctccgacaatctccatgagcttgaagacaccgtcgtccagatcctaggacagtcccgtcatgttctatccttttctcgcttcactcacaggtatgggaagaagtatcagagtgtggaggagatgaagttaagattctctgtttttaaggagaatcttgatttaatcagatccactaataagaaaggcttatcctataaactctctcttaatcagtttgctgacttgacatggcaagagtttcaaagatacaagcttggagctgctcaaaactgttctgctactttaaagggtagccacaagatcactgaagctacagttccagacacaaaagattggagagaagatggtattgttagccctgtgaaagaacagggacattgtggatcttgttggacatttagcacaactggagctcttgaagcagcttaccatcaagcatttggaaaaggaatatctttgtccgagcaacagcttgtggattgtgctggtactttcaataactttggttgtcatggtggacttccttctcaagcctttgaatacattaaatacaacggtgggctcgacacggaggaggcttatccttacaccggaaaagacggtggctgcaaattttcagcgaaaaacatcggtgtacaagtccgtgactctgtcaacattaccctgggtgcagaagatgaactgaagcacgcggtcgggttggtaaggccagtgagtgtggcgtttgaggttgtacatgaattcaggttttataagaagggagtttttactagcaatacatgtggtaacactccaatggatgtaaaccatgcagtgttagcagttggttatggagttgaagacgacgtcccgtactggcttataaagaactcatggggaggtgaatggggagacaatggctacttcaagatggaaatgggaaagaacatgtgtggtgttgcaacatgttcatcgtatccggttgtagcctgaggctgatgtttaaacccgtttacaccttacaagggactgaggcttttggttacttgggatgaatggttgaattgttgtgaatttatatcactagggacttcggagtaattgttttttatacttgtatggttatgtttccaaataatatggttgacactcaatagtcgacagaaaaaagaaaactatttccagataatgtcaagaggcctgactgcctgagactgatgtttaagcccgttaacttacaagggactgaggcttttggttatttgggatgaatggttgaatacttgaattgttataga

SEQ ID NO: 41410 - protein, 364 aa, Arabidopsis thaliana
  peptide (1)..(364): Ceres Seq. ID no. 12574499
KNQREAMSVKLNLSSSILLILFAAAASKEIGFDESNPIKMVSDNLHELEDTVVQILGQSRHVLSFSRFTHRYGKKYQSVEEMKLRFSVFKENLDLIRSTNKKGLSYKLSLNQFADLTWQEFQRYKLGAAQNCSATLKGSHKITEATVPDTKDWREDGIVSPVKEQGHCGSCWTFSTTGALEAAYHQAFGKGISLSEQQLVDCAGTFNNFGCHGGLPSQAFEYIKYNGGLDTEEAYPYTGKDGGCKFSAKNIGVQVRDSVNITLGAEDELKHAVGLVRPVSVAFEVVHEFRFYKKGVFTSNTCGNTPMDVNHAVLAVGYGVEDDVPYWLIKNSWGGEWGDNGYFKMEMGKNMCGVATCSSYPVVA

SEQ ID NO: 41411 - protein, 358 aa, Arabidopsis thaliana
  peptide (1)..(358): Ceres Seq. ID no. 12574500
MSVKLNLSSSILLILFAAAASKEIGFDESNPIKMVSDNLHELEDTVVQILGQSRHVLSFSRFTHRYGKKYQSVEEMKLRFSVFKENLDLIRSTNKKGLSYKLSLNQFADLTWQEFQRYKLGAAQNCSATLKGSHKITEATVPDTKDWREDGIVSPVKEQGHCGSCWTFSTTGALEAAYHQAFGKGISLSEQQLVDCAGTFNNFGCHGGLPSQAFEYIKYNGGLDTEEAYPYTGKDGGCKFSAKNIGVQVRDSVNITLGAEDELKHAVGLVRPVSVAFEVVHEFRFYKKGVFTSNTCGNTPMDVNHAVLAVGYGVEDDVPYWLIKNSWGGEWGDNGYFKMEMGKNMCGVATCSSYPVVA

SEQ ID NO: 41412 - protein, 325 aa, Arabidopsis thaliana
  peptide (1)..(325): Ceres Seq. ID no. 12574501
MVSDNLHELEDTVVQILGQSRHVLSFSRFTHRYGKKYQSVEEMKLRFSVFKENLDLIRSTNKKGLSYKLSLNQFADLTWQEFQRYKLGAAQNCSATLKGSHKITEATVPDTKDWREDGIVSPVKEQGHCGSCWTFSTTGALEAAYHQAFGKGISLSEQQLVDCAGTFNNFGCHGGLPSQAFEYIKYNGGLDTEEAYPYTGKDGGCKFSAKNIGVQVRDSVNITLGAEDELKHAVGLVRPVSVAFEVVHEFRFYKKGVFTSNTCGNTPMDVNHAVLAVGYGVEDDVPYWLIKNSWGGEWGDNGYFKMEMGKNMCGVATCSSYPVVA

SEQ ID NO: 41413 - DNA, 964 bp, Arabidopsis thaliana; identical to SEQ ID NO: 20500
  misc_feature (1)..(964): Ceres Seq. ID no. 13491587
  misc_feature (1)..(964): Ortholog of  Ceres SEQ ID NO 15169711 as cited in SEQ ID NO 54274

SEQ ID NO: 41414 - protein, 244 aa, Arabidopsis thaliana; identical to SEQ ID NO: 20501
  peptide (1)..(244): Ceres Seq. ID no. 13491588

SEQ ID NO: 41415 - protein, 164 aa, Arabidopsis thaliana; identical to SEQ ID NO: 20502
  peptide (1)..(164): Ceres Seq. ID no. 13491589

SEQ ID NO: 41416 - protein, 132 aa, Arabidopsis thaliana; identical to SEQ ID NO: 20503
  peptide (1)..(132): Ceres Seq. ID no. 13491590

SEQ ID NO: 41417 - DNA, 1305 bp, Arabidopsis thaliana; identical to SEQ ID NO: 22202
  misc_feature (1)..(1305): Ceres Seq. ID no. 12334870
  misc_feature (1)..(1305): Ortholog of  Ceres SEQ ID NO 15224874 as cited in SEQ ID NO 55015

SEQ ID NO: 41418 - protein, 385 aa, Arabidopsis thaliana; identical to SEQ ID NO: 22203
  peptide (1)..(385): Ceres Seq. ID no. 12334871

SEQ ID NO: 41419 - protein, 355 aa, Arabidopsis thaliana; identical to SEQ ID NO: 22204
  peptide (1)..(355): Ceres Seq. ID no. 12334872

SEQ ID NO: 41420 - protein, 353 aa, Arabidopsis thaliana; identical to SEQ ID NO: 22205
  peptide (1)..(353): Ceres Seq. ID no. 12334873

SEQ ID NO: 41421 - DNA, 1307 bp, Arabidopsis thaliana
  misc_feature (1)..(1307): Ceres Seq. ID no. 13580557
  misc_feature (1)..(1307): Ortholog of  Ceres SEQ ID NO 15177654 as cited in SEQ ID NO 59933
  misc_feature (1)..(1307): Ortholog of  Ceres SEQ ID NO 14303600 as cited in SEQ ID NO 64632
  misc_feature (1)..(1307): Ortholog of  Ceres SEQ ID NO 14302776 as cited in SEQ ID NO 66919
attttcgtagcgcgcagagagagagagagagggacgatcttttctataactgaaacactactcgaggccaagttgctttagccgtaatcgtcgtcgtccctcttcccgatattatctcttctctgttcttcgatttcgaaaccctaacctcctctctttaattcgcgttttctggatcgaagatggtggcggctggtaaatccgacctttccttgcccaaaactttcgcctgcagtgccttcgctgcttgcgtcggcgaggtatgcacaattccattggacactgctaaagttaggcttcagctccaaaagtctgctcttgctggtgatgttactctgcctaaatatcgaggattgttgggaactgttggtaccatagcaagggaagaagggttacgttcactatggaaaggtgttgtacctggattgcatcgtcaatgcctatttggaggtcttaggattggaatgtatgagccggtgaaaaacttgtatgttggaaaagactttgtaggtgatgttccattgagcaagaaaattcttgctggtttgacaacaggtgcactgggtatcatggtagcaaatcccactgatcttgtgaaagttaggcttcaggcggaaggaaaattagctgcaggtgcgccaagacggtactctggagcgctgaatgcgtattcaacaattgtgagacaggaaggagtccgagctctttggactggtcttggacctaacgtagcaagaaacgctattatcaatgctgctgaattagcgagttacgatcaagtgaaagagactatcttgaagattccagggttcactgacaacgttgtcacacatattctatctggactgggggcaggattctttgctgtttgcatcggttctcctgttgacgtggttaagtcaagaatgatgggagattctggtgcttacaagggcaccattgattgcttcgtcaaaactctgaagagcgacggtcctatggcattttacaagggtttcatccccaactttggacgccttggctcatggaacgtaatcatgtttttgaccctcgaacaggcaaagaagtatgtccgggaactcgatgcgtccaaaagaaactgagacacaaagttttaagcagagggaataagagcaacattgttttcttcttcattttcggtgattgagagaggccagaacttggtcgaatattgttttcggaatagagattcagttttcgagtaaaactgtgaaataaaatttctgtggattgctcatatattggctgtaccatccaacatttatcaaaaatcatacatttttccc

SEQ ID NO: 41422 - protein, 306 aa, Arabidopsis thaliana
  peptide (1)..(306): Ceres Seq. ID no. 15222731
MVAAGKSDLSLPKTFACSAFAACVGEVCTIPLDTAKVRLQLQKSALAGDVTLPKYRGLLGTVGTIAREEGLRSLWKGVVPGLHRQCLFGGLRIGMYEPVKNLYVGKDFVGDVPLSKKILAGLTTGALGIMVANPTDLVKVRLQAEGKLAAGAPRRYSGALNAYSTIVRQEGVRALWTGLGPNVARNAIINAAELASYDQVKETILKIPGFTDNVVTHILSGLGAGFFAVCIGSPVDVVKSRMMGDSGAYKGTIDCFVKTLKSDGPMAFYKGFIPNFGRLGSWNVIMFLTLEQAKKYVRELDASKRN

SEQ ID NO: 41423 - protein, 212 aa, Arabidopsis thaliana
  peptide (1)..(212): Ceres Seq. ID no. 15222732
MYEPVKNLYVGKDFVGDVPLSKKILAGLTTGALGIMVANPTDLVKVRLQAEGKLAAGAPRRYSGALNAYSTIVRQEGVRALWTGLGPNVARNAIINAAELASYDQVKETILKIPGFTDNVVTHILSGLGAGFFAVCIGSPVDVVKSRMMGDSGAYKGTIDCFVKTLKSDGPMAFYKGFIPNFGRLGSWNVIMFLTLEQAKKYVRELDASKRN

SEQ ID NO: 41424 - protein, 177 aa, Arabidopsis thaliana
  peptide (1)..(177): Ceres Seq. ID no. 15222733
MVANPTDLVKVRLQAEGKLAAGAPRRYSGALNAYSTIVRQEGVRALWTGLGPNVARNAIINAAELASYDQVKETILKIPGFTDNVVTHILSGLGAGFFAVCIGSPVDVVKSRMMGDSGAYKGTIDCFVKTLKSDGPMAFYKGFIPNFGRLGSWNVIMFLTLEQAKKYVRELDASKRN

SEQ ID NO: 41425 - DNA, 1251 bp, Arabidopsis thaliana
  misc_feature (1)..(1251): Ceres Seq. ID no. 12327879
  misc_feature (1)..(1251): Ortholog of  Ceres SEQ ID NO 14312281 as cited in SEQ ID NO 59172
  misc_feature (1)..(1251): Ortholog of  Ceres SEQ ID NO 14302299 as cited in SEQ ID NO 68665
aaaaatctcagaaataactttcacaacagagaaagagttccaaatcgtttgtttgtattttgtacgatcaaagttgttggtacttgtaagataatcgaaaccaaagatgcggatgagctgtaatggatgcagagttcttcggaaagggtgtagtgaggattgtagtataaggccgtgtttggcttggatcaaatcgcctgaagcgcaagctaacgcaactgtctttctcgccaagttctatggccgtgctggactcatgaacctcatcaacgccggtcccaatcaccttcgtcctggttagtggtttttcttttaaccttttgatggcagttttgaattatactttccaacgatgccgttttgtcttaggtcattttttgaacctaattagatcaaatatttttgcagggattttccgatcgttgttgcacgaagcttgtgggaggattgtgaatccgatctatggttcggtgggtttgttgtggtcggggaattggcagctttgtcaagacgccgtggaggctgtgatgaaaggagaaccgatcaaagagatcgccacagacgctgcgacgatcggccaaggtccgcctcttaagatctacgacatccgacatatctccaaggatgataactctgccgccgcggctactggctcaaccgatttgaaacttgcgaaaactcgccgtgctaagcgggtctccaccgtcgcgatacaggcggaatcggagggaaagtctgacgaggctagtcacgattcgtcgttgagtcatcagtctgaaatagtggctgctcatgaaggagagagcaaggaatccgagagcaatgtctctgaggttttggcattctcgcctccggctgtgaagggctccggcgagataaagcttgacctaactttaaggctcgaaccggtgtcacgtgcgtatcatgtggtacctgttaagaagagaaggatcggcgtgtttggcacgtgtcagaaggagagcacgtgtaagactgagcttatgctctaagctccgttttagctatactcagaagttttgcccccatcagctctattcggctcggctctgatgatcttcaagtcgagccggtaacttttttttaatatatagttctctatttccccctttaatgttcactttccatttgtgacaaaagaatagagtatatgtacaaaattatttacagagattaattcaagaattggctgtagatattatctattttttaacgaataaaggcaaaaaattt

SEQ ID NO: 41426 - protein, 228 aa, Arabidopsis thaliana
  peptide (1)..(228): Ceres Seq. ID no. 12327880
MAVLNYTFQRCRFVLGHFLNLIRSNIFAGIFRSLLHEACGRIVNPIYGSVGLLWSGNWQLCQDAVEAVMKGEPIKEIATDAATIGQGPPLKIYDIRHISKDDNSAAAATGSTDLKLAKTRRAKRVSTVAIQAESEGKSDEASHDSSLSHQSEIVAAHEGESKESESNVSEVLAFSPPAVKGSGEIKLDLTLRLEPVSRAYHVVPVKKRRIGVFGTCQKESTCKTELML

SEQ ID NO: 41427 - protein, 160 aa, Arabidopsis thaliana
  peptide (1)..(160): Ceres Seq. ID no. 12327881
MKGEPIKEIATDAATIGQGPPLKIYDIRHISKDDNSAAAATGSTDLKLAKTRRAKRVSTVAIQAESEGKSDEASHDSSLSHQSEIVAAHEGESKESESNVSEVLAFSPPAVKGSGEIKLDLTLRLEPVSRAYHVVPVKKRRIGVFGTCQKESTCKTELML

SEQ ID NO: 41428 - DNA, 1963 bp, Arabidopsis thaliana
  misc_feature (1)..(1963): Ceres Seq. ID no. 13488683
  misc_feature (1)..(1963): Ortholog of  Ceres SEQ ID NO 14315146 as cited in SEQ ID NO 52929
  misc_feature (1)..(1963): Ortholog of  Ceres SEQ ID NO 13584538 as cited in SEQ ID NO 64739
  misc_feature (1)..(1963): Ortholog of  Ceres SEQ ID NO 15169643 as cited in SEQ ID NO 64826
  misc_feature (1)..(1963): Ortholog of  Ceres SEQ ID NO 15169647 as cited in SEQ ID NO 64930
gccggtcaagcgtatcaaatacccaatcacgcgaacttttctccgcctcttctccactccaaaattcttctccgtctttctcccgtcaccgtcgaataaagcctgagatctccgaattctgatcagcaactatgcattcaagtcatctccttctcgaggaaccgatcaggatgacttcaatcctcgaaccttctaaatcaagtttcttcccggctttgactaagattgttgggactctaggtccgaaatctcgatccgtcgaggtgattgctggttgtctcaaagctggaatgtccgtggctcgattcgatttctcttggtgcgatgctgattatcaccaggagacgctggagaatctgaagatagctgtgaagagcactaagaagctttgtgctgttatgctagacactgtaggacctgagttgcaagttattaacaagactgagaaagctatttctcttaaagctgatggccttgtaactttgactccgagtcaagatcaagaagcctcctctgaagtccttcccattaattttgatgggttagcgaaggcggttaagaaaggagacactatctttgttggacaatacctcttcactggtagtgaaacaacttcagtttggcttgaggttgaagaagttaaaggagatgatgtcatttgtatttcaaggaatgctgctactctgggtggtccgttattcacattgcacgtctctcaagttcacattgatatgccaaccctaactgagaaggataaggaggttataagtacatggggagttcagaataagatcgactttctctcattatcttattgtcgacatgcagaagatgttcgccaggcccgtgagttgcttaacagttgtggtgacctctctcaaacacaaatatttgcgaagattgagaatgaagagggactaacccactttgacgaaattctacaagaagcagatggcattattctttctcgtgggaatttgggtatcgatctacctccggaaaaggtgtttttgttccaaaaggctgctctttacaagtgtaacatggctggaaagcctgccgttcttactcgtgttgtagacagtatgacagacaatctgcggccaactcgtgcagaggcaactgatgttgctaatgctgttttagatggaagtgatgcaattcttcttggtgctgagactcttcgtggattgtaccctgttgaaaccatatcaactgttggtagaatctgttgtgaggcagagaaagttttcaaccaagatttgttctttaagaagactgtcaagtatgttggagaaccaatgactcacttggaatctattgcttcttctgctgtacgggcagcaatcaaggttaaggcatccgtaattatatgcttcacctcgtctggcagagcagcaaggttgattgccaaataccgtccaactatgcccgttctctctgttgtcattccccgacttacgacaaatcagctgaagtggagctttagcggagcctttgaggcaaggcagtcacttattgtcagaggtcttttccccatgcttgctgatcctcgtcaccctgcggaatcaacaagtgcaacaaatgagtcggttcttaaagtggctctagaccatgggaagcaagccggagtgatcaagtcacatgacagagttgtggtctgtcagaaagtgggagatgcgtccgtggtcaaaatcatcgagctagaggattagaagaagcagagtgagtcgttgtctcggtcttttttgttctgttactaatcaattttatttccttcactaaaactcttggtgccgtccaagaaaaatccttgcaatcattgtttctcgccggctatatgctagataccggagtgaaaatatatctcctgggcttttgttttcgtatttaggagattgatgtttccaagttatgatataaaccactttccactttatgcataatatctccatcccctagt

SEQ ID NO: 41429 - protein, 527 aa, Arabidopsis thaliana
  peptide (1)..(527): Ceres Seq. ID no. 13488684
MHSSHLLLEEPIRMTSILEPSKSSFFPALTKIVGTLGPKSRSVEVIAGCLKAGMSVARFDFSWCDADYHQETLENLKIAVKSTKKLCAVMLDTVGPELQVINKTEKAISLKADGLVTLTPSQDQEASSEVLPINFDGLAKAVKKGDTIFVGQYLFTGSETTSVWLEVEEVKGDDVICISRNAATLGGPLFTLHVSQVHIDMPTLTEKDKEVISTWGVQNKIDFLSLSYCRHAEDVRQARELLNSCGDLSQTQIFAKIENEEGLTHFDEILQEADGIILSRGNLGIDLPPEKVFLFQKAALYKCNMAGKPAVLTRVVDSMTDNLRPTRAEATDVANAVLDGSDAILLGAETLRGLYPVETISTVGRICCEAEKVFNQDLFFKKTVKYVGEPMTHLESIASSAVRAAIKVKASVIICFTSSGRAARLIAKYRPTMPVLSVVIPRLTTNQLKWSFSGAFEARQSLIVRGLFPMLADPRHPAESTSATNESVLKVALDHGKQAGVIKSHDRVVVCQKVGDASVVKIIELED

SEQ ID NO: 41430 - protein, 514 aa, Arabidopsis thaliana
  peptide (1)..(514): Ceres Seq. ID no. 13488685
MTSILEPSKSSFFPALTKIVGTLGPKSRSVEVIAGCLKAGMSVARFDFSWCDADYHQETLENLKIAVKSTKKLCAVMLDTVGPELQVINKTEKAISLKADGLVTLTPSQDQEASSEVLPINFDGLAKAVKKGDTIFVGQYLFTGSETTSVWLEVEEVKGDDVICISRNAATLGGPLFTLHVSQVHIDMPTLTEKDKEVISTWGVQNKIDFLSLSYCRHAEDVRQARELLNSCGDLSQTQIFAKIENEEGLTHFDEILQEADGIILSRGNLGIDLPPEKVFLFQKAALYKCNMAGKPAVLTRVVDSMTDNLRPTRAEATDVANAVLDGSDAILLGAETLRGLYPVETISTVGRICCEAEKVFNQDLFFKKTVKYVGEPMTHLESIASSAVRAAIKVKASVIICFTSSGRAARLIAKYRPTMPVLSVVIPRLTTNQLKWSFSGAFEARQSLIVRGLFPMLADPRHPAESTSATNESVLKVALDHGKQAGVIKSHDRVVVCQKVGDASVVKIIELED

SEQ ID NO: 41431 - protein, 474 aa, Arabidopsis thaliana
  peptide (1)..(474): Ceres Seq. ID no. 13488686
MSVARFDFSWCDADYHQETLENLKIAVKSTKKLCAVMLDTVGPELQVINKTEKAISLKADGLVTLTPSQDQEASSEVLPINFDGLAKAVKKGDTIFVGQYLFTGSETTSVWLEVEEVKGDDVICISRNAATLGGPLFTLHVSQVHIDMPTLTEKDKEVISTWGVQNKIDFLSLSYCRHAEDVRQARELLNSCGDLSQTQIFAKIENEEGLTHFDEILQEADGIILSRGNLGIDLPPEKVFLFQKAALYKCNMAGKPAVLTRVVDSMTDNLRPTRAEATDVANAVLDGSDAILLGAETLRGLYPVETISTVGRICCEAEKVFNQDLFFKKTVKYVGEPMTHLESIASSAVRAAIKVKASVIICFTSSGRAARLIAKYRPTMPVLSVVIPRLTTNQLKWSFSGAFEARQSLIVRGLFPMLADPRHPAESTSATNESVLKVALDHGKQAGVIKSHDRVVVCQKVGDASVVKIIELED

SEQ ID NO: 41432 - DNA, 633 bp, Arabidopsis thaliana
  misc_feature (1)..(633): Ceres Seq. ID no. 13488049
  misc_feature (1)..(633): Ortholog of  Ceres SEQ ID NO 12626722 as cited in SEQ ID NO 66993
gaatgcgtttccggttctcttctctcgtcggagttctgaggtaaaaaaagaataaggagaagaagaaaagcaaaagcataaaagagagtagcaaagactgagaatggaaagcttggacactaattttcctgtgcgccatagaaaggtctcgtttgaaagtaagggaaacaagacagagattgtgatctgcagctatgaagatcatatccttatcatagcaacacagattggtgccatgggaactatattgcacgcaaggaaggaagaagggatgtctgttgaaccaacatttagtgtttcagtgatattcggaaagcgagacgagccaatgctgacagcaactgctcgaagactcattgaacacataagttctattgttccctcgaagcctctggttctctcacttggtctcaaagatcattcttcggagacgttgaaggaaatagtagcgacagtgattgagaatcgcctttggtaatacatattgttgtccatgttaaaaggagaacgagaagatgttttatgttttagtcttggttgatataattagcatggagttgtggaatcttttcttgtttatactgaaaacattgtttttgagataaaagttaacaacaagtacacatttttttc

SEQ ID NO: 41433 - protein, 124 aa, Arabidopsis thaliana
  peptide (1)..(124): Ceres Seq. ID no. 13488050
MESLDTNFPVRHRKVSFESKGNKTEIVICSYEDHILIIATQIGAMGTILHARKEEGMSVEPTFSVSVIFGKRDEPMLTATARRLIEHISSIVPSKPLVLSLGLKDHSSETLKEIVATVIENRLW

SEQ ID NO: 41434 - protein, 80 aa, Arabidopsis thaliana
  peptide (1)..(80): Ceres Seq. ID no. 13488051
MGTILHARKEEGMSVEPTFSVSVIFGKRDEPMLTATARRLIEHISSIVPSKPLVLSLGLKDHSSETLKEIVATVIENRLW

SEQ ID NO: 41435 - protein, 68 aa, Arabidopsis thaliana
  peptide (1)..(68): Ceres Seq. ID no. 13488052
MSVEPTFSVSVIFGKRDEPMLTATARRLIEHISSIVPSKPLVLSLGLKDHSSETLKEIVATVIENRLW

SEQ ID NO: 41436 - DNA, 1172 bp, Arabidopsis thaliana
  misc_feature (1)..(1172): Ceres Seq. ID no. 13491391
  misc_feature (1)..(1172): Ortholog of  Ceres SEQ ID NO 13593955 as cited in SEQ ID NO 54278
  misc_feature (1)..(1172): Ortholog of  Ceres SEQ ID NO 13597380 as cited in SEQ ID NO 64054
  misc_feature (1)..(1172): Ortholog of  Ceres SEQ ID NO 12625474 as cited in SEQ ID NO 64169
cagaaaaattttggacttattttcgatatgtttaggggaaaaatatttgtgttatcattattttctatttacgtcctctcatcagcggctgaaaaaaatacatcattttctgcgctttttgcttttggtgattcagtcttagatacgggaaacaataattttcttcttactcttctcaaaggaaattattggccatatggtttgagttttgactataaatttccgacgggaagattcggaaatggaagagttttcaccgatatagttgccgaaggtttacagatcaaaagacttgtaccagcttatagcaagattcgtcgcatcagttctgaagaccttaagactggcgtttgttttgcatcaggtggttcaggaattgacgatcttacatcccgaacactgagagttttatcggcaggtgaccaagtaaaagactttaaagactatttgaagaaactaagaagagtagtgaaacgtaagaaaaaagtaaaagaaatagtttcaaacgctgtgtttcttatttctgaaggaaataatgatcttggatactttgtcgctcccgctcttcttcgattacagtccacaacaacatacaccagtaaaatggttgtttggaccagaaagtttctaaaagatttatatgatcttggagcgagaaaatttgcggtgatgggagtgatgcctgtgggatgtttgcctatccatcgagcctcattcggtggggtattcggatggtgtaacttcctctttaatagagttacggaggacttcaacatgaaattgcagaaaggtcttacaagttacgcagtagaatatgatttcaaagatgcaaagtttgtttacgtcgacatatacggtactcttatggatcttgtcaaaaatcctatggcctatgggtttacagaagcgaaaaaagcttgttgttgtatgccgaatgcaataataccatgcttccatccagataaatacgtcttctatgactttgctcacccttcccagaaagcctacgaagtaatatctaaacctattgtctatcagatagcgaaaggccttgcctagctaattccttatttcctacaatgttttattataatctttgaaaattatcaccatatcgataaatatatgtaaatgtataagattcatgacaatctattcgtttttcttattgc

SEQ ID NO: 41437 - protein, 352 aa, Arabidopsis thaliana
  peptide (1)..(352): Ceres Seq. ID no. 13491392
QKNFGLIFDMFRGKIFVLSLFSIYVLSSAAEKNTSFSALFAFGDSVLDTGNNNFLLTLLKGNYWPYGLSFDYKFPTGRFGNGRVFTDIVAEGLQIKRLVPAYSKIRRISSEDLKTGVCFASGGSGIDDLTSRTLRVLSAGDQVKDFKDYLKKLRRVVKRKKKVKEIVSNAVFLISEGNNDLGYFVAPALLRLQSTTTYTSKMVVWTRKFLKDLYDLGARKFAVMGVMPVGCLPIHRASFGGVFGWCNFLFNRVTEDFNMKLQKGLTSYAVEYDFKDAKFVYVDIYGTLMDLVKNPMAYGFTEAKKACCCMPNAIIPCFHPDKYVFYDFAHPSQKAYEVISKPIVYQIAKGLA

SEQ ID NO: 41438 - protein, 343 aa, Arabidopsis thaliana
  peptide (1)..(343): Ceres Seq. ID no. 13491393
MFRGKIFVLSLFSIYVLSSAAEKNTSFSALFAFGDSVLDTGNNNFLLTLLKGNYWPYGLSFDYKFPTGRFGNGRVFTDIVAEGLQIKRLVPAYSKIRRISSEDLKTGVCFASGGSGIDDLTSRTLRVLSAGDQVKDFKDYLKKLRRVVKRKKKVKEIVSNAVFLISEGNNDLGYFVAPALLRLQSTTTYTSKMVVWTRKFLKDLYDLGARKFAVMGVMPVGCLPIHRASFGGVFGWCNFLFNRVTEDFNMKLQKGLTSYAVEYDFKDAKFVYVDIYGTLMDLVKNPMAYGFTEAKKACCCMPNAIIPCFHPDKYVFYDFAHPSQKAYEVISKPIVYQIAKGLA

SEQ ID NO: 41439 - DNA, 1314 bp, Arabidopsis thaliana
  misc_feature (1)..(1314): Ceres Seq. ID no. 12327768
  misc_feature (1)..(1314): Ortholog of  Ceres SEQ ID NO 14313413 as cited in SEQ ID NO 58766
  misc_feature (1)..(1314): Ortholog of  Ceres SEQ ID NO 15171109 as cited in SEQ ID NO 59576
agatatgggagaacggtttttccgaaatgagatgccggagtttgtaccggaagatttatccggagaagaagaaactgttaccgaatgtaaagattcgttgacgaaactgctatcacttccgtacaaatcattctcagagaagcttcacagatatgctctaagcatcaaagataaagtagtctgggagacatgggaacgatctggaaaacgtgttcgagattataacttgtatactggagttcttgggacagcttatctcttgttcaaatcttatcaggttactagaaatgaagatgatcttaagctatgcttagagaatgttgaagcttgtgatgtagcttcaagagattctgagcgagtgacatttatatgtggctatgctggtgtatgtgctcttggtgctgttgcagcgaagtgtttaggtgatgaccagttatatgatcgttacttagcccgtttccgaggggcttcctagtgacttgccatatgagttgctatatggtagagcaggatacttgtgggcgtgtttgttcttgaataagcatattggtcaggagatatatcatctgaacgaatgagatcagtggttgaggaaatcttcagggcaggaagacaactcgggaataaaggaacttgtccattgatgtatgagtggcacgggaagaggtactggggggctgcacacggtttagctgggatcatgaatgttttgatgcatacggaacttgaaccagatgaaatcaaagatgtcaaaggtacactaagctatatgatacaaaaccgttttcctagcgggaattacctatctagtgaaggaagcaaatcagatcgccttgttcactggtgtcacggtgctcctggtgttgctctcacacttgtaaaggcagctcaggtttataacactaaggaatttgtagaggcagcaatggaggcaggagaagttgtgtggagccgtggattgcttaaacgagtaggaatctgtcacggtatcagcggaaacacatacgtgtttctttctctataccggttaacaagaaacccaaagtatttgtaccgcgctaaagctttcgcgtctttcctactcgataaatcagagaagttaatctcagaaggtcaaatgcatggaggagatagacccttctctctctttgaaggtatcggaggaatggcctacatgttactcgacatgaatgatccaacacaagctctgtttccaggttatgaactctaaactgtataaaacttacactgtaacaataagcttagatactgaaatgtagaatagctgtctatattaataagattttatacatc

SEQ ID NO: 41440 - protein, 218 aa, Arabidopsis thaliana
  peptide (1)..(218): Ceres Seq. ID no. 12327769
MRSVVEEIFRAGRQLGNKGTCPLMYEWHGKRYWGAAHGLAGIMNVLMHTELEPDEIKDVKGTLSYMIQNRFPSGNYLSSEGSKSDRLVHWCHGAPGVALTLVKAAQVYNTKEFVEAAMEAGEVVWSRGLLKRVGICHGISGNTYVFLSLYRLTRNPKYLYRAKAFASFLLDKSEKLISEGQMHGGDRPFSLFEGIGGMAYMLLDMNDPTQALFPGYEL

SEQ ID NO: 41441 - protein, 195 aa, Arabidopsis thaliana
  peptide (1)..(195): Ceres Seq. ID no. 12327770
MYEWHGKRYWGAAHGLAGIMNVLMHTELEPDEIKDVKGTLSYMIQNRFPSGNYLSSEGSKSDRLVHWCHGAPGVALTLVKAAQVYNTKEFVEAAMEAGEVVWSRGLLKRVGICHGISGNTYVFLSLYRLTRNPKYLYRAKAFASFLLDKSEKLISEGQMHGGDRPFSLFEGIGGMAYMLLDMNDPTQALFPGYEL

SEQ ID NO: 41442 - protein, 176 aa, Arabidopsis thaliana
  peptide (1)..(176): Ceres Seq. ID no. 12327771
MNVLMHTELEPDEIKDVKGTLSYMIQNRFPSGNYLSSEGSKSDRLVHWCHGAPGVALTLVKAAQVYNTKEFVEAAMEAGEVVWSRGLLKRVGICHGISGNTYVFLSLYRLTRNPKYLYRAKAFASFLLDKSEKLISEGQMHGGDRPFSLFEGIGGMAYMLLDMNDPTQALFPGYEL

SEQ ID NO: 41443 - DNA, 2925 bp, Arabidopsis thaliana
  misc_feature (1)..(2925): Ceres Seq. ID no. 12421325
  misc_feature (1)..(2925): Ortholog of  Ceres SEQ ID NO 14313575 as cited in SEQ ID NO 58703
aaaaaaaaaaaacttttcaaattcatctttggtttctgcagcagcaacaacaaccgagccctgttcgttagggttttcggtttttgttagcttttcttcttcttcttcttcgtttccttccacctgaattgttgtaaccatggcggagaaagtatcggaggacgttatgcttctacacggtgacctcgatttgaaaattgttaaggctaggaggttacctaacatggatatgttctcagaacatttgcgccgtctcttcaccgcctgtaacgcctgtgctagacccaccgataccgatgatgtcgatcccagagataaaggcgaattcggtgataaaaacatccgtagccaccgtaaggttatcaccagcgatccttacgtcaccgtcgtcgttcctcaagcgactctagctcgaacacgtgttttgaaaaactcacaagagcctctttgggacgagaaattcaacatttctatagcgcatccgtttgcttatctcgagttccaggtcaaagacgacgatgttttcggtgctcaaatcattggcacggctaagatcccggttcgagacatcgcatcgggagaacgcatttctggttggtttcctgtactcggtgcttcgggaaaaccgcctaaggcagaaactgctattttcatcgatatgaaatttactccgtttgaccagatccatagctaccgatgtggaatcgccggagatccggagcgtaggggtgttagacggacttatttccctgtgaggaaaggaagtcaggtgaggctttaccaggacgctcatgttatggacggaacgttgccggcgattgggttagataacgggaaagtttatgagcatgggaagtgttgggaagatatatgttatgctatatctgaggctcaccatatgatttacattgttggttggtctatcttccataagattaagcttgttagggaaacaaaagttccaagagataaggatatgacgcttggggaattgctcaaatacaaatcccaggaaggtgttcgagttttgctacttgtatgggatgataagacttctcatgataagtttgggataaaaacgcctggagttatggggacacatgatgaggagactaggaagttcttcaagcattcttctgtgatatgcgttttgtcaccccggtatgccagcagtaagcttgggttgttcaaacaacaggttgttggaactctcttcacgcaccatcaaaagtgtgttcttgtagacactcaggctgttggtaataatcgcaaggtcaccgcttttattggaggtctagatctttgtgatggccgttatgacacacctgagcataggatactccacgatcttgacactgtatttaaggatgatttccacaatcctacatttccagctggtaccaaggccccaagacaaccttggcacgatttgcactgtaggatagatgggcctgcggcatatgatgttctcataaactttgagcagcgatggagaaaggcaacacgatggaaggagtttagcttacgtttaaaggggaaaactcactggcaagatgatgctttgatccggatagggcgtatatcatggattctgagtccagtgtttaaatttctgaaggatggtacttcgataattccagaggacgatccatgtgtttgggtttctaaagaagatgatccagagaactggcatgttcagatattccgttctatcgactcaggatccgtgaaaggatttccaaaatatgaagatgaggctgaggcccagcatctggaatgtgccaagcgtcttgttgtagataaaagcatccagactgcatacatccagacaatcagatctgctcagcatttcatatatatcgagaatcagtatttcctgggttcttcttatgcttggccttcttatagagacgcaggagctgacaatcttattcctatggagttggcactaaagattgttagcaaaatcagagctaaggaaagatttgccgtatatgttgtcataccattgtggcctgaaggcgacccaaagtctggccctgtgcaagaaattctatattggcagagccaaactatgcagatgatgtatgatgttatagcaaaagaactgaaagcggtgcaatcagatgctcatcctctcgattaccttaacttttactgccttggtaaacgagagcagcttccagatgatatgccagccaccaatggcagtgtggtatcagattcttataatttccagcgtttcatgatttacgtgcacgcaaaagggatgatagtagatgatgagtatgtactcatgggatctgctaatatcaaccaaagatctatggcaggcaccaaagatactgaaatcgccatgggcgcataccaacctaatcatacatgggctcacaagggaagacacccacgtggccaggtgtatggatacagaatgtcactatgggcagagcatttaggcaaaactggagatgagtttgtggagccatcagatctggaatgtctgaagaaggtgaacacaatctctgaagaaaactggaaaagattcatagacccgaaattctcagagctacaaggtcacttaataaagtatcctctacaagtagacgttgatggtaaagtaagccctcttcctgattacgagaccttcccagatgttggtggtaagatcattggagctcattccatggctcttcctgacactttaaccacgtaatgtgaatgttcaatgtaaatttcagcatttgttttggggtttcttttgatcctgaataatattagctgaaagtgttgtttgagttgttgtacatttaactgtgttgtttcttttttatacattcttttgtgattgtcgtcaaatatttgttggggtgcaaaatgtagagatcgtgagtgagtgaagaggcaaaataatttgaggatattcta

SEQ ID NO: 41444 - protein, 857 aa, Arabidopsis thaliana
  peptide (1)..(857): Ceres Seq. ID no. 12421326
MAEKVSEDVMLLHGDLDLKIVKARRLPNMDMFSEHLRRLFTACNACARPTDTDDVDPRDKGEFGDKNIRSHRKVITSDPYVTVVVPQATLARTRVLKNSQEPLWDEKFNISIAHPFAYLEFQVKDDDVFGAQIIGTAKIPVRDIASGERISGWFPVLGASGKPPKAETAIFIDMKFTPFDQIHSYRCGIAGDPERRGVRRTYFPVRKGSQVRLYQDAHVMDGTLPAIGLDNGKVYEHGKCWEDICYAISEAHHMIYIVGWSIFHKIKLVRETKVPRDKDMTLGELLKYKSQEGVRVLLLVWDDKTSHDKFGIKTPGVMGTHDEETRKFFKHSSVICVLSPRYASSKLGLFKQQVVGTLFTHHQKCVLVDTQAVGNNRKVTAFIGGLDLCDGRYDTPEHRILHDLDTVFKDDFHNPTFPAGTKAPRQPWHDLHCRIDGPAAYDVLINFEQRWRKATRWKEFSLRLKGKTHWQDDALIRIGRISWILSPVFKFLKDGTSIIPEDDPCVWVSKEDDPENWHVQIFRSIDSGSVKGFPKYEDEAEAQHLECAKRLVVDKSIQTAYIQTIRSAQHFIYIENQYFLGSSYAWPSYRDAGADNLIPMELALKIVSKIRAKERFAVYVVIPLWPEGDPKSGPVQEILYWQSQTMQMMYDVIAKELKAVQSDAHPLDYLNFYCLGKREQLPDDMPATNGSVVSDSYNFQRFMIYVHAKGMIVDDEYVLMGSANINQRSMAGTKDTEIAMGAYQPNHTWAHKGRHPRGQVYGYRMSLWAEHLGKTGDEFVEPSDLECLKKVNTISEENWKRFIDPKFSELQGHLIKYPLQVDVDGKVSPLPDYETFPDVGGKIIGAHSMALPDTLTT

SEQ ID NO: 41445 - protein, 848 aa, Arabidopsis thaliana
  peptide (1)..(848): Ceres Seq. ID no. 12421327
MLLHGDLDLKIVKARRLPNMDMFSEHLRRLFTACNACARPTDTDDVDPRDKGEFGDKNIRSHRKVITSDPYVTVVVPQATLARTRVLKNSQEPLWDEKFNISIAHPFAYLEFQVKDDDVFGAQIIGTAKIPVRDIASGERISGWFPVLGASGKPPKAETAIFIDMKFTPFDQIHSYRCGIAGDPERRGVRRTYFPVRKGSQVRLYQDAHVMDGTLPAIGLDNGKVYEHGKCWEDICYAISEAHHMIYIVGWSIFHKIKLVRETKVPRDKDMTLGELLKYKSQEGVRVLLLVWDDKTSHDKFGIKTPGVMGTHDEETRKFFKHSSVICVLSPRYASSKLGLFKQQVVGTLFTHHQKCVLVDTQAVGNNRKVTAFIGGLDLCDGRYDTPEHRILHDLDTVFKDDFHNPTFPAGTKAPRQPWHDLHCRIDGPAAYDVLINFEQRWRKATRWKEFSLRLKGKTHWQDDALIRIGRISWILSPVFKFLKDGTSIIPEDDPCVWVSKEDDPENWHVQIFRSIDSGSVKGFPKYEDEAEAQHLECAKRLVVDKSIQTAYIQTIRSAQHFIYIENQYFLGSSYAWPSYRDAGADNLIPMELALKIVSKIRAKERFAVYVVIPLWPEGDPKSGPVQEILYWQSQTMQMMYDVIAKELKAVQSDAHPLDYLNFYCLGKREQLPDDMPATNGSVVSDSYNFQRFMIYVHAKGMIVDDEYVLMGSANINQRSMAGTKDTEIAMGAYQPNHTWAHKGRHPRGQVYGYRMSLWAEHLGKTGDEFVEPSDLECLKKVNTISEENWKRFIDPKFSELQGHLIKYPLQVDVDGKVSPLPDYETFPDVGGKIIGAHSMALPDTLTT

SEQ ID NO: 41446 - protein, 829 aa, Arabidopsis thaliana
  peptide (1)..(829): Ceres Seq. ID no. 12421328
MDMFSEHLRRLFTACNACARPTDTDDVDPRDKGEFGDKNIRSHRKVITSDPYVTVVVPQATLARTRVLKNSQEPLWDEKFNISIAHPFAYLEFQVKDDDVFGAQIIGTAKIPVRDIASGERISGWFPVLGASGKPPKAETAIFIDMKFTPFDQIHSYRCGIAGDPERRGVRRTYFPVRKGSQVRLYQDAHVMDGTLPAIGLDNGKVYEHGKCWEDICYAISEAHHMIYIVGWSIFHKIKLVRETKVPRDKDMTLGELLKYKSQEGVRVLLLVWDDKTSHDKFGIKTPGVMGTHDEETRKFFKHSSVICVLSPRYASSKLGLFKQQVVGTLFTHHQKCVLVDTQAVGNNRKVTAFIGGLDLCDGRYDTPEHRILHDLDTVFKDDFHNPTFPAGTKAPRQPWHDLHCRIDGPAAYDVLINFEQRWRKATRWKEFSLRLKGKTHWQDDALIRIGRISWILSPVFKFLKDGTSIIPEDDPCVWVSKEDDPENWHVQIFRSIDSGSVKGFPKYEDEAEAQHLECAKRLVVDKSIQTAYIQTIRSAQHFIYIENQYFLGSSYAWPSYRDAGADNLIPMELALKIVSKIRAKERFAVYVVIPLWPEGDPKSGPVQEILYWQSQTMQMMYDVIAKELKAVQSDAHPLDYLNFYCLGKREQLPDDMPATNGSVVSDSYNFQRFMIYVHAKGMIVDDEYVLMGSANINQRSMAGTKDTEIAMGAYQPNHTWAHKGRHPRGQVYGYRMSLWAEHLGKTGDEFVEPSDLECLKKVNTISEENWKRFIDPKFSELQGHLIKYPLQVDVDGKVSPLPDYETFPDVGGKIIGAHSMALPDTLTT

SEQ ID NO: 41447 - DNA, 2404 bp, Arabidopsis thaliana
  misc_feature (1)..(2404): Ceres Seq. ID no. 12329382
  misc_feature (1)..(2404): Ortholog of  Ceres SEQ ID NO 13657677 as cited in SEQ ID NO 66119
gtggccgtctttttcaaaaccttagacaatgagtatcatgctatcaatttcccggcgccagaactcttatattctgctcaaccattctcgattcctccggcgtttttcttatgatgttgacccacggccggaaatcaaatcggagagccaggaatttgtagtagtcaaatttgtgaaaactcttcaaaataccccgcaacatgattgggcgtcgagcgagtcgctaagtgcgcttgtcgtatcttcttcttctgcttctcctttagtattctcgcaaatcacgcggcggctaggatcgtattctctagcaatctcgttcttcgagtacctggatgcgaagtctcagtctctgaaacgccgtgaagaatctctctccttggcgcttcagtcggtcattgaattcgccggtagtgaaccggacccgcgtgataaacttctccgtctctacgagatcgccaaagagaagaacattcctcttactatcgttgccactaagcttctgatccgatggtttgggcgtatgggtatggtgaatcagtcggttcttgtatacgaaagactcgattcgaatatgaaaaactcgcaggttcgtaatgttgtggtagacgtcttgctaagaaatggacttgtggatgatgccttcaaggtgctcgacgaaatgcttcagaaagaatctgtttttcctcctaatagaatcacagcggatattgtgttacacgaggtttggaaggaaaggcttttgacagaagaaaagataattgctttgatttcaagatttagctctcatggtgtctccccaaactctgtttggttgactcggtttatatcaagtctatgcaaaaatgctcgcgccaatactgcttgggatattttgagcgacctgatgaagaacaaaaccccacttgaagctcctcccttcaatgcgcttttgtcttgcttaggaaggaatatggacattagtagaatgaatgatttagtcttgaagatggatgaggtgaaaatccggcctgatgttgtgactttagggattcttattaacactttatgcaaatcaagaagggtagatgaagctctcgaagtttttgaacaaatgcgtggaaagagaactgatgatggaaatgtgattaaagctgattcgattcattttaatactctcattgacgggctctgcaaggtggggaggttgaaagaagcagaggagttattggtaaggatgaaactggaagagagatgtgtgcccaatgcagttacttacaattgcttgattgatgggtattgcagagctggaaagcttgagacggctaaagaagtcgtttctcggatgaaagaggacgagattaaacctaatgtggtaactgttaatacaatcgttggtgggatgtgcaggcaccatggattgaacatggcggttgttttctttatggatatggaaaaggaaggcgtgaaagggaatgtggttacttatatgacattgattcatgcttgttgcagcgtcagtaatgtagagaaggctatgtattggtatgaaaaaatgttggaagctggttgttctcctgatgcaaagatctattatgctttgatctctggattgtgccaagttagacgggatcatgacgccattagagtggtggagaaactgaaagaaggagggttttctcttgacttattggcttacaacatgcttattgggttgttttgtgataagaataatgcagagaaagtctatgagatgctaaccgatatggaaaaagaagggaagaaacctgattccatcacttacaacactctgatttcgtttttcggtaaacacaaggacttcgagagtgttgagagaatgatggagcagatgagagaagacgggttagacccgactgtcacgacatatggagcggtgattgacgcttattgctcagtcggcgaattagacgaagcattgaagctctttaaggacatgggtttgcactcaaaggtcaatccgaacactgtaatatacaacattctcataaacgcattttctaagctggggaatttcgggcaagcgctctctctgaaagaggaaatgaagatgaagatggtgagacctaatgttgaaacttacaatgccttgtttaagtgtcttaacgagaaaacccaaggagagacattacttaaactgatggatgagatggtcgaacagtcttgtgaaccaaatcagatcacaatggagattctaatggagcgtctctcaggttctgatgagttagttaagctgaggaagtttatgcaaggctactctgttgcttcgccgaccgagaaagcttcacctttcgatgtctttagcttgggataatgttcttttagatacagtaaccattactataatgtttttaataatttcttgattatgcattttatataattacgc

SEQ ID NO: 41448 - protein, 766 aa, Arabidopsis thaliana
  peptide (1)..(766): Ceres Seq. ID no. 12329383
MSIMLSISRRQNSYILLNHSRFLRRFSYDVDPRPEIKSESQEFVVVKFVKTLQNTPQHDWASSESLSALVVSSSSASPLVFSQITRRLGSYSLAISFFEYLDAKSQSLKRREESLSLALQSVIEFAGSEPDPRDKLLRLYEIAKEKNIPLTIVATKLLIRWFGRMGMVNQSVLVYERLDSNMKNSQVRNVVVDVLLRNGLVDDAFKVLDEMLQKESVFPPNRITADIVLHEVWKERLLTEEKIIALISRFSSHGVSPNSVWLTRFISSLCKNARANTAWDILSDLMKNKTPLEAPPFNALLSCLGRNMDISRMNDLVLKMDEVKIRPDVVTLGILINTLCKSRRVDEALEVFEQMRGKRTDDGNVIKADSIHFNTLIDGLCKVGRLKEAEELLVRMKLEERCVPNAVTYNCLIDGYCRAGKLETAKEVVSRMKEDEIKPNVVTVNTIVGGMCRHHGLNMAVVFFMDMEKEGVKGNVVTYMTLIHACCSVSNVEKAMYWYEKMLEAGCSPDAKIYYALISGLCQVRRDHDAIRVVEKLKEGGFSLDLLAYNMLIGLFCDKNNAEKVYEMLTDMEKEGKKPDSITYNTLISFFGKHKDFESVERMMEQMREDGLDPTVTTYGAVIDAYCSVGELDEALKLFKDMGLHSKVNPNTVIYNILINAFSKLGNFGQALSLKEEMKMKMVRPNVETYNALFKCLNEKTQGETLLKLMDEMVEQSCEPNQITMEILMERLSGSDELVKLRKFMQGYSVASPTEKASPFDVFSLG

SEQ ID NO: 41449 - protein, 763 aa, Arabidopsis thaliana
  peptide (1)..(763): Ceres Seq. ID no. 12329384
MLSISRRQNSYILLNHSRFLRRFSYDVDPRPEIKSESQEFVVVKFVKTLQNTPQHDWASSESLSALVVSSSSASPLVFSQITRRLGSYSLAISFFEYLDAKSQSLKRREESLSLALQSVIEFAGSEPDPRDKLLRLYEIAKEKNIPLTIVATKLLIRWFGRMGMVNQSVLVYERLDSNMKNSQVRNVVVDVLLRNGLVDDAFKVLDEMLQKESVFPPNRITADIVLHEVWKERLLTEEKIIALISRFSSHGVSPNSVWLTRFISSLCKNARANTAWDILSDLMKNKTPLEAPPFNALLSCLGRNMDISRMNDLVLKMDEVKIRPDVVTLGILINTLCKSRRVDEALEVFEQMRGKRTDDGNVIKADSIHFNTLIDGLCKVGRLKEAEELLVRMKLEERCVPNAVTYNCLIDGYCRAGKLETAKEVVSRMKEDEIKPNVVTVNTIVGGMCRHHGLNMAVVFFMDMEKEGVKGNVVTYMTLIHACCSVSNVEKAMYWYEKMLEAGCSPDAKIYYALISGLCQVRRDHDAIRVVEKLKEGGFSLDLLAYNMLIGLFCDKNNAEKVYEMLTDMEKEGKKPDSITYNTLISFFGKHKDFESVERMMEQMREDGLDPTVTTYGAVIDAYCSVGELDEALKLFKDMGLHSKVNPNTVIYNILINAFSKLGNFGQALSLKEEMKMKMVRPNVETYNALFKCLNEKTQGETLLKLMDEMVEQSCEPNQITMEILMERLSGSDELVKLRKFMQGYSVASPTEKASPFDVFSLG

SEQ ID NO: 41450 - protein, 602 aa, Arabidopsis thaliana
  peptide (1)..(602): Ceres Seq. ID no. 12329385
MGMVNQSVLVYERLDSNMKNSQVRNVVVDVLLRNGLVDDAFKVLDEMLQKESVFPPNRITADIVLHEVWKERLLTEEKIIALISRFSSHGVSPNSVWLTRFISSLCKNARANTAWDILSDLMKNKTPLEAPPFNALLSCLGRNMDISRMNDLVLKMDEVKIRPDVVTLGILINTLCKSRRVDEALEVFEQMRGKRTDDGNVIKADSIHFNTLIDGLCKVGRLKEAEELLVRMKLEERCVPNAVTYNCLIDGYCRAGKLETAKEVVSRMKEDEIKPNVVTVNTIVGGMCRHHGLNMAVVFFMDMEKEGVKGNVVTYMTLIHACCSVSNVEKAMYWYEKMLEAGCSPDAKIYYALISGLCQVRRDHDAIRVVEKLKEGGFSLDLLAYNMLIGLFCDKNNAEKVYEMLTDMEKEGKKPDSITYNTLISFFGKHKDFESVERMMEQMREDGLDPTVTTYGAVIDAYCSVGELDEALKLFKDMGLHSKVNPNTVIYNILINAFSKLGNFGQALSLKEEMKMKMVRPNVETYNALFKCLNEKTQGETLLKLMDEMVEQSCEPNQITMEILMERLSGSDELVKLRKFMQGYSVASPTEKASPFDVFSLG

SEQ ID NO: 41451 - DNA, 2423 bp, Arabidopsis thaliana
  misc_feature (1)..(2423): Ceres Seq. ID no. 13489032
  misc_feature (1)..(2423): Ortholog of  Ceres SEQ ID NO 13623192 as cited in SEQ ID NO 1286
  misc_feature (1)..(2423): Ortholog of  Ceres SEQ ID NO 13594171 as cited in SEQ ID NO 60359
  misc_feature (1)..(2423): Ortholog of  Ceres SEQ ID NO 14301866 as cited in SEQ ID NO 60955
  misc_feature (1)..(2423): Ortholog of  Ceres SEQ ID NO 13590645 as cited in SEQ ID NO 62109
ctgcttcaatccccttttttttttcgtttcgtcgtttgttcgttttctctatcgctctcgttcatctacgcaatctctctcactaggtacagttttaaatgggtaagaagaagtcagacgagagtgctgctaccacaaaggtgaagccaagtgggaaagatgcttcgaaagattctaaaaaagagaaattgtcagtctcggctatgcttgcaggcatggatcagaaagatgataaaccgaagaagggctcatcatctagaaccaaggctgctccgaaatctacatcttacactgatggcatagatcttcctccttctgatgaagaagacgacggtgaatctgatgaggaagagagacagaaggaagcaaggaggaagctgaagagtgaacaaaggcaccttgagatatctgtgactgataaggaacaaaagaagcgagaggcgaaagaaagattagctcttcaggctgcagagtcggcaaagagggaggctatgaaggacgatcatgatgcattcacggttgttattggaagcaagacctcagtgcttgaaggagacgacatggctgatgcaaatgttaaggatattaccatagaatctttttctgtatctgctcgaggtaaagagcttttgaagaatgcttctgtcaggatttcacatggtaaaaggtatgggttgatcgggccaaacggaatgggaaagtctacactgttaaagcttttagcttggaggaagattccagtgccaaagaatattgatgttcttcttgttgagcaagaggtggttggtgatgaaaagagtgctctgaatgcagttgtctctgccaatgaagagttggttaagctacgggaagaggctgaagctctgcagaagtcgtcttctggagctgatggagaaaatgttgatggtgaggatgatgatgatactggagaaaagcttgctgaactgtatgacaggctgcagattttagggtcagatgctgctgaagcacaggcatccaaaattcttgcggggttaggtttcacaaaagatatgcaagtgcgtgcgactcagtccttcagtggtggctggaggatgcgaatatcattagctagagctctgttcgtgcaacctacccttttgctgttagatgaacccactaaccatcttgacctgagagctgttctatggttagaggagtatttgtgtcgctggaagaagacactagttgttgtttcacatgaccgggacttcctcaacacagtctgcacggagataatacatctccatgaccaaaatctccacttctaccgtggtaatttcgatggttttgaaagcggatatgagcagcgtcgcaaggagatgaacaaaaaatttgatgtctacgacaaacagatgaaagcagcgaagaggactggaaaccggggtcaacaggagaaggtaaaggacagggccaagtttactgctgcaaaagaagcatccaagagtaagtcaaagggcaagacagtggatgaagaaggcccagcaccagaagctccaaggaagtggagagattacagtgtggtgttccacttcccagaaccaactgagctcactcctcctcttctgcagttaattgaggttagcttcagctatcccaacaggccagatttcagactctcgaatgttgatgtaggtatcgatatggggacacgggttgcgatagttgggcctaacggagcaggaaagtccactctattaaatcttcttgcgggagatttagttccaacagagggtgaaatgagaagaagccagaagctgaggattggcaggtattctcagcattttgttgaccttttaacaatgggggaaacaccggttcagtatctccttcgtcttcatcctgaccaagagggatttagcaagcaagaggcagtgcgagcgaagctaggcaagtttgggctaccaagtcacaatcacttatctccaattgcgaaattgtctggaggacaaaaggctagggttgtgttcacctcgatctcaatgtcaaaaccacacattttgcttctggacgagcctacaaatcacttagacatgcagagtatagatgccttggcggatgcactagatgagttcacaggtggagttgtgttggtgagtcacgactcgagactcatatcacgtgtatgtgcggaagaggagaagagtcaaatttgggttgtagaagacggaacagtgaatttcttcccaggcacatttgaagagtacaaagaagatctccaaagagaaatcaaagcagaagttgatgagtgaagttttgttgttagcttctaaggtaaactcaaactcctttatgttttataacaaactcaaaaagttttggacaattttatttttagcaatcgtgttctttcatcatttgtgcgttaattacatcatatatgacactatatacatcagtttctc

SEQ ID NO: 41452 - protein, 723 aa, Arabidopsis thaliana
  peptide (1)..(723): Ceres Seq. ID no. 13489033
MGKKKSDESAATTKVKPSGKDASKDSKKEKLSVSAMLAGMDQKDDKPKKGSSSRTKAAPKSTSYTDGIDLPPSDEEDDGESDEEERQKEARRKLKSEQRHLEISVTDKEQKKREAKERLALQAAESAKREAMKDDHDAFTVVIGSKTSVLEGDDMADANVKDITIESFSVSARGKELLKNASVRISHGKRYGLIGPNGMGKSTLLKLLAWRKIPVPKNIDVLLVEQEVVGDEKSALNAVVSANEELVKLREEAEALQKSSSGADGENVDGEDDDDTGEKLAELYDRLQILGSDAAEAQASKILAGLGFTKDMQVRATQSFSGGWRMRISLARALFVQPTLLLLDEPTNHLDLRAVLWLEEYLCRWKKTLVVVSHDRDFLNTVCTEIIHLHDQNLHFYRGNFDGFESGYEQRRKEMNKKFDVYDKQMKAAKRTGNRGQQEKVKDRAKFTAAKEASKSKSKGKTVDEEGPAPEAPRKWRDYSVVFHFPEPTELTPPLLQLIEVSFSYPNRPDFRLSNVDVGIDMGTRVAIVGPNGAGKSTLLNLLAGDLVPTEGEMRRSQKLRIGRYSQHFVDLLTMGETPVQYLLRLHPDQEGFSKQEAVRAKLGKFGLPSHNHLSPIAKLSGGQKARVVFTSISMSKPHILLLDEPTNHLDMQSIDALADALDEFTGGVVLVSHDSRLISRVCAEEEKSQIWVVEDGTVNFFPGTFEEYKEDLQREIKAEVDE

SEQ ID NO: 41453 - protein, 688 aa, Arabidopsis thaliana
  peptide (1)..(688): Ceres Seq. ID no. 13489034
MLAGMDQKDDKPKKGSSSRTKAAPKSTSYTDGIDLPPSDEEDDGESDEEERQKEARRKLKSEQRHLEISVTDKEQKKREAKERLALQAAESAKREAMKDDHDAFTVVIGSKTSVLEGDDMADANVKDITIESFSVSARGKELLKNASVRISHGKRYGLIGPNGMGKSTLLKLLAWRKIPVPKNIDVLLVEQEVVGDEKSALNAVVSANEELVKLREEAEALQKSSSGADGENVDGEDDDDTGEKLAELYDRLQILGSDAAEAQASKILAGLGFTKDMQVRATQSFSGGWRMRISLARALFVQPTLLLLDEPTNHLDLRAVLWLEEYLCRWKKTLVVVSHDRDFLNTVCTEIIHLHDQNLHFYRGNFDGFESGYEQRRKEMNKKFDVYDKQMKAAKRTGNRGQQEKVKDRAKFTAAKEASKSKSKGKTVDEEGPAPEAPRKWRDYSVVFHFPEPTELTPPLLQLIEVSFSYPNRPDFRLSNVDVGIDMGTRVAIVGPNGAGKSTLLNLLAGDLVPTEGEMRRSQKLRIGRYSQHFVDLLTMGETPVQYLLRLHPDQEGFSKQEAVRAKLGKFGLPSHNHLSPIAKLSGGQKARVVFTSISMSKPHILLLDEPTNHLDMQSIDALADALDEFTGGVVLVSHDSRLISRVCAEEEKSQIWVVEDGTVNFFPGTFEEYKEDLQREIKAEVDE

SEQ ID NO: 41454 - protein, 684 aa, Arabidopsis thaliana
  peptide (1)..(684): Ceres Seq. ID no. 13489035
MDQKDDKPKKGSSSRTKAAPKSTSYTDGIDLPPSDEEDDGESDEEERQKEARRKLKSEQRHLEISVTDKEQKKREAKERLALQAAESAKREAMKDDHDAFTVVIGSKTSVLEGDDMADANVKDITIESFSVSARGKELLKNASVRISHGKRYGLIGPNGMGKSTLLKLLAWRKIPVPKNIDVLLVEQEVVGDEKSALNAVVSANEELVKLREEAEALQKSSSGADGENVDGEDDDDTGEKLAELYDRLQILGSDAAEAQASKILAGLGFTKDMQVRATQSFSGGWRMRISLARALFVQPTLLLLDEPTNHLDLRAVLWLEEYLCRWKKTLVVVSHDRDFLNTVCTEIIHLHDQNLHFYRGNFDGFESGYEQRRKEMNKKFDVYDKQMKAAKRTGNRGQQEKVKDRAKFTAAKEASKSKSKGKTVDEEGPAPEAPRKWRDYSVVFHFPEPTELTPPLLQLIEVSFSYPNRPDFRLSNVDVGIDMGTRVAIVGPNGAGKSTLLNLLAGDLVPTEGEMRRSQKLRIGRYSQHFVDLLTMGETPVQYLLRLHPDQEGFSKQEAVRAKLGKFGLPSHNHLSPIAKLSGGQKARVVFTSISMSKPHILLLDEPTNHLDMQSIDALADALDEFTGGVVLVSHDSRLISRVCAEEEKSQIWVVEDGTVNFFPGTFEEYKEDLQREIKAEVDE

SEQ ID NO: 41455 - DNA, 918 bp, Arabidopsis thaliana
  misc_feature (1)..(918): Ceres Seq. ID no. 12326248
  misc_feature (1)..(918): Ortholog of  Ceres SEQ ID NO 15175072 as cited in SEQ ID NO 59991
  misc_feature (1)..(918): Ortholog of  Ceres SEQ ID NO 15178850 as cited in SEQ ID NO 0
aaaagaaagaaaaaaatgccttcttttgcttttggatctcatcaccatttggcgaatcctacagactcgccgccgtactccgtcgaaattagcatcgacggtgactcctccgacttggattctttgtctcaggtcgatttagagtccggcggtgtaccggcgccggagaaacagctacattccggtggtaagaagaggagaactaggaggagaaagaggaggaagaagaagaagaagaagaaaggtggaagagattgcaggatctgtcatcttcctttagagactaacaaagaagctgaagatgaagatgaagaagaagaagatgattctgatgatgatgaagatgaagaagatgaagaagaagaagaagaagaagaagaatattatggtttgcctttgcaattaggttgctcttgtaaaggtgatttgggtgttgctcatagtaagtgtgctgagacttggtttaagatcaaaggaaacatgacatgtgagatatgcggcgcaatggctctaaacgtggctggtgaacaatctaatccggagagcactgcttctacacattcacaagcagctgcgggacaatctctaactcagacagagccacgaggaatctggcatggtcgccctgttatgaacttcttacttgctgctatggtcttcgccttcgttgtttcttggctttttcacttcaaagtcctcaagtgaaacgttttccatctctctctctctctctctttcgcccacccgcacgagctcactcttctcctgttcttgagccgcttgcaatcgctgaatcaatccctcctgttgcttgattattcacacgttttgtagctgtaaaaacttggtagtgtttagattgttgtaacttgtgagatttacattttgtataatattgttctctgctccggcttcgtg

SEQ ID NO: 41456 - protein, 234 aa, Arabidopsis thaliana
  peptide (1)..(234): Ceres Seq. ID no. 12326249
KRKKKMPSFAFGSHHHLANPTDSPPYSVEISIDGDSSDLDSLSQVDLESGGVPAPEKQLHSGGKKRRTRRRKRRKKKKKKKGGRDCRICHLPLETNKEAEDEDEEEEDDSDDDEDEEDEEEEEEEEEYYGLPLQLGCSCKGDLGVAHSKCAETWFKIKGNMTCEICGAMALNVAGEQSNPESTASTHSQAAAGQSLTQTEPRGIWHGRPVMNFLLAAMVFAFVVSWLFHFKVLK

SEQ ID NO: 41457 - protein, 229 aa, Arabidopsis thaliana
  peptide (1)..(229): Ceres Seq. ID no. 12326250
MPSFAFGSHHHLANPTDSPPYSVEISIDGDSSDLDSLSQVDLESGGVPAPEKQLHSGGKKRRTRRRKRRKKKKKKKGGRDCRICHLPLETNKEAEDEDEEEEDDSDDDEDEEDEEEEEEEEEYYGLPLQLGCSCKGDLGVAHSKCAETWFKIKGNMTCEICGAMALNVAGEQSNPESTASTHSQAAAGQSLTQTEPRGIWHGRPVMNFLLAAMVFAFVVSWLFHFKVLK

SEQ ID NO: 41458 - DNA, 1426 bp, Arabidopsis thaliana
  misc_feature (1)..(1426): Ceres Seq. ID no. 12329714
  misc_feature (1)..(1426): Ortholog of  Ceres SEQ ID NO 15176596 as cited in SEQ ID NO 55168
  misc_feature (1)..(1426): Ortholog of  Ceres SEQ ID NO 14301576 as cited in SEQ ID NO 62362
aacacaatccacacacatccaatcacaacctcatcatatatctcccgctaatctttttttctttgatcttttttttttttttgcttattatttttttgactttgatctcccatcagttcatcttcttcttcttcttctgatcaaccatggctgctgctataagtgctgcagtctctttaccttcctccaagtcatcctctctcctcaccaaaatctcctctgtatcccctcaaaggattttcctcaagaagagcacagtgtgttacagaagagttgtgtcagtgaaggctcaggtgacaacagatactaccgaggcaccaccagttaaagtagtcaaggagtctaagaaacaggaagaagggattgttgtcaacaaattcaaacctaagaacccttacactggtcgctgccttttgaacaccaagatcaccggtgatgacgctcccggtgagacttggcacattgtcttcaccaccgaaggtgaggttccgtatagagaaggacaatcgataggagtgattccagagggaatagacaagaacgggaagccgcacaagctcaggctttactctatcgcgagtagtgccattggtgactttggagactccaagaccgtttctctctgtgtcaagagactagtttacacaaatgatggcggagagattgttaagggggtctgctccaacttcttgtgtgacttgaagccgggtgatgaagctaagatcactggacctgttggcaaggaaatgcttatgccaaaagaccccaatgccaccatcatcatgcttggaacaggaactggaatagctccattcagatcatttttgtggaaaatgttctttgaggagcacgaggactacaagttcaatggtttggcgtggcttttcttgggtgtacccacaagcagctcactgctatacaaggaggagtttgagaagatgaaggagaagaacccagacaacttcaggctggactttgcggtgagcagagagcagacgaacgagaagggagagaaaatgtacattcagacaagaatggcagagtatgcagaagagctgtgggagttgctgaagaaagacaacacctttgtttacatgtgtggtcttaagggtatggagaagggtatcgatgacattatggtctcgcttgctgctaaagatgggatcgattggttggagtacaagaagcaattgaagaggagtgaacagtggaatgttgaagtctactaaggaagcttctgagggagtaattatataatgtagataaaaagcttctgatgcattgtgaaatcttcatatctgcttcttttttctttctcaaggattttcaatcaaaacattcaaaagagagcatcaataccaccaaactactctttctcacttgttgttcatgttatatttcttgcaacaatatagtgagttttgtg

SEQ ID NO: 41459 - protein, 360 aa, Arabidopsis thaliana
  peptide (1)..(360): Ceres Seq. ID no. 12329715
MAAAISAAVSLPSSKSSSLLTKISSVSPQRIFLKKSTVCYRRVVSVKAQVTTDTTEAPPVKVVKESKKQEEGIVVNKFKPKNPYTGRCLLNTKITGDDAPGETWHIVFTTEGEVPYREGQSIGVIPEGIDKNGKPHKLRLYSIASSAIGDFGDSKTVSLCVKRLVYTNDGGEIVKGVCSNFLCDLKPGDEAKITGPVGKEMLMPKDPNATIIMLGTGTGIAPFRSFLWKMFFEEHEDYKFNGLAWLFLGVPTSSSLLYKEEFEKMKEKNPDNFRLDFAVSREQTNEKGEKMYIQTRMAEYAEELWELLKKDNTFVYMCGLKGMEKGIDDIMVSLAAKDGIDWLEYKKQLKRSEQWNVEVY

SEQ ID NO: 41460 - DNA, 1160 bp, Arabidopsis thaliana
  misc_feature (1)..(1160): Ceres Seq. ID no. 13504771
  misc_feature (1)..(1160): Ortholog of  Ceres SEQ ID NO 14308401 as cited in SEQ ID NO 55082
gtagcgattctctctgcggcgcgtgtaaacggtgacggggctctaatggctaatcttcctcctccgctctccatgaaatctgtcgccctctcaggagcttcttctccttcttcttcctccaacaacgatcggaagctatcatcggcggagcagttaattctcgatctcagcaatcccgaactcagagaaaatgcacttcacgagttgtctaagaagagagagatctttcaagatttggctccgcttttatggcattctgttggtaccattcctgctcttctacaggagattatcgcagtttaccctgccctatctcctccaaccatgactcctgctcaatctaacagggtgtgcaatgcacttgctcttcttcagtgtgttgcttctcatactgatacgagaatgttgttcctaaaagcccatctgccattgtacctgtatgctttcttgaatacatcaagcaagtcaagaccgtttgagtacctgcggctgactagcttgggggttattggtgcacttgttaaggttgatgatactgaagtgatcagattccttcttcaaactgagattgtcccattgtgcctccggacaatggagaatggcagcgagttatcaaagactgttgctactttcattgttcagaaagttttgctggacgatgttgggcttgagtacatgtgcacgacagcggagagattctttgctctgggtcgggttttgggaaatatggttacttcacttgcagaaggaccgtccgctaggctactaaagcacatcatacgctgctatcttcgcttgacagataaccccagagcatgcgatgcacttggaagttgccttccagatcttctgagggatgctactttcagtggttgtctctatgatgacccacctgcaatgcaatggctgcagcaactgctccacaacgttaacgttggcgggagagcacctcaagggttggctcatatgtttgtgaattaaatcgaacccttatagtctgggcagaaactgttattcattggacaaaaaaagttagttggaaacagaattacagatgagaaacagaaacccaaccaaagattttgagtttgatggatatatgtatttggatttcttgaccgtcttatgatgttgcaatcaatataactaaaattccattg

SEQ ID NO: 41461 - protein, 326 aa, Arabidopsis thaliana
  peptide (1)..(326): Ceres Seq. ID no. 13504772
VAILSAARVNGDGALMANLPPPLSMKSVALSGASSPSSSSNNDRKLSSAEQLILDLSNPELRENALHELSKKREIFQDLAPLLWHSVGTIPALLQEIIAVYPALSPPTMTPAQSNRVCNALALLQCVASHTDTRMLFLKAHLPLYLYAFLNTSSKSRPFEYLRLTSLGVIGALVKVDDTEVIRFLLQTEIVPLCLRTMENGSELSKTVATFIVQKVLLDDVGLEYMCTTAERFFALGRVLGNMVTSLAEGPSARLLKHIIRCYLRLTDNPRACDALGSCLPDLLRDATFSGCLYDDPPAMQWLQQLLHNVNVGGRAPQGLAHMFVN

SEQ ID NO: 41462 - protein, 311 aa, Arabidopsis thaliana
  peptide (1)..(311): Ceres Seq. ID no. 13504773
MANLPPPLSMKSVALSGASSPSSSSNNDRKLSSAEQLILDLSNPELRENALHELSKKREIFQDLAPLLWHSVGTIPALLQEIIAVYPALSPPTMTPAQSNRVCNALALLQCVASHTDTRMLFLKAHLPLYLYAFLNTSSKSRPFEYLRLTSLGVIGALVKVDDTEVIRFLLQTEIVPLCLRTMENGSELSKTVATFIVQKVLLDDVGLEYMCTTAERFFALGRVLGNMVTSLAEGPSARLLKHIIRCYLRLTDNPRACDALGSCLPDLLRDATFSGCLYDDPPAMQWLQQLLHNVNVGGRAPQGLAHMFVN

SEQ ID NO: 41463 - protein, 302 aa, Arabidopsis thaliana
  peptide (1)..(302): Ceres Seq. ID no. 13504774
MKSVALSGASSPSSSSNNDRKLSSAEQLILDLSNPELRENALHELSKKREIFQDLAPLLWHSVGTIPALLQEIIAVYPALSPPTMTPAQSNRVCNALALLQCVASHTDTRMLFLKAHLPLYLYAFLNTSSKSRPFEYLRLTSLGVIGALVKVDDTEVIRFLLQTEIVPLCLRTMENGSELSKTVATFIVQKVLLDDVGLEYMCTTAERFFALGRVLGNMVTSLAEGPSARLLKHIIRCYLRLTDNPRACDALGSCLPDLLRDATFSGCLYDDPPAMQWLQQLLHNVNVGGRAPQGLAHMFVN

SEQ ID NO: 41464 - DNA, 1161 bp, Arabidopsis thaliana
  misc_feature (1)..(1161): Ceres Seq. ID no. 13575109
  misc_feature (1)..(1161): Ortholog of  Ceres SEQ ID NO 13596876 as cited in SEQ ID NO 62696
  misc_feature (1)..(1161): Ortholog of  Ceres SEQ ID NO 13655442 as cited in SEQ ID NO 64359
aaactcctctgacgttttttctccacccaaatctctctcaactctcaagctcctctctttttcttccttctgcaacaacaacaactgttactgatctctctctctctctcccaagtttttattttattttgatcggagatcgagatcagctagacatggctcctgccatgaagatcgtcttcggtctcttgacatttgtcactgtcggaatggtcatcggttccttgttacaattggcctttattaatagattggaagattcgtacggaactggatttccgtctctaagaggacttcgaggacagaacacccgctatctacgagatgtctcccggtgggcaaatgacaaagatgcagaattgttacggattggcaatgtcaagcctgaagtagtcagttggtcccctcgaattattgtgcttcatgactttctcagtccggaggaatgtgaatacctaaaagcaatcgcccggcctcgccttcaagtttccactgttgttgatgtaaaaaccggaaagggagttaaaagtgacgtgaggacaagctccggaatgtttctaactcatgtagaaagaagttatccaataatacaggcaattgaaaagcgaattgcagtcttttctcaagtaccagcggaaaatggagaacttattcaagttctaagatatgagccgcagcagttttacaaaccacatcacgattactttgctgacactttcaatctaaagcgtggtggtcagcgcgtagcaactatgcttatgtatctaactgatgacgtcgaaggaggagaaacttatttccctttggctggtgatggtgattgcacctgtggtggcaaaatcatgaaaggcatctctgttaaacccaccaaaggagacgcagttctcttctggagcatgggactcgacggacagtcagatcctaggagcatacatggaggatgtgaagttctgtctggagaaaagtggtctgctactaaatggatgaggcaaaaagctacttcttgaagaactacttaaaactttttaaaacaaaaagaaaccacagggacttatattgaaaaatgtcatagtatctcagagttttgatttactctctttttgacccttcaattttagaatttatcatttacatacgtaaatcaatatgaatgtgttttac

SEQ ID NO: 41465 - protein, 334 aa, Arabidopsis thaliana
  peptide (1)..(334): Ceres Seq. ID no. 13575110
TPLTFFLHPNLSQLSSSSLFLPSATTTTVTDLSLSLPSFYFILIGDRDQLDMAPAMKIVFGLLTFVTVGMVIGSLLQLAFINRLEDSYGTGFPSLRGLRGQNTRYLRDVSRWANDKDAELLRIGNVKPEVVSWSPRIIVLHDFLSPEECEYLKAIARPRLQVSTVVDVKTGKGVKSDVRTSSGMFLTHVERSYPIIQAIEKRIAVFSQVPAENGELIQVLRYEPQQFYKPHHDYFADTFNLKRGGQRVATMLMYLTDDVEGGETYFPLAGDGDCTCGGKIMKGISVKPTKGDAVLFWSMGLDGQSDPRSIHGGCEVLSGEKWSATKWMRQKATS

SEQ ID NO: 41466 - protein, 283 aa, Arabidopsis thaliana
  peptide (1)..(283): Ceres Seq. ID no. 13575111
MAPAMKIVFGLLTFVTVGMVIGSLLQLAFINRLEDSYGTGFPSLRGLRGQNTRYLRDVSRWANDKDAELLRIGNVKPEVVSWSPRIIVLHDFLSPEECEYLKAIARPRLQVSTVVDVKTGKGVKSDVRTSSGMFLTHVERSYPIIQAIEKRIAVFSQVPAENGELIQVLRYEPQQFYKPHHDYFADTFNLKRGGQRVATMLMYLTDDVEGGETYFPLAGDGDCTCGGKIMKGISVKPTKGDAVLFWSMGLDGQSDPRSIHGGCEVLSGEKWSATKWMRQKATS

SEQ ID NO: 41467 - protein, 279 aa, Arabidopsis thaliana
  peptide (1)..(279): Ceres Seq. ID no. 13575112
MKIVFGLLTFVTVGMVIGSLLQLAFINRLEDSYGTGFPSLRGLRGQNTRYLRDVSRWANDKDAELLRIGNVKPEVVSWSPRIIVLHDFLSPEECEYLKAIARPRLQVSTVVDVKTGKGVKSDVRTSSGMFLTHVERSYPIIQAIEKRIAVFSQVPAENGELIQVLRYEPQQFYKPHHDYFADTFNLKRGGQRVATMLMYLTDDVEGGETYFPLAGDGDCTCGGKIMKGISVKPTKGDAVLFWSMGLDGQSDPRSIHGGCEVLSGEKWSATKWMRQKATS

SEQ ID NO: 41468 - DNA, 1039 bp, Arabidopsis thaliana
  misc_feature (1)..(1039): Ceres Seq. ID no. 13488549
  misc_feature (1)..(1039): Ortholog of  Ceres SEQ ID NO 14305398 as cited in SEQ ID NO 60056
actgctaaaacctcacctgcggcttcacctttcttcgagttcgtgaaaaagagacgtcgcatcgcaccgccgtcgccatttccaccgtcgtagcattgccgcttcactgactgtcgcactgaatattgttgaatcgagaaaatggcttatgttgggcaaagtagaaacgtgattcggcatgtagtctcgagaggaacagcttatcacaagtatgaaaatgcgattcatcatcctctccttttcgcttgtcaaggagttcgatacagaaaattagaagttattcttacaacgggcattgagaagcttggcaaagctggtgagactgtgaaggtagctcctggatacttcaggaatcaccttatgccaaaacttcttgctgtgcctaacattgacaagtatgcttatctcatccgagagcaacgcaagatgtataatcatgaagaagtaaaggaggaggttaaggtggttcataaaacttctgaagtccagacaaaagagtatgaaaaggctgcaaagcgtctggcgaatgctaatttggtattgaggaagttagttgacaaggaaaagttcaaaaaccgctcctcaaaagacgacaaacctgatgttcaaactcctatcacaaaggaagagatagtctctgaggtggcgaggcagctctgtgtgaagattgatccagacaatgtggttttagcggcgcctttggaaacttttggcgagtacgaggtgcctcttaaattccccaagacaattcctttgccacaaggaactgttcaatggattctcaaagtcaaagtccgtggccattaaatcttccacctttgaaagtcctccttcagtgatagttctcttcttcaatatgtttcaatatagttttggaattgcagaaacataagcaaacacaaatcagttacatttcccttgactcagtttttttttttttttttttgtagttgtataaaccgggtttactccggtctttaatttaaacaatgactcgaattttgcgaaaaccggactcgtccagaagacggataaattt

SEQ ID NO: 41469 - protein, 221 aa, Arabidopsis thaliana
  peptide (1)..(221): Ceres Seq. ID no. 13488550
MAYVGQSRNVIRHVVSRGTAYHKYENAIHHPLLFACQGVRYRKLEVILTTGIEKLGKAGETVKVAPGYFRNHLMPKLLAVPNIDKYAYLIREQRKMYNHEEVKEEVKVVHKTSEVQTKEYEKAAKRLANANLVLRKLVDKEKFKNRSSKDDKPDVQTPITKEEIVSEVARQLCVKIDPDNVVLAAPLETFGEYEVPLKFPKTIPLPQGTVQWILKVKVRGH

SEQ ID NO: 41470 - protein, 148 aa, Arabidopsis thaliana
  peptide (1)..(148): Ceres Seq. ID no. 13488551
MPKLLAVPNIDKYAYLIREQRKMYNHEEVKEEVKVVHKTSEVQTKEYEKAAKRLANANLVLRKLVDKEKFKNRSSKDDKPDVQTPITKEEIVSEVARQLCVKIDPDNVVLAAPLETFGEYEVPLKFPKTIPLPQGTVQWILKVKVRGH

SEQ ID NO: 41471 - protein, 126 aa, Arabidopsis thaliana
  peptide (1)..(126): Ceres Seq. ID no. 13488552
MYNHEEVKEEVKVVHKTSEVQTKEYEKAAKRLANANLVLRKLVDKEKFKNRSSKDDKPDVQTPITKEEIVSEVARQLCVKIDPDNVVLAAPLETFGEYEVPLKFPKTIPLPQGTVQWILKVKVRGH

SEQ ID NO: 41472 - DNA, 1545 bp, Arabidopsis thaliana
  misc_feature (1)..(1545): Ceres Seq. ID no. 13488935
  misc_feature (1)..(1545): Ortholog of  Ceres SEQ ID NO 14308437 as cited in SEQ ID NO 55577
aaaaaaaaaaaacaaacagtttagcaaaagattttgagagggagaaaaagggcgatcgattagggtttttgtgttttcgtcttagtatcgaagatgatcggagctgtgaactcggtggaggctgtgataacgtcaatccaaggtttatcggggagtccagaggatttatctgcacttcacgatcttttgagaggagctcaagactcgctccgagccgaaccaggtgttaatttctctactcttgaccagctcgacgcctcgaagcactctctcggttacctgtatttccttgaggttcttacctgtggtccagtgtcgaaggagaaagctgcttatgagataccgataattgcacggttcatcaattcttgtgatgctgggcagattcgtttggcgagctataaatttgtatctctttgtaagatattgaaagaccatgttatagcactgggagatccgttgcgaggagtagggccactgttaaacgctgttcagaagcttcaggtctcctccaagcgtttgactgcattgcatccagatgttcttcaactctgtttgcaggcgaaatcgtacaaatctggtttctccattcttagtgatgatatcgtggagattgaccagccaagagacttttttctctatagctattatgggggaatgatttgtattggactgaagagatttcagaaagcattagagcttctttacaatgttgtgactgctcctatgcatcaagtcaatgccatagctcttgaggcgtacaaaaagtacatattggtgtctctcattcacaatgggcagtttactaacactctccccaagtgtgcttctacagcagcacagaggagcttcaagaactataccggaccttacattgaactgggtaattgttacaacgacgggaagattggtgaactagaggcattggttgtggccaggaatgcagaatttgaagaggataagaaccttggattagttaagcaagcagtgtcatccctttacaagcgtaacattctgagattgacacagaagtacttgaccctgtcgcttcaagatatagccaacatggtccaacttggtaatgctaaggaggcggaaatgcatgtgcttcagatgatccaggatggtcagatacatgcccttatcaaccagaaagacgggatggtcagattcttggaggaccctgagcagtacaaatctagtgagatgattgagatcatggattctgttatacaaaggactattggtctgtcgaagaatctcttagccatggatgagagcttatcatgtgaccctttatacttgggaaaggtaggaagggaaagacaaaggtacgactttggagacgatttcgatactgttcctcagaagttctccatgtaaacagcgaaagtcgagaagcaccaacaaaacttggctcaaagacaaccgtagtgtgaatcttgagaatgttacttttgatttctttgttcatttttgttggtttaaaaagtttcatatttttgtcacaattgccaacaagtagagaagaccattatggacccg

SEQ ID NO: 41473 - protein, 429 aa, Arabidopsis thaliana
  peptide (1)..(429): Ceres Seq. ID no. 13488936
MIGAVNSVEAVITSIQGLSGSPEDLSALHDLLRGAQDSLRAEPGVNFSTLDQLDASKHSLGYLYFLEVLTCGPVSKEKAAYEIPIIARFINSCDAGQIRLASYKFVSLCKILKDHVIALGDPLRGVGPLLNAVQKLQVSSKRLTALHPDVLQLCLQAKSYKSGFSILSDDIVEIDQPRDFFLYSYYGGMICIGLKRFQKALELLYNVVTAPMHQVNAIALEAYKKYILVSLIHNGQFTNTLPKCASTAAQRSFKNYTGPYIELGNCYNDGKIGELEALVVARNAEFEEDKNLGLVKQAVSSLYKRNILRLTQKYLTLSLQDIANMVQLGNAKEAEMHVLQMIQDGQIHALINQKDGMVRFLEDPEQYKSSEMIEIMDSVIQRTIGLSKNLLAMDESLSCDPLYLGKVGRERQRYDFGDDFDTVPQKFSM

SEQ ID NO: 41474 - protein, 241 aa, Arabidopsis thaliana
  peptide (1)..(241): Ceres Seq. ID no. 13488937
MICIGLKRFQKALELLYNVVTAPMHQVNAIALEAYKKYILVSLIHNGQFTNTLPKCASTAAQRSFKNYTGPYIELGNCYNDGKIGELEALVVARNAEFEEDKNLGLVKQAVSSLYKRNILRLTQKYLTLSLQDIANMVQLGNAKEAEMHVLQMIQDGQIHALINQKDGMVRFLEDPEQYKSSEMIEIMDSVIQRTIGLSKNLLAMDESLSCDPLYLGKVGRERQRYDFGDDFDTVPQKFSM

SEQ ID NO: 41475 - protein, 218 aa, Arabidopsis thaliana
  peptide (1)..(218): Ceres Seq. ID no. 13488938
MHQVNAIALEAYKKYILVSLIHNGQFTNTLPKCASTAAQRSFKNYTGPYIELGNCYNDGKIGELEALVVARNAEFEEDKNLGLVKQAVSSLYKRNILRLTQKYLTLSLQDIANMVQLGNAKEAEMHVLQMIQDGQIHALINQKDGMVRFLEDPEQYKSSEMIEIMDSVIQRTIGLSKNLLAMDESLSCDPLYLGKVGRERQRYDFGDDFDTVPQKFSM

SEQ ID NO: 41476 - DNA, 522 bp, Arabidopsis thaliana
  misc_feature (1)..(522): Ceres Seq. ID no. 5774950
  misc_feature (1)..(522): Ortholog of  Ceres SEQ ID NO 15178824 as cited in SEQ ID NO 0
aatataacttggatcagattcttcttctcctctaaacaacaacaaagtctctcttccttctgtctttcacatttcctcttcccctaaaaacagaactcaaaaccaaaacaaaatgactcgctcctctagattccttggtacggcgtcgcctccaccaccggaagaaatcctcgccgccgaaaccgacatggttgtgattctctcagcacttctctgcgctctcgtatgcgtascggtttagccgccgtagctcgctgcgcttggctccgccgtctcaccggagttaatcccgccgccgtcggagaagctccaccgcctaacaaaggcctcaagaaaaaagcacttcaagctctccctaaatcaacttacaccgcctctgcctctaccgccgccgccgctgacgatctaccgtgctcttcagtcggagacgnagattcatccaccgagtgtgcaatatgcataacggaattttcggagggcgaagaaatcagaatcttaccgctgtgtagtcacgcgagacgt

SEQ ID NO: 41477 - protein, 99 aa, Arabidopsis thaliana
  peptide (1)..(99): Ceres Seq. ID no. 5774951
  misc_feature (3)..(3): Xaa is any aa, unknown or other
  misc_feature (69)..(69): Xaa is any aa, unknown or other
MRXGLAAVARCAWLRRLTGVNPAAVGEAPPPNKGLKKKALQALPKSTYTASASTAAAADDLPCSSVGDXDSSTECAICITEFSEGEEIRILPLCSHARR

SEQ ID NO: 41478 - DNA, 1350 bp, Arabidopsis thaliana
  misc_feature (1)..(1350): Ceres Seq. ID no. 13499917
  misc_feature (1)..(1350): Ortholog of  Ceres SEQ ID NO 15224625 as cited in SEQ ID NO 1390
atgaagaaaaaaaacgaagaagatcaatggtcaatatttaatcagaagcatccacgtccacttcatcagattctatctctctctctctgtaagattccttgctctcgcgcttttctctctctctctcgcgttcgttcttatccacgagctctgcaccgtcgcaatctccgtcttctccatttagatccaacacagagccttttctacatgaaattcggcaaagagtttcgtactcacctcgaagaaactttaccagagtggagagacaagttcctttgctataaacctttaaaaaagcttctcaaatattatccttattactccgccgattttggacccgccaattccgatcacaacgattcgcgtccagtatttgctgatactactaacatctcttccgccgccgacgacggcggtgtggttcccggcgtcaggccatcggaagatctccagggttcgtttgtgaggatacttaacgatgaacttgagaagtttaacgatttttacgttgataaggaagaagatttcgttatcagattacaggagctcaaggaaagaatcgagcaagttaaagaaaagaatggggaatttgcatcagaaagtgagttcagcgaagaaatgatggatattcggagagaccttgttaccattcatggcgagatggtgctcctgaaaaactacagctcccttaattttgcaggacttgtcaagattttgaagaagtacgataaaagaacaggtggacttttacgtttgcctttcacacagcttgttctccatcaacccttctttactacagagccacttactaggttagtccgtgaatgtgaggccaatcttgagcttctttttccttcagaagcggaagttgtagagtcttctagcgcagtgcaagcacactcaagctcacatcagcacaactccccaagaatctcagctgagacttcctcaactctcggcaatgaaaatcttgatatatataagagtacactcgctgcaatgagagctataagagggttacaaaaggctagctcgacgtacaaccctttatcattctcatcgcttcttcagaacgaggatgatgagacggtaacagctgaaaactctccaaactctgggaacaaagatgattcagagaaggaagatactggaccttcccactgatcagaagagaatgatgctctttttgatcaagattttgagaatttgcttcttgatttcaccctaacttttcataaaattaacacattttactttacttcttcaccttttgcaggacacaacttctgtatgcatttgaattgtagtacagtcgtttatagattttcaatgaaattttcctccattgtc

SEQ ID NO: 41479 - protein, 387 aa, Arabidopsis thaliana
  peptide (1)..(387): Ceres Seq. ID no. 13499918
MKKKNEEDQWSIFNQKHPRPLHQILSLSLCKIPCSRAFLSLSRVRSYPRALHRRNLRLLHLDPTQSLFYMKFGKEFRTHLEETLPEWRDKFLCYKPLKKLLKYYPYYSADFGPANSDHNDSRPVFADTTNISSAADDGGVVPGVRPSEDLQGSFVRILNDELEKFNDFYVDKEEDFVIRLQELKERIEQVKEKNGEFASESEFSEEMMDIRRDLVTIHGEMVLLKNYSSLNFAGLVKILKKYDKRTGGLLRLPFTQLVLHQPFFTTEPLTRLVRECEANLELLFPSEAEVVESSSAVQAHSSSHQHNSPRISAETSSTLGNENLDIYKSTLAAMRAIRGLQKASSTYNPLSFSSLLQNEDDETVTAENSPNSGNKDDSEKEDTGPSH

SEQ ID NO: 41480 - protein, 318 aa, Arabidopsis thaliana
  peptide (1)..(318): Ceres Seq. ID no. 13499919
MKFGKEFRTHLEETLPEWRDKFLCYKPLKKLLKYYPYYSADFGPANSDHNDSRPVFADTTNISSAADDGGVVPGVRPSEDLQGSFVRILNDELEKFNDFYVDKEEDFVIRLQELKERIEQVKEKNGEFASESEFSEEMMDIRRDLVTIHGEMVLLKNYSSLNFAGLVKILKKYDKRTGGLLRLPFTQLVLHQPFFTTEPLTRLVRECEANLELLFPSEAEVVESSSAVQAHSSSHQHNSPRISAETSSTLGNENLDIYKSTLAAMRAIRGLQKASSTYNPLSFSSLLQNEDDETVTAENSPNSGNKDDSEKEDTGPSH

SEQ ID NO: 41481 - DNA, 1289 bp, Arabidopsis thaliana
  misc_feature (1)..(1289): Ceres Seq. ID no. 12738349
  misc_feature (1)..(1289): Ortholog of  Ceres SEQ ID NO 12607856 as cited in SEQ ID NO 55419
ctgattcaagaacgaaacgagagaaaacttgccgagtacaacctcacccattctctatctccacctaatgctttagatttggttagactttccgaaaagaatgaaagtctacgccctaaagaccacaaagcacaacctagaagcaaagtggcaaagtccttgcagagttttgacaatgctaatgaactatccaaggagatgatcagatgcatgagaaacatatttgtgtctctaggagagacatctgcaggatccaaatcctcacaagagactgccagtgtttcttctcgtgagaatcctccatcatcatcaacgtcatggtggtctccttcagaacactcacggatctccaggtgggcacagagtccacggatcgatattcagaagaactcagatgttttagccacagagagcgatgtgtttgatctttatacagtccaaggaaagctgagctgggctgacatcgggagttacagatctgcaactgaagtggcttcaatgtctgttgaggagaaaaggctcggatatgcttcagatgagttatggagattcaggaacctcgttgaaagacttgccagagtaaatccagcagaactaagccacaacgagaagcttgccttctggatcaacatatacaatgccatgatcatgcatgcatacttggcttacggcgtaccaaaaactgacttaaagctcttctccttgatgcaaaaggctgcttatacagttggtggccattcatacaacgcagcaacgatcgaatacatgactttaaagatgagccctcctctgcatcgtcctcaaattgctctgcttctctccattctcaagctgaaagtatcagacgaacagagacaagcggggataagtacaccggaacctctagtgtcatttgctctcagctgcgggatgcactcatctcctgcggtgagaatatactcagccgagaacgtaggagaagaacttgaagaagctcagaaagattatatccaggcgtcagtgggagtgagcccaaggggaaagttgattgtgccccaaatgcttcactgtttcgccaagaaatctgtcgatgactgcaaggttgctctgtggatttctcgtcatttgcctcctcgccaagctgcatttgttgagcagtgtattcacaggcgacaacggtggggttttctgggttcatctagtagcaaatgcggcatagttccttttgattcacggttccgatatttgtttcttccgtagcaaggcattgattcacaatgatgtgattaaagcaaatactgttccgatcc

SEQ ID NO: 41482 - protein, 412 aa, Arabidopsis thaliana
  peptide (1)..(412): Ceres Seq. ID no. 12738350
LIQERNERKLAEYNLTHSLSPPNALDLVRLSEKNESLRPKDHKAQPRSKVAKSLQSFDNANELSKEMIRCMRNIFVSLGETSAGSKSSQETASVSSRENPPSSSTSWWSPSEHSRISRWAQSPRIDIQKNSDVLATESDVFDLYTVQGKLSWADIGSYRSATEVASMSVEEKRLGYASDELWRFRNLVERLARVNPAELSHNEKLAFWINIYNAMIMHAYLAYGVPKTDLKLFSLMQKAAYTVGGHSYNAATIEYMTLKMSPPLHRPQIALLLSILKLKVSDEQRQAGISTPEPLVSFALSCGMHSSPAVRIYSAENVGEELEEAQKDYIQASVGVSPRGKLIVPQMLHCFAKKSVDDCKVALWISRHLPPRQAAFVEQCIHRRQRWGFLGSSSSKCGIVPFDSRFRYLFLP

SEQ ID NO: 41483 - protein, 346 aa, Arabidopsis thaliana
  peptide (1)..(346): Ceres Seq. ID no. 12738351
MIRCMRNIFVSLGETSAGSKSSQETASVSSRENPPSSSTSWWSPSEHSRISRWAQSPRIDIQKNSDVLATESDVFDLYTVQGKLSWADIGSYRSATEVASMSVEEKRLGYASDELWRFRNLVERLARVNPAELSHNEKLAFWINIYNAMIMHAYLAYGVPKTDLKLFSLMQKAAYTVGGHSYNAATIEYMTLKMSPPLHRPQIALLLSILKLKVSDEQRQAGISTPEPLVSFALSCGMHSSPAVRIYSAENVGEELEEAQKDYIQASVGVSPRGKLIVPQMLHCFAKKSVDDCKVALWISRHLPPRQAAFVEQCIHRRQRWGFLGSSSSKCGIVPFDSRFRYLFLP

SEQ ID NO: 41484 - protein, 342 aa, Arabidopsis thaliana
  peptide (1)..(342): Ceres Seq. ID no. 12738352
MRNIFVSLGETSAGSKSSQETASVSSRENPPSSSTSWWSPSEHSRISRWAQSPRIDIQKNSDVLATESDVFDLYTVQGKLSWADIGSYRSATEVASMSVEEKRLGYASDELWRFRNLVERLARVNPAELSHNEKLAFWINIYNAMIMHAYLAYGVPKTDLKLFSLMQKAAYTVGGHSYNAATIEYMTLKMSPPLHRPQIALLLSILKLKVSDEQRQAGISTPEPLVSFALSCGMHSSPAVRIYSAENVGEELEEAQKDYIQASVGVSPRGKLIVPQMLHCFAKKSVDDCKVALWISRHLPPRQAAFVEQCIHRRQRWGFLGSSSSKCGIVPFDSRFRYLFLP

SEQ ID NO: 41485 - DNA, 1370 bp, Arabidopsis thaliana
  misc_feature (1)..(1370): Ceres Seq. ID no. 12330632
  misc_feature (1)..(1370): Ortholog of  Ceres SEQ ID NO 13655881 as cited in SEQ ID NO 64426
aggaatcacattgatgatcaagagtttatctctggcttctgctcgcatcttcttctctagaacctctccatcttttcttattcccttctcaaagctctctgtatctcatcgtcggaaattctcagtaatggccagtggaagcgacgagttcgtgaaaggaaatgtttatccaaatggcgttgctctcattactcttgatcgacctaaagctctcaacgccatgaatctagaaatggatttgaagtacaaaagcttgcttgatgaatgggaatatgatcctggagtcaaatgtgttgtcgtcgaaggaagcacatctcgggccttttgtgcaggaatggatattaaaggcgttgttgcagagatcctaattgacaaaaatacgtctcttatgcaaaggtatttacatctgagtatagcctgatatgcaagattgctggatacagaaaaccatatatctctttaatggatggcataacaatgggatttggtcttggtctttctggacatggactctaccgagtgataacagagaggacggtcctcgcaatgccagaaaatggaatcggcttgtttccagatgttggattttcatatattgcagctcatagccctggcgaaggatctgttggtgcttacctaggtatgactgggagaaggatttccacaccttcagattcactgtttgtgggtcttgggacacattatgtaccatctggaaagttaggttcactcagagaagccattttgtcagctgacctttccaaggatccccaacaacacatccaagcaactttatcaaattacagcagtgatcctgaaactgagtcccacctccaaatgcttttgcctcagatagaatcagcttttagtgtaagtaagtctgttaaggaaacaatagaagagctgaaaagttccagcagagcagtgaggcttcagttgcagaatgggctaatgaagcagtccaaggcattgaaaaaggggcacctttttctctttacctaacacacaagtacttctccaaagttgcttgtgccaagggtaaaaccaacaacgccatggcaacacttaacggtgtgatgataactgagtaccgcattgctctaagatctgcattgcgcagtgatttcactgaaggtgttagagcagtcttgactgacaaggaccagaatccgaaatggaaaccagcgagcttagacgaagtagatgaaaccgaagtggacgcgctctttatgccattaagtcctgaatttgaagagctaaacgtatgaaccaaacaacagagatattgcttagatcatgaattggtgattattgtgttgcagcttttgaacatatcccatatatttatcaaattttcaagtcgtagattg

SEQ ID NO: 41486 - protein, 179 aa, Arabidopsis thaliana
  peptide (1)..(179): Ceres Seq. ID no. 12330633
MDGITMGFGLGLSGHGLYRVITERTVLAMPENGIGLFPDVGFSYIAAHSPGEGSVGAYLGMTGRRISTPSDSLFVGLGTHYVPSGKLGSLREAILSADLSKDPQQHIQATLSNYSSDPETESHLQMLLPQIESAFSVSKSVKETIEELKSSSRAVRLQLQNGLMKQSKALKKGHLFLFT

SEQ ID NO: 41487 - protein, 174 aa, Arabidopsis thaliana
  peptide (1)..(174): Ceres Seq. ID no. 12330634
MGFGLGLSGHGLYRVITERTVLAMPENGIGLFPDVGFSYIAAHSPGEGSVGAYLGMTGRRISTPSDSLFVGLGTHYVPSGKLGSLREAILSADLSKDPQQHIQATLSNYSSDPETESHLQMLLPQIESAFSVSKSVKETIEELKSSSRAVRLQLQNGLMKQSKALKKGHLFLFT

SEQ ID NO: 41488 - protein, 151 aa, Arabidopsis thaliana
  peptide (1)..(151): Ceres Seq. ID no. 12330635
MPENGIGLFPDVGFSYIAAHSPGEGSVGAYLGMTGRRISTPSDSLFVGLGTHYVPSGKLGSLREAILSADLSKDPQQHIQATLSNYSSDPETESHLQMLLPQIESAFSVSKSVKETIEELKSSSRAVRLQLQNGLMKQSKALKKGHLFLFT

SEQ ID NO: 41489 - DNA, 1951 bp, Arabidopsis thaliana
  misc_feature (1)..(1951): Ceres Seq. ID no. 13491676
  misc_feature (1)..(1951): Ortholog of  Ceres SEQ ID NO 15171610 as cited in SEQ ID NO 57317
atcagttaatcaacgcaacgccgagaagctttttcaggggtttggtgcgttgaatttgtggatcaagaaacaatgcaaattcaatgcaaaaccctaacttttacagtttcttcgattccttgtaacccaaagctaccattcccatcttccctcactttacggtcatggaatccttcattcccgagtttcaggagctccgctgtttccggaccaaagtcatcactgaagctgaacaggtttttaagaaactgtgcaagtacgaatcaggagcttgttgttgatggagaaaccggaaatgggtcgatttcggagctccaaggagatgcagcaaatggttcgatttcgccggtggaagtggaagcagaagtagaagaagtgaaggtagatgatttggcgactcagagcatttggggacagatgaaagagatcgtcatgtttaccggacctgccgcgggattgtggctatgtgggccgttgatgagtctcattgatacggcggtgattggtcaaggaagctcactcgaactcgctgctttaggtcctgctaccgtcatctgtgattatttgtgttatacgttcatgttcctctcagttgcgacttcaaatcttgttgctacctctcttgctcggcaggataaagatgaagtacaacatcagatatcgatcttgcttttcattgggttggcttgtggagtcacgatgatggtgttgacaagactgtttggttcctgggcactaactgcttttacaggggtaaagaatgccgacattgttccagcagctaataaatatgttcagattcgtggtttagcatggccagctgttctcattggatgggttgctcaaagtgcaagtcttggtatgaaagactcatggggacctcttaaggctttggcggttgctagtgcaataaacggtgttggtgatgtggtcttatgcacctttctaggatatggtatagcaggtgcagcttgggcaactatggtgtcacaagttgttgctgcttatatgatgatggacgcattgaacaagaaaggatacagcgcattctcattctgtgttccttctccaagtgaacttttgacgatttttggactcgctgcccctgtctttataactatgatgtcaaaggttttgttctatacgctccttgtgtactttgctacatcaatgggtacaaatatcatagctgctcatcaggttatgcttcagatatataccatgagtacggtttggggggagcctctctctcaaactgcacagtcctttatgcctgagcttttattcggaatcaatcgtaatttgcctaaagctagggtgcttctgaagtcactagttatcatcggagctacgctaggaatagtagtcggaaccattggcacagcagttccatggctgttccctggcatcttcacacgtgacaaggttgtcacatccgagatgcacaaggtcataataccgtattttcttgctttatccatcactccaagtactcacagtcttgaaggcaccttactggctggaagagatcttagatatatcagcttgtcaatgactggatgcttagcggtcgctgggcttctacttatgcttctgagcaatggaggatttggtttgagaggctgctggtatgctctcgtgggattccaatgggctcggttttctctatctcttttccgccttctatcgcgggatggtgtactgtactccgaagatacaagccgatacgctgagaaagtgaaagctgcgtagctcagtaagtcaccgtatacctcacaagaaaaagtataatgaacagagaacagcttcattcagttgtagatcaatgggttactctgtttcaagattgtattctttaagaacatgaaaatgtattcgactgaatagaaaagtcttggcattaataggccctgcttcaactcctgtgattcccctgtatataaaagatgat

SEQ ID NO: 41490 - protein, 559 aa, Arabidopsis thaliana
  peptide (1)..(559): Ceres Seq. ID no. 13491677
MQIQCKTLTFTVSSIPCNPKLPFPSSLTLRSWNPSFPSFRSSAVSGPKSSLKLNRFLRNCASTNQELVVDGETGNGSISELQGDAANGSISPVEVEAEVEEVKVDDLATQSIWGQMKEIVMFTGPAAGLWLCGPLMSLIDTAVIGQGSSLELAALGPATVICDYLCYTFMFLSVATSNLVATSLARQDKDEVQHQISILLFIGLACGVTMMVLTRLFGSWALTAFTGVKNADIVPAANKYVQIRGLAWPAVLIGWVAQSASLGMKDSWGPLKALAVASAINGVGDVVLCTFLGYGIAGAAWATMVSQVVAAYMMMDALNKKGYSAFSFCVPSPSELLTIFGLAAPVFITMMSKVLFYTLLVYFATSMGTNIIAAHQVMLQIYTMSTVWGEPLSQTAQSFMPELLFGINRNLPKARVLLKSLVIIGATLGIVVGTIGTAVPWLFPGIFTRDKVVTSEMHKVIIPYFLALSITPSTHSLEGTLLAGRDLRYISLSMTGCLAVAGLLLMLLSNGGFGLRGCWYALVGFQWARFSLSLFRLLSRDGVLYSEDTSRYAEKVKAA

SEQ ID NO: 41491 - protein, 444 aa, Arabidopsis thaliana
  peptide (1)..(444): Ceres Seq. ID no. 13491678
MKEIVMFTGPAAGLWLCGPLMSLIDTAVIGQGSSLELAALGPATVICDYLCYTFMFLSVATSNLVATSLARQDKDEVQHQISILLFIGLACGVTMMVLTRLFGSWALTAFTGVKNADIVPAANKYVQIRGLAWPAVLIGWVAQSASLGMKDSWGPLKALAVASAINGVGDVVLCTFLGYGIAGAAWATMVSQVVAAYMMMDALNKKGYSAFSFCVPSPSELLTIFGLAAPVFITMMSKVLFYTLLVYFATSMGTNIIAAHQVMLQIYTMSTVWGEPLSQTAQSFMPELLFGINRNLPKARVLLKSLVIIGATLGIVVGTIGTAVPWLFPGIFTRDKVVTSEMHKVIIPYFLALSITPSTHSLEGTLLAGRDLRYISLSMTGCLAVAGLLLMLLSNGGFGLRGCWYALVGFQWARFSLSLFRLLSRDGVLYSEDTSRYAEKVKAA

SEQ ID NO: 41492 - protein, 439 aa, Arabidopsis thaliana
  peptide (1)..(439): Ceres Seq. ID no. 13491679
MFTGPAAGLWLCGPLMSLIDTAVIGQGSSLELAALGPATVICDYLCYTFMFLSVATSNLVATSLARQDKDEVQHQISILLFIGLACGVTMMVLTRLFGSWALTAFTGVKNADIVPAANKYVQIRGLAWPAVLIGWVAQSASLGMKDSWGPLKALAVASAINGVGDVVLCTFLGYGIAGAAWATMVSQVVAAYMMMDALNKKGYSAFSFCVPSPSELLTIFGLAAPVFITMMSKVLFYTLLVYFATSMGTNIIAAHQVMLQIYTMSTVWGEPLSQTAQSFMPELLFGINRNLPKARVLLKSLVIIGATLGIVVGTIGTAVPWLFPGIFTRDKVVTSEMHKVIIPYFLALSITPSTHSLEGTLLAGRDLRYISLSMTGCLAVAGLLLMLLSNGGFGLRGCWYALVGFQWARFSLSLFRLLSRDGVLYSEDTSRYAEKVKAA

SEQ ID NO: 41493 - DNA, 1204 bp, Arabidopsis thaliana
  misc_feature (1)..(1204): Ceres Seq. ID no. 12325916
  misc_feature (1)..(1204): Ortholog of  Ceres SEQ ID NO 15175957 as cited in SEQ ID NO 20615
  misc_feature (1)..(1204): Ortholog of  Ceres SEQ ID NO 14301490 as cited in SEQ ID NO 66234
agattatctacctgttgtcttgggattaactaaagatggtagccatctacagtttaaagtgcaatttaattgggtaaatcaggaggatgaggaagaggaaacagagatgtcaaacgtttggtatgaagttttatctgttttgcatctaatggcaatgctacaaatgtctcaagccaatttactgcttcttcctagaggttctagtgatggtcacaatcatccgaaagtatccgaagaaaacagacgaacttcgattgatatcttcttaaaagcagctggatatcttgattgtgccgttaagcatgttctcccccagttttctgctgagcaaaggagaagtttaccagttgacttagcagaaggaactctacgggctctttgcttgcaaggcacttggccagggtgttgatatccaacttggcatggcgattgatagctcaaaggccactcttgcagtaaaacgaagactttcatgtgaaatggtgaaatattggcagcaggcacaagataatttaatgaatctcccgttagcaaatggttggggagaaaagcatggactctttgttaagtggaagtatgttgaagctaaggctgcggcttactactatcatggtttgattcttgatgaaggaaacacagagaagtcacatggcatggcagttgctgctttacaagctgcagatgaatgtttcaaagaaagtaagaaagcatccgaagcattcaacgcctctgcgcctacttcaagaacaccgcccctctttggaacaatgaaatatctaactgagaaaatcccgaaagatacttcgagtaaagtcaggataaaccgtgatctatactcttatgaaaaaatcatggagacagcaccaacacttcctgatttcgctttggcattgaaaccagatgagtatcaacttccactcgccgaagcttcgtagtctgaagatgctcaaagcgcttcgaaccaactttaaggagcaaacgaagagagagagagagatgtgtaaaccttgtatagccaaaaaatcagtggtttccaatggctgcctgcaaattatggtatggctatagaatttacccaacaggtttctatactgtgtgagaaaaaacacttatcaaaattgggtttggatcagtttacatgagagagatctttgtatgttaatgtactaatatatttcttcaataaagcattatttttttccct

SEQ ID NO: 41494 - protein, 170 aa, Arabidopsis thaliana
  peptide (1)..(170): Ceres Seq. ID no. 12325917
MAIDSSKATLAVKRRLSCEMVKYWQQAQDNLMNLPLANGWGEKHGLFVKWKYVEAKAAAYYYHGLILDEGNTEKSHGMAVAALQAADECFKESKKASEAFNASAPTSRTPPLFGTMKYLTEKIPKDTSSKVRINRDLYSYEKIMETAPTLPDFALALKPDEYQLPLAEAS

SEQ ID NO: 41495 - protein, 151 aa, Arabidopsis thaliana
  peptide (1)..(151): Ceres Seq. ID no. 12325918
MVKYWQQAQDNLMNLPLANGWGEKHGLFVKWKYVEAKAAAYYYHGLILDEGNTEKSHGMAVAALQAADECFKESKKASEAFNASAPTSRTPPLFGTMKYLTEKIPKDTSSKVRINRDLYSYEKIMETAPTLPDFALALKPDEYQLPLAEAS

SEQ ID NO: 41496 - protein, 139 aa, Arabidopsis thaliana
  peptide (1)..(139): Ceres Seq. ID no. 12325919
MNLPLANGWGEKHGLFVKWKYVEAKAAAYYYHGLILDEGNTEKSHGMAVAALQAADECFKESKKASEAFNASAPTSRTPPLFGTMKYLTEKIPKDTSSKVRINRDLYSYEKIMETAPTLPDFALALKPDEYQLPLAEAS

SEQ ID NO: 41497 - DNA, 1436 bp, Arabidopsis thaliana
  misc_feature (1)..(1436): Ceres Seq. ID no. 12330644
  misc_feature (1)..(1436): Ortholog of  Ceres SEQ ID NO 13596090 as cited in SEQ ID NO 68377
  misc_feature (1)..(1436): Ortholog of  Ceres SEQ ID NO 14303557 as cited in SEQ ID NO 68595
atttaggttcataggccagtgagtctctctctctctatctctaaaagaaagagaagcaaaaaagtaaggaatgtttcctcgcaatcatcatcatcatcaccatcttcgtcttcttctttgaaacctccagcgacttcctcgtagttctctcacttatacacttactaatacagagtaacagagagagacagagtggactcttcttagagtaagatgggaggtgtgacttcttcaatggcggcgaagttggcgttttttcctccgaatccgccgtcgtacaagctggtcagagatgaaacaacggagctttttctaatgagcccttttccccatcgagaaaatgtcgacattttgcggctgcccacgcgccgaggcaccgaaatcgtggccatgtacatcagatacccaatggccgtcaccacccttctctactctcatggaaatgctgccgacatcggtcagatgtatgagctcttcatcgagctcagtattcacctccgcgtcaatttgatggggtatgactattcagggtatggccaatcatcagggaagcccacagaacaaaacacttatgctgatatcgaggctgcttacaaatgtctggaagagaattatggggctaagcaggagaacattattctctatggtcaatctgttggtagtggtccaaccgtggacctagctgctcgtttgcctcgactaagagcttccattcttcatagtccaattctttctgggcttagagttatgtatcccgttaagcgaacttattggtttgacatatacaagaacattgacaaaattacgctggtgaggtgtcctgtcctcgtgattcatggaacagcggatgatgtggttgacttctctcatgggaagcagctttgggaactctgccaagagaaatatgaaccgctatggctcaaaggtggaaaccattgtgatcttgaactctttcccgaatacataggccatctcaagaagtttgtgagcgctgtggagaaatctgcatcgaaaagaaacagttctttctcaagaagaagcatggaagggtgtgaacaacctcctcgtcatagtgtagatgctccaaggaagagtaaggacggacgagaaaaaccgaggaaaagcatagacagactaaggttccagggatacaagttgagccacatagagaaaccggagaagctgaaggttccatttgaagaaatggagaggtcaaggagaagcgtggacatatacagagataagtctcagccgatggagagagcacgtaagagtgtggattggttggacagaagtcgagctaccgaatgaaaatggagggtttgatgtcaaaagattgtatttgagtgtcgttcaatttattggggtatgtgtttgtattgtagtttgtatgccaagttaaaatacaacaggaagatagatttaaacaaagtatg

SEQ ID NO: 41498 - protein, 365 aa, Arabidopsis thaliana
  peptide (1)..(365): Ceres Seq. ID no. 12330645
MGGVTSSMAAKLAFFPPNPPSYKLVRDETTELFLMSPFPHRENVDILRLPTRRGTEIVAMYIRYPMAVTTLLYSHGNAADIGQMYELFIELSIHLRVNLMGYDYSGYGQSSGKPTEQNTYADIEAAYKCLEENYGAKQENIILYGQSVGSGPTVDLAARLPRLRASILHSPILSGLRVMYPVKRTYWFDIYKNIDKITLVRCPVLVIHGTADDVVDFSHGKQLWELCQEKYEPLWLKGGNHCDLELFPEYIGHLKKFVSAVEKSASKRNSSFSRRSMEGCEQPPRHSVDAPRKSKDGREKPRKSIDRLRFQGYKLSHIEKPEKLKVPFEEMERSRRSVDIYRDKSQPMERARKSVDWLDRSRATE

SEQ ID NO: 41499 - protein, 358 aa, Arabidopsis thaliana
  peptide (1)..(358): Ceres Seq. ID no. 12330646
MAAKLAFFPPNPPSYKLVRDETTELFLMSPFPHRENVDILRLPTRRGTEIVAMYIRYPMAVTTLLYSHGNAADIGQMYELFIELSIHLRVNLMGYDYSGYGQSSGKPTEQNTYADIEAAYKCLEENYGAKQENIILYGQSVGSGPTVDLAARLPRLRASILHSPILSGLRVMYPVKRTYWFDIYKNIDKITLVRCPVLVIHGTADDVVDFSHGKQLWELCQEKYEPLWLKGGNHCDLELFPEYIGHLKKFVSAVEKSASKRNSSFSRRSMEGCEQPPRHSVDAPRKSKDGREKPRKSIDRLRFQGYKLSHIEKPEKLKVPFEEMERSRRSVDIYRDKSQPMERARKSVDWLDRSRATE

SEQ ID NO: 41500 - protein, 331 aa, Arabidopsis thaliana
  peptide (1)..(331): Ceres Seq. ID no. 12330647
MSPFPHRENVDILRLPTRRGTEIVAMYIRYPMAVTTLLYSHGNAADIGQMYELFIELSIHLRVNLMGYDYSGYGQSSGKPTEQNTYADIEAAYKCLEENYGAKQENIILYGQSVGSGPTVDLAARLPRLRASILHSPILSGLRVMYPVKRTYWFDIYKNIDKITLVRCPVLVIHGTADDVVDFSHGKQLWELCQEKYEPLWLKGGNHCDLELFPEYIGHLKKFVSAVEKSASKRNSSFSRRSMEGCEQPPRHSVDAPRKSKDGREKPRKSIDRLRFQGYKLSHIEKPEKLKVPFEEMERSRRSVDIYRDKSQPMERARKSVDWLDRSRATE

SEQ ID NO: 41501 - DNA, 1260 bp, Arabidopsis thaliana
  misc_feature (1)..(1260): Ceres Seq. ID no. 13499913
  misc_feature (1)..(1260): Ortholog of  Ceres SEQ ID NO 13582619 as cited in SEQ ID NO 56520
  misc_feature (1)..(1260): Ortholog of  Ceres SEQ ID NO 12611392 as cited in SEQ ID NO 56826
  misc_feature (1)..(1260): Ortholog of  Ceres SEQ ID NO 13660872 as cited in SEQ ID NO 60830
acactgagaagaaaaatccttcaggttatcgaaaattcccggattttactctttgggcggtggccgatttcttacgcgctctttttgtggcgactgttgtatacgcgcgagccttcatggacacgaaggcggttggagtttctaaggatacggcggcgtcgatggaagcgtcgacggtgtttcctgggtttaaattctcgccgacggatgtggagttgatttcgtattacctgaagcggaagatggatggcttggagaggtccgttgaggttataccggaccttgagatttacaatttcgagccttgggatttacccgataagtcgattgtgaaatctgatagcgagtggttcttcttctgtgcgcgtgggaaaaagtatccacatggttcacagaacaggagagcaacgaagatgggatactggaaagcaactgggaaagagcgtgatgtgaagtctggttctgaggtcattggaacaaagaggacgcttgttttccatattggtcgtgcaccaaaaggcgaaagaactgactggattatgcacgagtactgcgtgaaaggagtatctctggatgatgctatggttgtttgccgggttaggaggaacaaagaatacaatagtggtacaagtcagaaggcaccaaagccaaattcatcagccgagaagcatgcgaaagtccaaaatggcgctacgagttcagggagcccgtctgattgggacaacttggttgatttttacctagcaggtgaatcaggggagaaactactcgctgagatggcagagtcatcagaaaatctacaggtggataatgacgaggatttctttgcggatatcctaagagacgaaatcatcaatctcgatgaagcggtgatgacagggaacacaccaaacgaagtgccaacactagaatcagcatcaatggagataagggtacttcctttaccaaacatgatagacaaacaaatgtcatcactgttagaggaaagaccatcgcagaagaagaaaggaaaagacgccacggaatcattgtcgagctgcttcgtgggtttatactcgatcaaatcagtgaacaaggcacgatgggatgttattataggtgtagtggctctgatagcaatgttgttttatctagaataagaggcttatggaagtagcgaaaaacagtgtcctagctatgtttgtatcatcttttctcggacattgacaaggattatatgatgtttttgtgtaaacggtttatgttttacacttctacttc

SEQ ID NO: 41502 - protein, 378 aa, Arabidopsis thaliana
  peptide (1)..(378): Ceres Seq. ID no. 13499914
TEKKNPSGYRKFPDFTLWAVADFLRALFVATVVYARAFMDTKAVGVSKDTAASMEASTVFPGFKFSPTDVELISYYLKRKMDGLERSVEVIPDLEIYNFEPWDLPDKSIVKSDSEWFFFCARGKKYPHGSQNRRATKMGYWKATGKERDVKSGSEVIGTKRTLVFHIGRAPKGERTDWIMHEYCVKGVSLDDAMVVCRVRRNKEYNSGTSQKAPKPNSSAEKHAKVQNGATSSGSPSDWDNLVDFYLAGESGEKLLAEMAESSENLQVDNDEDFFADILRDEIINLDEAVMTGNTPNEVPTLESASMEIRVLPLPNMIDKQMSSLLEERPSQKKKGKDATESLSSCFVGLYSIKSVNKARWDVIIGVVALIAMLFYLE

SEQ ID NO: 41503 - protein, 340 aa, Arabidopsis thaliana
  peptide (1)..(340): Ceres Seq. ID no. 13499915
MDTKAVGVSKDTAASMEASTVFPGFKFSPTDVELISYYLKRKMDGLERSVEVIPDLEIYNFEPWDLPDKSIVKSDSEWFFFCARGKKYPHGSQNRRATKMGYWKATGKERDVKSGSEVIGTKRTLVFHIGRAPKGERTDWIMHEYCVKGVSLDDAMVVCRVRRNKEYNSGTSQKAPKPNSSAEKHAKVQNGATSSGSPSDWDNLVDFYLAGESGEKLLAEMAESSENLQVDNDEDFFADILRDEIINLDEAVMTGNTPNEVPTLESASMEIRVLPLPNMIDKQMSSLLEERPSQKKKGKDATESLSSCFVGLYSIKSVNKARWDVIIGVVALIAMLFYLE

SEQ ID NO: 41504 - protein, 325 aa, Arabidopsis thaliana
  peptide (1)..(325): Ceres Seq. ID no. 13499916
MEASTVFPGFKFSPTDVELISYYLKRKMDGLERSVEVIPDLEIYNFEPWDLPDKSIVKSDSEWFFFCARGKKYPHGSQNRRATKMGYWKATGKERDVKSGSEVIGTKRTLVFHIGRAPKGERTDWIMHEYCVKGVSLDDAMVVCRVRRNKEYNSGTSQKAPKPNSSAEKHAKVQNGATSSGSPSDWDNLVDFYLAGESGEKLLAEMAESSENLQVDNDEDFFADILRDEIINLDEAVMTGNTPNEVPTLESASMEIRVLPLPNMIDKQMSSLLEERPSQKKKGKDATESLSSCFVGLYSIKSVNKARWDVIIGVVALIAMLFYLE

SEQ ID NO: 41505 - DNA, 912 bp, Arabidopsis thaliana
  misc_feature (1)..(912): Ceres Seq. ID no. 13500029
  misc_feature (1)..(912): Ortholog of  Ceres SEQ ID NO 14306223 as cited in SEQ ID NO 56928
  misc_feature (1)..(912): Ortholog of  Ceres SEQ ID NO 12784326 as cited in SEQ ID NO 61717
tgaaaatccttcaagaatcgcttcatcttcttcttcttcaacaaatcgagtcctttttctgataactcatttcgatttcagaaactcgccaagaactggatactctggcggaatcagagattaagaaccgagacgtggttctgaaactgtatgaagccctgagatctcgcgacgtcaaatctgtgcaccagatcttaaccccagatctggagtattggttccacggtcctccgccgcaccagtttttgatgcgcgtactcaccggaggtgtctctccgtcttcttcctccttcgaattcgtacctctctccgtcgtttccttcggatctaccgtaatcgcggaaggctgcgacgccgcgacatcgatttcttggatccacgcttggactgtagcgaatgggataatcacacaggtgagggagtactctaacacttctctcaccgtcacacggatcggtaacgttgttgctggacgacgctccgctgagattgcgcctccgtcgcattgttcctccgtgtgggaaagccaattctcgggtcgggctggtaaacccgtacccggtttggttctggcgatttgaaagagtttggtaaagtaagtaacagccacgtcaggagaataactaaataaaggctgcttacgtgtctgtgtgtggttggtttgtttgttgtatgggttaaaaaggattttgttgctgttttaaacgcggtgtgggcttctggggctacggtcgcgtttggctgtcgctagttttttttttttttttaagttgtttgtctgaaaattcgtgtgggtttgtgttttttagtgggagcaagtatggggaaacccaaatcgacttgttgtcccgttgcgtttgatgtaacgtttgcttatgttataattgaaataaaaaagtgcttttgggatcc

SEQ ID NO: 41506 - protein, 110 aa, Arabidopsis thaliana; identical to SEQ ID NO: 26872
  peptide (1)..(110): Ceres Seq. ID no. 13500030

SEQ ID NO: 41507 - DNA, 1086 bp, Arabidopsis thaliana
  misc_feature (1)..(1086): Ceres Seq. ID no. 12331251
  misc_feature (1)..(1086): Ortholog of  Ceres SEQ ID NO 13595598 as cited in SEQ ID NO 56822
  misc_feature (1)..(1086): Ortholog of  Ceres SEQ ID NO 15171777 as cited in SEQ ID NO 57417
  misc_feature (1)..(1086): Ortholog of  Ceres SEQ ID NO 13655712 as cited in SEQ ID NO 63394
  misc_feature (1)..(1086): Ortholog of  Ceres SEQ ID NO 15179075 as cited in SEQ ID NO 0
aattcatttcaccaccatccttcttcttctttatttagttttctttctgtactttgaaccaagacaaggtggtggagaggagaagaagaaaacaaccaacaagagacatgtcttgtaataataatggcttagctttcttccctgaaaatttcagtctccaaaaccatcaccaagaagaagaagatcaccctcaacttcttcaagacttccatgggtttctaggtaaaagatctccaatgaacaacgtgcaagggttttgtaatctagatatgaacggagatgaagaatattcagacgatggatctaagatgggagagaagaagaggagattgaacatggaacaattgaaggcactagagaaggactttgagcttggtaataaacttgaatcagatcgaaaattagagctagctcgtgccttgggattgcaacctagacaaattgctatatggttccaaaacagaagagctcgatccaaaaccaagcagcttgagaaagactatgacatgcttaagcgtcaattcgaaagtctcagagatgagaacgaagttcttcaaactcaaaatcaaaagcttcaagctcaggtaatggcattgaaaagcagagaaccaatagaatcaatcaatctgaacaaagaaacagaaggatcatgtagtgacagaagtgagaacatttctggtgacatcaggccaccggagatcgatagccaattcgccctaggccatccaccgacaactacaacgatgcagttttttcagaattcatcgtcagaacagagaatggtgaaagaagagaacagtatcagtaacatgttctgtggaattgatgaccagtctgggttctggccatggcttgaccagcaacaatacaattgaatgtggtcgatctgttcttgtttgtattaaaattttcgttttctttaagtggtcagatgaaccaattcatgtttcaagaatctatatttagtctatatgcaccaactaagctagtagtttttttgggtaatgtgatgtaagagaattaatgggggaaatattcatcatattatatgataattaatcaatcatatgggccatatgattagac

SEQ ID NO: 41508 - protein, 255 aa, Arabidopsis thaliana
  peptide (1)..(255): Ceres Seq. ID no. 12331252
MSCNNNGLAFFPENFSLQNHHQEEEDHPQLLQDFHGFLGKRSPMNNVQGFCNLDMNGDEEYSDDGSKMGEKKRRLNMEQLKALEKDFELGNKLESDRKLELARALGLQPRQIAIWFQNRRARSKTKQLEKDYDMLKRQFESLRDENEVLQTQNQKLQAQVMALKSREPIESINLNKETEGSCSDRSENISGDIRPPEIDSQFALGHPPTTTTMQFFQNSSSEQRMVKEENSISNMFCGIDDQSGFWPWLDQQQYN

SEQ ID NO: 41509 - protein, 212 aa, Arabidopsis thaliana
  peptide (1)..(212): Ceres Seq. ID no. 12331253
MNNVQGFCNLDMNGDEEYSDDGSKMGEKKRRLNMEQLKALEKDFELGNKLESDRKLELARALGLQPRQIAIWFQNRRARSKTKQLEKDYDMLKRQFESLRDENEVLQTQNQKLQAQVMALKSREPIESINLNKETEGSCSDRSENISGDIRPPEIDSQFALGHPPTTTTMQFFQNSSSEQRMVKEENSISNMFCGIDDQSGFWPWLDQQQYN

SEQ ID NO: 41510 - protein, 201 aa, Arabidopsis thaliana
  peptide (1)..(201): Ceres Seq. ID no. 12331254
MNGDEEYSDDGSKMGEKKRRLNMEQLKALEKDFELGNKLESDRKLELARALGLQPRQIAIWFQNRRARSKTKQLEKDYDMLKRQFESLRDENEVLQTQNQKLQAQVMALKSREPIESINLNKETEGSCSDRSENISGDIRPPEIDSQFALGHPPTTTTMQFFQNSSSEQRMVKEENSISNMFCGIDDQSGFWPWLDQQQYN

SEQ ID NO: 41511 - DNA, 1067 bp, Arabidopsis thaliana
  misc_feature (1)..(1067): Ceres Seq. ID no. 13491405
  misc_feature (1)..(1067): Ortholog of  Ceres SEQ ID NO 13594430 as cited in SEQ ID NO 60181
  misc_feature (1)..(1067): Ortholog of  Ceres SEQ ID NO 13589401 as cited in SEQ ID NO 0
cgggaagaaagttgactagaaacggagaatttccaaatgttgaatttgttggatgcatgtgaaagccaattctatttggttcctccttgataatccacccaatcgctgtcattctcccatcaatctagctgctttcacaaaccattgtactgagatcgtatctttaaggtaaatttcaaatcggagtcggcgagatcgaaataggaacctggaagtcggagaatttgtgtaaattcggtttttttttttttaattctccgatggatagtttaagtgatatcgatggtgatttcgatggaagaaatgaaggaggatcgtcatcggattatcgattgttgggtcggcagattacggttcatcagttcatgggtggtggcaaagctgctgacttgctcttatggaggaggcgacatctttctttgggggttatcattatatcaactgtagcctggcttatattcgagttttccgggttgcctttcttatctgtttcttcggatgtcttactcatcgtgatcatgatatcattcgttcatgcccgggtttctgcttttaggaatagacagttgcattcgttgccagagcttgttctatcagaggaaatggtgaatagtgctgcagcttctttccgtataaaactcaatcacttgcttgtaatggctcatgatgtcacagttggcaacgattttcgactcttcttcaaggtggtgatttgtctgtggcttctctctgccattggtagctatatatctctctgcactcttctttacatcgggaccatcctatctgtaacaataccggctttgtacagtaaatatcaaagcaaagtagacaagtgttgcgggacgattcacaggcggttgtctcaccactacaaaatagtagacgaaaatgttataagcagactctcatggagcttatccaaggataaagattcatgagcttaactttggtgattctgagaatgcttttacttgtttttgtttagcttttcttgttattcaccatttgtagtataactaaacgccatatccagaatgaatataagatggtttctttgttcaact

SEQ ID NO: 41512 - protein, 226 aa, Arabidopsis thaliana
  peptide (1)..(226): Ceres Seq. ID no. 13491406
MDSLSDIDGDFDGRNEGGSSSDYRLLGRQITVHQFMGGGKAADLLLWRRRHLSLGVIIISTVAWLIFEFSGLPFLSVSSDVLLIVIMISFVHARVSAFRNRQLHSLPELVLSEEMVNSAAASFRIKLNHLLVMAHDVTVGNDFRLFFKVVICLWLLSAIGSYISLCTLLYIGTILSVTIPALYSKYQSKVDKCCGTIHRRLSHHYKIVDENVISRLSWSLSKDKDS

SEQ ID NO: 41513 - protein, 191 aa, Arabidopsis thaliana
  peptide (1)..(191): Ceres Seq. ID no. 13491407
MGGGKAADLLLWRRRHLSLGVIIISTVAWLIFEFSGLPFLSVSSDVLLIVIMISFVHARVSAFRNRQLHSLPELVLSEEMVNSAAASFRIKLNHLLVMAHDVTVGNDFRLFFKVVICLWLLSAIGSYISLCTLLYIGTILSVTIPALYSKYQSKVDKCCGTIHRRLSHHYKIVDENVISRLSWSLSKDKDS

SEQ ID NO: 41514 - protein, 140 aa, Arabidopsis thaliana
  peptide (1)..(140): Ceres Seq. ID no. 13491408
MISFVHARVSAFRNRQLHSLPELVLSEEMVNSAAASFRIKLNHLLVMAHDVTVGNDFRLFFKVVICLWLLSAIGSYISLCTLLYIGTILSVTIPALYSKYQSKVDKCCGTIHRRLSHHYKIVDENVISRLSWSLSKDKDS

SEQ ID NO: 41515 - DNA, 1474 bp, Arabidopsis thaliana
  misc_feature (1)..(1474): Ceres Seq. ID no. 12329750
  misc_feature (1)..(1474): Ortholog of  Ceres SEQ ID NO 15176230 as cited in SEQ ID NO 58796
  misc_feature (1)..(1474): Ortholog of  Ceres SEQ ID NO 14308156 as cited in SEQ ID NO 59006
  misc_feature (1)..(1474): Ortholog of  Ceres SEQ ID NO 13596321 as cited in SEQ ID NO 67976
aaatagagacctttctttaacacagagaaagagcctgagagacaagtgagaaacgcaacaacaccaccgaaagagagagtccaaattcgaaagagaaaaagaatcaaattccttcttcttccttttttgattttcaattattactttaatcttctttcccgctctctattcttcttcttctttaggatcaatcaccgtttagctttcttcccatacgtctctccgtttacgaccagtatacagaggctggagctggggaagaaaaggattgtctatggagggagacgtcggaataggtttggtatgccagaatactatggatgggaaggcgagtaatggaaatggtttagagaagactgtaccttcttgttgccttaaggctatggcatgtgtacctgaggatgatgctaagtgtcactccactgttgtttctgggtggttttcggaacctcaccctcgctctgggaaaaaaggcggcaaagcagtctatttcaacaaccctatgtggccaggagaagcacactcactgaaagttgagaaagttctgttcaaagacaagtcggattttcaggaagtcctagtgttcgagtcagccacgtacggaaaggtgcttgttctagatggtatcgtacagctgaccgaaaaagatgaatgtgcatatcaggagatgatagcccatctgcctttatgctctatatcttcccctaaaaatgttcttgttgttggtggaggtgatggtggtgttcttcgagagatttctcgccatagttctgttgaggttattgatatctgtgagatagacaagatggttatagatgtgtctaagaagttcttccccgagttagcggttgggtttgacgatcctcgtgttcaacttcacattggtgatgctgctgagttcctccgtaaatcccctgaagggaagtatgatgccatcattgttgattcttcagatcccgtaggtcctgctcttgcgcttgttgagaagcctttcttcgagacactggctagagcgttgaagcctgggggagttctttgtaacatggcagaaagtatgtggctccatactcatcttattgaagatatgatctccatttgccgtcaaacattcaaaagtgttcactatgcgtggagcagcgtccccacatatccaagcggcgtgattggtttcgtcttgtgctctactgaaggaccagctgttgacttcaagaacccaatcaaccctattgagaaactagacggtgcgatgacccataaaagagaattgaagttctataactctgatatgcacagagccgcatttgctttgcccacattcctgcggagagaagtagcttcacttctggcttcttgacttctgtttggctctaccatatccctcatatcaaactttgtagaactcttgaagaggaataataaatcattgaaggctttgtatctctaagtttactcctttataaaaagacttatattt

SEQ ID NO: 41516 - protein, 359 aa, Arabidopsis thaliana; identical to SEQ ID NO: 24836
  peptide (1)..(359): Ceres Seq. ID no. 12329751

SEQ ID NO: 41517 - protein, 345 aa, Arabidopsis thaliana; identical to SEQ ID NO: 24837
  peptide (1)..(345): Ceres Seq. ID no. 12329752

SEQ ID NO: 41518 - protein, 323 aa, Arabidopsis thaliana; identical to SEQ ID NO: 24838
  peptide (1)..(323): Ceres Seq. ID no. 12329753

SEQ ID NO: 41519 - DNA, 1538 bp, Arabidopsis thaliana
  misc_feature (1)..(1538): Ceres Seq. ID no. 12389171
  misc_feature (1)..(1538): Ortholog of  Ceres SEQ ID NO 15171382 as cited in SEQ ID NO 51642
  misc_feature (1)..(1538): Ortholog of  Ceres SEQ ID NO 15168545 as cited in SEQ ID NO 57829
  misc_feature (1)..(1538): Ortholog of  Ceres SEQ ID NO 15168468 as cited in SEQ ID NO 58115
  misc_feature (1)..(1538): Ortholog of  Ceres SEQ ID NO 15179784 as cited in SEQ ID NO 64755
  misc_feature (1)..(1538): Ortholog of  Ceres SEQ ID NO 13596440 as cited in SEQ ID NO 68769
  misc_feature (1)..(1538): Ortholog of  Ceres SEQ ID NO 15180012 as cited in SEQ ID NO 0
gattagattgtccctaggagtcactgttatcgctctttcaattactgtaatgttgaatttgggtttcatctactaactaagatgaagtttcttgtctctttctgtctccctctttcttaattcctctctacttttcggttaattgctcctcttcagctaactttggggctttaaagtgataggatggctcgcttcagttttccttgttttccaaattttgggggttttaatcaggctgtgacaaatcgggggcctgagatttcagaaactgctgataattgggtctcaccatctgacattccactcatagaacctaatagtaaagagcacaggatgagagaggcacagctaggcggtcacactctgaggtcccatggaatgactgttgcaaggactcacatgcatgattggatcattctcgtgttacttgttattctcgagtgtgtactccttataatccacccattttatcgctttgttggtaaagatatgatgactgatctaagttacccgttaaagagtaacaccgtaccaatttggtctgtcccggtatatgcgatgctgttacctttggtaatcttcatctttatctacttccgtcgaagagatgtttatgatcttcatcacgcggtgctaggtctcttatactctgttctggtgacagcagtacttaccgatgcaataaagaatgcagttggtcgaccacgtcctgacttcttctggcgttgttttccagatggcaaagctctttatgatagccttggagatgttatatgccatggtgataaaagcgtcataagggaaggtcacaaaagctttccaagtggacacacgtcatggtctttttcgggtctcggatttctttcgctttacttatcgggaaagattcaagcatttgacggtaaaggccacgttgcaaagctatgcatagtcatactccctttgctatttgcagctcttgtcggcatttcccgtgttgatgactattggcatcattggcaagacgtctttgcaggaggcttgctaggtcttgcgatctctacaatctgttatcttcaatttttcccgccaccatatcacaccgaaggttggggaccatatgcttacttccaagtgttggaggctgcgagagtgcaaggagcagcgaatggagcagtgcagcagccgccgccccaagttaacaacggtgaagaagaagacggtgggtttatgggtttacatttggtggataatccgactatgaggagagaagaggatgtagaaactggtagaggctgagatgaagaaactctgaagctggtttggttacttgttaggacactttctcttgttcttttgattctttgttggacaactttagtagatttctctaagataactaatagagtcgtttggttttggttttggtttaaatggatgaccggttttatggttccggtattggtggttaaagtttatgtttttcaaaaaagttcactggataaatgtagctttattttcaatattttaaggattgaaatcggatttgaacttaatcg

SEQ ID NO: 41520 - protein, 364 aa, Arabidopsis thaliana
  peptide (1)..(364): Ceres Seq. ID no. 12389172
MARFSFPCFPNFGGFNQAVTNRGPEISETADNWVSPSDIPLIEPNSKEHRMREAQLGGHTLRSHGMTVARTHMHDWIILVLLVILECVLLIIHPFYRFVGKDMMTDLSYPLKSNTVPIWSVPVYAMLLPLVIFIFIYFRRRDVYDLHHAVLGLLYSVLVTAVLTDAIKNAVGRPRPDFFWRCFPDGKALYDSLGDVICHGDKSVIREGHKSFPSGHTSWSFSGLGFLSLYLSGKIQAFDGKGHVAKLCIVILPLLFAALVGISRVDDYWHHWQDVFAGGLLGLAISTICYLQFFPPPYHTEGWGPYAYFQVLEAARVQGAANGAVQQPPPQVNNGEEEDGGFMGLHLVDNPTMRREEDVETGRG

SEQ ID NO: 41521 - protein, 314 aa, Arabidopsis thaliana; identical to SEQ ID NO: 27353
  peptide (1)..(314): Ceres Seq. ID no. 12389173

SEQ ID NO: 41522 - protein, 299 aa, Arabidopsis thaliana; identical to SEQ ID NO: 27354
  peptide (1)..(299): Ceres Seq. ID no. 12389174

SEQ ID NO: 41523 - DNA, 1170 bp, Arabidopsis thaliana
  misc_feature (1)..(1170): Ceres Seq. ID no. 13491722
  misc_feature (1)..(1170): Ortholog of  Ceres SEQ ID NO 14311576 as cited in SEQ ID NO 51551
aagttagaagacgatatccgctctgaagcagaagaaaaggtaattctgaatgtctggaagaaaccggattcacagagatatccgagacagctatcatgatcatcgtgatttacctccggagagaccttttctccgaggccctccattgttacaacctccaccaccatctttgttagaagatcttcagatacaggagggtgaaatcagaaggcaggatgctgaaatcagaaggcttttgagtgataatcatggactagctgacgaccgaatggttctggagagagaactcgttgctgctaaagaagagcttcaccgaatgaatctgatgatttctgatcttcgtgctgagcaagatctgcaattgagggagtttagtgagaaaaggcataaacttgagggggatgttcgcgctatggagtcgtataagaaggaggcttcacagttgcgtggtgaagttcagaagctggatgagattaaacgtgaattaagtggaaatgttcagttgcttaggaaagatttggctaaattgcaatcagataacaagcagattcctggtatgagagctgaggttaaagacctgcagaaggagcttatgcatgctagagatgcaattgaatatgagaagaaggaaaagtttgagcttatggagcagcggcagacaatggaaaagaacatggtttctatggcgcgtgaagttgaaaagctacgcgcagaacttgctactgttgatagtaggccgtggggttttggtggatcgtatgggatgaattacaacaatatggacggcactttccgtggctcgtatggcgaaaacgatacttatttgggatcttcggaaaggagtcaatattacagccatgggtctggctcgcagaagaaacctcgtttggatcgtcattgaaatctaaaatgatctgtggaaaaagaatgaggtgacgactaaatagcccacttctcaatactcctctggttgtttgtgggtatgcatctactctaaatctaaatgttagttcttctgcttttttaataaggcgttatagttatgtaacttagatggctttttttctttctttctttttagccaagcttagatggctaatctatttcgtatgtttcaataatttgacgatttggttcttcttgcttgctattaattgtgttctattatcc

SEQ ID NO: 41524 - protein, 283 aa, Arabidopsis thaliana
  peptide (1)..(283): Ceres Seq. ID no. 13491723
MSGRNRIHRDIRDSYHDHRDLPPERPFLRGPPLLQPPPPSLLEDLQIQEGEIRRQDAEIRRLLSDNHGLADDRMVLERELVAAKEELHRMNLMISDLRAEQDLQLREFSEKRHKLEGDVRAMESYKKEASQLRGEVQKLDEIKRELSGNVQLLRKDLAKLQSDNKQIPGMRAEVKDLQKELMHARDAIEYEKKEKFELMEQRQTMEKNMVSMAREVEKLRAELATVDSRPWGFGGSYGMNYNNMDGTFRGSYGENDTYLGSSERSQYYSHGSGSQKKPRLDRH

SEQ ID NO: 41525 - protein, 210 aa, Arabidopsis thaliana
  peptide (1)..(210): Ceres Seq. ID no. 13491724
MVLERELVAAKEELHRMNLMISDLRAEQDLQLREFSEKRHKLEGDVRAMESYKKEASQLRGEVQKLDEIKRELSGNVQLLRKDLAKLQSDNKQIPGMRAEVKDLQKELMHARDAIEYEKKEKFELMEQRQTMEKNMVSMAREVEKLRAELATVDSRPWGFGGSYGMNYNNMDGTFRGSYGENDTYLGSSERSQYYSHGSGSQKKPRLDRH

SEQ ID NO: 41526 - protein, 194 aa, Arabidopsis thaliana
  peptide (1)..(194): Ceres Seq. ID no. 13491725
MNLMISDLRAEQDLQLREFSEKRHKLEGDVRAMESYKKEASQLRGEVQKLDEIKRELSGNVQLLRKDLAKLQSDNKQIPGMRAEVKDLQKELMHARDAIEYEKKEKFELMEQRQTMEKNMVSMAREVEKLRAELATVDSRPWGFGGSYGMNYNNMDGTFRGSYGENDTYLGSSERSQYYSHGSGSQKKPRLDRH

SEQ ID NO: 41527 - DNA, 1376 bp, Arabidopsis thaliana
  misc_feature (1)..(1376): Ceres Seq. ID no. 12395085
  misc_feature (1)..(1376): Ortholog of  Ceres SEQ ID NO 12364737 as cited in SEQ ID NO 51089
  misc_feature (1)..(1376): Ortholog of  Ceres SEQ ID NO 13593955 as cited in SEQ ID NO 54278
  misc_feature (1)..(1376): Ortholog of  Ceres SEQ ID NO 13595567 as cited in SEQ ID NO 56760
  misc_feature (1)..(1376): Ortholog of  Ceres SEQ ID NO 13597380 as cited in SEQ ID NO 64054
  misc_feature (1)..(1376): Ortholog of  Ceres SEQ ID NO 12625474 as cited in SEQ ID NO 64169
  misc_feature (1)..(1376): Ortholog of  Ceres SEQ ID NO 13597502 as cited in SEQ ID NO 64681
atgcatctccttcaaaggttcattttctttcattctgagtttgttccatcgctccaactttcaaacacaagtgcttttgtcttaagaccttttctcttcgggttcgtgagttaagggttcttcttcttcttcttcttttttctctaaactggaaaataaagaagaaaagaacatggatttgcattcttgtctaaactcatactttcttttgctcctcctctgtcttcttaatattaccaccattaactcaacgaagccattagaacaagaaacagtgctttttggcggcaactttccggctttttatgttattggagattcattggttgattcaggaaacaataatcatcttacaacgatggtcaaatcgaattttccaccttatggttcggactttgaaggtggcaaagccaccggccgtttcagcaatggcaaaacaattgctgattacattgctatctactatggtcttcctttggttcctgcttatttgggattatctcaagaagaaaagaatagtatctcaactggtattaactatgcttctgctggctgtgggattcttcctcagacaggaaggcaaataggaacatgtctctcgttaagtgtccaagtcgatatgttccaggagaccatcacaaacaatctgaagaagaacttcaagaagtccgagctccgtgaacacttggctgaatcgttgtttatgatcgccattggggttaacgactacacattcttatttaatgaaacaaccgatgcgaatgagtttgcaaacaagcttcttcatgattacttgcttcaaatagaaagattgcacaagttaggagcaaggaagttcttcatcaacaacattaaaccattaggatgttacccaaatgttgtagctaagaccgtgccacgtggaagctgcaacgatgctttgaactttgcggtcagcattttcaacactaagcttagaaaaagtctgtctcgtatgacgcaaaaattcatcaaaacgtcctttttatactcggattactacaactacatgttgggactaagaggaccttcaagcaatcaagttggttcgagtctattgaacgtgacaagcccatgttgtcctaacgtttatgatggaggtcaattgacaagttgcaagcctggttcgatcgcgtgtaaggcacccgatactcatattttctttgatccgtttcatccgactcaattggcgaattacatgtatgcgattgcgtgtttccacgagagaagtatttgccatgtgatattggaagattaacttttgtcggcaacaatcttttttgtttgttttaaacaccaatttggttgttgtttgttgctttcaacttttcaatatcatcagaacttttaagattacc

SEQ ID NO: 41528 - protein, 367 aa, Arabidopsis thaliana
  peptide (1)..(367): Ceres Seq. ID no. 12395086
MDLHSCLNSYFLLLLLCLLNITTINSTKPLEQETVLFGGNFPAFYVIGDSLVDSGNNNHLTTMVKSNFPPYGSDFEGGKATGRFSNGKTIADYIAIYYGLPLVPAYLGLSQEEKNSISTGINYASAGCGILPQTGRQIGTCLSLSVQVDMFQETITNNLKKNFKKSELREHLAESLFMIAIGVNDYTFLFNETTDANEFANKLLHDYLLQIERLHKLGARKFFINNIKPLGCYPNVVAKTVPRGSCNDALNFAVSIFNTKLRKSLSRMTQKFIKTSFLYSDYYNYMLGLRGPSSNQVGSSLLNVTSPCCPNVYDGGQLTSCKPGSIACKAPDTHIFFDPFHPTQLANYMYAIACFHERSICHVILED

SEQ ID NO: 41529 - protein, 305 aa, Arabidopsis thaliana; identical to SEQ ID NO: 37441
  peptide (1)..(305): Ceres Seq. ID no. 12395087

SEQ ID NO: 41530 - protein, 218 aa, Arabidopsis thaliana
  peptide (1)..(218): Ceres Seq. ID no. 12395088
MFQETITNNLKKNFKKSELREHLAESLFMIAIGVNDYTFLFNETTDANEFANKLLHDYLLQIERLHKLGARKFFINNIKPLGCYPNVVAKTVPRGSCNDALNFAVSIFNTKLRKSLSRMTQKFIKTSFLYSDYYNYMLGLRGPSSNQVGSSLLNVTSPCCPNVYDGGQLTSCKPGSIACKAPDTHIFFDPFHPTQLANYMYAIACFHERSICHVILED

SEQ ID NO: 41531 - DNA, 1608 bp, Arabidopsis thaliana
  misc_feature (1)..(1608): Ceres Seq. ID no. 13592782
  misc_feature (1)..(1608): Ortholog of  Ceres SEQ ID NO 14316184 as cited in SEQ ID NO 54517
  misc_feature (1)..(1608): Ortholog of  Ceres SEQ ID NO 15226529 as cited in SEQ ID NO 55005
  misc_feature (1)..(1608): Ortholog of  Ceres SEQ ID NO 12616225 as cited in SEQ ID NO 68930
ctaatccaaaaacttcctagaaaagtaagtatatacctttctctgtatttccttcacctccggctaaatctccggcgaccgcgtaacttgttctccggtctgaatagtgaataaacacacacacggagccaaatccaggagaaattaggtttgaattagagagattaggagaatacaaattggtttggtggttttcaagtatgctaccaagtgggttgaaagaaacccaactccgtgagagcaacaacaaccaaaaagtccatcctcaaccaatggaagagtctatcaatcagaatcctgaagctatggaagcacttatctccaatctcttcggaaacatctcgtctttgaaatctgcttatatcgagcttcaaagtgctcatactccttacgatcccgagaagattcaggcagcggacaaagttgtcatttctgaactcaagaatctttccgaaatgaagcatttttacagagagaataaccccaaacctgtatgtgtctctccacaagactctcgtttagctgcagagatccaagagcagcagagtttgttgaagacttatgaggttatggtgaagaagtttcagtctgagattcagaacaaggattctgagatcacgcagatgctacagaagattgaggaagcaaaccagaaacggcttaagcttgataagaatcttaagttaagaggaatgtctacaaacgaaggttctaatggagatggaaatatgcagtttcctgacttaactactgaactctatgtatctacttacgaagctgctgctaaagccgtgcacgatttctccaagccgctaatcaacatgatgaaagcagcaggatgggatcttgattctgcagccaattctattgagcctgatgttgtttacgccaagaggcctcacaagaaatatgcatttgaatcatacatatgccaaaggatgttcagtgggtttcagcagaagaacttctcagtaaactcagagagtgctgcggttatggccgatgatgacacagacacctttttccgccagtttcttgctctcaaggacatggatccactagatgctctaggtacaaaccctgattccaactttggtatattctgcaggagcaagtatctcctcttggtccacccaaagatggaagcttctttctttggaaatctagaccagcgtgactacgtgacaggaggtgggcacccgaggactgcgttttaccaggccttcttaaaacttgcaaagtcgatatggatcttgcacaggcttgcttactcttttgatccagctgcaaagatcttccaagtgaaaaagggtagtgagttctctgattcatacatggaaagtgttgtgaagaacatagttgtggatgaaaaagaagagaacccaagagttggtcttatggttatgcctgggttttggattggtggcagtgtcattcaaagccgagtttatgtttctggtgtgaaggtccttgagtgaaggatctcaggaactctcttaatgcttcttcccactttgttgtgcaacttttattttctctttgttataagcaagcctatatgtatcatctattgttaaaaaaaaatggaattaatatcttcttcgtctc

SEQ ID NO: 41532 - protein, 425 aa, Arabidopsis thaliana
  peptide (1)..(425): Ceres Seq. ID no. 13592783
MLPSGLKETQLRESNNNQKVHPQPMEESINQNPEAMEALISNLFGNISSLKSAYIELQSAHTPYDPEKIQAADKVVISELKNLSEMKHFYRENNPKPVCVSPQDSRLAAEIQEQQSLLKTYEVMVKKFQSEIQNKDSEITQMLQKIEEANQKRLKLDKNLKLRGMSTNEGSNGDGNMQFPDLTTELYVSTYEAAAKAVHDFSKPLINMMKAAGWDLDSAANSIEPDVVYAKRPHKKYAFESYICQRMFSGFQQKNFSVNSESAAVMADDDTDTFFRQFLALKDMDPLDALGTNPDSNFGIFCRSKYLLLVHPKMEASFFGNLDQRDYVTGGGHPRTAFYQAFLKLAKSIWILHRLAYSFDPAAKIFQVKKGSEFSDSYMESVVKNIVVDEKEENPRVGLMVMPGFWIGGSVIQSRVYVSGVKVLE

SEQ ID NO: 41533 - protein, 401 aa, Arabidopsis thaliana
  peptide (1)..(401): Ceres Seq. ID no. 13592784
MEESINQNPEAMEALISNLFGNISSLKSAYIELQSAHTPYDPEKIQAADKVVISELKNLSEMKHFYRENNPKPVCVSPQDSRLAAEIQEQQSLLKTYEVMVKKFQSEIQNKDSEITQMLQKIEEANQKRLKLDKNLKLRGMSTNEGSNGDGNMQFPDLTTELYVSTYEAAAKAVHDFSKPLINMMKAAGWDLDSAANSIEPDVVYAKRPHKKYAFESYICQRMFSGFQQKNFSVNSESAAVMADDDTDTFFRQFLALKDMDPLDALGTNPDSNFGIFCRSKYLLLVHPKMEASFFGNLDQRDYVTGGGHPRTAFYQAFLKLAKSIWILHRLAYSFDPAAKIFQVKKGSEFSDSYMESVVKNIVVDEKEENPRVGLMVMPGFWIGGSVIQSRVYVSGVKVLE

SEQ ID NO: 41534 - protein, 390 aa, Arabidopsis thaliana
  peptide (1)..(390): Ceres Seq. ID no. 13592785
MEALISNLFGNISSLKSAYIELQSAHTPYDPEKIQAADKVVISELKNLSEMKHFYRENNPKPVCVSPQDSRLAAEIQEQQSLLKTYEVMVKKFQSEIQNKDSEITQMLQKIEEANQKRLKLDKNLKLRGMSTNEGSNGDGNMQFPDLTTELYVSTYEAAAKAVHDFSKPLINMMKAAGWDLDSAANSIEPDVVYAKRPHKKYAFESYICQRMFSGFQQKNFSVNSESAAVMADDDTDTFFRQFLALKDMDPLDALGTNPDSNFGIFCRSKYLLLVHPKMEASFFGNLDQRDYVTGGGHPRTAFYQAFLKLAKSIWILHRLAYSFDPAAKIFQVKKGSEFSDSYMESVVKNIVVDEKEENPRVGLMVMPGFWIGGSVIQSRVYVSGVKVLE

SEQ ID NO: 41535 - DNA, 1486 bp, Arabidopsis thaliana
  misc_feature (1)..(1486): Ceres Seq. ID no. 12328370
  misc_feature (1)..(1486): Ortholog of  Ceres SEQ ID NO 15177414 as cited in SEQ ID NO 57242
  misc_feature (1)..(1486): Ortholog of  Ceres SEQ ID NO 13594151 as cited in SEQ ID NO 58886
cactcatccgatctctcaatcctctcaaatctcaaactctctcttcccatcactctctcgctctctcttcaatctcatctcaatcatgacagagcaagagatctgcgtgagggttacaagagcggcggcgaaacgaaaagcttcgacggcgatgggtattgacggagatcgggtcaacaagaagagagttgttctcggtgagcttctaaacgtctccaatgtcaatctcttggctaatctcaatcagaagaaagaaacccagaagccaaaaaggaatcttaaacctcctccggcgaaacagattaagtcagctccggtggctattattgacctagaatcaaaatctgacattgattctcgatctgatgatcctcaaatgtgtggaccttatgttgctgatatctatgagtatcttcgtcaacttgaggtgaagccaaagcagagacctttaccagattacatagagaaagttcagaaagatgtaacaccaagtatgagaggtgttttggttgattggttagtggaagttgctgaagagtataaacttggatctgaaacactttatctcactgtctcacatattgatagattcttgtctttaaagactgttaacaagcaaaagctacagcttgttggagtttctgctatgcttattgcttcgaagtatgaagagataagtcctcctaaagtggatgatttttgttacattacggataatacgttttcgaaacaagatgttgtgaagatggaagctgatatacttcttgctcttcagtttgagttgggaagaccaacgattaatacttttatgagacggtttactagagttgcacaagacgatttcaaagttccacatttgcagctagagcctctttgttgctatttgtcagaattgagtatattagattataagactgtgaagtttgtgccgtctctgttggctgcttctgctgtttttctcgctcggttcatcatccgtccgaaacaacatccttggaaccaaatgttagaagagtacacaaagtacaaagcggctgatctacaagtgtgtgttggaatcatacatgacttgtatttgagcagaagaggaggtgctttacaagctgttagagagaaatataagcaccataagttccaatgcgttgcgaccatgcctgtttcaccagagctgccggttaccttttgggaggatgttaccatttgatctgaggttatgctatcttaagcaaatgttacggagctggattaccgaatcttgtttcaaatagtataatggacacagatcttcaagtgaagctagaagagtaagaaatatagaagtgaaggcaggagcaaataagtctgcgttatgtgaagatgtgtgatgtattattgaaatctcttcttttttatttacaaaattttagtgtgaaattcggaataatataattttatacaattatgcaatatgatataagtatttatgtgacatgatcttattttgttt

SEQ ID NO: 41536 - protein, 400 aa, Arabidopsis thaliana
  peptide (1)..(400): Ceres Seq. ID no. 12328371
THPISQSSQISNSLFPSLSRSLFNLISIMTEQEICVRVTRAAAKRKASTAMGIDGDRVNKKRVVLGELLNVSNVNLLANLNQKKETQKPKRNLKPPPAKQIKSAPVAIIDLESKSDIDSRSDDPQMCGPYVADIYEYLRQLEVKPKQRPLPDYIEKVQKDVTPSMRGVLVDWLVEVAEEYKLGSETLYLTVSHIDRFLSLKTVNKQKLQLVGVSAMLIASKYEEISPPKVDDFCYITDNTFSKQDVVKMEADILLALQFELGRPTINTFMRRFTRVAQDDFKVPHLQLEPLCCYLSELSILDYKTVKFVPSLLAASAVFLARFIIRPKQHPWNQMLEEYTKYKAADLQVCVGIIHDLYLSRRGGALQAVREKYKHHKFQCVATMPVSPELPVTFWEDVTI

SEQ ID NO: 41537 - protein, 372 aa, Arabidopsis thaliana
  peptide (1)..(372): Ceres Seq. ID no. 12328372
MTEQEICVRVTRAAAKRKASTAMGIDGDRVNKKRVVLGELLNVSNVNLLANLNQKKETQKPKRNLKPPPAKQIKSAPVAIIDLESKSDIDSRSDDPQMCGPYVADIYEYLRQLEVKPKQRPLPDYIEKVQKDVTPSMRGVLVDWLVEVAEEYKLGSETLYLTVSHIDRFLSLKTVNKQKLQLVGVSAMLIASKYEEISPPKVDDFCYITDNTFSKQDVVKMEADILLALQFELGRPTINTFMRRFTRVAQDDFKVPHLQLEPLCCYLSELSILDYKTVKFVPSLLAASAVFLARFIIRPKQHPWNQMLEEYTKYKAADLQVCVGIIHDLYLSRRGGALQAVREKYKHHKFQCVATMPVSPELPVTFWEDVTI

SEQ ID NO: 41538 - protein, 350 aa, Arabidopsis thaliana
  peptide (1)..(350): Ceres Seq. ID no. 12328373
MGIDGDRVNKKRVVLGELLNVSNVNLLANLNQKKETQKPKRNLKPPPAKQIKSAPVAIIDLESKSDIDSRSDDPQMCGPYVADIYEYLRQLEVKPKQRPLPDYIEKVQKDVTPSMRGVLVDWLVEVAEEYKLGSETLYLTVSHIDRFLSLKTVNKQKLQLVGVSAMLIASKYEEISPPKVDDFCYITDNTFSKQDVVKMEADILLALQFELGRPTINTFMRRFTRVAQDDFKVPHLQLEPLCCYLSELSILDYKTVKFVPSLLAASAVFLARFIIRPKQHPWNQMLEEYTKYKAADLQVCVGIIHDLYLSRRGGALQAVREKYKHHKFQCVATMPVSPELPVTFWEDVTI

SEQ ID NO: 41539 - DNA, 1306 bp, Arabidopsis thaliana
  misc_feature (1)..(1306): Ceres Seq. ID no. 12339414
  misc_feature (1)..(1306): Ortholog of  Ceres SEQ ID NO 14303866 as cited in SEQ ID NO 53689
  misc_feature (1)..(1306): Ortholog of  Ceres SEQ ID NO 14315958 as cited in SEQ ID NO 59979
  misc_feature (1)..(1306): Ortholog of  Ceres SEQ ID NO 13597613 as cited in SEQ ID NO 65334
  misc_feature (1)..(1306): Ortholog of  Ceres SEQ ID NO 13597037 as cited in SEQ ID NO 69005
atcaacttcagatcctttcaccagcaacacaagttattttcaaaagatgatgccaaattctagatcggcgacaataactccgacgacagaatcaaccaccacaacaacaacaacaacaacgactctaacgacgtcgtattggtgttacagttgtacacgattcatcagcgtttgggaagatcaagacgcaaacgctggagtcttatgtccttattgcaacggtggattcatcgaagagattgaagattcttctaattccaccgtcgcggcgattccggcttcgactccggaagttagatcggttgaggaaacacatagatctataattagacgtcgtagatctaatcgccggacgtcctttaatccggtaatcgtcttacacggcggaggaggaggaggagccggtgagagagttgagaacgaagaaggtgacggagctactagagaacgacgagcttatgagttttattacgatgatggatctggttcaggtctaagacctcttcctgattctgtatctgagatcttgatgggatctggattcgaacggttacttgaacaattgagtcagatcgaagcgtcaggtaacggaatcggtagatctgggaatccaccggcgtcgaaatcagcgattgaatctttacctagagtcgaaatctcagattgtcatacgaaagcagaagctaattgcgccgtgtgtacggaggttttcgaagccggaatcgaaggtcgtgagatgccgtgtaaacacatatttcacggtgattgtattgttccatggctttcgattcggaattcgtgtcctgtgtgtagatttgagttaccttcagatccaatccaacggagtaatgaagaagaacatgccgttgggatgacgatttggagattacctggtggtggtttcgctgttggtaggtttaacgcgggagtgagagaaggtgagaggatattgccggtggtattgacggagatggatggtggtggacttggtagtaatgaaggaccgagaaggatatcttgggttagagctcatgagacaccggagatgagtaggaatggtggtcgttctggtaatggtggtagattgagaagagctgttcgtggaatggtttcgtttatgagaagagttagaccaagtcgtggctcttcgaattcgaatgttattgatttggatagtgatggtgaaactagagttatgaatcgatcaacttcgttgatcagaagatttttctgatgaaactaggtgagatttttttgtttgttgattcaacaatgtatatatatttatttagatgaacttatttgg

SEQ ID NO: 41540 - protein, 410 aa, Arabidopsis thaliana
  peptide (1)..(410): Ceres Seq. ID no. 12339416
STSDPFTSNTSYFQKMMPNSRSATITPTTESTTTTTTTTTTLTTSYWCYSCTRFISVWEDQDANAGVLCPYCNGGFIEEIEDSSNSTVAAIPASTPEVRSVEETHRSIIRRRRSNRRTSFNPVIVLHGGGGGGAGERVENEEGDGATRERRAYEFYYDDGSGSGLRPLPDSVSEILMGSGFERLLEQLSQIEASGNGIGRSGNPPASKSAIESLPRVEISDCHTKAEANCAVCTEVFEAGIEGREMPCKHIFHGDCIVPWLSIRNSCPVCRFELPSDPIQRSNEEEHAVGMTIWRLPGGGFAVGRFNAGVREGERILPVVLTEMDGGGLGSNEGPRRISWVRAHETPEMSRNGGRSGNGGRLRRAVRGMVSFMRRVRPSRGSSNSNVIDLDSDGETRVMNRSTSLIRRFF

SEQ ID NO: 41541 - protein, 395 aa, Arabidopsis thaliana
  peptide (1)..(395): Ceres Seq. ID no. 12339417
MMPNSRSATITPTTESTTTTTTTTTTLTTSYWCYSCTRFISVWEDQDANAGVLCPYCNGGFIEEIEDSSNSTVAAIPASTPEVRSVEETHRSIIRRRRSNRRTSFNPVIVLHGGGGGGAGERVENEEGDGATRERRAYEFYYDDGSGSGLRPLPDSVSEILMGSGFERLLEQLSQIEASGNGIGRSGNPPASKSAIESLPRVEISDCHTKAEANCAVCTEVFEAGIEGREMPCKHIFHGDCIVPWLSIRNSCPVCRFELPSDPIQRSNEEEHAVGMTIWRLPGGGFAVGRFNAGVREGERILPVVLTEMDGGGLGSNEGPRRISWVRAHETPEMSRNGGRSGNGGRLRRAVRGMVSFMRRVRPSRGSSNSNVIDLDSDGETRVMNRSTSLIRRFF

SEQ ID NO: 41542 - protein, 394 aa, Arabidopsis thaliana
  peptide (1)..(394): Ceres Seq. ID no. 12339419
MPNSRSATITPTTESTTTTTTTTTTLTTSYWCYSCTRFISVWEDQDANAGVLCPYCNGGFIEEIEDSSNSTVAAIPASTPEVRSVEETHRSIIRRRRSNRRTSFNPVIVLHGGGGGGAGERVENEEGDGATRERRAYEFYYDDGSGSGLRPLPDSVSEILMGSGFERLLEQLSQIEASGNGIGRSGNPPASKSAIESLPRVEISDCHTKAEANCAVCTEVFEAGIEGREMPCKHIFHGDCIVPWLSIRNSCPVCRFELPSDPIQRSNEEEHAVGMTIWRLPGGGFAVGRFNAGVREGERILPVVLTEMDGGGLGSNEGPRRISWVRAHETPEMSRNGGRSGNGGRLRRAVRGMVSFMRRVRPSRGSSNSNVIDLDSDGETRVMNRSTSLIRRFF

SEQ ID NO: 41543 - DNA, 2181 bp, Arabidopsis thaliana; identical to SEQ ID NO: 37605
  misc_feature (1)..(2181): Ceres Seq. ID no. 13646180
  misc_feature (1)..(2181): Ortholog of  Ceres SEQ ID NO 14303366 as cited in SEQ ID NO 54418
  misc_feature (1)..(2181): Ortholog of  Ceres SEQ ID NO 13503610 as cited in SEQ ID NO 62416
  misc_feature (1)..(2181): Ortholog of  Ceres SEQ ID NO 13657610 as cited in SEQ ID NO 66165
  misc_feature (1)..(2181): Ortholog of  Ceres SEQ ID NO 13598312 as cited in SEQ ID NO 68448
  misc_feature (1)..(2181): Ortholog of  Ceres SEQ ID NO 13596100 as cited in SEQ ID NO 68573

SEQ ID NO: 41544 - protein, 497 aa, Arabidopsis thaliana; identical to SEQ ID NO: 23374
  peptide (1)..(497): Ceres Seq. ID no. 13646181

SEQ ID NO: 41545 - protein, 492 aa, Arabidopsis thaliana; identical to SEQ ID NO: 23375
  peptide (1)..(492): Ceres Seq. ID no. 13646182

SEQ ID NO: 41546 - protein, 460 aa, Arabidopsis thaliana; identical to SEQ ID NO: 23376
  peptide (1)..(460): Ceres Seq. ID no. 13646183

SEQ ID NO: 41547 - DNA, 799 bp, Arabidopsis thaliana; identical to SEQ ID NO: 36512
  misc_feature (1)..(799): Ceres Seq. ID no. 12462083
  misc_feature (1)..(799): Ortholog of  Ceres SEQ ID NO 13582184 as cited in SEQ ID NO 56002
  misc_feature (1)..(799): Ortholog of  Ceres SEQ ID NO 15227042 as cited in SEQ ID NO 0

SEQ ID NO: 41548 - protein, 199 aa, Arabidopsis thaliana; identical to SEQ ID NO: 36513
  peptide (1)..(199): Ceres Seq. ID no. 12462084

SEQ ID NO: 41549 - protein, 187 aa, Arabidopsis thaliana; identical to SEQ ID NO: 36514
  peptide (1)..(187): Ceres Seq. ID no. 12462085

SEQ ID NO: 41550 - protein, 134 aa, Arabidopsis thaliana; identical to SEQ ID NO: 36515
  peptide (1)..(134): Ceres Seq. ID no. 12462086

SEQ ID NO: 41551 - DNA, 1437 bp, Arabidopsis thaliana
  misc_feature (1)..(1437): Ceres Seq. ID no. 12329608
  misc_feature (1)..(1437): Ortholog of  Ceres SEQ ID NO 15170609 as cited in SEQ ID NO 52683
aagaacaacagaaaatttcaaaatggtttctcagataatctcgtgtttatctcaatcttcgtctcttctatgtttatccgattcaaggaggttaattcttccgaagacttgtacttgcggcggtttgagccggttttctccaggatttgctagccgccggttatttacggttaatcggaagaaatggagatcggcctgcattttcaactctggaaaggaacctggaggagagggaaaggttactggatcactgactctatctaaattagattcttgtttagtttccggtctgaatttttctgaggcagctctatgtaacttgttcaattgaatccaaattctattggaatgtgaaaaaagactagacctttgagaaattatttgaagttttgattgttatatttgttgtagttacaaggaggtagctcagagtggccgatacttcagagatgggaagttccatggggatggcagacagtttcgttaacttcgtttgcttgtgcactaaggcagttttgttttgacaggattaaccgagatggcagtcataccgtttttaggaatcgacgttgagaaactgaccttggacgataaggcggagattttgttcctggatcaaggcctaacaaccgcggtggtacttgctgtcatattcactgttgccaaaaccttcgacccacttcctgaagatattcttcgctatgatttgagacaacccgtcaacctgcaaaaaggatggcttgtgtggggtggaatcggtctggttggtgctgttggtgctattgcgttaacaggtgttgttttatccgtgttcaggacagaagcacctgaaagggaggtagactctttgatgaagcttcttccattaattggatcctcaaacataagcaccttaagcttagtgggcataactggaatccttgctccacttctggaggagaccgtgtttcgcggattcttcatggtctctcttaccaaatgggtcccgaccccaatagcgatcatcatcagctcagctgcgtttgcccttgcccatttcacacctggtgaattcccgcagctgtttattctaggaagtgttttgggattatcatatgcacaaacccgcaatctcattaccccaatggtcatacacggtttctggaactcgggagttattttgctactcacttttcttcagatccaagggtatgacattaaggagctattgcaggcaaactagctctgagccatgctctttgtgctgtccgcatttaacatcaaaaagcttcattatgtgctcgatgttagtaagatattttgtattcgagaacagatttcatacttaatgcaatttgggttttggtagagttatctttattacaacatcatgacagtaatgtatgaactaatatggtagagatgaatctttttggaacaaaaaacaaatttatttgc

SEQ ID NO: 41552 - protein, 227 aa, Arabidopsis thaliana; identical to SEQ ID NO: 23346
  peptide (1)..(227): Ceres Seq. ID no. 12329609

SEQ ID NO: 41553 - protein, 123 aa, Arabidopsis thaliana
  peptide (1)..(123): Ceres Seq. ID no. 12329610
MKLLPLIGSSNISTLSLVGITGILAPLLEETVFRGFFMVSLTKWVPTPIAIIISSAAFALAHFTPGEFPQLFILGSVLGLSYAQTRNLITPMVIHGFWNSGVILLLTFLQIQGYDIKELLQAN

SEQ ID NO: 41554 - DNA, 755 bp, Arabidopsis thaliana
  misc_feature (1)..(755): Ceres Seq. ID no. 12325799
  misc_feature (1)..(755): Ortholog of  Ceres SEQ ID NO 15173624 as cited in SEQ ID NO 60470
aattaattttgacatgcgtgatgatctttcaaaataataaggaaacggaggatttggctagggacgttcgagaccgcagaggaggcagcaagagcatacgacgaggccgccgttttaatgagcggccgcaacgccaaaaccaactttcccctcaacaacaacaacaccggagaaacttccgagggcaaaaccgatatttcagcttcgtccacaatgtcatcctcaacatcatcttcatcgctctcttccatcctcagcgccaaactgaggaaatgctgcaagtctccttccccatccctcacctgcctccgtcttgacacagccagctcccatatcggcgtctggcagaaacgggccggttcaaagtctgactccagctgggtcatgacggtggagctaggtcccgcaagctcctcccaagagactactagtaaagcttcacaagacgctattcttgctccgaccactgaagttgaaattggtggcagcagagaagaagtattggatgaggaagaaaaggttgctttgcaaatgatagaggagcttctcaatacaaactaaatcttatttgcttatatatatgtacctattttcattgctgatttacagccaaaataatcaattataccgtgtattttatagatgttttatattaaaaggttgttagctatatattgtttctctttttccacatttgtatctaataaagtattggtgtttgtaactaaaatccagaagtgacctttttctttccg

SEQ ID NO: 41555 - protein, 147 aa, Arabidopsis thaliana; identical to SEQ ID NO: 30301
  peptide (1)..(147): Ceres Seq. ID no. 12325800

SEQ ID NO: 41556 - protein, 115 aa, Arabidopsis thaliana; identical to SEQ ID NO: 30302
  peptide (1)..(115): Ceres Seq. ID no. 12325801

SEQ ID NO: 41557 - protein, 104 aa, Arabidopsis thaliana
  peptide (1)..(104): Ceres Seq. ID no. 12325802
LILTCVMIFQNNKETEDLARDVRDRRGGSKSIRRGRRFNERPQRQNQLSPQQQQHRRNFRGQNRYFSFVHNVILNIIFIALFHPQRQTEEMLQVSFPIPHLPPS

SEQ ID NO: 41558 - DNA, 1590 bp, Arabidopsis thaliana
  misc_feature (1)..(1590): Ceres Seq. ID no. 12371145
  misc_feature (1)..(1590): Ortholog of  Ceres SEQ ID NO 13596509 as cited in SEQ ID NO 62004
  misc_feature (1)..(1590): Ortholog of  Ceres SEQ ID NO 13659971 as cited in SEQ ID NO 67565
  misc_feature (1)..(1590): Ortholog of  Ceres SEQ ID NO 13500385 as cited in SEQ ID NO 67583
ataaatttaattttaaaattcgaaactttttttctgcttttcctctttctctctctctatctatcaaacactagacttgaagaaatgcagtgaaattgaaattgagtagaagcagaagagaatatggtggtaaggaaggtgggcaagtatgaattaggtagaacaatcggcgaaggtactttcgctaaagtcaagttcgctcagaatacagagaccggtgagagcgtcgccatgaaaatcgtggatcgtagcacaatcatcaagcgcaagatggtggatcagattaagagagagatctcgattatgaagcttgttcgtcatccttgtgttgttcgtctttatgaggttctagcaagccgtacaaagatttatatcatcctggagtacattactggtggtgaactgtttgataagattgttcgtaatggacgacttagtgagtcagaagctaggaaatactttcaccagcttattgatggagttgattactgtcatagtaaaggtgtttaccacagagatctaaagccggaaaatcttctgttggattctcaaggaaatctcaagatatctgattttggcctcagtgcattacctgaacaaggagttaccatcctaaagacaacatgtggaactcccaattacgttgctcctgaggttctcagtcacaagggttacaatggtgccgttgcagatatttggtcctgtggggtcatcctttatgttcttatggcaggatatcttccatttgatgaaatggatctaccaactttatatagtaagatcgacaaagctgagttctcttgcccctcatattttgccctgggggcaaagtccttgattaatagaattttggatccaaatccagaaactcggattacaattgcagaaatcaggaaagatgagtggtttctaaaggattacactcctgtacaacttatcgattacgaacatgtaaacctggatgatgtatatgctgcttttgatgatccggaggaacaaacatatgcacaggatggaacaagagacacaggtccactaactctaaatgcgtttgacctaattattctatctcagggcctgaacctcgcaactctttttgaccgtggaaaggactccatgaagcaccagacaaggttcatctcacacaagccagcaaacgtggttctctcaagcatggaagttgtgtcacagtctatgggctttaagacacacattcgtaattacaagatgagagtggaaggattatctgcaaataagacatctcatttctccgtcatactagaacaggagacgcagaagaataccttaagttctacaagactttttgtagtaagcttgatgacatcatttggaagccgccagatgcatctatgaaaaatcgagtcaccaaggccaagagtaaaagacgttgaatccacgtgcgtggtattcaagcagagctttcacagaagacagttagaaacaatatttaactctctgtgtttcttaagtgctttagtcgagtgaatatgtacaagcttgttgatttggttttaatttatgaatacatagaagattgtactaaacttatacgatatcaagactaaattg

SEQ ID NO: 41559 - protein, 416 aa, Arabidopsis thaliana
  peptide (1)..(416): Ceres Seq. ID no. 12371146
MVVRKVGKYELGRTIGEGTFAKVKFAQNTETGESVAMKIVDRSTIIKRKMVDQIKREISIMKLVRHPCVVRLYEVLASRTKIYIILEYITGGELFDKIVRNGRLSESEARKYFHQLIDGVDYCHSKGVYHRDLKPENLLLDSQGNLKISDFGLSALPEQGVTILKTTCGTPNYVAPEVLSHKGYNGAVADIWSCGVILYVLMAGYLPFDEMDLPTLYSKIDKAEFSCPSYFALGAKSLINRILDPNPETRITIAEIRKDEWFLKDYTPVQLIDYEHVNLDDVYAAFDDPEEQTYAQDGTRDTGPLTLNAFDLIILSQGLNLATLFDRGKDSMKHQTRFISHKPANVVLSSMEVVSQSMGFKTHIRNYKMRVEGLSANKTSHFSVILEQETQKNTLSSTRLFVVSLMTSFGSRQMHL

SEQ ID NO: 41560 - protein, 380 aa, Arabidopsis thaliana
  peptide (1)..(380): Ceres Seq. ID no. 12371147
MKIVDRSTIIKRKMVDQIKREISIMKLVRHPCVVRLYEVLASRTKIYIILEYITGGELFDKIVRNGRLSESEARKYFHQLIDGVDYCHSKGVYHRDLKPENLLLDSQGNLKISDFGLSALPEQGVTILKTTCGTPNYVAPEVLSHKGYNGAVADIWSCGVILYVLMAGYLPFDEMDLPTLYSKIDKAEFSCPSYFALGAKSLINRILDPNPETRITIAEIRKDEWFLKDYTPVQLIDYEHVNLDDVYAAFDDPEEQTYAQDGTRDTGPLTLNAFDLIILSQGLNLATLFDRGKDSMKHQTRFISHKPANVVLSSMEVVSQSMGFKTHIRNYKMRVEGLSANKTSHFSVILEQETQKNTLSSTRLFVVSLMTSFGSRQMHL

SEQ ID NO: 41561 - protein, 367 aa, Arabidopsis thaliana
  peptide (1)..(367): Ceres Seq. ID no. 12371148
MVDQIKREISIMKLVRHPCVVRLYEVLASRTKIYIILEYITGGELFDKIVRNGRLSESEARKYFHQLIDGVDYCHSKGVYHRDLKPENLLLDSQGNLKISDFGLSALPEQGVTILKTTCGTPNYVAPEVLSHKGYNGAVADIWSCGVILYVLMAGYLPFDEMDLPTLYSKIDKAEFSCPSYFALGAKSLINRILDPNPETRITIAEIRKDEWFLKDYTPVQLIDYEHVNLDDVYAAFDDPEEQTYAQDGTRDTGPLTLNAFDLIILSQGLNLATLFDRGKDSMKHQTRFISHKPANVVLSSMEVVSQSMGFKTHIRNYKMRVEGLSANKTSHFSVILEQETQKNTLSSTRLFVVSLMTSFGSRQMHL

SEQ ID NO: 41562 - DNA, 1330 bp, Arabidopsis thaliana
  misc_feature (1)..(1330): Ceres Seq. ID no. 13645865
  misc_feature (1)..(1330): Ortholog of  Ceres SEQ ID NO 15179609 as cited in SEQ ID NO 0
ctttgctcatttcttcacgagaagatgaaatcttaaacctctcaagttcagggtcttctttcccaaacgaaaatgacaggttcgatctcgacctcttggctcttgtcgtctccttcgaattcgaattcggcttcgagctcagagtcctactctttcatagctaccttgaaaccagttcgttattatccgtttcaatcactgacaccaaaccggatttcgtcgagatctccgttgccctcaattcaaattcgagctggaatccgagagttacgagaacgaatcgacagtgtgaagaatacccagaagataacggaagcgatgagactcgtggcggcagctagagttcgtcgagctcaagatgcagtcataaagggtagacctttcactgaaactcttgtggagattctctactcaattaaccaatctgctcaattagaagacattgattttcctctgagcattgttagacccgtgaagagagttgctttggttgttgttactggcgataaaggattgtgtggtggtttcaacaatgcagtgaccaagaaagctactctgcgagttcaagagttgaagcagagaggaatagactgtgttgtgataagtgtaggtaagaaagggaatgcttattttagtcggagagatgaatttgatgttgataaatgtattgaaggaggaggtgttttcccaacgactaaagaagctcaagttattgcagatgatgtgttttccttgtttgtcagtgaagaggttgataaagttgagcttgtttacacaaagtttgtgtctttggtgaaatctgatcctgtgatccacactctgttgcctttgtcgatgaaaggagagtcttgtgatgtgaaaggtgagtgtgttgatgctatcgaggatgagatgtttaggctaacgagcaaagatgggaagttagctgtggaaaggaccaagcttgaagttgagaagcctgagatctcaccgttgatgcagtttgagcaagaccctgttcagattcttgatgcaatgatgcctttgtatctcaacagtcagattctaagagcactgcaggaatctttagcgagtgagcttgcgtcgaggatgaatgcgatgagtaatgcgactgataatgcggttgaattgaagaagaatctgacgatggcttataaccgagcgagacaggctaagatcactggggagttgctggagattgtggctggagcagaagctcttcgagagtcttaggtagaaactacagctgtgtaaaatcatttgttgtttgtggtaataaatgtcatgaaagaatatacagatcatgagaaattgagaatcgtttacacct

SEQ ID NO: 41563 - protein, 386 aa, Arabidopsis thaliana
  peptide (1)..(386): Ceres Seq. ID no. 13645866
MTGSISTSWLLSSPSNSNSASSSESYSFIATLKPVRYYPFQSLTPNRISSRSPLPSIQIRAGIRELRERIDSVKNTQKITEAMRLVAAARVRRAQDAVIKGRPFTETLVEILYSINQSAQLEDIDFPLSIVRPVKRVALVVVTGDKGLCGGFNNAVTKKATLRVQELKQRGIDCVVISVGKKGNAYFSRRDEFDVDKCIEGGGVFPTTKEAQVIADDVFSLFVSEEVDKVELVYTKFVSLVKSDPVIHTLLPLSMKGESCDVKGECVDAIEDEMFRLTSKDGKLAVERTKLEVEKPEISPLMQFEQDPVQILDAMMPLYLNSQILRALQESLASELASRMNAMSNATDNAVELKKNLTMAYNRARQAKITGELLEIVAGAEALRES

SEQ ID NO: 41564 - protein, 304 aa, Arabidopsis thaliana
  peptide (1)..(304): Ceres Seq. ID no. 13645867
MRLVAAARVRRAQDAVIKGRPFTETLVEILYSINQSAQLEDIDFPLSIVRPVKRVALVVVTGDKGLCGGFNNAVTKKATLRVQELKQRGIDCVVISVGKKGNAYFSRRDEFDVDKCIEGGGVFPTTKEAQVIADDVFSLFVSEEVDKVELVYTKFVSLVKSDPVIHTLLPLSMKGESCDVKGECVDAIEDEMFRLTSKDGKLAVERTKLEVEKPEISPLMQFEQDPVQILDAMMPLYLNSQILRALQESLASELASRMNAMSNATDNAVELKKNLTMAYNRARQAKITGELLEIVAGAEALRES

SEQ ID NO: 41565 - DNA, 601 bp, Arabidopsis thaliana
  misc_feature (1)..(601): Ceres Seq. ID no. 12396705
  misc_feature (1)..(601): Ortholog of  Ceres SEQ ID NO 12587328 as cited in SEQ ID NO 62249
  misc_feature (1)..(601): Ortholog of  Ceres SEQ ID NO 13598823 as cited in SEQ ID NO 0
  misc_feature (1)..(601): Ortholog of  Ceres SEQ ID NO 13600477 as cited in SEQ ID NO 0
  misc_feature (1)..(601): Ortholog of  Ceres SEQ ID NO 14309300 as cited in SEQ ID NO 0
aacaagagcgtcctttgattggttttggattttgttgtgttcctctcaaaatgacaaaactatggacttctctctctgctcttcattccctcgctggacccgtggtgatgctgctctatccgttatatgcgtcggtgatagcaatagagagcccatcaaaagtagatgacgagcaatggcttgcttattggattctctattctttccttactctatcagaactcatccttcaatctctcctagagtggataccgatatggtacacggcgaagctagtgtttgtggcatggttggttttaccacaatttagaggagctgcttttatatacaacaaagtcgtgagggaacagttcaagaagtacggcatcctcaaacctaaggtagagcatcaggctgagtgagtcaaaaagagcaggggacacaagagggcttcactgttggggtctccagtttctaatctctttatgctttttctattttgtcttatttctcttttgatatacggaaaaatggggttgttcttattatgagcctctgcttgaatgtatgaaaagaccttttattcgacgttaaactattatattaaagattaaaaaattgt

SEQ ID NO: 41566 - protein, 132 aa, Arabidopsis thaliana
  peptide (1)..(132): Ceres Seq. ID no. 12396706
QERPLIGFGFCCVPLKMTKLWTSLSALHSLAGPVVMLLYPLYASVIAIESPSKVDDEQWLAYWILYSFLTLSELILQSLLEWIPIWYTAKLVFVAWLVLPQFRGAAFIYNKVVREQFKKYGILKPKVEHQAE

SEQ ID NO: 41567 - protein, 116 aa, Arabidopsis thaliana
  peptide (1)..(116): Ceres Seq. ID no. 12396707
MTKLWTSLSALHSLAGPVVMLLYPLYASVIAIESPSKVDDEQWLAYWILYSFLTLSELILQSLLEWIPIWYTAKLVFVAWLVLPQFRGAAFIYNKVVREQFKKYGILKPKVEHQAE

SEQ ID NO: 41568 - protein, 97 aa, Arabidopsis thaliana
  peptide (1)..(97): Ceres Seq. ID no. 12396708
MLLYPLYASVIAIESPSKVDDEQWLAYWILYSFLTLSELILQSLLEWIPIWYTAKLVFVAWLVLPQFRGAAFIYNKVVREQFKKYGILKPKVEHQAE

SEQ ID NO: 41569 - DNA, 1649 bp, Arabidopsis thaliana
  misc_feature (1)..(1649): Ceres Seq. ID no. 13592752
  misc_feature (1)..(1649): Ortholog of  Ceres SEQ ID NO 15176433 as cited in SEQ ID NO 59539
aatttcccaaaaagaaaatataaagcacgttcttcgtctcggattcagagaaactaatcttgaagatgagttcaagatctgacctcaaaatcaaacgagtttctttgataatcttcttgctaagtgttcttgttgagttttgctatggagggttcacaagtgaatatgtcagaggaagtgatttaccagatgacatgccactagacagcgatgtttttgaagttcctcctggtcctaattcacctcaacaggttcatgtaacgcaagggaaccatgaaggtaatggagtgatcatttcttgggtgactccggttaagcccggttctaagactgttcaatattggtgtgagaatgagaaatcgaggaaacaagcagaagcaacagttaatacttaccggttctttaattacacgtctggttatattcaccattgcctcatcgatgatttggaatttgatacgaaatactactacgaaattgggagtggcaagtggtccagacggttctggttctttatcccgcctaaatcaggccctgacgtaccttacacatttggattaattggggatctaggacaaacttatgactcaaatagtacgttaagccattatgagatgaatccgggaaaaggacaagcggttctgtttgtaggagacttgtcttacgcggatcgctaccctaaccacgacaacaatagatgggatacttggggaaggttcgttgagcgaagtgttgcttatcaaccttggatatggactgctggcaaccacgaaatcgacttcgttcctgacattggtgaaatagaaccattcaagccttttatgaatcggtatcatacgccacataaggcatcaggaagtatctctccattgtggtattccatcaaaagggcgtcagcttatattattgttatgtcatgttactcatcttatgggatatacacacctcaatacaaatggctggaaaaggagttacaaggagtgaatcgaacagagacgccatggcttatagtcttagtgcatagcccgttttacagtagctatgtgcatcattacatggaaggtgaaacattgagagtcatgtacgaacaatggtttgtcaaatacaaggttgatgttgtgtttgcaggtcatgttcatgcctatgagagatcggaacgtgtttctaatattgcttacaacattgtcaatggattgtgtgagccaatatcggatgagtcagctcctatatacatcacaatcggggatggcggaaactcggaaggcttgcttaccgacatgatgcagccacaaccaaaatactccgcgtttcgagaagctagctttgggcacgggttgctagagattaaaaacagaactcatgcttacttcagctggaatcggaaccaagatgggaacgccgtggcagcagattctgtgtggttgcttaatcggttttggcgagctcaaaagaagacatggcttgatgcattttaaagacaaattgaagaaggttttatttttgcagcaattctaaacgaataaatcagttagtgactgttttacgagggttgttattgagatttgattaaaacctcctctcatacagaaaaaagtttgttattaccataagtggttttgcacctatacaagttaatataccatttcwcc

SEQ ID NO: 41570 - protein, 469 aa, Arabidopsis thaliana
  peptide (1)..(469): Ceres Seq. ID no. 15221141
MSSRSDLKIKRVSLIIFLLSVLVEFCYGGFTSEYVRGSDLPDDMPLDSDVFEVPPGPNSPQQVHVTQGNHEGNGVIISWVTPVKPGSKTVQYWCENEKSRKQAEATVNTYRFFNYTSGYIHHCLIDDLEFDTKYYYEIGSGKWSRRFWFFIPPKSGPDVPYTFGLIGDLGQTYDSNSTLSHYEMNPGKGQAVLFVGDLSYADRYPNHDNNRWDTWGRFVERSVAYQPWIWTAGNHEIDFVPDIGEIEPFKPFMNRYHTPHKASGSISPLWYSIKRASAYIIVMSCYSSYGIYTPQYKWLEKELQGVNRTETPWLIVLVHSPFYSSYVHHYMEGETLRVMYEQWFVKYKVDVVFAGHVHAYERSERVSNIAYNIVNGLCEPISDESAPIYITIGDGGNSEGLLTDMMQPQPKYSAFREASFGHGLLEIKNRTHAYFSWNRNQDGNAVAADSVWLLNRFWRAQKKTWLDAF

SEQ ID NO: 41571 - protein, 426 aa, Arabidopsis thaliana
  peptide (1)..(426): Ceres Seq. ID no. 15221142
MPLDSDVFEVPPGPNSPQQVHVTQGNHEGNGVIISWVTPVKPGSKTVQYWCENEKSRKQAEATVNTYRFFNYTSGYIHHCLIDDLEFDTKYYYEIGSGKWSRRFWFFIPPKSGPDVPYTFGLIGDLGQTYDSNSTLSHYEMNPGKGQAVLFVGDLSYADRYPNHDNNRWDTWGRFVERSVAYQPWIWTAGNHEIDFVPDIGEIEPFKPFMNRYHTPHKASGSISPLWYSIKRASAYIIVMSCYSSYGIYTPQYKWLEKELQGVNRTETPWLIVLVHSPFYSSYVHHYMEGETLRVMYEQWFVKYKVDVVFAGHVHAYERSERVSNIAYNIVNGLCEPISDESAPIYITIGDGGNSEGLLTDMMQPQPKYSAFREASFGHGLLEIKNRTHAYFSWNRNQDGNAVAADSVWLLNRFWRAQKKTWLDAF

SEQ ID NO: 41572 - protein, 286 aa, Arabidopsis thaliana
  peptide (1)..(286): Ceres Seq. ID no. 15221143
MNPGKGQAVLFVGDLSYADRYPNHDNNRWDTWGRFVERSVAYQPWIWTAGNHEIDFVPDIGEIEPFKPFMNRYHTPHKASGSISPLWYSIKRASAYIIVMSCYSSYGIYTPQYKWLEKELQGVNRTETPWLIVLVHSPFYSSYVHHYMEGETLRVMYEQWFVKYKVDVVFAGHVHAYERSERVSNIAYNIVNGLCEPISDESAPIYITIGDGGNSEGLLTDMMQPQPKYSAFREASFGHGLLEIKNRTHAYFSWNRNQDGNAVAADSVWLLNRFWRAQKKTWLDAF

SEQ ID NO: 41573 - DNA, 569 bp, Arabidopsis thaliana
  misc_feature (1)..(569): Ceres Seq. ID no. 13645801
  misc_feature (1)..(569): Ortholog of  Ceres SEQ ID NO 15172828 as cited in SEQ ID NO 60174
attaaaatataataaaaagacgtaagattctctccgcctcctccttctctctataagaaccgacacagagacgaagaagaataaatggccgcagaaggagaagttatcgcttgccacaccgttgaagattggaccgagaagctcaaagccgccaacgaatccaagaaactgattgtgatagacttcactgcaacatggtgcccaccttgccgtttcattgcacccgtctttgctgacttagccaagaagcacctcgacgtagtcttcttcaaggtcgatgttgacgaattgaacactgttgctgaggagtttaaagttcaggcaatgccaacgtttatcttcatgaaagaaggagagatcaaggagactgtggttggtgctgctaaagaagaaatcattgccaatctcgagaagcacaagacagttgttgctgctgcttgatttgcttttctctcttacctattttgctaaaatatgtttggtgttttaataaatcctttgttcgcccgagtcttttcaccttaaatgtgctcttatgtgtggtggtgaataaatgttgttgcaaactt

SEQ ID NO: 41574 - protein, 118 aa, Arabidopsis thaliana; identical to SEQ ID NO: 29115
  peptide (1)..(118): Ceres Seq. ID no. 13645802

SEQ ID NO: 41575 - DNA, 1111 bp, Arabidopsis thaliana
  misc_feature (1)..(1111): Ceres Seq. ID no. 13591787
  misc_feature (1)..(1111): Ortholog of  Ceres SEQ ID NO 14305682 as cited in SEQ ID NO 59267
  misc_feature (1)..(1111): Ortholog of  Ceres SEQ ID NO 14315060 as cited in SEQ ID NO 60039
  misc_feature (1)..(1111): Ortholog of  Ceres SEQ ID NO 13594430 as cited in SEQ ID NO 60181
  misc_feature (1)..(1111): Ortholog of  Ceres SEQ ID NO 13597809 as cited in SEQ ID NO 64598
  misc_feature (1)..(1111): Ortholog of  Ceres SEQ ID NO 14313544 as cited in SEQ ID NO 68424
  misc_feature (1)..(1111): Ortholog of  Ceres SEQ ID NO 12617960 as cited in SEQ ID NO 69051
  misc_feature (1)..(1111): Ortholog of  Ceres SEQ ID NO 13589401 as cited in SEQ ID NO 0
gccattgcttaatcctctcctctccttcacgttgagatatttttgagttttctgtgctgaattttggggaatcgaagaaattgaatttcaaaaatcaatggcggaagaaattgaaaaatctgtgccgacagaggaatctctgatggagaagatctccgagaagattcaccatcacgattcgtcgtcatcgtctgaatccgagtacgagaaacctgattctccttcggctgtgaaagcgaagatctatcgtatgtttggcagagagaagcctgttcacaaggttctcggtggtggaaagcctgctgatgtgttcttgtggagggataaaaaactatcaggtgctgttcttggtgtcgcgactgctatttgggttctgttcgagctggttgagtatcatttgttgagtcttttgtgtcacatttcgatactcgctcttggaggcctctttttgtggtccaatgctcacacacttatcaacaagacttcaccacaaattccagaaatccatgttcccgaggaggctttccttgtggttgcttcttctctgagaaacgaactaaaccaagcttttgttatcctacgaagcattgctttaggaagggacctaaaaaaattcctgatggttgttgtcggtctatggatcatctcggtggtgggcaattggttcaatttcctgactttggtgtacatttgcttcgtgatattgcacacagtcccaatgttgtatgagaaacacgaggacaaggttgatccattggcagagaaagcaatgaaggagttgcagaaacagtatgtggttttcgatgaaaaggttctctctaagattcccattgcttctctcaaggcaaaggcaaaattgggttaaaaagagagacagacgtctatggttttctttttgcatttttgatcatgtgaaattggtggtcacttgcagggttttgccgctaatggcccaactgtcctttttatgattttatcacgttttgagtacacttgttttttcttttcaaataccattttttccagctttttatggagaattcttgagctcatgaaacgtgagacattgtttcgttttgaatattccacaaatatagaagatataaatcac

SEQ ID NO: 41576 - protein, 255 aa, Arabidopsis thaliana
  peptide (1)..(255): Ceres Seq. ID no. 13591788
MAEEIEKSVPTEESLMEKISEKIHHHDSSSSSESEYEKPDSPSAVKAKIYRMFGREKPVHKVLGGGKPADVFLWRDKKLSGAVLGVATAIWVLFELVEYHLLSLLCHISILALGGLFLWSNAHTLINKTSPQIPEIHVPEEAFLVVASSLRNELNQAFVILRSIALGRDLKKFLMVVVGLWIISVVGNWFNFLTLVYICFVILHTVPMLYEKHEDKVDPLAEKAMKELQKQYVVFDEKVLSKIPIASLKAKAKLG

SEQ ID NO: 41577 - protein, 240 aa, Arabidopsis thaliana
  peptide (1)..(240): Ceres Seq. ID no. 13591789
MEKISEKIHHHDSSSSSESEYEKPDSPSAVKAKIYRMFGREKPVHKVLGGGKPADVFLWRDKKLSGAVLGVATAIWVLFELVEYHLLSLLCHISILALGGLFLWSNAHTLINKTSPQIPEIHVPEEAFLVVASSLRNELNQAFVILRSIALGRDLKKFLMVVVGLWIISVVGNWFNFLTLVYICFVILHTVPMLYEKHEDKVDPLAEKAMKELQKQYVVFDEKVLSKIPIASLKAKAKLG

SEQ ID NO: 41578 - protein, 204 aa, Arabidopsis thaliana
  peptide (1)..(204): Ceres Seq. ID no. 13591790
MFGREKPVHKVLGGGKPADVFLWRDKKLSGAVLGVATAIWVLFELVEYHLLSLLCHISILALGGLFLWSNAHTLINKTSPQIPEIHVPEEAFLVVASSLRNELNQAFVILRSIALGRDLKKFLMVVVGLWIISVVGNWFNFLTLVYICFVILHTVPMLYEKHEDKVDPLAEKAMKELQKQYVVFDEKVLSKIPIASLKAKAKLG

SEQ ID NO: 41579 - DNA, 1969 bp, Arabidopsis thaliana
  misc_feature (1)..(1969): Ceres Seq. ID no. 12385044
  misc_feature (1)..(1969): Ortholog of  Ceres SEQ ID NO 14307728 as cited in SEQ ID NO 54710
aaaggcttttaatattttatcatcttcaggcttattcgattttcttcagatttgaaatggtgtcgttcaaggtctctctcgtctctacttcgcctattgatggccagaaacctgggacttctggactccgtaagaaggtgaaagtgtttaagcaaccaaattaccttgaaaattttgtccaggcaacgttcaatgctcttactacagagaaagttaaaggtgcgacacttgtggtttctggtgatggtcgttattattcagagcaagctattcagattatagtaaagatggcagcagctaatggtgttagacgtgtgtgggttggtcaaaacagtctgctatcaactcctgcagtatcagctattattcgtgaaagagtaggggctgatggatctaaagccacaggagcatttatcttaacagcaagtcataatcctggtggcccaactgaggatttcggaattaagtacaatatggaaaatggtggaccagctcctgaatcaatcactgataagatttacgagaacacaaagacaatcaaggagtacccaatagcggaagatctacccagggttgatatttctactattggtataaccagctttgaaggacctgaaggaaagtttgacgtcgaagtttttgattctgcagatgactatgttaaactaatgaagtcaatcttcgactttgaatccatcaagaaattgctatcttatccaaaatttactttctgctatgatgcattgcatggagtggctggagcatatgcacatcgcatctttgtcgaagaactaggtgcaccagaaagttcgttgttgaactgcgtacccaaggaggactttggagggggccacccggatcccaatcttacctatgctaaggagctcgtggcacgcatgggattgagtaaaactgatgatgctggtggcgagcctccagagtttggcgccgctgctgatggtgatgcagaccgaaacatgatcctcggtaaaaggtttttcgtaactccttcggattcagttgctataattgctgcaaatgctgttggggccataccatacttcagctctggtttaaaaggtgttgctaggagcatgccgacctcagctgcacttgatgtcgttgcaaaaaacttgggtttgaagttctttgaggttccaacaggctggaaattctttggcaatctaatggatgctgggatgtgctctgtatgcggagaagaaagttttggaaccggttcggatcatatccgtgagaaagatgggatctgggcagttcttgcttggctatcaatactggctcacaagaacaaggaaacccttgatgggaatgcaaaactggtgacggttgaagacattgtccgccagcactgggctacatatggccgtcactattacactcgatacgactatgagaacgtagacgcaactgcagctaaagaactcatgggacttttggttaagttgcaatcttcacttcccgaagtcaacaagattataaagggaattcatccagaggtggcaaatgttgcaagcgcagatgagttcgagtacaaagatccagtagatggctctgtttcaaagcaccaagggatccgatacttattcgaggatggatcacgacttgtgttccgtctctcgggaactggctcagaaggagcaacaataaggctatacattgaacaatacgagaaggacgcctcaaagatcggccgagattctcaggatgctcttggtcccctggttgatgttgcattaaagctgtcgaaaatgcaagagttcaccggccgatcatcaccaactgttattacataagacagctttcagaagacgctgtctccaatactactctcattccaacttcatttcttatgaatttgggttttgcttttttcctgttatctgttatcttacacaagtatacttcaatacatataattttaatggaatatacattaggttggcaattg

SEQ ID NO: 41580 - protein, 603 aa, Arabidopsis thaliana
  peptide (1)..(603): Ceres Seq. ID no. 12385045
RLLIFYHLQAYSIFFRFEMVSFKVSLVSTSPIDGQKPGTSGLRKKVKVFKQPNYLENFVQATFNALTTEKVKGATLVVSGDGRYYSEQAIQIIVKMAAANGVRRVWVGQNSLLSTPAVSAIIRERVGADGSKATGAFILTASHNPGGPTEDFGIKYNMENGGPAPESITDKIYENTKTIKEYPIAEDLPRVDISTIGITSFEGPEGKFDVEVFDSADDYVKLMKSIFDFESIKKLLSYPKFTFCYDALHGVAGAYAHRIFVEELGAPESSLLNCVPKEDFGGGHPDPNLTYAKELVARMGLSKTDDAGGEPPEFGAAADGDADRNMILGKRFFVTPSDSVAIIAANAVGAIPYFSSGLKGVARSMPTSAALDVVAKNLGLKFFEVPTGWKFFGNLMDAGMCSVCGEESFGTGSDHIREKDGIWAVLAWLSILAHKNKETLDGNAKLVTVEDIVRQHWATYGRHYYTRYDYENVDATAAKELMGLLVKLQSSLPEVNKIIKGIHPEVANVASADEFEYKDPVDGSVSKHQGIRYLFEDGSRLVFRLSGTGSEGATIRLYIEQYEKDASKIGRDSQDALGPLVDVALKLSKMQEFTGRSSPTVIT

SEQ ID NO: 41581 - protein, 585 aa, Arabidopsis thaliana
  peptide (1)..(585): Ceres Seq. ID no. 12385046
MVSFKVSLVSTSPIDGQKPGTSGLRKKVKVFKQPNYLENFVQATFNALTTEKVKGATLVVSGDGRYYSEQAIQIIVKMAAANGVRRVWVGQNSLLSTPAVSAIIRERVGADGSKATGAFILTASHNPGGPTEDFGIKYNMENGGPAPESITDKIYENTKTIKEYPIAEDLPRVDISTIGITSFEGPEGKFDVEVFDSADDYVKLMKSIFDFESIKKLLSYPKFTFCYDALHGVAGAYAHRIFVEELGAPESSLLNCVPKEDFGGGHPDPNLTYAKELVARMGLSKTDDAGGEPPEFGAAADGDADRNMILGKRFFVTPSDSVAIIAANAVGAIPYFSSGLKGVARSMPTSAALDVVAKNLGLKFFEVPTGWKFFGNLMDAGMCSVCGEESFGTGSDHIREKDGIWAVLAWLSILAHKNKETLDGNAKLVTVEDIVRQHWATYGRHYYTRYDYENVDATAAKELMGLLVKLQSSLPEVNKIIKGIHPEVANVASADEFEYKDPVDGSVSKHQGIRYLFEDGSRLVFRLSGTGSEGATIRLYIEQYEKDASKIGRDSQDALGPLVDVALKLSKMQEFTGRSSPTVIT

SEQ ID NO: 41582 - protein, 508 aa, Arabidopsis thaliana
  peptide (1)..(508): Ceres Seq. ID no. 12385047
MAAANGVRRVWVGQNSLLSTPAVSAIIRERVGADGSKATGAFILTASHNPGGPTEDFGIKYNMENGGPAPESITDKIYENTKTIKEYPIAEDLPRVDISTIGITSFEGPEGKFDVEVFDSADDYVKLMKSIFDFESIKKLLSYPKFTFCYDALHGVAGAYAHRIFVEELGAPESSLLNCVPKEDFGGGHPDPNLTYAKELVARMGLSKTDDAGGEPPEFGAAADGDADRNMILGKRFFVTPSDSVAIIAANAVGAIPYFSSGLKGVARSMPTSAALDVVAKNLGLKFFEVPTGWKFFGNLMDAGMCSVCGEESFGTGSDHIREKDGIWAVLAWLSILAHKNKETLDGNAKLVTVEDIVRQHWATYGRHYYTRYDYENVDATAAKELMGLLVKLQSSLPEVNKIIKGIHPEVANVASADEFEYKDPVDGSVSKHQGIRYLFEDGSRLVFRLSGTGSEGATIRLYIEQYEKDASKIGRDSQDALGPLVDVALKLSKMQEFTGRSSPTVIT

SEQ ID NO: 41583 - DNA, 1832 bp, Arabidopsis thaliana
  misc_feature (1)..(1832): Ceres Seq. ID no. 12329310
  misc_feature (1)..(1832): Ortholog of  Ceres SEQ ID NO 13599900 as cited in SEQ ID NO 531
  misc_feature (1)..(1832): Ortholog of  Ceres SEQ ID NO 14304811 as cited in SEQ ID NO 53097
  misc_feature (1)..(1832): Ortholog of  Ceres SEQ ID NO 13659971 as cited in SEQ ID NO 67565
  misc_feature (1)..(1832): Ortholog of  Ceres SEQ ID NO 13500385 as cited in SEQ ID NO 67583
atctgcgatgctgctcttaaattctcctctcgtcctcatttccatcttcgtctcctccctcagccatcccctctgagcttataaaaccttcatggcatttgcgcacttctgcagcatccactgtttccttaaaatcgggaaacaacaagagcttcttctccttgttattggattgccttttgccagcctttgttttagtcagttttctcctcattaacttctgtcggtacagaatctctctccaggctggtgaactcttgcagctttctcagtgattctgtatcgatttttcccgtgtaaattatggtttcctctcagcgtcctgtccccaacaaaatccagaaacagcaatatctatccatcagcccttcaaattctgtcttgaaagatgatgttgaacttgagttctctgatgtgtttggtccactccccgaagaggccaatgatattgcttacgacgagcctgctgttgtctacagtcgatcccactccttggttggcccgtgttcgctcgatagtcattctttgaagctgaccaagctcaccttactagagactgaggactcaattgacttggtggagtgtctcgaaggtgaatctttaaaagaaaatgatgatttctctggtaatgacgacagtgacaatgagaaagctttagagggagatctggtgaaagtctcaggtgtagtaggcatagatgattttgaggttatgaaggttgttgggaaaggtgcgtttgggaaagtctaccaggtgaggaaaaaggagacctctgagatatacgctatgaaagtcatgaggaaagatcacattatggagaagaaccatgctgaatacatgaaagctgagcgcgatattcttacaaaaattgatcacccattcattgttcaacttaaatactcttttcagaccaagtacaggctgtatcttgtgctcgactttataaacggaggtcatcttttcttccaactctatcaccaagggcttttcagagaggacttggctcgagtgtacactgcagaaatcgtctctgcagtttcccatctccatgagaaaggcataatgcacagagatctgaaacccgaaaacatactcatggatacagatggccacgtgatgctaacagattttggtttagcaaaggaatttgaagaaaacacaagatcaaactccatgtgcggaactacggagtatatggcacctgaaattgttcgaggaaaaggacatgataaagcagctgactggtggagcgtagggattcttctgtatgagatgctcacaggaaagccaccgtttctcgggagcaaaggaaagatacagcagaaaattgtgaaggacaagatcaagcttccgcagtttctgtctaatgaagctcatgcaatactgaaagggctgctgcaaaaagagccagaaaggcgacttggaagtggactgagcggagcagaggagataaaacagcacaaatggttcaagggaataaactggaagaagctggaggctagagaagtgatgccaagtttcaagccggaagtatcgggaaggcaatgcatagcaaattttgacaagtgttggactgacatgtctgttttggattctccggcgagcagtcccagttcggatcctaaggccaacccttttaccaatttcacttacgtcaggcctcctccttcattccttcaccagtccacaactactttgtagatttactatatttttatgtagttcctacttctttggttgttgtttccttctgacacatgaacattaaagaaaactttggttaccaagacgcttaatttataattgattttatgagattgttattgattgag

SEQ ID NO: 41584 - protein, 465 aa, Arabidopsis thaliana
  peptide (1)..(465): Ceres Seq. ID no. 12329311
MVSSQRPVPNKIQKQQYLSISPSNSVLKDDVELEFSDVFGPLPEEANDIAYDEPAVVYSRSHSLVGPCSLDSHSLKLTKLTLLETEDSIDLVECLEGESLKENDDFSGNDDSDNEKALEGDLVKVSGVVGIDDFEVMKVVGKGAFGKVYQVRKKETSEIYAMKVMRKDHIMEKNHAEYMKAERDILTKIDHPFIVQLKYSFQTKYRLYLVLDFINGGHLFFQLYHQGLFREDLARVYTAEIVSAVSHLHEKGIMHRDLKPENILMDTDGHVMLTDFGLAKEFEENTRSNSMCGTTEYMAPEIVRGKGHDKAADWWSVGILLYEMLTGKPPFLGSKGKIQQKIVKDKIKLPQFLSNEAHAILKGLLQKEPERRLGSGLSGAEEIKQHKWFKGINWKKLEAREVMPSFKPEVSGRQCIANFDKCWTDMSVLDSPASSPSSDPKANPFTNFTYVRPPPSFLHQSTTTL

SEQ ID NO: 41585 - protein, 329 aa, Arabidopsis thaliana
  peptide (1)..(329): Ceres Seq. ID no. 12329312
MKVVGKGAFGKVYQVRKKETSEIYAMKVMRKDHIMEKNHAEYMKAERDILTKIDHPFIVQLKYSFQTKYRLYLVLDFINGGHLFFQLYHQGLFREDLARVYTAEIVSAVSHLHEKGIMHRDLKPENILMDTDGHVMLTDFGLAKEFEENTRSNSMCGTTEYMAPEIVRGKGHDKAADWWSVGILLYEMLTGKPPFLGSKGKIQQKIVKDKIKLPQFLSNEAHAILKGLLQKEPERRLGSGLSGAEEIKQHKWFKGINWKKLEAREVMPSFKPEVSGRQCIANFDKCWTDMSVLDSPASSPSSDPKANPFTNFTYVRPPPSFLHQSTTTL

SEQ ID NO: 41586 - protein, 304 aa, Arabidopsis thaliana
  peptide (1)..(304): Ceres Seq. ID no. 12329313
MKVMRKDHIMEKNHAEYMKAERDILTKIDHPFIVQLKYSFQTKYRLYLVLDFINGGHLFFQLYHQGLFREDLARVYTAEIVSAVSHLHEKGIMHRDLKPENILMDTDGHVMLTDFGLAKEFEENTRSNSMCGTTEYMAPEIVRGKGHDKAADWWSVGILLYEMLTGKPPFLGSKGKIQQKIVKDKIKLPQFLSNEAHAILKGLLQKEPERRLGSGLSGAEEIKQHKWFKGINWKKLEAREVMPSFKPEVSGRQCIANFDKCWTDMSVLDSPASSPSSDPKANPFTNFTYVRPPPSFLHQSTTTL

SEQ ID NO: 41587 - DNA, 1798 bp, Arabidopsis thaliana
  misc_feature (1)..(1798): Ceres Seq. ID no. 13487443
  misc_feature (1)..(1798): Ortholog of  Ceres SEQ ID NO 13594209 as cited in SEQ ID NO 59089
  misc_feature (1)..(1798): Ortholog of  Ceres SEQ ID NO 15176091 as cited in SEQ ID NO 65733
  misc_feature (1)..(1798): Ortholog of  Ceres SEQ ID NO 15169599 as cited in SEQ ID NO 66096
  misc_feature (1)..(1798): Ortholog of  Ceres SEQ ID NO 15170167 as cited in SEQ ID NO 66224
  misc_feature (1)..(1798): Ortholog of  Ceres SEQ ID NO 13502874 as cited in SEQ ID NO 66298
  misc_feature (1)..(1798): Ortholog of  Ceres SEQ ID NO 14307944 as cited in SEQ ID NO 66503
  misc_feature (1)..(1798): Ortholog of  Ceres SEQ ID NO 12614124 as cited in SEQ ID NO 68392
  misc_feature (1)..(1798): Ortholog of  Ceres SEQ ID NO 14308011 as cited in SEQ ID NO 69234
caaaaaatccaacccaagaaccacagtgagatctttctcagaagacaaaaatgggaacagcgtcgtctaagtctaacatcaacctctcgcaggtcctcaacactgaggagccgtacagctccgtgatgctggccgtcgctgctctcttggccgttgtatgctacttatggattcaggggaagtccaagtccaaaaaggaacctccactgcctccgggaccttggccacttcctatcgtcggaaacctcccgttcctaaactctgacgtcctccacacgcaattccaagccctaaccctaaaatatggccctctcatgaagatccacctcggttccaaacttgcgatcgtcgtctcttcccctgacatggctcgcgaggttctcaaaacccacgacatcactttcgccaaccacgatctccctgaagtcggaaagatcaacacttacggtggtgaagacatcctctggtctccttacggtacccattggaggagacttcgtaagctctgcgtcatgaagatgttcactaccccaagtctcgaagcttcctactccactcgccgggaagaaacccgacaaaccattgtccacatgtcggaaatggctcgtgaaggatcaccagtcaacctcggagagcaaatatttctttccattttcaacgtcgtgacaagaatgatgtggggcgccactgttgaaggagacgagagaacgagcttaggaaacgagctcaaaaccctaatatctgatatctccgacatagaagggattcaaaactactcagatttctttccgttgttctcaagattcgatttccaaggattggttaagcagatgaaaggccatgtgaagaagcttgatctcttgttcgatagagttatggagagtcacgtcaaaatggtgggaaagaagagcgaagaagaagaagatttcttgcaatacttacttagagttaaagatgatgatgagaaagctcctctgtccatgactcatgtcaagtctctcctcatggatatggttcttggtggtgtcgacacatcggttaacgcatccgaattcgccatggcagagattgtgagcagaccggaagtgttaaacaagatccgactagaacttgaccaagttgttggcaaagacaacatcgttgaggaatcacatttacctaagcttccttacctacaagcggttatgaaagagactcttaggcttcaccctacgcttcctcttcttgttcctcacagaaacagcgaaacctcggtggttgcgggatacactgtgcctaaagactccaagattttcatcaacgtttgggcgattcatagagatcctaagaattgggatgaaccaaacgagttcaaacctgagaggtttttggagaattcgcttgatttcaatggaggtgattttaagtatttgccttttgggtcaggaaggaggatttgtgcggcgataaacatggctgagagacttgttctgttcaacattgcttcacttcttcactcttttgattggaaagctcctcaaggacagaagtttgaggttgaagagaagtttggtcttgttcttaagttgaagtctccacttgtggctattcctgttccaaggttgtccgatccaaaactctacacagcttaagtaagtaagaaggaaatttggtttgagcttatgagaggaagttgaattgagttttcttgtttaaagtttatttttctttattcgtgtttggagtttgatgctttgtaaaaaaagatgtgtcaagttaaatttaattttcttatatataataaaataaagttttagtc

SEQ ID NO: 41588 - protein, 526 aa, Arabidopsis thaliana
  peptide (1)..(526): Ceres Seq. ID no. 13487444
MGTASSKSNINLSQVLNTEEPYSSVMLAVAALLAVVCYLWIQGKSKSKKEPPLPPGPWPLPIVGNLPFLNSDVLHTQFQALTLKYGPLMKIHLGSKLAIVVSSPDMAREVLKTHDITFANHDLPEVGKINTYGGEDILWSPYGTHWRRLRKLCVMKMFTTPSLEASYSTRREETRQTIVHMSEMAREGSPVNLGEQIFLSIFNVVTRMMWGATVEGDERTSLGNELKTLISDISDIEGIQNYSDFFPLFSRFDFQGLVKQMKGHVKKLDLLFDRVMESHVKMVGKKSEEEEDFLQYLLRVKDDDEKAPLSMTHVKSLLMDMVLGGVDTSVNASEFAMAEIVSRPEVLNKIRLELDQVVGKDNIVEESHLPKLPYLQAVMKETLRLHPTLPLLVPHRNSETSVVAGYTVPKDSKIFINVWAIHRDPKNWDEPNEFKPERFLENSLDFNGGDFKYLPFGSGRRICAAINMAERLVLFNIASLLHSFDWKAPQGQKFEVEEKFGLVLKLKSPLVAIPVPRLSDPKLYTA

SEQ ID NO: 41589 - protein, 501 aa, Arabidopsis thaliana
  peptide (1)..(501): Ceres Seq. ID no. 13487445
MLAVAALLAVVCYLWIQGKSKSKKEPPLPPGPWPLPIVGNLPFLNSDVLHTQFQALTLKYGPLMKIHLGSKLAIVVSSPDMAREVLKTHDITFANHDLPEVGKINTYGGEDILWSPYGTHWRRLRKLCVMKMFTTPSLEASYSTRREETRQTIVHMSEMAREGSPVNLGEQIFLSIFNVVTRMMWGATVEGDERTSLGNELKTLISDISDIEGIQNYSDFFPLFSRFDFQGLVKQMKGHVKKLDLLFDRVMESHVKMVGKKSEEEEDFLQYLLRVKDDDEKAPLSMTHVKSLLMDMVLGGVDTSVNASEFAMAEIVSRPEVLNKIRLELDQVVGKDNIVEESHLPKLPYLQAVMKETLRLHPTLPLLVPHRNSETSVVAGYTVPKDSKIFINVWAIHRDPKNWDEPNEFKPERFLENSLDFNGGDFKYLPFGSGRRICAAINMAERLVLFNIASLLHSFDWKAPQGQKFEVEEKFGLVLKLKSPLVAIPVPRLSDPKLYTA

SEQ ID NO: 41590 - protein, 438 aa, Arabidopsis thaliana
  peptide (1)..(438): Ceres Seq. ID no. 13487446
MKIHLGSKLAIVVSSPDMAREVLKTHDITFANHDLPEVGKINTYGGEDILWSPYGTHWRRLRKLCVMKMFTTPSLEASYSTRREETRQTIVHMSEMAREGSPVNLGEQIFLSIFNVVTRMMWGATVEGDERTSLGNELKTLISDISDIEGIQNYSDFFPLFSRFDFQGLVKQMKGHVKKLDLLFDRVMESHVKMVGKKSEEEEDFLQYLLRVKDDDEKAPLSMTHVKSLLMDMVLGGVDTSVNASEFAMAEIVSRPEVLNKIRLELDQVVGKDNIVEESHLPKLPYLQAVMKETLRLHPTLPLLVPHRNSETSVVAGYTVPKDSKIFINVWAIHRDPKNWDEPNEFKPERFLENSLDFNGGDFKYLPFGSGRRICAAINMAERLVLFNIASLLHSFDWKAPQGQKFEVEEKFGLVLKLKSPLVAIPVPRLSDPKLYTA

SEQ ID NO: 41591 - DNA, 2395 bp, Arabidopsis thaliana; identical to SEQ ID NO: 37382
  misc_feature (1)..(2395): Ceres Seq. ID no. 13497276
  misc_feature (1)..(2395): Ortholog of  Ceres SEQ ID NO 15175681 as cited in SEQ ID NO 55458
  misc_feature (1)..(2395): Ortholog of  Ceres SEQ ID NO 15180188 as cited in SEQ ID NO 0

SEQ ID NO: 41592 - protein, 540 aa, Arabidopsis thaliana; identical to SEQ ID NO: 37383
  peptide (1)..(540): Ceres Seq. ID no. 13497277

SEQ ID NO: 41593 - protein, 515 aa, Arabidopsis thaliana; identical to SEQ ID NO: 37384
  peptide (1)..(515): Ceres Seq. ID no. 13497278

SEQ ID NO: 41594 - protein, 502 aa, Arabidopsis thaliana; identical to SEQ ID NO: 37385
  peptide (1)..(502): Ceres Seq. ID no. 13497279

SEQ ID NO: 41595 - DNA, 1440 bp, Arabidopsis thaliana
  misc_feature (1)..(1440): Ceres Seq. ID no. 12329401
  misc_feature (1)..(1440): Ortholog of  Ceres SEQ ID NO 13596581 as cited in SEQ ID NO 62420
  misc_feature (1)..(1440): Ortholog of  Ceres SEQ ID NO 13591273 as cited in SEQ ID NO 65904
  misc_feature (1)..(1440): Ortholog of  Ceres SEQ ID NO 13623086 as cited in SEQ ID NO 0
aaaagataagatacgaagaacaagagccccctctctctctctcgtccactcacctattgtgtatctcatcatcaccatggacaagacatttttctctagcaacgaagggaaaccaattacatgcaaagcagcaatatgtagaaaagcaggagaagcattggtgattgaagacatccacgtggatccaccccaagcttatgaagttaggattaagattttatgtacttctctatgtcacactgatcttactttctggaaactaagctttggaccaatttcaaggtttcctaggattcttggacacgaagcagtcggcataataacatgtatttgctgtttttattgggattttaaaccagtgtggtcgagagcattggtgaaaacgtggacggatttaaacaagatatgccgaagatttcatatcaaacacaagacgatatggaatggcttcaagattcaaagattcttcaggagaagtgattcatcattttctctttgtctcaggtttttccgaatacaccgtcgtggatattgcacatcttgtcaaaatatctcctgaaatccccgttaataaagcggctttgctcagctgcggtgtctccacaggaattggagcagcttggaaggtggctaacgtggaagaaggctccaccattgcaatttttggccttggtgctgttggacttgcggttgcagaaggagccaggctacgaggagccgcaaagattattggtattgataccaattctgataaattcgagctaggtaagaaatttggttttacggatttcatcaatccgaccttatgcggagaaaagaagattagtgaggtcattaaagaaatgacagaaggaggagttgactatagtttcgaatgcgttggcttagcttctttacttaacgaggctttcatcagtacccgcacgggaacaggtaaaactgtaatgttggggatggagaagcatgcagcgccaattagtttgggtagttttgatcttttaagaggcagagttatttgcggaagcttgttcggtggtctgaaatccaaacttgatattcccattctagtggatcattacctaaaaaaggagctcaatctggatagtttcattacacacgaactgaatttcaaagaaattaataaggctttcgctttattagaggaaggaaagtctctccgctgcattctatggatggataagtaactatccagcttcatatttgcactttataatcttctcgtggatcttgtttagattatcttcctttgtctttcaagatgctttgtcttgttaccttgcaatttttgttctttccacacgagctacaaacttatcatttggtagtccaaaccccttaacattgtgttttctgatggttacaaatattatgacaccttgtatttgttgatcaatgatcattatagtactaattgcttcc

SEQ ID NO: 41596 - protein, 253 aa, Arabidopsis thaliana
  peptide (1)..(253): Ceres Seq. ID no. 12329402
MASRFKDSSGEVIHHFLFVSGFSEYTVVDIAHLVKISPEIPVNKAALLSCGVSTGIGAAWKVANVEEGSTIAIFGLGAVGLAVAEGARLRGAAKIIGIDTNSDKFELGKKFGFTDFINPTLCGEKKISEVIKEMTEGGVDYSFECVGLASLLNEAFISTRTGTGKTVMLGMEKHAAPISLGSFDLLRGRVICGSLFGGLKSKLDIPILVDHYLKKELNLDSFITHELNFKEINKAFALLEEGKSLRCILWMDK

SEQ ID NO: 41597 - protein, 185 aa, Arabidopsis thaliana
  peptide (1)..(185): Ceres Seq. ID no. 12329403
KDKIRRTRAPSLSLVHSPIVYLIITMDKTFFSSNEGKPITCKAAICRKAGEALVIEDIHVDPPQAYEVRIKILCTSLCHTDLTFWKLSFGPISRFPRILGHEAVGIITCICCFYWDFKPVWSRALVKTWTDLNKICRRFHIKHKTIWNGFKIQRFFRRSDSSFSLCLRFFRIHRRGYCTSCQNIS

SEQ ID NO: 41598 - protein, 160 aa, Arabidopsis thaliana
  peptide (1)..(160): Ceres Seq. ID no. 12329404
MDKTFFSSNEGKPITCKAAICRKAGEALVIEDIHVDPPQAYEVRIKILCTSLCHTDLTFWKLSFGPISRFPRILGHEAVGIITCICCFYWDFKPVWSRALVKTWTDLNKICRRFHIKHKTIWNGFKIQRFFRRSDSSFSLCLRFFRIHRRGYCTSCQNIS

SEQ ID NO: 41599 - DNA, 1445 bp, Arabidopsis thaliana
  misc_feature (1)..(1445): Ceres Seq. ID no. 13488594
  misc_feature (1)..(1445): Ortholog of  Ceres SEQ ID NO 14312893 as cited in SEQ ID NO 57030
aaaccaccaattctctcatccgtaccaaagaacaaaaaaaagataaaatggcggttcatattcacaaccctaactttttccacactcatcatctccgagcatctcttacttctgcctctgcatcaccttcctcatatctctttcatagacactctgcttcaaagtatcctagcttcctctgcaaatccaataacaaagatgactatctcattgatgctcctgtttctgttggagatggattctcttttagtggagggaagtattcggatcaaccgagtccatcagatgagtggttgaagcaagggaaatgggttaaagctcatagagttggcggctctggtgtagaagcaaaagatccgattttcggattaacaatgggagctagctctcaagcttcaaaagatcttttccgatggtttagtgtagaatccgggagtgtagatagtcctcctgttatactcatccatggattcccatctcaggcttattcttaccggaaaactattcccgttctttcaaagaactaccgcgccattgctttcgattggctaggatttggattttctgacaagcctcaggctggatatggattcaactatacaatggacgagtttgtttcttcgctggagtcattcattgacgaagtaactactagtaaggtgtcacttgtggtgcagggctacttctcagctgctgttgtaaaatatgcaagaaaccgaccagacaagatcaagaatctcatactcttgaatcctcctctcacaccagaacatgctaaacttccatcaacattgtctgtattcagcaactttttgcttggggaaattttctctcaggatcctctaagagcaagtgacaagcctttaacaagctgtggtccttacaaaatgaaagaagacgatgcaatggtttatcgaagaccttatcttacctcaggttcttctggttttgcacttaatgccataagcaggtccatgaagaaagaacttaagaaatatgcagaagagatgaggacatcactaatggataaaaactggaaaatcccgatcaccgtgtgctggggacaacgagataggtggttaagctatgaaggagttgaagagttctgcaagagttcgggacacaacctcgtcgaattaccaaatgctggccatcatgtacaagaagattgtggagaggaacttggaggaataatctcaagaatcataagcaaatctgctctattctaactggaaccactccacaagaatattgaaagaacgtaaagaaccatttgtataaactcagctttattcaaaacatactctagttccagtggtacattacatataagtcaccagtaagatttttgtgcttaactttgaggctctataaagtaggagattctccagttctctagtacaaatttgtaacatcctaaaaagaatgtagcttgatctacatgt

SEQ ID NO: 41600 - protein, 408 aa, Arabidopsis thaliana
  peptide (1)..(408): Ceres Seq. ID no. 13488595
TTNSLIRTKEQKKDKMAVHIHNPNFFHTHHLRASLTSASASPSSYLFHRHSASKYPSFLCKSNNKDDYLIDAPVSVGDGFSFSGGKYSDQPSPSDEWLKQGKWVKAHRVGGSGVEAKDPIFGLTMGASSQASKDLFRWFSVESGSVDSPPVILIHGFPSQAYSYRKTIPVLSKNYRAIAFDWLGFGFSDKPQAGYGFNYTMDEFVSSLESFIDEVTTSKVSLVVQGYFSAAVVKYARNRPDKIKNLILLNPPLTPEHAKLPSTLSVFSNFLLGEIFSQDPLRASDKPLTSCGPYKMKEDDAMVYRRPYLTSGSSGFALNAISRSMKKELKKYAEEMRTSLMDKNWKIPITVCWGQRDRWLSYEGVEEFCKSSGHNLVELPNAGHHVQEDCGEELGGIISRIISKSALF

SEQ ID NO: 41601 - protein, 393 aa, Arabidopsis thaliana
  peptide (1)..(393): Ceres Seq. ID no. 13488596
MAVHIHNPNFFHTHHLRASLTSASASPSSYLFHRHSASKYPSFLCKSNNKDDYLIDAPVSVGDGFSFSGGKYSDQPSPSDEWLKQGKWVKAHRVGGSGVEAKDPIFGLTMGASSQASKDLFRWFSVESGSVDSPPVILIHGFPSQAYSYRKTIPVLSKNYRAIAFDWLGFGFSDKPQAGYGFNYTMDEFVSSLESFIDEVTTSKVSLVVQGYFSAAVVKYARNRPDKIKNLILLNPPLTPEHAKLPSTLSVFSNFLLGEIFSQDPLRASDKPLTSCGPYKMKEDDAMVYRRPYLTSGSSGFALNAISRSMKKELKKYAEEMRTSLMDKNWKIPITVCWGQRDRWLSYEGVEEFCKSSGHNLVELPNAGHHVQEDCGEELGGIISRIISKSALF

SEQ ID NO: 41602 - protein, 284 aa, Arabidopsis thaliana
  peptide (1)..(284): Ceres Seq. ID no. 13488597
MGASSQASKDLFRWFSVESGSVDSPPVILIHGFPSQAYSYRKTIPVLSKNYRAIAFDWLGFGFSDKPQAGYGFNYTMDEFVSSLESFIDEVTTSKVSLVVQGYFSAAVVKYARNRPDKIKNLILLNPPLTPEHAKLPSTLSVFSNFLLGEIFSQDPLRASDKPLTSCGPYKMKEDDAMVYRRPYLTSGSSGFALNAISRSMKKELKKYAEEMRTSLMDKNWKIPITVCWGQRDRWLSYEGVEEFCKSSGHNLVELPNAGHHVQEDCGEELGGIISRIISKSALF

SEQ ID NO: 41603 - DNA, 1837 bp, Arabidopsis thaliana
  misc_feature (1)..(1837): Ceres Seq. ID no. 12338342
  misc_feature (1)..(1837): Ortholog of  Ceres SEQ ID NO 14314945 as cited in SEQ ID NO 58031
  misc_feature (1)..(1837): Ortholog of  Ceres SEQ ID NO 13595833 as cited in SEQ ID NO 59877
  misc_feature (1)..(1837): Ortholog of  Ceres SEQ ID NO 13654452 as cited in SEQ ID NO 65792
  misc_feature (1)..(1837): Ortholog of  Ceres SEQ ID NO 13573778 as cited in SEQ ID NO 0
aaatcttctgatgcacactagttcgaaggatcctttaatgggagagagaatgttctacttcttcttcttcttcttcttcttcttcttcttcctcctctctcgtcggatctctctgatttagtgatttttcaaatttcaagttttcttcacctttaattttgtgtctcgttgatctctctttggacattctgctttggattctggaggcttctcattagatctctattagtgggtttaggtcaagttcttgaaatggataaggagaaatctcctgcaccaccacctagtggaggtcttcctccaccatcgggtcgttactctgcgttttcacctaatggaagtagctttgcaatgaaagctgaatcatcttttcctcctttgactccaagtggaagcaatagctcagatgctaaccgattcagccatgatattagccgaatgccggataatccacctaagaacctaggccatcgccgagctcattcagagattcttactcttcctgatgacttaagctttgatagtgatcttggtgtggttggtgctgctgatggaccttctttctctgatgatactgacgaggacttactctatatgtatcttgatatggaaaaattcaattcttctgctacatcgacttctcaaatgggtgagccatcagaaccgacttggaggaatgaattagcctcgacttctaaccttcagagtacacccggtagctctagtgaaagaccgagaattagacaccaacacagccaatcgatggatggttcaacaactatcaagcctgagatgcttatgtcagggaatgaagatgtgtctggagttgactctaagaaagccatctctgctgctaaactttctgagcttgctctcattgatccaaaacgcgccaagaggatatgggcaaacaggcagtctgctgcgaggtcaaaagaaaggaagatgagatacattgcagagctcgagagaaaagtacagactttacaaacagaggccacatctctctcagcccagttgactctcttacagagagatacaaatggcctgggtgttgaaaacaatgagcttaaactgcgagtacaaactatggagcaacaggtccacctacaggatgctttaaatgatgcactaaaggaggaagtccagcatcttaaggtattgacggggcaaggtccatcaaatggtacatcaatgaactacggttcttttggatcaaaccagcaattctatcccaataatcagtcgatgcacactatcttagccgcacaacagttacagcagctccagatccagtcacagaaacagcaacaacaacaacagcaacaccagcaacaacaacagcagcagcagcagcaatttcactttcaacagcagcaactgtaccagcttcagcagcagcaacggcttcaacaacaggaacaacaaagcggggcttcagagctaagaagacccatgccttctcctggtcagaaagagagtgtgacatcgcctgatcgtgaaactcccttgacaaaagactgagtctagactgtgctaatgtccaatttagtaagttactcttggaaaatcttctttttcatcgcaggctcatggatttgggatttactgcattatagagttaaaaacaagacagcttagaagttgcggatttagaagttgttagtgaagcttttgttctcgtctgttggtagtttacaatcttctctttgtatgatcctaagctcttaaaaagttcttggatttggtcatttggttagaaatgggtccttagtccaagtctgtagtcgtttaaccatattcatattctttgccttttgttcattttggttacttg

SEQ ID NO: 41604 - protein, 423 aa, Arabidopsis thaliana
  peptide (1)..(423): Ceres Seq. ID no. 12338343
MDKEKSPAPPPSGGLPPPSGRYSAFSPNGSSFAMKAESSFPPLTPSGSNSSDANRFSHDISRMPDNPPKNLGHRRAHSEILTLPDDLSFDSDLGVVGAADGPSFSDDTDEDLLYMYLDMEKFNSSATSTSQMGEPSEPTWRNELASTSNLQSTPGSSSERPRIRHQHSQSMDGSTTIKPEMLMSGNEDVSGVDSKKAISAAKLSELALIDPKRAKRIWANRQSAARSKERKMRYIAELERKVQTLQTEATSLSAQLTLLQRDTNGLGVENNELKLRVQTMEQQVHLQDALNDALKEEVQHLKVLTGQGPSNGTSMNYGSFGSNQQFYPNNQSMHTILAAQQLQQLQIQSQKQQQQQQQHQQQQQQQQQQFHFQQQQLYQLQQQQRLQQQEQQSGASELRRPMPSPGQKESVTSPDRETPLTKD

SEQ ID NO: 41605 - protein, 390 aa, Arabidopsis thaliana
  peptide (1)..(390): Ceres Seq. ID no. 12338344
MKAESSFPPLTPSGSNSSDANRFSHDISRMPDNPPKNLGHRRAHSEILTLPDDLSFDSDLGVVGAADGPSFSDDTDEDLLYMYLDMEKFNSSATSTSQMGEPSEPTWRNELASTSNLQSTPGSSSERPRIRHQHSQSMDGSTTIKPEMLMSGNEDVSGVDSKKAISAAKLSELALIDPKRAKRIWANRQSAARSKERKMRYIAELERKVQTLQTEATSLSAQLTLLQRDTNGLGVENNELKLRVQTMEQQVHLQDALNDALKEEVQHLKVLTGQGPSNGTSMNYGSFGSNQQFYPNNQSMHTILAAQQLQQLQIQSQKQQQQQQQHQQQQQQQQQQFHFQQQQLYQLQQQQRLQQQEQQSGASELRRPMPSPGQKESVTSPDRETPLTKD

SEQ ID NO: 41606 - protein, 361 aa, Arabidopsis thaliana
  peptide (1)..(361): Ceres Seq. ID no. 12338345
MPDNPPKNLGHRRAHSEILTLPDDLSFDSDLGVVGAADGPSFSDDTDEDLLYMYLDMEKFNSSATSTSQMGEPSEPTWRNELASTSNLQSTPGSSSERPRIRHQHSQSMDGSTTIKPEMLMSGNEDVSGVDSKKAISAAKLSELALIDPKRAKRIWANRQSAARSKERKMRYIAELERKVQTLQTEATSLSAQLTLLQRDTNGLGVENNELKLRVQTMEQQVHLQDALNDALKEEVQHLKVLTGQGPSNGTSMNYGSFGSNQQFYPNNQSMHTILAAQQLQQLQIQSQKQQQQQQQHQQQQQQQQQQFHFQQQQLYQLQQQQRLQQQEQQSGASELRRPMPSPGQKESVTSPDRETPLTKD

SEQ ID NO: 41607 - DNA, 1010 bp, Arabidopsis thaliana
  misc_feature (1)..(1010): Ceres Seq. ID no. 13646176
  misc_feature (1)..(1010): Ortholog of  Ceres SEQ ID NO 13593920 as cited in SEQ ID NO 54151
  misc_feature (1)..(1010): Ortholog of  Ceres SEQ ID NO 15225313 as cited in SEQ ID NO 58628
cacaaaattacccactacgttgctcttcaacaaaaagattaaacaaagagagaagaatatggcgagagggaagatccagatcaagaggatagagaaccagacaaacagacaagtgacgtattcaaagagaagaaatggtttattcaagaaagcacatgagctcacggttttgtgtgatgctagggtttcgattatcatgttctctagctccaacaagcttcatgagtatatcagccctaacaccacaacgaaggagatcgtagatctgtaccaaactatttctgatgtcgatgtttgggccactcaatatgagcgaatgcaagaaaccaagaggaaactgttggagacaaatagaaatctccggactcagatcaagcagaggctaggtgagtgtttggacgagcttgacattcaggagctgcgtcgtcttgaggatgaaatggaaaacactttcaaactcgttcgcgagcgcaagttcaaatctcttgggaatcagatcgagaccaccaagaaaaagaacaaaagtcaacaagacatacaaaagaatctcatacatgagctggaactaagagctgaagatcctcactatggactagtagacaatggaggagattacgactcagttcttggataccaaatcgaagggtcacgtgcttacgctcttcgtttccaccagaaccatcaccactattaccccaaccatggccttcatgcaccctctgcctctgacatcattaccttccatcttcttgaataattaaaggctaaaaggtttgctggtgccatcattgtctatctaattatttagtaactacttaaaacataaggcatggtgttgctaaaaccttaaactgtcatgtttcttagttatgtattttaaagcctaaagaaatatggattgtgtgatcagtagtgcttaggcttattgtgtgtggaatgttttcaagacttttatcatgtatcgtattattatattgaccactctacttaattatgctacaaatttactc

SEQ ID NO: 41608 - protein, 251 aa, Arabidopsis thaliana
  peptide (1)..(251): Ceres Seq. ID no. 13646177
TKLPTTLLFNKKIKQREKNMARGKIQIKRIENQTNRQVTYSKRRNGLFKKAHELTVLCDARVSIIMFSSSNKLHEYISPNTTTKEIVDLYQTISDVDVWATQYERMQETKRKLLETNRNLRTQIKQRLGECLDELDIQELRRLEDEMENTFKLVRERKFKSLGNQIETTKKKNKSQQDIQKNLIHELELRAEDPHYGLVDNGGDYDSVLGYQIEGSRAYALRFHQNHHHYYPNHGLHAPSASDIITFHLLE

SEQ ID NO: 41609 - protein, 232 aa, Arabidopsis thaliana
  peptide (1)..(232): Ceres Seq. ID no. 13646178
MARGKIQIKRIENQTNRQVTYSKRRNGLFKKAHELTVLCDARVSIIMFSSSNKLHEYISPNTTTKEIVDLYQTISDVDVWATQYERMQETKRKLLETNRNLRTQIKQRLGECLDELDIQELRRLEDEMENTFKLVRERKFKSLGNQIETTKKKNKSQQDIQKNLIHELELRAEDPHYGLVDNGGDYDSVLGYQIEGSRAYALRFHQNHHHYYPNHGLHAPSASDIITFHLLE

SEQ ID NO: 41610 - protein, 186 aa, Arabidopsis thaliana
  peptide (1)..(186): Ceres Seq. ID no. 13646179
MFSSSNKLHEYISPNTTTKEIVDLYQTISDVDVWATQYERMQETKRKLLETNRNLRTQIKQRLGECLDELDIQELRRLEDEMENTFKLVRERKFKSLGNQIETTKKKNKSQQDIQKNLIHELELRAEDPHYGLVDNGGDYDSVLGYQIEGSRAYALRFHQNHHHYYPNHGLHAPSASDIITFHLLE

SEQ ID NO: 41611 - DNA, 1483 bp, Arabidopsis thaliana; identical to SEQ ID NO: 25149
  misc_feature (1)..(1483): Ceres Seq. ID no. 12329362
  misc_feature (1)..(1483): Ortholog of  Ceres SEQ ID NO 13639243 as cited in SEQ ID NO 56820
  misc_feature (1)..(1483): Ortholog of  Ceres SEQ ID NO 13496409 as cited in SEQ ID NO 65697

SEQ ID NO: 41612 - protein, 357 aa, Arabidopsis thaliana; identical to SEQ ID NO: 25150
  peptide (1)..(357): Ceres Seq. ID no. 12329363

SEQ ID NO: 41613 - protein, 195 aa, Arabidopsis thaliana; identical to SEQ ID NO: 24160
  peptide (1)..(195): Ceres Seq. ID no. 12329364

SEQ ID NO: 41614 - DNA, 1869 bp, Arabidopsis thaliana
  misc_feature (1)..(1869): Ceres Seq. ID no. 12357799
  misc_feature (1)..(1869): Ortholog of  Ceres SEQ ID NO 14302343 as cited in SEQ ID NO 67343
ataacaaatcacatttctctctcttctctgcttgaatccattacagagggattgtggagtggtttggtttgatttgatttcgatctgtgacaatggtggagactagtatcgacatggaggaaggaactctcgagatcggaatggagtatagaactgtctccggagttgctggacctttggtcatccttgacaaagtgaagggtccaaagtaccaggagattgttaatattcgcttaggagatggatcaacgagacgtggtcaggtcttggaggttgatggggagaaagctgttgtccaggtttttgaaggaacatctgggattgacaacaagtttaccaccgtgcaattcacaggagaggtgttactataaaagccttctcctcttttaagcttttggcagattagttaaaattttggttggaagttttctaaaaactaagaggatgcttggttacagttttttcttgttctttttttgtcattatctgttattggtgtgtgttttcaggtactgaaaacgcctgtatcattggacatgcttggccgcatatttaacggctcgggaaagccaattgataatggccctcctattttgccagaggcataccttgatatttctggaagttcaatcaaccccagtgaaagaacctaccctgaagagatgatacaaacggggatttctaccattgatgtcatgaactccattgctcgtggacagaagattcctcttttctctgctgctggtctacctcataatgagattgctgctcaaatttgtcgtcaggctggacttgtgaagcggttggaaaagactgagaacttaattcaggaggatcatggagaggacaattttgcaattgtttttgcagctatgggtgtaaacatggagacagctcagtttttcaagcgtgattttgaagaaaatggatcgatggaaagggttacccttttcctgaacttggccaatgatccaaccattgagagaattatcactcctcgaattgccctaacaaccgctgaatatttggcttatgaatgtggaaagcatgtgcttgttatattgacagacatgagttcttatgcagatgctcttcgtgaggtttctgctgctcgagaagaagttcctggaagacgtggatatccggggtatatgtatacagatcttgcaactatttatgaacgtgcgggacgtattgaaggaagaaagggttccattacccaaattcctatcctgactatgcccaatgacgatatcactcaccctactccggatcttactggttacattactgagggtcagatatatattgataggcaacttcacaacagacagatatacccacccattaacgtgcttccatcactttctcggctgatgaagagtgctattggtgaaggaatgactcgcaaagaccattctgatgtgtccaaccagctatacgcaaattatgcaatcggaaaagatgttcaagccatgaaagctgttgttggagaagaagctctgtcttccgaggatctgctgtatttagagtttctggataaatttgaaaggaagtttgtgatgcaaggcgcatacgatacaaggaatatcttccagtcgcttgacttggcatggacactgctccgtatcttcccacgtgagcttcttcaccgtattcctgccaaaacacttgatcaattctacagccgcgactccacaagctaaaccttttaaaacaagctctatgttgctccattcttatcttatttggaacttaaatcataccgagagaagacaaacaggattggttgcgtgaaaacaaaactcagagaattgtgaagttgggaattttcttttgtttttccatttgtataataaaggtttgtgt

SEQ ID NO: 41615 - protein, 389 aa, Arabidopsis thaliana
  peptide (1)..(389): Ceres Seq. ID no. 12357800
MLGRIFNGSGKPIDNGPPILPEAYLDISGSSINPSERTYPEEMIQTGISTIDVMNSIARGQKIPLFSAAGLPHNEIAAQICRQAGLVKRLEKTENLIQEDHGEDNFAIVFAAMGVNMETAQFFKRDFEENGSMERVTLFLNLANDPTIERIITPRIALTTAEYLAYECGKHVLVILTDMSSYADALREVSAAREEVPGRRGYPGYMYTDLATIYERAGRIEGRKGSITQIPILTMPNDDITHPTPDLTGYITEGQIYIDRQLHNRQIYPPINVLPSLSRLMKSAIGEGMTRKDHSDVSNQLYANYAIGKDVQAMKAVVGEEALSSEDLLYLEFLDKFERKFVMQGAYDTRNIFQSLDLAWTLLRIFPRELLHRIPAKTLDQFYSRDSTS

SEQ ID NO: 41616 - protein, 347 aa, Arabidopsis thaliana
  peptide (1)..(347): Ceres Seq. ID no. 12357801
MIQTGISTIDVMNSIARGQKIPLFSAAGLPHNEIAAQICRQAGLVKRLEKTENLIQEDHGEDNFAIVFAAMGVNMETAQFFKRDFEENGSMERVTLFLNLANDPTIERIITPRIALTTAEYLAYECGKHVLVILTDMSSYADALREVSAAREEVPGRRGYPGYMYTDLATIYERAGRIEGRKGSITQIPILTMPNDDITHPTPDLTGYITEGQIYIDRQLHNRQIYPPINVLPSLSRLMKSAIGEGMTRKDHSDVSNQLYANYAIGKDVQAMKAVVGEEALSSEDLLYLEFLDKFERKFVMQGAYDTRNIFQSLDLAWTLLRIFPRELLHRIPAKTLDQFYSRDSTS

SEQ ID NO: 41617 - protein, 336 aa, Arabidopsis thaliana
  peptide (1)..(336): Ceres Seq. ID no. 12357802
MNSIARGQKIPLFSAAGLPHNEIAAQICRQAGLVKRLEKTENLIQEDHGEDNFAIVFAAMGVNMETAQFFKRDFEENGSMERVTLFLNLANDPTIERIITPRIALTTAEYLAYECGKHVLVILTDMSSYADALREVSAAREEVPGRRGYPGYMYTDLATIYERAGRIEGRKGSITQIPILTMPNDDITHPTPDLTGYITEGQIYIDRQLHNRQIYPPINVLPSLSRLMKSAIGEGMTRKDHSDVSNQLYANYAIGKDVQAMKAVVGEEALSSEDLLYLEFLDKFERKFVMQGAYDTRNIFQSLDLAWTLLRIFPRELLHRIPAKTLDQFYSRDSTS

SEQ ID NO: 41618 - DNA, 2000 bp, Arabidopsis thaliana
  misc_feature (1)..(2000): Ceres Seq. ID no. 13493828
  misc_feature (1)..(2000): Ortholog of  Ceres SEQ ID NO 13597732 as cited in SEQ ID NO 64810
aacgtttatggatttgagtcgttctcaaacaaattttcaattagggtttggttgttcacacgcatcaatgactccaacaccaacaccaagagctccaatcgcagacgattcgattaatctacaagtcgatcaaagtttccgatcattaccaacaactttctctccgattccgttacaattactcgaacaaaaagccgagaagaccaccaccgttgatgagccaaagaaagatggaggaggaggaggagatcaaaaggaagacgagcatttcagaatcttaggtcaccatatgtgtctcaaaaggcaaagagattgtccacttttgttaacgcaatcaaagcatccgaagagaagttccatcggtgattcagatctggaatcgcgacgtgctgctgtacgagcttggggtgatcaaccgattcatttggcggatcctgatattcatgagcttatggagaaagagaagcaacgacaagtaagaggaattgaattgattgcttctgagaatttcgtgtgtagagctgtaatggaagctttaggtagtcatttaacgaataaatactctgaaggtatgcctggagctagatactatactgggaatcaatatattgatcagattgagaatctctgtattgagcgtgctcttactgcgtttggtcttgaatctgataaatggggtgttaatgttcagccttattcttgtacttctgctaacttcgcggtgtataccggacttttattgcccggtgaacggattatggggcttgattcgccttctggtggtcatatgagtcatggttattgtactcctggtgggaagaagatttcggctgcttccatcttctttgagagttttccttataaagtgaatcctcaaactgggtatattgattatgataagcttgaagataaggcgcttgattaccgtcctaagattcttatttgtggtgggagttcttatcctagggattgggattttgcaagggttagacagattgcagataagtgtggagctgttttgatgtgtgatatggctcatattagcggtcttgttgcaactaaggaatgttcaaatccatttgatcactgtgacatagtaacctccactactcacaaaggtctacgtggtcctagaggaggtatcatcttctacaggagaggcccaaagataagaaagcagggccatcactctagccattgtgacacttccacgcattacgatctagaggaaaagatcaactttgctgtttttccatctctacaaggaggtccacacaacaaccatatcgctgctcttgccattgcattgaaacaagtggccactccagagtacaaagcttacatacaacagatgaagaaaaacgcccaagctttagcagcagctcttcttagaagaaaatgcagactggttactggtggtacagacaaccatttgttgctgtgggatctcactcctatgggcttaacagggaaagtctacgagaaagtgtgtgagatgtgccatatcactttaaacaagacggctatattcggggacaatggtacaatatctcctggaggtgtaagaatagggacacctgcaatgacaacccgaggctgtatagagtctgatttcgagacaatggcggattttctgataaaggcggctcagataacaagtgcgttgcagagagagcatggaaagtcacacaaggagtttgtgaaaagtttatgcaccaacaaagacatagctgagcttagaaaccgagtcgaagcatttgctttgcagtatgagatgcctgcttctcttattcgaattgaatgaaagaaaactccacacaacagctttatttacagttgaattttatcttatctctgggtcaatttttttttttttttggagttctatcttgtaaattagagtaaatatatatttatattgggattgatttgcattatttttttccattgtaattctgtaaacattttgataaatgggaatgattactacaaatttactt

SEQ ID NO: 41619 - protein, 600 aa, Arabidopsis thaliana
  peptide (1)..(600): Ceres Seq. ID no. 13493829
TFMDLSRSQTNFQLGFGCSHASMTPTPTPRAPIADDSINLQVDQSFRSLPTTFSPIPLQLLEQKAEKTTTVDEPKKDGGGGGDQKEDEHFRILGHHMCLKRQRDCPLLLTQSKHPKRSSIGDSDLESRRAAVRAWGDQPIHLADPDIHELMEKEKQRQVRGIELIASENFVCRAVMEALGSHLTNKYSEGMPGARYYTGNQYIDQIENLCIERALTAFGLESDKWGVNVQPYSCTSANFAVYTGLLLPGERIMGLDSPSGGHMSHGYCTPGGKKISAASIFFESFPYKVNPQTGYIDYDKLEDKALDYRPKILICGGSSYPRDWDFARVRQIADKCGAVLMCDMAHISGLVATKECSNPFDHCDIVTSTTHKGLRGPRGGIIFYRRGPKIRKQGHHSSHCDTSTHYDLEEKINFAVFPSLQGGPHNNHIAALAIALKQVATPEYKAYIQQMKKNAQALAAALLRRKCRLVTGGTDNHLLLWDLTPMGLTGKVYEKVCEMCHITLNKTAIFGDNGTISPGGVRIGTPAMTTRGCIESDFETMADFLIKAAQITSALQREHGKSHKEFVKSLCTNKDIAELRNRVEAFALQYEMPASLIRIE

SEQ ID NO: 41620 - protein, 598 aa, Arabidopsis thaliana
  peptide (1)..(598): Ceres Seq. ID no. 13493830
MDLSRSQTNFQLGFGCSHASMTPTPTPRAPIADDSINLQVDQSFRSLPTTFSPIPLQLLEQKAEKTTTVDEPKKDGGGGGDQKEDEHFRILGHHMCLKRQRDCPLLLTQSKHPKRSSIGDSDLESRRAAVRAWGDQPIHLADPDIHELMEKEKQRQVRGIELIASENFVCRAVMEALGSHLTNKYSEGMPGARYYTGNQYIDQIENLCIERALTAFGLESDKWGVNVQPYSCTSANFAVYTGLLLPGERIMGLDSPSGGHMSHGYCTPGGKKISAASIFFESFPYKVNPQTGYIDYDKLEDKALDYRPKILICGGSSYPRDWDFARVRQIADKCGAVLMCDMAHISGLVATKECSNPFDHCDIVTSTTHKGLRGPRGGIIFYRRGPKIRKQGHHSSHCDTSTHYDLEEKINFAVFPSLQGGPHNNHIAALAIALKQVATPEYKAYIQQMKKNAQALAAALLRRKCRLVTGGTDNHLLLWDLTPMGLTGKVYEKVCEMCHITLNKTAIFGDNGTISPGGVRIGTPAMTTRGCIESDFETMADFLIKAAQITSALQREHGKSHKEFVKSLCTNKDIAELRNRVEAFALQYEMPASLIRIE

SEQ ID NO: 41621 - protein, 578 aa, Arabidopsis thaliana
  peptide (1)..(578): Ceres Seq. ID no. 13493831
MTPTPTPRAPIADDSINLQVDQSFRSLPTTFSPIPLQLLEQKAEKTTTVDEPKKDGGGGGDQKEDEHFRILGHHMCLKRQRDCPLLLTQSKHPKRSSIGDSDLESRRAAVRAWGDQPIHLADPDIHELMEKEKQRQVRGIELIASENFVCRAVMEALGSHLTNKYSEGMPGARYYTGNQYIDQIENLCIERALTAFGLESDKWGVNVQPYSCTSANFAVYTGLLLPGERIMGLDSPSGGHMSHGYCTPGGKKISAASIFFESFPYKVNPQTGYIDYDKLEDKALDYRPKILICGGSSYPRDWDFARVRQIADKCGAVLMCDMAHISGLVATKECSNPFDHCDIVTSTTHKGLRGPRGGIIFYRRGPKIRKQGHHSSHCDTSTHYDLEEKINFAVFPSLQGGPHNNHIAALAIALKQVATPEYKAYIQQMKKNAQALAAALLRRKCRLVTGGTDNHLLLWDLTPMGLTGKVYEKVCEMCHITLNKTAIFGDNGTISPGGVRIGTPAMTTRGCIESDFETMADFLIKAAQITSALQREHGKSHKEFVKSLCTNKDIAELRNRVEAFALQYEMPASLIRIE

SEQ ID NO: 41622 - DNA, 1491 bp, Arabidopsis thaliana
  misc_feature (1)..(1491): Ceres Seq. ID no. 12681276
  misc_feature (1)..(1491): Ortholog of  Ceres SEQ ID NO 13596013 as cited in SEQ ID NO 61990
atctccagtcgcaaaaccaccgccgtatatccacggccgtcttatcaccggcaacaaccgtaggtttttgttttccgtcgcgatggaggtggataagaaggacgagagagaggctgaatcttcggagcaagtggtgaatccatgggaagtgtccgccaaagacggcgggaagatcgattacgacaagcttattgacaaatttggatgtcaaaggcttgacgagtcactgattgatcgtgttcagagactgacttctcgtcaaccacacgtgttcctccgccgtagtgtcttcttcgcccaccgggatttcaatgagattttggacgcttatgagagaggagacaagttctatctctacactggaagaggaccttcatcagaagcattgcatttggggcatttgattcctttcatgtttaccaaatacttgcaagaagctttcaaggttccccttgttatacagctcacggatgatgaaaaaagtatatggaagaacttatcggtggaggaaagtcaaagacttgccagagaaaatgcgaaagatattattgcttgtggattcgatgtaacaaagaccttcattttctcggacttcgactatgttggcggtgctttctataaaaatatggtgaaggttggcaagtgcgttacacttaataaggctatgggaatctttggcttttccggtgaagatcctatcgcgaaactcagtttccctcctgtgcaggcagttccatcttttcctagctcattcccacatttgttccctggcaaggacaatctccgctgcttgattccttgtgctattgaccaggatccttattttagaatgactcgtgatgtcgcaccccggttaggctatagcaagcccgccctgattgagtcaacattttttcctgcgttgcagggagagaatggaaaaatgtctgctagtgatccaaattctgctatctatgtgactgattccgcaaaggacattaaaaacaagataaacagatatgcgtttagtggtgggcaagactccattgagaagcaccgagaacttggagcaaatctcgaggttgacatacccgtcaagtatctgagtttcttcctcgaagacgattctgaactagaacacattaaaaaggaatatggagaaggaagaatgctaacaggagaagtaaagaagagacttacggaagtgttgacagaaattgtggagagacaccgcagggctcgagctgctgttactgatgagatggttgatgcgttcatggcggtgagacctctcccaagcatgttcgaatagaaaaagtcagaaaccctttttggctcctcagcaacttcacatcactccgtttgatttggattcagacatctttgggtgtctattgatagatttgatccttgaaattgaaccatacttgttagttacaattttcatatttacatttatttatgaatcacattctaaaatgatttgcattgttaattgaataaagtgaaact

SEQ ID NO: 41623 - protein, 429 aa, Arabidopsis thaliana
  peptide (1)..(429): Ceres Seq. ID no. 12681277
SPVAKPPPYIHGRLITGNNRRFLFSVAMEVDKKDEREAESSEQVVNPWEVSAKDGGKIDYDKLIDKFGCQRLDESLIDRVQRLTSRQPHVFLRRSVFFAHRDFNEILDAYERGDKFYLYTGRGPSSEALHLGHLIPFMFTKYLQEAFKVPLVIQLTDDEKSIWKNLSVEESQRLARENAKDIIACGFDVTKTFIFSDFDYVGGAFYKNMVKVGKCVTLNKAMGIFGFSGEDPIAKLSFPPVQAVPSFPSSFPHLFPGKDNLRCLIPCAIDQDPYFRMTRDVAPRLGYSKPALIESTFFPALQGENGKMSASDPNSAIYVTDSAKDIKNKINRYAFSGGQDSIEKHRELGANLEVDIPVKYLSFFLEDDSELEHIKKEYGEGRMLTGEVKKRLTEVLTEIVERHRRARAAVTDEMVDAFMAVRPLPSMFE

SEQ ID NO: 41624 - protein, 402 aa, Arabidopsis thaliana
  peptide (1)..(402): Ceres Seq. ID no. 12681278
MEVDKKDEREAESSEQVVNPWEVSAKDGGKIDYDKLIDKFGCQRLDESLIDRVQRLTSRQPHVFLRRSVFFAHRDFNEILDAYERGDKFYLYTGRGPSSEALHLGHLIPFMFTKYLQEAFKVPLVIQLTDDEKSIWKNLSVEESQRLARENAKDIIACGFDVTKTFIFSDFDYVGGAFYKNMVKVGKCVTLNKAMGIFGFSGEDPIAKLSFPPVQAVPSFPSSFPHLFPGKDNLRCLIPCAIDQDPYFRMTRDVAPRLGYSKPALIESTFFPALQGENGKMSASDPNSAIYVTDSAKDIKNKINRYAFSGGQDSIEKHRELGANLEVDIPVKYLSFFLEDDSELEHIKKEYGEGRMLTGEVKKRLTEVLTEIVERHRRARAAVTDEMVDAFMAVRPLPSMFE

SEQ ID NO: 41625 - protein, 292 aa, Arabidopsis thaliana
  peptide (1)..(292): Ceres Seq. ID no. 12681279
MFTKYLQEAFKVPLVIQLTDDEKSIWKNLSVEESQRLARENAKDIIACGFDVTKTFIFSDFDYVGGAFYKNMVKVGKCVTLNKAMGIFGFSGEDPIAKLSFPPVQAVPSFPSSFPHLFPGKDNLRCLIPCAIDQDPYFRMTRDVAPRLGYSKPALIESTFFPALQGENGKMSASDPNSAIYVTDSAKDIKNKINRYAFSGGQDSIEKHRELGANLEVDIPVKYLSFFLEDDSELEHIKKEYGEGRMLTGEVKKRLTEVLTEIVERHRRARAAVTDEMVDAFMAVRPLPSMFE

SEQ ID NO: 41626 - DNA, 1781 bp, Arabidopsis thaliana
  misc_feature (1)..(1781): Ceres Seq. ID no. 12329754
  misc_feature (1)..(1781): Ortholog of  Ceres SEQ ID NO 13654928 as cited in SEQ ID NO 62546
actcttaatctttaaaaaaaagaaaaaaaaaaacagaacaatttcttcttcctctgggatccataagttttgagtgaatagtggaagagagaaagcttcttagagatctgtttttggttactttcattaaaagtcatatggttattgatcagaaagcaaatctctcctttatgtcttcaaaaaaaggatgaagagtatagagatttgagcatattacagtacctagagtgaagagtatagagatttgagcatgaataagcagaggattttataataaggaacacatggaaatttctctcagacacttcaattttggtggtcagtgtctgatggagtgtaatgcaaagccaccgtttcaatgggaattggaaaacttgatatcttttggcacttctacagctgaagttcctagaaagctaaagccaatggagtgggaaattgatggatttgattgcacctctctgtattcttcaagctttgatgcagtagcttatggtggtagttcaggttctgatatagctcatgctttctctaaaagctcaaagtcaacttccattagctcttcatcagctgaagttagaacacacaattttacatcagaaactggtgaaagtcttcctggagaatttgcaaaggggattgatacttctccaactcttgaactttcttttggctctggtgatccggttctcggtttaaagcttggtaaacgaacgtactttgaagacttttgggaagtggagaatgctaaaggtttgggacttcccgtgagccttgcttcgtcttctgtttctccggtgaagaaatcgaaatccattcctcagaggttacaaactcctcactgtcaagttgaaggctgtaatcttgatctttcatcagctaaagactatcatcggaaacataggatttgtgaaaaccattcaaagtttcctaaagtcgttgtgagtggcgtagagcgtcggttctgccaacaatgtagcaggttccactgtctctccgagtttgatgagaagaaacgtagctgtcgccgacgtctctcagatcacaatgcaagacgtcgcaagccaaatcctggaaggacatatgatgggaaaccacaggtggattttgtatggaacagatttgcacttatccatccaagaagtgaggaaaagtttctatggcccagttcaaagcctgtaccatcaagagtcttaatgccgcagcctgcaaagaccgagatttccaataagctgttcaccgagcacagtagatttggattgttggaccccaaaacaaaatccgcaagagcggagttattcagtaaagaaaaggtcacaatctcttcacacatgggtgcttctcaagatcttgatggtgctctctctcttctgtcaaattcaacaacatgggtttcttcctctgaccaaccaagacgttttacccttgatcaccatccctcaagcaacctccaacccgtagctaaccggtctgcggctcaactcagttcagtgtccggctattggcagccggacccacccgcagttgaaggcccgaccgctctgcatagaaatggggcaggccagtttaatgaaaactacttcagcttgaaccagttttataactgaaagctgtatgcctttaaatcctatttaggatcaagcaagctagtgataagttaagataggagctgtgaaacttgcaagacaccaaatcctctcttatttctttgtccaaatattttcatgggttagagagctttgacaattgtctttaatatcaactttatcgtgttatacatt

SEQ ID NO: 41627 - protein, 440 aa, Arabidopsis thaliana
  peptide (1)..(440): Ceres Seq. ID no. 12329755
MEISLRHFNFGGQCLMECNAKPPFQWELENLISFGTSTAEVPRKLKPMEWEIDGFDCTSLYSSSFDAVAYGGSSGSDIAHAFSKSSKSTSISSSSAEVRTHNFTSETGESLPGEFAKGIDTSPTLELSFGSGDPVLGLKLGKRTYFEDFWEVENAKGLGLPVSLASSSVSPVKKSKSIPQRLQTPHCQVEGCNLDLSSAKDYHRKHRICENHSKFPKVVVSGVERRFCQQCSRFHCLSEFDEKKRSCRRRLSDHNARRRKPNPGRTYDGKPQVDFVWNRFALIHPRSEEKFLWPSSKPVPSRVLMPQPAKTEISNKLFTEHSRFGLLDPKTKSARAELFSKEKVTISSHMGASQDLDGALSLLSNSTTWVSSSDQPRRFTLDHHPSSNLQPVANRSAAQLSSVSGYWQPDPPAVEGPTALHRNGAGQFNENYFSLNQFYN

SEQ ID NO: 41628 - protein, 425 aa, Arabidopsis thaliana; identical to SEQ ID NO: 37436
  peptide (1)..(425): Ceres Seq. ID no. 12329756

SEQ ID NO: 41629 - protein, 393 aa, Arabidopsis thaliana; identical to SEQ ID NO: 37437
  peptide (1)..(393): Ceres Seq. ID no. 12329757

SEQ ID NO: 41630 - DNA, 1499 bp, Arabidopsis thaliana
  misc_feature (1)..(1499): Ceres Seq. ID no. 12329744
  misc_feature (1)..(1499): Ortholog of  Ceres SEQ ID NO 15174737 as cited in SEQ ID NO 52912
  misc_feature (1)..(1499): Ortholog of  Ceres SEQ ID NO 13624551 as cited in SEQ ID NO 0
ctctcgatttttcttgggaagaagaaactcatgggaattttcaggaattttgtcagccattttctctcatttgagaaaccactaaattagagcttcaaaaaacttctaaaggaatgaatgtttctttgatttccaagagagttttggttcgttgactgagtttagttttggagatctagcaactgaaagctggttaaatacttaaatggacgtagcaggctactgtttgtgaatcctctcctatggcgatgttgtttgtgtggaaaaagtatggcctgtttcagatgtttctctgttgattcaagttttaaacgagagccaagagtcagaaatcaagtcacaggctcgtgaaagctgctttgagtcaaacccatgtcaggtgctcctagagttcagtccatgaatgtggctgaagcagagaccaggtcaactctggggtctactgctaaaaaggctagtcctttcatcacacacaaagctgtatcaaagtcactgcgaaagcttgaaagatcctcatctgggcgtactggatcagatgagaaaacatcttatgctacaccaacagaaactgtgtcttcttcttctcagaagcatactcttaatgcggcttctatactacgacggcatgagcagaacctgaattctaatctgtcacttaatgcatcgttttcatctgatgcctccgtggactcgttccacagccgagcatcaactggtcgcttgattaggtcgtacagtgttggaagtagaagtaagtcttacccttccaagccaagaagtgttgtctctgaaggtgctttggattcaccacctaatggttcagagactaagaagaggtgtacttgggtgacaccaaactccgatccatgttatatagttttccatgatgaagaatggggtgtgccagttcacgatgacaagaggttgtttgaactccttgtgctttcgggtgctttggccgaacacacatggcctacgatactgagcaagagacaggctttcagggaagtttttgctgattttgaccccaatgccattgtgaaaatcaatgagaagaagataattggtccaggaagcccggcaagcactttattgtctgatcttaagctaagggcagtcattgagaatgcacgccagatacttaaggtgatagaagaatacggatcatttgacaagtatatatggagttttgtgaagaataaggcgattgtgagcaagttcaggtaccagcgacaagtacctgcaaaaactccaaaagcagaagtgataagtaaagatctagtgagaagagggttccgcagcgtcggaccaacggtggtttactccttcatgcaggcagcagggataacaaacgatcatcttaccagttgtttcaggttccaccattgtatattcgaacatgaaaggtatgtctgaaaagaaggacttcctaaaacttgttaaagtccttttatgttttgtaaagcctccaatttgagtctattattagtattcaaaac

SEQ ID NO: 41631 - protein, 347 aa, Arabidopsis thaliana
  peptide (1)..(347): Ceres Seq. ID no. 12329745
MSGAPRVQSMNVAEAETRSTLGSTAKKASPFITHKAVSKSLRKLERSSSGRTGSDEKTSYATPTETVSSSSQKHTLNAASILRRHEQNLNSNLSLNASFSSDASVDSFHSRASTGRLIRSYSVGSRSKSYPSKPRSVVSEGALDSPPNGSETKKRCTWVTPNSDPCYIVFHDEEWGVPVHDDKRLFELLVLSGALAEHTWPTILSKRQAFREVFADFDPNAIVKINEKKIIGPGSPASTLLSDLKLRAVIENARQILKVIEEYGSFDKYIWSFVKNKAIVSKFRYQRQVPAKTPKAEVISKDLVRRGFRSVGPTVVYSFMQAAGITNDHLTSCFRFHHCIFEHERYV

SEQ ID NO: 41632 - protein, 338 aa, Arabidopsis thaliana
  peptide (1)..(338): Ceres Seq. ID no. 12329746
MNVAEAETRSTLGSTAKKASPFITHKAVSKSLRKLERSSSGRTGSDEKTSYATPTETVSSSSQKHTLNAASILRRHEQNLNSNLSLNASFSSDASVDSFHSRASTGRLIRSYSVGSRSKSYPSKPRSVVSEGALDSPPNGSETKKRCTWVTPNSDPCYIVFHDEEWGVPVHDDKRLFELLVLSGALAEHTWPTILSKRQAFREVFADFDPNAIVKINEKKIIGPGSPASTLLSDLKLRAVIENARQILKVIEEYGSFDKYIWSFVKNKAIVSKFRYQRQVPAKTPKAEVISKDLVRRGFRSVGPTVVYSFMQAAGITNDHLTSCFRFHHCIFEHERYV

SEQ ID NO: 41633 - DNA, 1403 bp, Arabidopsis thaliana
  misc_feature (1)..(1403): Ceres Seq. ID no. 12395432
  misc_feature (1)..(1403): Ortholog of  Ceres SEQ ID NO 14307678 as cited in SEQ ID NO 59456
  misc_feature (1)..(1403): Ortholog of  Ceres SEQ ID NO 13586716 as cited in SEQ ID NO 0
gaatactttttcgaaatatcaaaagaaggaacaaaaatgcaagccatcggtagcagccatggcaggaggctctgcttcaaccactatctctccgattccttctccaaattcctctctccttcttcttctccttcccttctccctcagagatgccattcgttctgtatccccaagcttggaagtagtagtaccaatgagaatggcagaggaagaagtgtaacagtgagagcttcaggagatgaagattctaatgagaactttgctcctcttgctcctgttgagcttgaatctcctgtaggacagcttttggagcagattcttagaactcatcctcatcttttacccgttactgtcgatgagcagctcgagaaattcgccgcggaaagcgagtctcgtaaagctgattcgtcttccacacaagacattctccaaaagaggatatctgaagttagagataaggaaagacgtaaaactttagcagagatcatttactgtttagtggtacacagatttgtggaaaaaggaatctctatgattcctcggattaaaccaacttcagacccagcaggacggatagacttatggccgaatcaagaagagaagctcgaagtcattcactctgcggatgcgttcgagatgatacagagtcacttgtcttcagttcttggagacggaccagcagttggtccgttaagctctatagttcagataggcaaaatcaagctaggaaaactctatgctgcttctgctatgtatggatattttctcagaagagtagaccaaagataccaacttgagagaaccatgaacacacttccgaaacgccctgagaaaaccagagaacggttcgaagaaccttcgcctccttacccgttatgggacccggattccttgatcaggattcaaccagaggaatatgatcccgatgaatacgcgatacaaagaaatgaagatgagtcatcgtcttatggattgagatcatatgttacgtatttggactcggatacgcttcagagatatgccacgatacgttctaaagaagccatgactctgattgagaagcagactcaggcgctctttggacgaccggatataaggatactcgaggatggaaagctcgatacttctaacgacgaggttctgtctctgagtgtctctggacttgcgatgttggttttggaagctgtggcttttgggtctttcttatgggattcagagagttacgttgaatccaaataccatttcctcaaggcttgagtttagtcctccttgacatttgtacctttttgagagtagtgaatgtaaatgttaaatctctcatgtgaaattggtagcaactcctattcgtaaaatgtaataaacttcacttcaaaactttagacttaaatcaagcatattagctc

SEQ ID NO: 41634 - protein, 418 aa, Arabidopsis thaliana
  peptide (1)..(418): Ceres Seq. ID no. 12395433
EYFFEISKEGTKMQAIGSSHGRRLCFNHYLSDSFSKFLSPSSSPSLLPQRCHSFCIPKLGSSSTNENGRGRSVTVRASGDEDSNENFAPLAPVELESPVGQLLEQILRTHPHLLPVTVDEQLEKFAAESESRKADSSSTQDILQKRISEVRDKERRKTLAEIIYCLVVHRFVEKGISMIPRIKPTSDPAGRIDLWPNQEEKLEVIHSADAFEMIQSHLSSVLGDGPAVGPLSSIVQIGKIKLGKLYAASAMYGYFLRRVDQRYQLERTMNTLPKRPEKTRERFEEPSPPYPLWDPDSLIRIQPEEYDPDEYAIQRNEDESSSYGLRSYVTYLDSDTLQRYATIRSKEAMTLIEKQTQALFGRPDIRILEDGKLDTSNDEVLSLSVSGLAMLVLEAVAFGSFLWDSESYVESKYHFLKA

SEQ ID NO: 41635 - protein, 406 aa, Arabidopsis thaliana; identical to SEQ ID NO: 24938
  peptide (1)..(406): Ceres Seq. ID no. 12395434

SEQ ID NO: 41636 - protein, 241 aa, Arabidopsis thaliana; identical to SEQ ID NO: 24939
  peptide (1)..(241): Ceres Seq. ID no. 12395435

SEQ ID NO: 41637 - DNA, 1110 bp, Arabidopsis thaliana
  misc_feature (1)..(1110): Ceres Seq. ID no. 12328689
  misc_feature (1)..(1110): Ortholog of  Ceres SEQ ID NO 15169419 as cited in SEQ ID NO 58491
attcaaacgtacctttgattgctcttgttctaatttggtaagtatcatttgtggaccaaaatgagtgtatatcctggatatggtggctggatcaatcagaacattcaacagtctcctaaggccgagtccaagagatctgagaatgttaaatccaattcaatgtctgagaaagatactaatctaaaaccatggtatgatgaacctggtaagaccgagtccatggaacctgggcatcctagatctaaggccctatatgtggtagatcctaaatattatgactttgaagaagtaaagaggcaagtagaactttggatagttggaaaaaataagcttccatggtatgatgctcccgctaaagtgaaggtgaaaacgaaaaagggtctttgccatatgaacatagaatttacattgggatggcctcctcaagcagtctatgaaatgcttactaacccaagaaatttaccattcttcagagaggatgagaccgggcagcttctggtttttcttttcttcatatccttgtatgattcgagttgagtattaattatagcaatacttgagagtgtagtatttttcctattgaaggaaaataaatcaacaaaggttttgaagaaggatggaccgaggcagatcacggatgtagagaaagctctcagatggaagctcctttggtggtctggagttatcctaatacatctcattatcgatgaaaaccatcaaaatctttcggcaaaatataagaaagagaaaatgaagttcatgaaagtgtttgagggtagctggaaagtcgagccactatacgtagatcaggaacgcttttgcaagtctaggtcggtgaatagtcaagaagagaacaaaaaatgtagcggcggacgaggaagaattgcatcgatggtgacaatggagcttatctttcagccttctacccttcttaatctgccaccggtttcttggatcatccgtgggatcaccatcaaaatcaccaaaatgttgctagaagatcttagaaaatatgttatcatgatccacaaaagtgatgctaccacttgattagatttttttgtaagaaaaaataaaatgaatctcattattttgcatatgaatccagat

SEQ ID NO: 41638 - protein, 158 aa, Arabidopsis thaliana
  peptide (1)..(158): Ceres Seq. ID no. 12328690
MSVYPGYGGWINQNIQQSPKAESKRSENVKSNSMSEKDTNLKPWYDEPGKTESMEPGHPRSKALYVVDPKYYDFEEVKRQVELWIVGKNKLPWYDAPAKVKVKTKKGLCHMNIEFTLGWPPQAVYEMLTNPRNLPFFREDETGQLLVFLFFISLYDSS

SEQ ID NO: 41639 - protein, 125 aa, Arabidopsis thaliana
  peptide (1)..(125): Ceres Seq. ID no. 12328691
MSEKDTNLKPWYDEPGKTESMEPGHPRSKALYVVDPKYYDFEEVKRQVELWIVGKNKLPWYDAPAKVKVKTKKGLCHMNIEFTLGWPPQAVYEMLTNPRNLPFFREDETGQLLVFLFFISLYDSS

SEQ ID NO: 41640 - protein, 105 aa, Arabidopsis thaliana
  peptide (1)..(105): Ceres Seq. ID no. 12328692
MEPGHPRSKALYVVDPKYYDFEEVKRQVELWIVGKNKLPWYDAPAKVKVKTKKGLCHMNIEFTLGWPPQAVYEMLTNPRNLPFFREDETGQLLVFLFFISLYDSS

SEQ ID NO: 41641 - DNA, 2369 bp, Arabidopsis thaliana; identical to SEQ ID NO: 30438
  misc_feature (1)..(2369): Ceres Seq. ID no. 12327544
  misc_feature (1)..(2369): Ortholog of  Ceres SEQ ID NO 14315309 as cited in SEQ ID NO 53998
  misc_feature (1)..(2369): Ortholog of  Ceres SEQ ID NO 13638213 as cited in SEQ ID NO 57275

SEQ ID NO: 41642 - protein, 623 aa, Arabidopsis thaliana; identical to SEQ ID NO: 30439
  peptide (1)..(623): Ceres Seq. ID no. 12327545

SEQ ID NO: 41643 - protein, 587 aa, Arabidopsis thaliana; identical to SEQ ID NO: 30440
  peptide (1)..(587): Ceres Seq. ID no. 12327546

SEQ ID NO: 41644 - protein, 582 aa, Arabidopsis thaliana; identical to SEQ ID NO: 30441
  peptide (1)..(582): Ceres Seq. ID no. 12327547

SEQ ID NO: 41645 - DNA, 1124 bp, Arabidopsis thaliana
  misc_feature (1)..(1124): Ceres Seq. ID no. 12329268
  misc_feature (1)..(1124): Ortholog of  Ceres SEQ ID NO 15177991 as cited in SEQ ID NO 53915
  misc_feature (1)..(1124): Ortholog of  Ceres SEQ ID NO 15174347 as cited in SEQ ID NO 58577
  misc_feature (1)..(1124): Ortholog of  Ceres SEQ ID NO 13596609 as cited in SEQ ID NO 63070
  misc_feature (1)..(1124): Ortholog of  Ceres SEQ ID NO 12616895 as cited in SEQ ID NO 63909
  misc_feature (1)..(1124): Ortholog of  Ceres SEQ ID NO 13598574 as cited in SEQ ID NO 69083
aatcacacaaatcccttttttggtttctccaaatcttcaaatcttcttcaatcatcaccatggtacgttttagtaacagtcttgtaggaatactcaacttcttcgtcttccttctctcggttcccatactctcaaccggaatctggctcagccttaaagccacgacgcaatgcgcgagattcctcgacaaacccatgatcgctctcggtgttttcctcatgataatcgcaatcgctggagtcgttggatcttgttccagagtgacgtggcttctctggtcctatctctttgtgatgttcttcttaatcctcatcgtcctctgtttcaccatctttgccttcgttgtcactagtaaaggctccggcgaaactatccaaggaaaagcttataaggagtataggctcgaggcttactctgattggttgcagaggcgtgtgaacaacgctaagcattggaacagcattagaagctgtctttatgagagcaagttctgttacaacttggagttagtcactgctaatcacactgtttctgatttctacaaagaagatctcactgcttttgagtctggttgctgcaagccctctaatgactgtgacttcacctacataacttcaacaacttggaataaaacatcaagaacacataaaaactcagattgccaactttgggacaacgaaaagcataagctttgctacaattgcaaagcctgcaaggccggttttctcgacaacctcaaggccgcatggaaaagagttgctattgtcaacatcattttccttgtactcctcgttgtcgtctacgctatgagatgttgcgctttccgaaacaacaaagaagatagatatggccgttccaatggtttcaacaattcttgatttgcgccggttcaagctagactttgatttttcattaatacatcatattacatttatgattagaacaaaacagctttcaaaatttaagaaacagtagaatggaagaatattgaattagtatagttgttgatgtgtttggatttcttctgttgatttgtgtttggacaacagaggattcttcagatctttattacagattgttgtgtttgaagaatcttctatatgaatcttcacttctgacttctg

SEQ ID NO: 41646 - protein, 291 aa, Arabidopsis thaliana
  peptide (1)..(291): Ceres Seq. ID no. 12329269
SHKSLFWFLQIFKSSSIITMVRFSNSLVGILNFFVFLLSVPILSTGIWLSLKATTQCARFLDKPMIALGVFLMIIAIAGVVGSCSRVTWLLWSYLFVMFFLILIVLCFTIFAFVVTSKGSGETIQGKAYKEYRLEAYSDWLQRRVNNAKHWNSIRSCLYESKFCYNLELVTANHTVSDFYKEDLTAFESGCCKPSNDCDFTYITSTTWNKTSRTHKNSDCQLWDNEKHKLCYNCKACKAGFLDNLKAAWKRVAIVNIIFLVLLVVVYAMRCCAFRNNKEDRYGRSNGFNNS

SEQ ID NO: 41647 - protein, 272 aa, Arabidopsis thaliana
  peptide (1)..(272): Ceres Seq. ID no. 12329270
MVRFSNSLVGILNFFVFLLSVPILSTGIWLSLKATTQCARFLDKPMIALGVFLMIIAIAGVVGSCSRVTWLLWSYLFVMFFLILIVLCFTIFAFVVTSKGSGETIQGKAYKEYRLEAYSDWLQRRVNNAKHWNSIRSCLYESKFCYNLELVTANHTVSDFYKEDLTAFESGCCKPSNDCDFTYITSTTWNKTSRTHKNSDCQLWDNEKHKLCYNCKACKAGFLDNLKAAWKRVAIVNIIFLVLLVVVYAMRCCAFRNNKEDRYGRSNGFNNS

SEQ ID NO: 41648 - protein, 227 aa, Arabidopsis thaliana
  peptide (1)..(227): Ceres Seq. ID no. 12329271
MIALGVFLMIIAIAGVVGSCSRVTWLLWSYLFVMFFLILIVLCFTIFAFVVTSKGSGETIQGKAYKEYRLEAYSDWLQRRVNNAKHWNSIRSCLYESKFCYNLELVTANHTVSDFYKEDLTAFESGCCKPSNDCDFTYITSTTWNKTSRTHKNSDCQLWDNEKHKLCYNCKACKAGFLDNLKAAWKRVAIVNIIFLVLLVVVYAMRCCAFRNNKEDRYGRSNGFNNS

SEQ ID NO: 41649 - DNA, 1413 bp, Arabidopsis thaliana
  misc_feature (1)..(1413): Ceres Seq. ID no. 13488037
  misc_feature (1)..(1413): Ortholog of  Ceres SEQ ID NO 12590542 as cited in SEQ ID NO 621
  misc_feature (1)..(1413): Ortholog of  Ceres SEQ ID NO 12421854 as cited in SEQ ID NO 20723
  misc_feature (1)..(1413): Ortholog of  Ceres SEQ ID NO 13597847 as cited in SEQ ID NO 64858
attttcctattcttgaaaacacacaacacatctcatttctccgctgtttcgtcggcaaattttcccatttttgattccgaagataatagatattatcaacagaggataaggataaaacccagaacaatcattataatttagtggtgaagttgaccaaatttataaactgatccaattttaaaatctaagagatatggagaacatggacgatttctcaccggagaatgttttagcaccaccaccaccacctcctccaatgaagaagtcaacggatctgtttatgcaaagaagcaatagctttgtttctaaagctacgagagattcatgggatcgtatgttcgacgaagctcatggagctgatgttttgattcatactgatgataatggtttgatttacgcacattctaatgtcatcggaatggcttcagatgtaatcagaggaatgatgaagcaacataagagaaaatctcatcgtaaatcgatttcaatcctcggtgttcctcaccacgctcttcgagttttcattcgattcttatactcttcttgctatgagaaacaagatatggaggattttgcaatacatctacttgtgttatcacatgtctacgttgtaccgcatttgaagcgagtctgcgaatcagaattcgaaagtagtttgctcaacaaagagaatgtgattgatgtgtttcagctagctcttctatgtgatgctcctcgtctcggtcttctctgtcatagaatgattctaaacaactttgaagaagtttctacttctgaaggatggcaaacaatgaaagagagccatcctagacttcaaaaagagcttttacgctctgtcgcttacgagcttaatagcttgaagcaaagaaacaggaaacagaaggagatacagacttatacacagctctatgaagcaatggaggcttttgttcatatatgtagagatggatgcagagaaataggtccaacaaagaccgaaaccccgcatatgtcatgcggatttcaagcgtgtaatggtttagagcagctattgaaacatttggcgggatgcaaactaagatcaatccctggtggttgtagccgttgcaagagaatgtggcagcttcttgagcttcattcgcgcatttgcgtagactcggaacaatgcaaagtccctctttgcagtagtttgaaagagaggatgaagacacagagcaggaaagatgagaaaagatggaaacttttggtgaggaatgttttgagcaccaagagaattggaggatctccattctttttgcaagcaattgatgttactttatgagttatgacattattatttgattgcttttagatgtagaaattacatatttatacatgtacataggttgcagattctttgtaaagatagattcaaaattttcaaacctaagatcc

SEQ ID NO: 41650 - protein, 368 aa, Arabidopsis thaliana
  peptide (1)..(368): Ceres Seq. ID no. 13488038
MENMDDFSPENVLAPPPPPPPMKKSTDLFMQRSNSFVSKATRDSWDRMFDEAHGADVLIHTDDNGLIYAHSNVIGMASDVIRGMMKQHKRKSHRKSISILGVPHHALRVFIRFLYSSCYEKQDMEDFAIHLLVLSHVYVVPHLKRVCESEFESSLLNKENVIDVFQLALLCDAPRLGLLCHRMILNNFEEVSTSEGWQTMKESHPRLQKELLRSVAYELNSLKQRNRKQKEIQTYTQLYEAMEAFVHICRDGCREIGPTKTETPHMSCGFQACNGLEQLLKHLAGCKLRSIPGGCSRCKRMWQLLELHSRICVDSEQCKVPLCSSLKERMKTQSRKDEKRWKLLVRNVLSTKRIGGSPFFLQAIDVTL

SEQ ID NO: 41651 - protein, 365 aa, Arabidopsis thaliana
  peptide (1)..(365): Ceres Seq. ID no. 13488039
MDDFSPENVLAPPPPPPPMKKSTDLFMQRSNSFVSKATRDSWDRMFDEAHGADVLIHTDDNGLIYAHSNVIGMASDVIRGMMKQHKRKSHRKSISILGVPHHALRVFIRFLYSSCYEKQDMEDFAIHLLVLSHVYVVPHLKRVCESEFESSLLNKENVIDVFQLALLCDAPRLGLLCHRMILNNFEEVSTSEGWQTMKESHPRLQKELLRSVAYELNSLKQRNRKQKEIQTYTQLYEAMEAFVHICRDGCREIGPTKTETPHMSCGFQACNGLEQLLKHLAGCKLRSIPGGCSRCKRMWQLLELHSRICVDSEQCKVPLCSSLKERMKTQSRKDEKRWKLLVRNVLSTKRIGGSPFFLQAIDVTL

SEQ ID NO: 41652 - protein, 347 aa, Arabidopsis thaliana
  peptide (1)..(347): Ceres Seq. ID no. 13488040
MKKSTDLFMQRSNSFVSKATRDSWDRMFDEAHGADVLIHTDDNGLIYAHSNVIGMASDVIRGMMKQHKRKSHRKSISILGVPHHALRVFIRFLYSSCYEKQDMEDFAIHLLVLSHVYVVPHLKRVCESEFESSLLNKENVIDVFQLALLCDAPRLGLLCHRMILNNFEEVSTSEGWQTMKESHPRLQKELLRSVAYELNSLKQRNRKQKEIQTYTQLYEAMEAFVHICRDGCREIGPTKTETPHMSCGFQACNGLEQLLKHLAGCKLRSIPGGCSRCKRMWQLLELHSRICVDSEQCKVPLCSSLKERMKTQSRKDEKRWKLLVRNVLSTKRIGGSPFFLQAIDVTL

SEQ ID NO: 41653 - DNA, 1669 bp, Arabidopsis thaliana
  misc_feature (1)..(1669): Ceres Seq. ID no. 13575575
  misc_feature (1)..(1669): Ortholog of  Ceres SEQ ID NO 14308851 as cited in SEQ ID NO 55618
gagctatatattcgcacatgtactcgtttcgctttccttagtgttagctgctgccgctgttgtttctcctccatttctctatctttctctctcgctgcttctcgaatcttctgtatcatcttcttcttcttcaagtgaaaaatggccgatggtgaggatattcagccacttgtctgtgacaatggaactggaatggtgaaggctggttttgctggtgatgatgccccgagagcagtgttcccaagtattgttggtcgtcctaggcacactggtgtcatggttggtatgggtcagaaagatgcttacgttggtgatgaagctcagtccaagagaggtatcctcactctgaagtatccaatcgaacatggtattgtaagtaactgggatgacatggaaaagatatggcatcacactttctacaacgagcttcgtgttgcccctgaggagcacccagttctactcacagaggcacctcttaaccctaaagctaacagggagaagatgactcagatcatgtttgagacattcaatgtccctgccatgtatgttgccattcaggccgttctttctctctatgccagtggtcgtacaaccggtattgtgctcgattctggtgatggtgtgtctcacactgtgccaatctacgaggggtatgctcttcctcatgctatccttcgtcttgatcttgcgggtcgggatctcacagactcactcatgaagattctcactgagagaggttacatgttcaccactaccgcagaacgggaaattgtccgtgacataaaggagaaacttgcttatgtcgctcttgactacgagcaagagctagagacagccaagagcagttcttcagtggagaagaactacgagctacctgatggacaagtcataaccatcggagctgagagattccgttgtcctgaggttctgttccagccatcgctcatcggaatggaagctcctggaatccatgaaacaacttacaactccatcatgaaatgtgatgtcgatatcaggaaggatctctatggaaacatcgttctcagtggtggttccaccatgttcccaggaattgctgaccgtatgagcaaagagatcaccgctcttgcacctagcagcatgaagatcaaggtggttgcaccgccagagagaaaatacagtgtctggatcggaggatcaatccttgcatccctcagcaccttccaacagatgtggatttcaaagagtgagtacgatgagtcaggtccatcgattgttcacaggaaatgcttctaagtgtgtcttgtcttatctggttcgtggtggtgagtttgttacaaaaaaatctattttccctagttgagatgggaattgaactatctgttgttatgtggattttattttcttttttctctttagaaccttatggttgtgtcaagaagtcttgtgtactttagttttatatctctgttttatctcttctattttctttaggatgcttgtgatgatgctgtttttttttgtccctaagcaaaaaaatatcatattatatttggtccttggttcatttttttggtttttttttgtcttcacatataaatattgtttgaatgtcttcaatcttttatttgtatgagacaattatttaagtatcgggtgacaatgcagctattatgtattgtcgattgtt

SEQ ID NO: 41654 - protein, 377 aa, Arabidopsis thaliana
  peptide (1)..(377): Ceres Seq. ID no. 13575576
MADGEDIQPLVCDNGTGMVKAGFAGDDAPRAVFPSIVGRPRHTGVMVGMGQKDAYVGDEAQSKRGILTLKYPIEHGIVSNWDDMEKIWHHTFYNELRVAPEEHPVLLTEAPLNPKANREKMTQIMFETFNVPAMYVAIQAVLSLYASGRTTGIVLDSGDGVSHTVPIYEGYALPHAILRLDLAGRDLTDSLMKILTERGYMFTTTAEREIVRDIKEKLAYVALDYEQELETAKSSSSVEKNYELPDGQVITIGAERFRCPEVLFQPSLIGMEAPGIHETTYNSIMKCDVDIRKDLYGNIVLSGGSTMFPGIADRMSKEITALAPSSMKIKVVAPPERKYSVWIGGSILASLSTFQQMWISKSEYDESGPSIVHRKCF

SEQ ID NO: 41655 - protein, 360 aa, Arabidopsis thaliana
  peptide (1)..(360): Ceres Seq. ID no. 13575577
MVKAGFAGDDAPRAVFPSIVGRPRHTGVMVGMGQKDAYVGDEAQSKRGILTLKYPIEHGIVSNWDDMEKIWHHTFYNELRVAPEEHPVLLTEAPLNPKANREKMTQIMFETFNVPAMYVAIQAVLSLYASGRTTGIVLDSGDGVSHTVPIYEGYALPHAILRLDLAGRDLTDSLMKILTERGYMFTTTAEREIVRDIKEKLAYVALDYEQELETAKSSSSVEKNYELPDGQVITIGAERFRCPEVLFQPSLIGMEAPGIHETTYNSIMKCDVDIRKDLYGNIVLSGGSTMFPGIADRMSKEITALAPSSMKIKVVAPPERKYSVWIGGSILASLSTFQQMWISKSEYDESGPSIVHRKCF

SEQ ID NO: 41656 - protein, 332 aa, Arabidopsis thaliana
  peptide (1)..(332): Ceres Seq. ID no. 13575578
MVGMGQKDAYVGDEAQSKRGILTLKYPIEHGIVSNWDDMEKIWHHTFYNELRVAPEEHPVLLTEAPLNPKANREKMTQIMFETFNVPAMYVAIQAVLSLYASGRTTGIVLDSGDGVSHTVPIYEGYALPHAILRLDLAGRDLTDSLMKILTERGYMFTTTAEREIVRDIKEKLAYVALDYEQELETAKSSSSVEKNYELPDGQVITIGAERFRCPEVLFQPSLIGMEAPGIHETTYNSIMKCDVDIRKDLYGNIVLSGGSTMFPGIADRMSKEITALAPSSMKIKVVAPPERKYSVWIGGSILASLSTFQQMWISKSEYDESGPSIVHRKCF

SEQ ID NO: 41657 - DNA, 1953 bp, Arabidopsis thaliana
  misc_feature (1)..(1953): Ceres Seq. ID no. 12482224
  misc_feature (1)..(1953): Ortholog of  Ceres SEQ ID NO 15176081 as cited in SEQ ID NO 65838
  misc_feature (1)..(1953): Ortholog of  Ceres SEQ ID NO 13660287 as cited in SEQ ID NO 67316
aacaacacagaactagaaaagagaaacactattagatcatcacttctcagatttcgatattcccaataaataataaatactctcagttcttctcttctccaagaacaaaaaaaaaaaatgaattcagaatcgctagaaaatcttcaccgtccattaatcgaatcatcgaagtcgttcgtcgattatcgtctcgagactgtgttaacagatcgagagttaccgtattttcgccggatttatctagcgatgatgattgagatgaagtttctctttcatctggcggctccggcgatctttgtttacgtcatcaacaacggcatgtcaattcttacacgtatcttcgctggacacgtaggaagcttcgaactcgccgccgcttcacttggaaacagtggtttcaacatgttcacctatggacttctgcttggaatgggaagtgcagtggaaacattatgtggtcaagcacatggagctcatagatacgaaatgcttggagtttacctccaaagatcaacagttgttctaatcctaacatgtctaccaatgtcatttctcttcctcttctcaaatccgatcctcacagcacttggagagccagagcaagtggcaacattggcttcagtattcgtctacggtatgatcccggtgatcttcgcttacgcagtcaatttccctatccagaagtttctccaatcacaaagcatcgtcactccaagtgcctacatatcagctgcaacgcttgtgatccatctcatactttcgtggatcgctgtgtatcgtcttggttacggtcttttggctttgtctttgatacatagcttctcgtggtggatcattgttgtggctcagattgtttatattaaaatgagtccgagatgtcgtcggacttgggaaggttttagttggaaagcttttgaaggtctttgggattttttccgattatcagctgcttctgccgtcatgctttgtcttgaatcttggtactctcagattcttgttttactcgccggacttctcaagaaccctgagcttgctttggattctcttgctatctgcatgtcaatttctgcaatctcattcatggtctccgttggattcaacgcagctgcaagtgtgagagtaagcaacgagctaggagccggaaacccgagagcagccgcgttctccacagtcgtgacaacgggagtatcattcttactatcggttttcgaagccatcgtggtcttatcgtggcgtcacgtcatcagctatgcgtttactgatagtccagcagtggctgaggccgttgcggatttatctccctttttagccatcacaattgtcctcaatggaattcagcctgttttgtccggtgtggctgttggatgtggatggcaagcatttgttgcgtacgtaaacattggatgttactacgttgtggggattccagtgggattcgttcttggcttcacttatgatatgggagctaagggaatatggactgggatgattggtggtactttaatgcaaacaataatcttagtgattgtcactttacgaactgattgggacaaagaggttgagaaagcttcgagcagattggaccagtgggaagagagccgtgagccgcttttgaagcaataaataaattaatgaaatgatttgtttatttttattttttttgggagttttgaggtcagattgaaatcaaaatttttgtttccccgaaatatggcgatagatgatcacttgtaagatgcatattcaattgttaaactctcgtttttcaatcgaaaaatgtatatcgctttgttatttaatgacttggaaatttgagttttttttttggtttcttggtgttgtgggagttttttttttgatggacatttgagattagaatatataggagcaaagttgaaagtttatttcagtgtatgattgtatatgaaaataaagagtgagttgtttcttctt

SEQ ID NO: 41658 - protein, 501 aa, Arabidopsis thaliana
  peptide (1)..(501): Ceres Seq. ID no. 12482225
MNSESLENLHRPLIESSKSFVDYRLETVLTDRELPYFRRIYLAMMIEMKFLFHLAAPAIFVYVINNGMSILTRIFAGHVGSFELAAASLGNSGFNMFTYGLLLGMGSAVETLCGQAHGAHRYEMLGVYLQRSTVVLILTCLPMSFLFLFSNPILTALGEPEQVATLASVFVYGMIPVIFAYAVNFPIQKFLQSQSIVTPSAYISAATLVIHLILSWIAVYRLGYGLLALSLIHSFSWWIIVVAQIVYIKMSPRCRRTWEGFSWKAFEGLWDFFRLSAASAVMLCLESWYSQILVLLAGLLKNPELALDSLAICMSISAISFMVSVGFNAAASVRVSNELGAGNPRAAAFSTVVTTGVSFLLSVFEAIVVLSWRHVISYAFTDSPAVAEAVADLSPFLAITIVLNGIQPVLSGVAVGCGWQAFVAYVNIGCYYVVGIPVGFVLGFTYDMGAKGIWTGMIGGTLMQTIILVIVTLRTDWDKEVEKASSRLDQWEESREPLLKQ

SEQ ID NO: 41659 - protein, 458 aa, Arabidopsis thaliana
  peptide (1)..(458): Ceres Seq. ID no. 12482226
MMIEMKFLFHLAAPAIFVYVINNGMSILTRIFAGHVGSFELAAASLGNSGFNMFTYGLLLGMGSAVETLCGQAHGAHRYEMLGVYLQRSTVVLILTCLPMSFLFLFSNPILTALGEPEQVATLASVFVYGMIPVIFAYAVNFPIQKFLQSQSIVTPSAYISAATLVIHLILSWIAVYRLGYGLLALSLIHSFSWWIIVVAQIVYIKMSPRCRRTWEGFSWKAFEGLWDFFRLSAASAVMLCLESWYSQILVLLAGLLKNPELALDSLAICMSISAISFMVSVGFNAAASVRVSNELGAGNPRAAAFSTVVTTGVSFLLSVFEAIVVLSWRHVISYAFTDSPAVAEAVADLSPFLAITIVLNGIQPVLSGVAVGCGWQAFVAYVNIGCYYVVGIPVGFVLGFTYDMGAKGIWTGMIGGTLMQTIILVIVTLRTDWDKEVEKASSRLDQWEESREPLLKQ

SEQ ID NO: 41660 - protein, 457 aa, Arabidopsis thaliana
  peptide (1)..(457): Ceres Seq. ID no. 12482227
MIEMKFLFHLAAPAIFVYVINNGMSILTRIFAGHVGSFELAAASLGNSGFNMFTYGLLLGMGSAVETLCGQAHGAHRYEMLGVYLQRSTVVLILTCLPMSFLFLFSNPILTALGEPEQVATLASVFVYGMIPVIFAYAVNFPIQKFLQSQSIVTPSAYISAATLVIHLILSWIAVYRLGYGLLALSLIHSFSWWIIVVAQIVYIKMSPRCRRTWEGFSWKAFEGLWDFFRLSAASAVMLCLESWYSQILVLLAGLLKNPELALDSLAICMSISAISFMVSVGFNAAASVRVSNELGAGNPRAAAFSTVVTTGVSFLLSVFEAIVVLSWRHVISYAFTDSPAVAEAVADLSPFLAITIVLNGIQPVLSGVAVGCGWQAFVAYVNIGCYYVVGIPVGFVLGFTYDMGAKGIWTGMIGGTLMQTIILVIVTLRTDWDKEVEKASSRLDQWEESREPLLKQ

SEQ ID NO: 41661 - DNA, 1900 bp, Arabidopsis thaliana
  misc_feature (1)..(1900): Ceres Seq. ID no. 13491591
  misc_feature (1)..(1900): Ortholog of  Ceres SEQ ID NO 14304867 as cited in SEQ ID NO 54375
aaggggcaaaactgaaaatcacacaaaaacaaacaaaactttgcttacgtcacatcattatctgtgactaattcttaatcatcatcatcatcatcacttacttaaatctaaaaaaatctctgtttgtatatatattatctttgcgatttttatccaaatcttccaaagcttagtttttttttttttcaatttctctcttgcgttttcgattttattacaagaactttgttttgggcttcatccatcgttcaaggttcgttgaaaactatgaagaaagttgagttttttatgctccttctctgcttcatcgcagcgtcatctctagtgtctgctgatccaccaacatgtcctgctgatttgggaggcaagtgtagtgattctgatgactggcaaggtgatttcttccctgaaatccccaagattaagtatgagggaccttcgagtaagaacccacttgcttacaggtggtataacgctgaagaagagattcttgggaagaaaatgaaggattggtttagattcagtgttgcgttttggcatactttccgtgggactggaggtgatccatttggtgctgctactaagtattggccttgggaagatggtactaactctgtgtctatggctaagagaagaatgagagctaactttgagttcttgaagaaacttggagttgattggtggtgttttcatgacagagacatagcacctgatggcactacacttgaggaatctaacaaaaacttggatgaagttatcgaactcgccaaagaactccaaaaggggagcaaaatcaaaccattgtggggaacagctcagcttttcttgcatcctcgttatatgcacggaggagcgaccagctctgaagttggagtgtatgcttacgctgctgctcaggtgaagaaagccatggaggtaacacattacttaggtggtgaaaactacgttttttggggtggtcgtgaaggttatcagacactcttgaacactgatatgggaagagagcttgatcatctagccaggttctttgaagctgctgttgcttacaagaagaagattggattcaaaggcacgcttttaatcgagcccaagcctcaagaacccaccaagcaccagtatgactgggatgctgcaacagctgccaatttcttgaggaaatatggtcttattgatgagtttaagctcaacattgagtgtaaccatgccacgctctctggtcacacttgtcatcacgagcttgaaactgcaagaattaatggtttacttggcaacattgatgcaaacactggcgatgctcaaactggatgggatacagatcagtttcttacagatgttggagaagcaaccatggttatgatgagtgtcatcaaaaatggtgggattgctccaggcggcttcaactttgacgctaaactgcgaagagagagtacagacgtggaagacttattcattgctcatattagtggaatggatacaatggctcgtggactgagaaatgcagtcaaaatcttggaggagggaagtctaagtgaattggtacgcaagcgatatgcaacttgggactctgagcttgggaagcaaatagaagaaggaaaagctgattttgagtatcttgagaagaaagctaaagagtttggagaaccaaaggtttcttctgctaaacaggaactcgctgagatgattttccaatctgcaatgtaagaagaagaacaagaaggctttttatgtttattaaaagtatcgtcttttttagtttccctcgcatctttgagaagtttgaaaaccaaaacattggaaaataagatgattagagaggttggtttcattatttcagttgatgtactatggtttcacactctaattactttaaattgaataacaaaagactgtttaggccttc

SEQ ID NO: 41662 - protein, 477 aa, Arabidopsis thaliana
  peptide (1)..(477): Ceres Seq. ID no. 13491592
MKKVEFFMLLLCFIAASSLVSADPPTCPADLGGKCSDSDDWQGDFFPEIPKIKYEGPSSKNPLAYRWYNAEEEILGKKMKDWFRFSVAFWHTFRGTGGDPFGAATKYWPWEDGTNSVSMAKRRMRANFEFLKKLGVDWWCFHDRDIAPDGTTLEESNKNLDEVIELAKELQKGSKIKPLWGTAQLFLHPRYMHGGATSSEVGVYAYAAAQVKKAMEVTHYLGGENYVFWGGREGYQTLLNTDMGRELDHLARFFEAAVAYKKKIGFKGTLLIEPKPQEPTKHQYDWDAATAANFLRKYGLIDEFKLNIECNHATLSGHTCHHELETARINGLLGNIDANTGDAQTGWDTDQFLTDVGEATMVMMSVIKNGGIAPGGFNFDAKLRRESTDVEDLFIAHISGMDTMARGLRNAVKILEEGSLSELVRKRYATWDSELGKQIEEGKADFEYLEKKAKEFGEPKVSSAKQELAEMIFQSAM

SEQ ID NO: 41663 - protein, 470 aa, Arabidopsis thaliana
  peptide (1)..(470): Ceres Seq. ID no. 13491593
MLLLCFIAASSLVSADPPTCPADLGGKCSDSDDWQGDFFPEIPKIKYEGPSSKNPLAYRWYNAEEEILGKKMKDWFRFSVAFWHTFRGTGGDPFGAATKYWPWEDGTNSVSMAKRRMRANFEFLKKLGVDWWCFHDRDIAPDGTTLEESNKNLDEVIELAKELQKGSKIKPLWGTAQLFLHPRYMHGGATSSEVGVYAYAAAQVKKAMEVTHYLGGENYVFWGGREGYQTLLNTDMGRELDHLARFFEAAVAYKKKIGFKGTLLIEPKPQEPTKHQYDWDAATAANFLRKYGLIDEFKLNIECNHATLSGHTCHHELETARINGLLGNIDANTGDAQTGWDTDQFLTDVGEATMVMMSVIKNGGIAPGGFNFDAKLRRESTDVEDLFIAHISGMDTMARGLRNAVKILEEGSLSELVRKRYATWDSELGKQIEEGKADFEYLEKKAKEFGEPKVSSAKQELAEMIFQSAM

SEQ ID NO: 41664 - protein, 399 aa, Arabidopsis thaliana
  peptide (1)..(399): Ceres Seq. ID no. 13491594
MKDWFRFSVAFWHTFRGTGGDPFGAATKYWPWEDGTNSVSMAKRRMRANFEFLKKLGVDWWCFHDRDIAPDGTTLEESNKNLDEVIELAKELQKGSKIKPLWGTAQLFLHPRYMHGGATSSEVGVYAYAAAQVKKAMEVTHYLGGENYVFWGGREGYQTLLNTDMGRELDHLARFFEAAVAYKKKIGFKGTLLIEPKPQEPTKHQYDWDAATAANFLRKYGLIDEFKLNIECNHATLSGHTCHHELETARINGLLGNIDANTGDAQTGWDTDQFLTDVGEATMVMMSVIKNGGIAPGGFNFDAKLRRESTDVEDLFIAHISGMDTMARGLRNAVKILEEGSLSELVRKRYATWDSELGKQIEEGKADFEYLEKKAKEFGEPKVSSAKQELAEMIFQSAM

SEQ ID NO: 41665 - DNA, 944 bp, Arabidopsis thaliana
  misc_feature (1)..(944): Ceres Seq. ID no. 13488157
  misc_feature (1)..(944): Ortholog of  Ceres SEQ ID NO 13660094 as cited in SEQ ID NO 60820
aagatcatcaagaccaatctcgtagacttcttgtctctgtccaaaaaccataaagaaactttattggcataaaaagagaacaatctcgtagattcttgagcttctgacaatggattctttgaagaatagaacattgcttaaggtcattgttcttggagatagcggggtaggcaaaacttcattgatgaatcaatatgtgtacaagaaatttaacaagcaatataaggctacgatcggagcagatttcgtgaccaaagagcttcatatagatgaaaaatctgtcactttacagatatgggataccgctggacaagagagatttcaaagtctaggggccgcgttctatagaggtgctgattgttgcgttcttgtctacgacgtgaacaatctcaaatcttttgaaactctcaataactggcacacagagttcctcaaacaggcaaatcctatggaaccggagacatttccctttgttttgatcgggaacaagaccgatgtagatggcggaaacagccgagttgtttcaaataagagagccatcgagtggtgtggctcaaagggaaacataccgtaccatgaaacctctgcgaaggaagataccaatatcgatgaagcttttttgagtgttgcacacattgctctctctaatgaacgtaaacaaagcaatgacatatatcctagaggccagtatcatgactctgttacggatattattgatccagatcagtcaagaggttgtgcttgctgattccatgtttgacatatctgatcaaataatatcgagtcccagctctttcatttgcagtccttgtttttggtaactttttttctatttattggtttaataatatcatttatagaggtttattaacgacaaaaaacagttgatacatactactttctgagtgttttgattcatgtaaagcattaattaatttctattt

SEQ ID NO: 41666 - protein, 212 aa, Arabidopsis thaliana
  peptide (1)..(212): Ceres Seq. ID no. 13488158
MDSLKNRTLLKVIVLGDSGVGKTSLMNQYVYKKFNKQYKATIGADFVTKELHIDEKSVTLQIWDTAGQERFQSLGAAFYRGADCCVLVYDVNNLKSFETLNNWHTEFLKQANPMEPETFPFVLIGNKTDVDGGNSRVVSNKRAIEWCGSKGNIPYHETSAKEDTNIDEAFLSVAHIALSNERKQSNDIYPRGQYHDSVTDIIDPDQSRGCAC

SEQ ID NO: 41667 - protein, 187 aa, Arabidopsis thaliana
  peptide (1)..(187): Ceres Seq. ID no. 13488159
MNQYVYKKFNKQYKATIGADFVTKELHIDEKSVTLQIWDTAGQERFQSLGAAFYRGADCCVLVYDVNNLKSFETLNNWHTEFLKQANPMEPETFPFVLIGNKTDVDGGNSRVVSNKRAIEWCGSKGNIPYHETSAKEDTNIDEAFLSVAHIALSNERKQSNDIYPRGQYHDSVTDIIDPDQSRGCAC

SEQ ID NO: 41668 - DNA, 1833 bp, Arabidopsis thaliana; identical to SEQ ID NO: 30707
  misc_feature (1)..(1833): Ceres Seq. ID no. 13509854
  misc_feature (1)..(1833): Ortholog of  Ceres SEQ ID NO 13663419 as cited in SEQ ID NO 66561

SEQ ID NO: 41669 - protein, 510 aa, Arabidopsis thaliana; identical to SEQ ID NO: 30708
  peptide (1)..(510): Ceres Seq. ID no. 13509855

SEQ ID NO: 41670 - protein, 455 aa, Arabidopsis thaliana; identical to SEQ ID NO: 30709
  peptide (1)..(455): Ceres Seq. ID no. 13509856

SEQ ID NO: 41671 - protein, 395 aa, Arabidopsis thaliana; identical to SEQ ID NO: 30710
  peptide (1)..(395): Ceres Seq. ID no. 13509857

SEQ ID NO: 41672 - DNA, 1455 bp, Arabidopsis thaliana
  misc_feature (1)..(1455): Ceres Seq. ID no. 12371110
  misc_feature (1)..(1455): Ortholog of  Ceres SEQ ID NO 13596090 as cited in SEQ ID NO 68377
  misc_feature (1)..(1455): Ortholog of  Ceres SEQ ID NO 14303557 as cited in SEQ ID NO 68595
accatttcaaagtgccactttttcttcctaaatcctctctctctctctctccgttcccgagacaagcaaaagcttcaatctcaaatctttcagcagctacaaaaatgttcttcatctaaaagagactgtgaagcagagagagagagagagatgggaggtgtgacgtcatcagttgcggcgaagttcgctttcttcccgccgagtccgtcgtcttacaagctggtttacgatgaactgaccggacttcttctgatgaacccatttcctcaccgtgaaaacgttgaaatccttaagcttccgacacgtagaggaacagagatcgtggctatgtacgtcagacatccgatggctacctctactctgctttattcccatggaaacgccgccgatctgggccagatgtatgagctcttcatcgaattgagcatccatcttaaggttaatctcatggggtacgattactccgggtatggacaatctactggaaagccaagtgagcaccatacatatgctgatatcgaagctgcttataaatgtcttgaggaaacctatggagcaaaacaggaagacataatcctttatggccaatccgttggaagtggacctacattagatcttgctgctcggttgcctcaattaagagctgctgttctccatagcccgattctttctggtctaagagtaatgtatccagtgaagaagacatactggttcgacatcttcaagaatatcgacaaaatacctcttgtgaattgcccggttctcgtcattcacggaacttgtgatgaagttgttgactgttctcatggaaaacaactatgggaactctctaaagagaaatatgaaccgctttggctcgaaggcggtaaccactgtgatctagaacactatcctgaatacattaaacaccttaagaagttcatcacaaccgtagagagagatctctcctcgagggcgagcacggcccaattagagaaacagagcagcgatttggaaatgccgaggcagagcgtagatagaagagagaagccgaggcaaagcgttgataaaagggagaaagagaaacctccaaagggtccttcaaagaagagtaagctgagaatcacgttcgagcagcacttagatcggactaggagaagcgttgacttccacgaaaaggcaaggaagagcgttgaccatcatcagcatcatcagaatcatcatcagattgagagaggaaggaagagtgttgatagattggatagagtacggtctgagtaaaccggagaaaatctaccacacgtacataagttgttacagaacaagaacatttgatcttgatcttgattggccattctaatgtttatggttttttgttttgatttgtgagttattctctagttttatttgggtgtgtcatttcttgaatggtgaagcttaaatcttaagcaaacaaatgagagaaattaggtcttt

SEQ ID NO: 41673 - protein, 419 aa, Arabidopsis thaliana
  peptide (1)..(419): Ceres Seq. ID no. 12371111
TISKCHFFFLNPLSLSLRSRDKQKLQSQIFQQLQKCSSSKRDCEAEREREMGGVTSSVAAKFAFFPPSPSSYKLVYDELTGLLLMNPFPHRENVEILKLPTRRGTEIVAMYVRHPMATSTLLYSHGNAADLGQMYELFIELSIHLKVNLMGYDYSGYGQSTGKPSEHHTYADIEAAYKCLEETYGAKQEDIILYGQSVGSGPTLDLAARLPQLRAAVLHSPILSGLRVMYPVKKTYWFDIFKNIDKIPLVNCPVLVIHGTCDEVVDCSHGKQLWELSKEKYEPLWLEGGNHCDLEHYPEYIKHLKKFITTVERDLSSRASTAQLEKQSSDLEMPRQSVDRREKPRQSVDKREKEKPPKGPSKKSKLRITFEQHLDRTRRSVDFHEKARKSVDHHQHHQNHHQIERGRKSVDRLDRVRSE

SEQ ID NO: 41674 - protein, 369 aa, Arabidopsis thaliana
  peptide (1)..(369): Ceres Seq. ID no. 12371112
MGGVTSSVAAKFAFFPPSPSSYKLVYDELTGLLLMNPFPHRENVEILKLPTRRGTEIVAMYVRHPMATSTLLYSHGNAADLGQMYELFIELSIHLKVNLMGYDYSGYGQSTGKPSEHHTYADIEAAYKCLEETYGAKQEDIILYGQSVGSGPTLDLAARLPQLRAAVLHSPILSGLRVMYPVKKTYWFDIFKNIDKIPLVNCPVLVIHGTCDEVVDCSHGKQLWELSKEKYEPLWLEGGNHCDLEHYPEYIKHLKKFITTVERDLSSRASTAQLEKQSSDLEMPRQSVDRREKPRQSVDKREKEKPPKGPSKKSKLRITFEQHLDRTRRSVDFHEKARKSVDHHQHHQNHHQIERGRKSVDRLDRVRSE

SEQ ID NO: 41675 - protein, 335 aa, Arabidopsis thaliana
  peptide (1)..(335): Ceres Seq. ID no. 12371113
MNPFPHRENVEILKLPTRRGTEIVAMYVRHPMATSTLLYSHGNAADLGQMYELFIELSIHLKVNLMGYDYSGYGQSTGKPSEHHTYADIEAAYKCLEETYGAKQEDIILYGQSVGSGPTLDLAARLPQLRAAVLHSPILSGLRVMYPVKKTYWFDIFKNIDKIPLVNCPVLVIHGTCDEVVDCSHGKQLWELSKEKYEPLWLEGGNHCDLEHYPEYIKHLKKFITTVERDLSSRASTAQLEKQSSDLEMPRQSVDRREKPRQSVDKREKEKPPKGPSKKSKLRITFEQHLDRTRRSVDFHEKARKSVDHHQHHQNHHQIERGRKSVDRLDRVRSE

SEQ ID NO: 41676 - DNA, 1155 bp, Arabidopsis thaliana
  misc_feature (1)..(1155): Ceres Seq. ID no. 12329808
  misc_feature (1)..(1155): Ortholog of  Ceres SEQ ID NO 14309271 as cited in SEQ ID NO 0
ctaatcttgtgcctttagatttcttttcggggagatctagtagttgttggattcgttaaacggagaagtggatttggtacgagtctttaggtttccttcttcaccaaaagctctatatagatagaatctgcgagctctttttggtaggaaattagggttcgtgttgcttggtaaatatagaatcaatgacggaggttgttctgcatatatacgatgtgacgaacagtggatcggagaagactaacaacaccattgttcagatcaataggttcttcaaagacgggatcggtcttggcggtatattccacagcgctattcaggtatatggaaacgatgaatggtcttacgggtattgtgaactaggaactggtgtattcagctgcccgagtggaaagaatccaatgtacacataccgtgagaaaatcgtccttggcaaaacagattgcacaatcttcatggtgaatcagatgttgcgtgaactcagcagggaatggcctggacacacttatgatttgttgtcaaaaaattgcaatcacttctgcgatgtactctgtgaccggcttggtgtgccaaagatcccaggttgggttaatcgctttgctaatgctggggacacagccttggaagtggcaggaaacacagcaatgcggatgaagcaagccaaaactgaacttgtgtcagctagtaaagtggcttatcgcttcctctcgaatgttacttcgaacgtaaccaatggctccaatggctctccacaacgaccgggaactctcaacaattcagacagcgggaacttgagattgcaaggtagttggctcaaaggcttacttaacacagccaaaccctccactagtacagagatagggaacaaagatgaagatgcaaatcatgcagtcaccaatcagaagaaacaaagccgtgactctgatgttctactgtttcagtagcaaccgtaccgatccaccacaatgcattcggttagctgtatatccaccggtctaagagtcacacgcactattctcctcgtctgtacccattactctgtatcaacgttggaacctgtcattttttcttgagtttttagctcacgtgtgcttttgttaagatcattctcgcttgttactgtcaaatcttaacatcaaaaggtttattagtctc

SEQ ID NO: 41677 - protein, 252 aa, Arabidopsis thaliana
  peptide (1)..(252): Ceres Seq. ID no. 12329809
MTEVVLHIYDVTNSGSEKTNNTIVQINRFFKDGIGLGGIFHSAIQVYGNDEWSYGYCELGTGVFSCPSGKNPMYTYREKIVLGKTDCTIFMVNQMLRELSREWPGHTYDLLSKNCNHFCDVLCDRLGVPKIPGWVNRFANAGDTALEVAGNTAMRMKQAKTELVSASKVAYRFLSNVTSNVTNGSNGSPQRPGTLNNSDSGNLRLQGSWLKGLLNTAKPSTSTEIGNKDEDANHAVTNQKKQSRDSDVLLFQ

SEQ ID NO: 41678 - protein, 180 aa, Arabidopsis thaliana
  peptide (1)..(180): Ceres Seq. ID no. 12329810
MYTYREKIVLGKTDCTIFMVNQMLRELSREWPGHTYDLLSKNCNHFCDVLCDRLGVPKIPGWVNRFANAGDTALEVAGNTAMRMKQAKTELVSASKVAYRFLSNVTSNVTNGSNGSPQRPGTLNNSDSGNLRLQGSWLKGLLNTAKPSTSTEIGNKDEDANHAVTNQKKQSRDSDVLLFQ

SEQ ID NO: 41679 - protein, 162 aa, Arabidopsis thaliana
  peptide (1)..(162): Ceres Seq. ID no. 12329811
MVNQMLRELSREWPGHTYDLLSKNCNHFCDVLCDRLGVPKIPGWVNRFANAGDTALEVAGNTAMRMKQAKTELVSASKVAYRFLSNVTSNVTNGSNGSPQRPGTLNNSDSGNLRLQGSWLKGLLNTAKPSTSTEIGNKDEDANHAVTNQKKQSRDSDVLLFQ

SEQ ID NO: 41680 - DNA, 1187 bp, Arabidopsis thaliana
  misc_feature (1)..(1187): Ceres Seq. ID no. 12370911
  misc_feature (1)..(1187): Ortholog of  Ceres SEQ ID NO 12635446 as cited in SEQ ID NO 0
ccaacttaaaaaaccctaatttctcaatctcttcttctacttttttttataacgatggcttcagaggtcaatctgcggcgagatctaccgggaaggtgaactggttcaacgcttctaaaggctatggtttcattactcctgacgatggcagcgtagagcttttcgttcatcaatcttcaattgtctccgaaggttaccggagtttaaccgtcggcgatgcggttgagttcgctattactcagggaagcgacggtaagactaaagccgtcaatgttactgctcctggtggtggttctctcaagaaggagaataactctcgtggtaacggtgctaggcgcggcggcggtggaagcggttgctacaattgcggtgagttaggtcatatctctaaagattgtggtattggtggcggcggcggaggtggtgaacgtagatctagaggaggagaaggttgttacaattgtggtgatactggtcacttcgctagggattgtacttcagctggaaacggtgaccaacgtggagccaccaaaggtggaaacgatggttgctacacttgcggtgatgttggtcacgtggctagggattgtactcagaaatcagttggaaacggagaccaacgtggagcggtcaaaggtggaaacgatggttgctacacttgtggtgatgttggtcactttgctagggattgtactcagaaggttgctgccggaaacgtcagaagcggtggtggtggtagtggaacttgttattcatgcggtggagttggtcacattgcaagagattgtgcgactaagagacagccttctcgtgggtgttaccagtgtggtggttctggtcacttggctcgtgattgtgaccagagaggaagcggtggaggaggtaatgataatgcgtgctacaagtgtggtaaggaaggtcactttgcaagggaatgttcttctgtagcttaatcgatttcctaatcaacaaaacaaaaaaacaagaatgaaattgaatcgagttatatagtttggtatatattactcttcgttttcatttatctttttttttgttgttgatgggaatgaaattgcctggtccttttggtgtgtttttgagcttttattattatacagagtgatccctttttgttataactattacaagtttttagctttatttgatatggatgctctctccttttc

SEQ ID NO: 41681 - protein, 316 aa, Arabidopsis thaliana
  peptide (1)..(316): Ceres Seq. ID no. 12370912
NLKNPNFSISSSTFFYNDGFRGQSAARSTGKVNWFNASKGYGFITPDDGSVELFVHQSSIVSEGYRSLTVGDAVEFAITQGSDGKTKAVNVTAPGGGSLKKENNSRGNGARRGGGGSGCYNCGELGHISKDCGIGGGGGGGERRSRGGEGCYNCGDTGHFARDCTSAGNGDQRGATKGGNDGCYTCGDVGHVARDCTQKSVGNGDQRGAVKGGNDGCYTCGDVGHFARDCTQKVAAGNVRSGGGGSGTCYSCGGVGHIARDCATKRQPSRGCYQCGGSGHLARDCDQRGSGGGGNDNACYKCGKEGHFARECSSVA

SEQ ID NO: 41682 - DNA, 1250 bp, Arabidopsis thaliana
  misc_feature (1)..(1250): Ceres Seq. ID no. 13488754
  misc_feature (1)..(1250): Ortholog of  Ceres SEQ ID NO 12583469 as cited in SEQ ID NO 51031
  misc_feature (1)..(1250): Ortholog of  Ceres SEQ ID NO 13597389 as cited in SEQ ID NO 63426
  misc_feature (1)..(1250): Ortholog of  Ceres SEQ ID NO 13595998 as cited in SEQ ID NO 68161
  misc_feature (1)..(1250): Ortholog of  Ceres SEQ ID NO 15180463 as cited in SEQ ID NO 0
aaaagcaaatttaaacaacatagcgagagttcatgaatataactaagatgaaactcttctatgtgatcctattttttatcagttctttacagatttcaaactccatcgatttcaattatccgtctgcttttaatttcggagattccaattctgataccggtgatcttgttgctggccttggcattcgtctagaccttcctaacggacaaaattccttcaaaacttcatcccaaagattctgcgatggacgtcttgttatagattttctaatggatgaaatggacctgccatttttaaatccatatttggattcattaggtttaccaaatttcaaaaaagggtgtaactttgcagcagcaggatccacaattcttcccgcaaacccgacctcggtctctcctttctcctttgatcttcaaatctctcaattcatccggttcaaatctagggccattgaattactttctaaaacaggaaggaaatatgaaaagtacttaccaccaattgattattattcaaaaggattatacatgattgacataggccaaaatgatatagctggtgccttctactccaagactcttgaccaagttcttgcctctattccttccattcttgaaacttttgaagctggcctcaagaggctttatgaggaaggaggcagaaacatttggatacacaacacagggcctttaggatgtttagctcaaaatattgccaagtttgggacagattcaacaaaacttgatgagtttggttgcgttagttcccataaccaagcagctaagcttttcaatcttcaactccatgctatgtccaacaaatttcaagctcaataccctgatgcaaatgttacttacgttgacatcttctctattaaatctaatctcatcgctaattattcccgatttggcttcgaaaaaccgttaatggcgtgttgtggagtcggaggggcgccattaaattacgatagtcgcattacatgtggccaaactaaagtcttagatgggatatcagtaacagccaaagcttgcaacgatagttccgagtacataaactgggatggaattcattataccgaagccgcaaacgagttcgtctcatctcaaatcttaaccggaaaatattccgatccaccgttttcagatcaaatgccattttttctaaccttgaaattttaaacaatgccgttacaatcggatggtttcattcattctttagttttctgttattatttacttatattgttc

SEQ ID NO: 41683 - protein, 382 aa, Arabidopsis thaliana
  peptide (1)..(382): Ceres Seq. ID no. 13488755
MNITKMKLFYVILFFISSLQISNSIDFNYPSAFNFGDSNSDTGDLVAGLGIRLDLPNGQNSFKTSSQRFCDGRLVIDFLMDEMDLPFLNPYLDSLGLPNFKKGCNFAAAGSTILPANPTSVSPFSFDLQISQFIRFKSRAIELLSKTGRKYEKYLPPIDYYSKGLYMIDIGQNDIAGAFYSKTLDQVLASIPSILETFEAGLKRLYEEGGRNIWIHNTGPLGCLAQNIAKFGTDSTKLDEFGCVSSHNQAAKLFNLQLHAMSNKFQAQYPDANVTYVDIFSIKSNLIANYSRFGFEKPLMACCGVGGAPLNYDSRITCGQTKVLDGISVTAKACNDSSEYINWDGIHYTEAANEFVSSQILTGKYSDPPFSDQMPFFLTLKF

SEQ ID NO: 41684 - protein, 377 aa, Arabidopsis thaliana
  peptide (1)..(377): Ceres Seq. ID no. 13488756
MKLFYVILFFISSLQISNSIDFNYPSAFNFGDSNSDTGDLVAGLGIRLDLPNGQNSFKTSSQRFCDGRLVIDFLMDEMDLPFLNPYLDSLGLPNFKKGCNFAAAGSTILPANPTSVSPFSFDLQISQFIRFKSRAIELLSKTGRKYEKYLPPIDYYSKGLYMIDIGQNDIAGAFYSKTLDQVLASIPSILETFEAGLKRLYEEGGRNIWIHNTGPLGCLAQNIAKFGTDSTKLDEFGCVSSHNQAAKLFNLQLHAMSNKFQAQYPDANVTYVDIFSIKSNLIANYSRFGFEKPLMACCGVGGAPLNYDSRITCGQTKVLDGISVTAKACNDSSEYINWDGIHYTEAANEFVSSQILTGKYSDPPFSDQMPFFLTLKF

SEQ ID NO: 41685 - protein, 303 aa, Arabidopsis thaliana
  peptide (1)..(303): Ceres Seq. ID no. 13488757
MDEMDLPFLNPYLDSLGLPNFKKGCNFAAAGSTILPANPTSVSPFSFDLQISQFIRFKSRAIELLSKTGRKYEKYLPPIDYYSKGLYMIDIGQNDIAGAFYSKTLDQVLASIPSILETFEAGLKRLYEEGGRNIWIHNTGPLGCLAQNIAKFGTDSTKLDEFGCVSSHNQAAKLFNLQLHAMSNKFQAQYPDANVTYVDIFSIKSNLIANYSRFGFEKPLMACCGVGGAPLNYDSRITCGQTKVLDGISVTAKACNDSSEYINWDGIHYTEAANEFVSSQILTGKYSDPPFSDQMPFFLTLKF

SEQ ID NO: 41686 - DNA, 1091 bp, Arabidopsis thaliana
  misc_feature (1)..(1091): Ceres Seq. ID no. 12395480
  misc_feature (1)..(1091): Ortholog of  Ceres SEQ ID NO 15176514 as cited in SEQ ID NO 1114
  misc_feature (1)..(1091): Ortholog of  Ceres SEQ ID NO 13662513 as cited in SEQ ID NO 63303
  misc_feature (1)..(1091): Ortholog of  Ceres SEQ ID NO 15174088 as cited in SEQ ID NO 0
ctaaacaaaaccctctcttcctctacttcatattcttcttcatttcctacgctctcttctcgttctcgattcgccatgcctctaattgaaaaggtttcctcttcccgaaccagcctgggcccgtgttacatctcgacccgacccaagacatccgggtccggatactcgccgctgaatgatccttcgccgaattggagcaaccgtccgccgaaggagacgattcttcttgatgggtgcgattatgagcactggctcatcgtcatggagttcactgatcctaaacctactgaagaagagatgatcaattcttatgtcaaaaccttaacttccgtccttggctgtgaggaagaggccaagaagaagatttactctgtttgtacttcgacctacactggctttggtgctttgatctctgaagagctctcttgcaaagtcaaaggtatcaacttctccatatttgcaattaggtttttaagccttttttgctctgacatagcttttctagttgtttacttatgatgttgagatttatcgtaaaaggctttctctgtttggtactgctctgttcaacaggtaggaggaaacttctcttgatctttgttttatcgcagttattgtctgtctctagtactataaaatgagaacatattttactgtttgagaaatctgatctagagttgtgtgattcattagcattgcctggtgttctctgggtgctgccggattcctatctcgatgtaccaaacaaagactacggaggtgacttgtacgttgaaggaaaggtcatacccagaccacagtacaggttcacggaacagcgtcatactagaccccgtcctaggccaaggtatgataggcgccgtgagacaatgcaggttgagaggagagagccatccatgggtcttcattctccagtaaatccgggagagttcaacaagcccagtgcttaatattaaacatgaacaatgcattatgtaatggatggagtttattaggattatggtatttacatgcttgtcttaaacactcatgtgagagacttttcagtttttatccacttaatcaaacaaatcaatcatcattcatgtctc

SEQ ID NO: 41687 - protein, 172 aa, Arabidopsis thaliana
  peptide (1)..(172): Ceres Seq. ID no. 12395481
LNKTLSSSTSYSSSFPTLSSRSRFAMPLIEKVSSSRTSLGPCYISTRPKTSGSGYSPLNDPSPNWSNRPPKETILLDGCDYEHWLIVMEFTDPKPTEEEMINSYVKTLTSVLGCEEEAKKKIYSVCTSTYTGFGALISEELSCKVKGINFSIFAIRFLSLFCSDIAFLVVYL

SEQ ID NO: 41688 - protein, 147 aa, Arabidopsis thaliana
  peptide (1)..(147): Ceres Seq. ID no. 12395482
MPLIEKVSSSRTSLGPCYISTRPKTSGSGYSPLNDPSPNWSNRPPKETILLDGCDYEHWLIVMEFTDPKPTEEEMINSYVKTLTSVLGCEEEAKKKIYSVCTSTYTGFGALISEELSCKVKGINFSIFAIRFLSLFCSDIAFLVVYL

SEQ ID NO: 41689 - DNA, 1883 bp, Arabidopsis thaliana; identical to SEQ ID NO: 36956
  misc_feature (1)..(1883): Ceres Seq. ID no. 13503035
  misc_feature (1)..(1883): Ortholog of  Ceres SEQ ID NO 15177221 as cited in SEQ ID NO 53046
  misc_feature (1)..(1883): Ortholog of  Ceres SEQ ID NO 15170209 as cited in SEQ ID NO 58562
  misc_feature (1)..(1883): Ortholog of  Ceres SEQ ID NO 14315134 as cited in SEQ ID NO 59476
  misc_feature (1)..(1883): Ortholog of  Ceres SEQ ID NO 12616332 as cited in SEQ ID NO 63449
  misc_feature (1)..(1883): Ortholog of  Ceres SEQ ID NO 13597498 as cited in SEQ ID NO 64648
  misc_feature (1)..(1883): Ortholog of  Ceres SEQ ID NO 14308053 as cited in SEQ ID NO 67790

SEQ ID NO: 41690 - protein, 404 aa, Arabidopsis thaliana; identical to SEQ ID NO: 36957
  peptide (1)..(404): Ceres Seq. ID no. 13503036

SEQ ID NO: 41691 - protein, 373 aa, Arabidopsis thaliana; identical to SEQ ID NO: 36958
  peptide (1)..(373): Ceres Seq. ID no. 13503037

SEQ ID NO: 41692 - protein, 367 aa, Arabidopsis thaliana; identical to SEQ ID NO: 36959
  peptide (1)..(367): Ceres Seq. ID no. 13503038

SEQ ID NO: 41693 - DNA, 1432 bp, Arabidopsis thaliana
  misc_feature (1)..(1432): Ceres Seq. ID no. 12385788
  misc_feature (1)..(1432): Ortholog of  Ceres SEQ ID NO 15227026 as cited in SEQ ID NO 52193
  misc_feature (1)..(1432): Ortholog of  Ceres SEQ ID NO 15177903 as cited in SEQ ID NO 54993
  misc_feature (1)..(1432): Ortholog of  Ceres SEQ ID NO 15177994 as cited in SEQ ID NO 55641
  misc_feature (1)..(1432): Ortholog of  Ceres SEQ ID NO 13595454 as cited in SEQ ID NO 56502
  misc_feature (1)..(1432): Ortholog of  Ceres SEQ ID NO 13589016 as cited in SEQ ID NO 68472
actactcattgtgcgtcttctcgatttgtaatctccatacaattttttctagagagaatccatctctctctcttttttttctttggttttgcttgtcccttaaattcagcctccttcatacataacgtcaaagctcagatatctgaataactcgcttgcgtgcctctctctctctaaaagcccatctctttctcctcctcctcctccattgaagaagaaacctaccttcgtaatatttcctcaattacgatcatggtgaatgttaaagggtcaaccaaaaaatcgaatcttgatcgattccttcattgcataacacccttagtgccaccccaatctctccccaagacggagattagaaccctaaatcgattgtggcatccatgggagagacaaaaggttgagtttttcaggttgagtgatttgtgggattgttatgatgaatggagcgcttatggagctagcgttcctattcatgttaccaacggagaatctcttgttcaatactatgttccttatctctctgccatccagattttcacctctcattcctccttgatccgcttaagggaagagtctgaagatggggaatgtgagggtagagatccgtttagcgattcaggtagcgatgagagtgtctctgaggaaggacttgagaacaacacgctcttgcatccaagtgatcgtttgggttatctttatctccaatactttgagagatcagctccttataccagagttcctctgatggataagatcaatgaattggctcaaagatacccgggattgatgtcgttgagaagcgttgatctttctccagctagttggatgtcagtagcatggtacccgatttaccatataccaatgggaagaaccattaaagacttatccacgtgtttcctcacttatcacactctttcctcttcttttcaagatatggaaccggaagaaaatggtggggacaaggagagagtgcggagggaaggggaagatataactctgctcccatttgggatggctacttacaagatgcaaggcgatgtttggctttcgcaggaccacgatgatcaagagagattggcttcgctttacagtgttgcggattcttggcttaaacagctcagggtccaacatcatgacttcaactacttctgcaatatgtcaatgactcatcgtggctaaacctcggttggatgacaccatgatgtttgcttgtttcctcatatatagtctaattcttgctttgttctggaaccgcttgcgttttgtaaaacgcaatggagcgattcgctttgcagtgttttggttagaatagcgttttgagtcttctaacctttgagagagtatatgtcgtatatagagttttgttgcttgttgaaacagagtacaattgttgttgcttgttaaaaacagagtgattgtttcttataagttg

SEQ ID NO: 41694 - protein, 308 aa, Arabidopsis thaliana
  peptide (1)..(308): Ceres Seq. ID no. 12385789
MVNVKGSTKKSNLDRFLHCITPLVPPQSLPKTEIRTLNRLWHPWERQKVEFFRLSDLWDCYDEWSAYGASVPIHVTNGESLVQYYVPYLSAIQIFTSHSSLIRLREESEDGECEGRDPFSDSGSDESVSEEGLENNTLLHPSDRLGYLYLQYFERSAPYTRVPLMDKINELAQRYPGLMSLRSVDLSPASWMSVAWYPIYHIPMGRTIKDLSTCFLTYHTLSSSFQDMEPEENGGDKERVRREGEDITLLPFGMATYKMQGDVWLSQDHDDQERLASLYSVADSWLKQLRVQHHDFNYFCNMSMTHRG

SEQ ID NO: 41695 - DNA, 1498 bp, Arabidopsis thaliana
  misc_feature (1)..(1498): Ceres Seq. ID no. 13646293
  misc_feature (1)..(1498): Ortholog of  Ceres SEQ ID NO 13593831 as cited in SEQ ID NO 53828
aactaaaaataaatgtttggaaacgttaggcaattttattatattctatcgttgttctctataaatgaagtctcgaccacacacttggtagctacacacgagaaagaaaaagctcacaactttaacctttctggagagagaagaacaaaagagggagagggagagaaatggaaggcaaagaagaagatgtacgagtgggagctaacaagttcccggagaggcaacccatcggtacatcggctcagtccaccgacaaggactacaaagagccacctcctgcgccactgttcgagcccggcgagctcagctcatggtctttctacagagccggaatagctgagtttatcgctactttcttgtttctctacatcactgttttgactgtaatgggagttaagagagcaccaaacatgtgtgcttctgttggaatccaaggtatcgcttgggcttttggtggcatgatctttgctcttgtctactgtactgctggaatttcaggtggacacatcaaccctgctgtaacattcggtctgttcttggctcggaagttatctctgaccagagcagtgttctacatgattatgcaatgtcttggagccatctgtggtgccggagtcgtcaaaggtttccagccaacgccgtaccagactctcggtggtggtgctaacaccgttgctcatggctacaccaaaggttctggccttggtgctgaaatcatcggaacattcgttctcgtctacactgtcttctccgccaccgacgccaagagaagcgcccgtgactcacacgtcccgattttggcgccgctcccaatcggatttgcagtgttcttggtacacttggcaacaataccgatcaccgggaccggaatcaacccagctagaagtcttggagccgcaattatctacaacaaggaccactcttgggatgaccattggattttctgggttggaccattcattggagcagctctagcagcactatatcaccagattgtcatcagagcgattcctttcaagagcaagagttagagacacacagaaagattccacggtccagaatttgttctttagtagtttctttgcttatctatctaatgtagcttgtgttttgcaatgtaatgagcctttcaagaatatgtatttgggatttctaatcagcttttgtctatgtaaaaactatgtgtttcttttttcttcctatactcgtctcagatgctttatggcaaagggtctctgaagtctaaggtgattagtgctccggttattgatgttttgaatagtttgttcgacgaatataaaataaacatagtcaaccctcattctgtatcaacatcaagttctcgggttggttttgagagacatgattatgaagatgatcatgacttcgtgaatgtgggggttgaaggattggcctctgtttatgacaagatggtgaatgaagagcttgactattgtgtacttgcaagaaagtgttgaaaacacaagggccaatacat

SEQ ID NO: 41696 - protein, 287 aa, Arabidopsis thaliana; identical to SEQ ID NO: 29005
  peptide (1)..(287): Ceres Seq. ID no. 13646294

SEQ ID NO: 41697 - protein, 214 aa, Arabidopsis thaliana; identical to SEQ ID NO: 29006
  peptide (1)..(214): Ceres Seq. ID no. 13646295

SEQ ID NO: 41698 - protein, 206 aa, Arabidopsis thaliana; identical to SEQ ID NO: 29007
  peptide (1)..(206): Ceres Seq. ID no. 13646296

SEQ ID NO: 41699 - DNA, 1295 bp, Arabidopsis thaliana
  misc_feature (1)..(1295): Ceres Seq. ID no. 12330892
  misc_feature (1)..(1295): Ortholog of  Ceres SEQ ID NO 13585342 as cited in SEQ ID NO 63601
  misc_feature (1)..(1295): Ortholog of  Ceres SEQ ID NO 15177459 as cited in SEQ ID NO 0
acaagcatctctccctcatattcacctaaaaatcaggtcccctctctttatttctctctcattcttatatcagatcaaaattttcggatttcttgttaagtaacaccaatcttttaaaagtgttttcaggttaataaaaaagaataatgatgttttcggtgacggttgcgatccttgtttgtcttattggctacatttaccgatcatttaagcctccaccaccgcgaatctgcggccatcctaacggtcctccggttacttctccgagaatcaagctcagtgatggaagatatcttgcttatagagaatctggggttgatagagacaatgctaactacaagatcattgtcgttcatggcttcaacagctccaaagacactgaatttcccatccctaaggatgtaattgaggagcttgggatatactttgtgttctacgatagagcaggatatggagaaagtgatccacacccatcacgcactgttaagagtgaagcatacgacattcaagaactcgccgataaactcaagatcggaccaaagttctatgttcttggtatatcactaggtgcttactcggtttatagttgcctcaaatacattccccacagactagctggagcagtcttaatggttccatttgtgaactattggtggactaaagtgcctcaagaaaaattgagtaaagcgttggagctaatgccaaagaaagaccaatggacgtttaaagtggctcattatgttccgtggttgttatattggtggttgacccaaaaactatttccgtcttcgagtatggtcacggggaacaatgcgttatgcagcgacaaagatttggtcgtcataaagaagaaaatggagaatccacgccctggcttggaaaaagttagacaacaaggagaccatgaatgtcttcaccgggacatgatagccggattcgcgacatgggaattcgacccgactgaattagaaaatccgtttgcggaaggcgaaggatcggtccacgtttggcaagggatggaagacagaatcattccatacgaaattaatcgatatatatcagagaagcttccatggattaagtaccatgaggtcttaggttatggacatcttctaaacgccgaggaggagaaatgcaaagacattatcaaggcacttcttgtcaactgatgatcatctctacacaagatgccacaaaaaatatagcatatttaatagattttattttttatttatggattataatattatagcatattataagtttgtaagtaagatgaaaaccacttgaaagtc

SEQ ID NO: 41700 - protein, 340 aa, Arabidopsis thaliana
  peptide (1)..(340): Ceres Seq. ID no. 12330893
MMFSVTVAILVCLIGYIYRSFKPPPPRICGHPNGPPVTSPRIKLSDGRYLAYRESGVDRDNANYKIIVVHGFNSSKDTEFPIPKDVIEELGIYFVFYDRAGYGESDPHPSRTVKSEAYDIQELADKLKIGPKFYVLGISLGAYSVYSCLKYIPHRLAGAVLMVPFVNYWWTKVPQEKLSKALELMPKKDQWTFKVAHYVPWLLYWWLTQKLFPSSSMVTGNNALCSDKDLVVIKKKMENPRPGLEKVRQQGDHECLHRDMIAGFATWEFDPTELENPFAEGEGSVHVWQGMEDRIIPYEINRYISEKLPWIKYHEVLGYGHLLNAEEEKCKDIIKALLVN

SEQ ID NO: 41701 - protein, 339 aa, Arabidopsis thaliana
  peptide (1)..(339): Ceres Seq. ID no. 12330894
MFSVTVAILVCLIGYIYRSFKPPPPRICGHPNGPPVTSPRIKLSDGRYLAYRESGVDRDNANYKIIVVHGFNSSKDTEFPIPKDVIEELGIYFVFYDRAGYGESDPHPSRTVKSEAYDIQELADKLKIGPKFYVLGISLGAYSVYSCLKYIPHRLAGAVLMVPFVNYWWTKVPQEKLSKALELMPKKDQWTFKVAHYVPWLLYWWLTQKLFPSSSMVTGNNALCSDKDLVVIKKKMENPRPGLEKVRQQGDHECLHRDMIAGFATWEFDPTELENPFAEGEGSVHVWQGMEDRIIPYEINRYISEKLPWIKYHEVLGYGHLLNAEEEKCKDIIKALLVN

SEQ ID NO: 41702 - protein, 179 aa, Arabidopsis thaliana
  peptide (1)..(179): Ceres Seq. ID no. 12330895
MVPFVNYWWTKVPQEKLSKALELMPKKDQWTFKVAHYVPWLLYWWLTQKLFPSSSMVTGNNALCSDKDLVVIKKKMENPRPGLEKVRQQGDHECLHRDMIAGFATWEFDPTELENPFAEGEGSVHVWQGMEDRIIPYEINRYISEKLPWIKYHEVLGYGHLLNAEEEKCKDIIKALLVN

SEQ ID NO: 41703 - DNA, 1305 bp, Arabidopsis thaliana
  misc_feature (1)..(1305): Ceres Seq. ID no. 12395060
  misc_feature (1)..(1305): Ortholog of  Ceres SEQ ID NO 14306617 as cited in SEQ ID NO 53026
acacattcgtgtaccgtttccgatttttcgttcctccaatttcattctctctctctttaagaaaaattccttgtttttgatccgagaatcgaagtcgccctcgaatcaagattaaaacctcgtttagttctcaatttcagttctgtggatccgtgcgtgacctcaagttttttttttttttctgtctcgaaattcagaatcgtagaggtgttgaaagttgaaaccttttttttggtttgcttggttaatgggtttcttcaaacttgatcgataattggatttgaatcaagggttttagtgttcttgctttgtgtattcgtttggcaatttgggataatgaatggtttgcaagaagtttgttcgtcaagtgggtcggtgatgatcggactaccagctgaagaagacgaaaacgccgcacattcgtcggaggattcatcttgccccgacgagtcagtgtcagagacagagctcgacctagctttgggtcttagcattggtcgtcggaaggttcgatcgtctttgtcttcctcgtcttcttctctgaccagggaaagtgggaccaaacgctctgctgattcttctccggctgccgcctcaaacgcaaccagacaagttgctgtaggttggccgcctctacggacttacagaatcaacagtttggtcaatcaagcaaagtctttagctacggaaggcggcttgagttctggcattcaaaaggagactacaaaaagtgtagtggttgctgctaagaacgatgatgcttgctttatcaaatcgtccaggacttctatgcttgtgaaggtgacaatggacggagttataattggaaggaaggttgatctcaatgctctggattcttatgcagccttagagaaaactttggatctaatgtttttccagattccttctcctgtaacaagatccaacacacaaggatacaagacaattaaggaaacatgtacttcgaaattactggatggctcatcggaatatatcataacatatcaagataaagacggagattggatgcttgtaggagatgttccttggcagatgttcctcgggtctgtgacaagactgagaatcatgaagacatcaattggagctggagtaggtaagtagagagtcctatatagcaaaaacagtttacatctctttggtctgtaactcatatatcacattcacatatatacatgtgcatatgtttatacatgagtgtacatatgtcttgtggtcgtttgtgaatatcaaacaacagcttaaccttgtctttaaagatctttgtatatttagggtttttcactc

SEQ ID NO: 41704 - protein, 261 aa, Arabidopsis thaliana
  peptide (1)..(261): Ceres Seq. ID no. 12395061
MNGLQEVCSSSGSVMIGLPAEEDENAAHSSEDSSCPDESVSETELDLALGLSIGRRKVRSSLSSSSSSLTRESGTKRSADSSPAAASNATRQVAVGWPPLRTYRINSLVNQAKSLATEGGLSSGIQKETTKSVVVAAKNDDACFIKSSRTSMLVKVTMDGVIIGRKVDLNALDSYAALEKTLDLMFFQIPSPVTRSNTQGYKTIKETCTSKLLDGSSEYIITYQDKDGDWMLVGDVPWQMFLGSVTRLRIMKTSIGAGVGK

SEQ ID NO: 41705 - protein, 247 aa, Arabidopsis thaliana
  peptide (1)..(247): Ceres Seq. ID no. 12395062
MIGLPAEEDENAAHSSEDSSCPDESVSETELDLALGLSIGRRKVRSSLSSSSSSLTRESGTKRSADSSPAAASNATRQVAVGWPPLRTYRINSLVNQAKSLATEGGLSSGIQKETTKSVVVAAKNDDACFIKSSRTSMLVKVTMDGVIIGRKVDLNALDSYAALEKTLDLMFFQIPSPVTRSNTQGYKTIKETCTSKLLDGSSEYIITYQDKDGDWMLVGDVPWQMFLGSVTRLRIMKTSIGAGVGK

SEQ ID NO: 41706 - DNA, 1575 bp, Arabidopsis thaliana
  misc_feature (1)..(1575): Ceres Seq. ID no. 12602778
  misc_feature (1)..(1575): Ortholog of  Ceres SEQ ID NO 14311938 as cited in SEQ ID NO 51615
  misc_feature (1)..(1575): Ortholog of  Ceres SEQ ID NO 14302059 as cited in SEQ ID NO 68322
acctagaacatcctaatcgaaaactcaacatttcctcatctcatctctctgatttcttgcttcgaattttgatttatctctctctgtctctctctcggtctcgtgctctatctcgtttgtaggcagtgccaatttcaccacttgtgttgtgtgtcagcggatatagaatctgagaggaatatttaaagattctccctttgcttcttcttttttataccgtttctattaatgtttcggactcttgcttccggcgaaatcgaaactgccagactgaaccgtaatttggggattacgtccaatttaggggtttcctgcggtggatttgaagactttgctatgagattcgaaggggaaaacatggtgccatacaaaggtgaagagcaggaggaggaagaagaccaagtggtggtgaacgaaacgacgccgttccagtttcaacaacctttgtttctgcagcagcagcagaagctcgttgttgggtatgctctgacttctaagaagaagaagagtttcttgcagcccaagcttgaacttcttgctaggagaaaaggcattttctttgtcgccatcgatttgaaccggcccctatctgaacaagggccatttgatgttgttttgcataagttgttgggaaaagagtgggaagaggttattgaggattaccaacaaaaacacccagaagtgactgtgcttgatcctccaggatcaatacagcgtatatataatcgacaatcgatgcttcagggtatggcagatttgaaactgtcagattgcagtggcagcctttttgttccaaagcaaatggttgtcttgaaagattcagcagctagtgctgatgcagttgtggaagctggtctcaaatttccactagttgcaaagccgctctggatcgatgggactccaaagtcacatcaattgtacttggcttatgacaggcgctcgcttgcagagcttgatccgcctttagtccttcaagagtttgttaatcatggtggagttatgttcaaggtatttgtggtgggtgatgttataaaagtcatgagacggttttctctaccaaatgtgagtaattgtgaaaaagccaaagttgatggcgtcttccaattcccaagggtttcatcagctgctgcttcagctgataacgcagacttggaccctcgtgttgctgagctacctccaaagcctttcctcgaggcgcttgtgaaagagctaagaagcttattgggacttcggcttttcaacatagacatgatcagggaacatgggagcaaaaacgtgttttatgttattgacatcaactattttcctggttacggaaaactgccagactacgagcaagtctttgtagatttcttccaaaatctggcgcaggtcaaatataagaagagacaacattgtaaatgaaagaaaatggcggcagtttttagatggtctactaagaagcgacaaataataaaatgtctaattatggatttgtacagaatttagctctcccttttggaagcagtatcagataaacaagttttgattactgattttgaattttcagttaaaaaaaaaaaaaaaaaatatcga

SEQ ID NO: 41707 - protein, 391 aa, Arabidopsis thaliana
  peptide (1)..(391): Ceres Seq. ID no. 12602779
MFRTLASGEIETARLNRNLGITSNLGVSCGGFEDFAMRFEGENMVPYKGEEQEEEEDQVVVNETTPFQFQQPLFLQQQQKLVVGYALTSKKKKSFLQPKLELLARRKGIFFVAIDLNRPLSEQGPFDVVLHKLLGKEWEEVIEDYQQKHPEVTVLDPPGSIQRIYNRQSMLQGMADLKLSDCSGSLFVPKQMVVLKDSAASADAVVEAGLKFPLVAKPLWIDGTPKSHQLYLAYDRRSLAELDPPLVLQEFVNHGGVMFKVFVVGDVIKVMRRFSLPNVSNCEKAKVDGVFQFPRVSSAAASADNADLDPRVAELPPKPFLEALVKELRSLLGLRLFNIDMIREHGSKNVFYVIDINYFPGYGKLPDYEQVFVDFFQNLAQVKYKKRQHCK

SEQ ID NO: 41708 - protein, 355 aa, Arabidopsis thaliana
  peptide (1)..(355): Ceres Seq. ID no. 12602780
MRFEGENMVPYKGEEQEEEEDQVVVNETTPFQFQQPLFLQQQQKLVVGYALTSKKKKSFLQPKLELLARRKGIFFVAIDLNRPLSEQGPFDVVLHKLLGKEWEEVIEDYQQKHPEVTVLDPPGSIQRIYNRQSMLQGMADLKLSDCSGSLFVPKQMVVLKDSAASADAVVEAGLKFPLVAKPLWIDGTPKSHQLYLAYDRRSLAELDPPLVLQEFVNHGGVMFKVFVVGDVIKVMRRFSLPNVSNCEKAKVDGVFQFPRVSSAAASADNADLDPRVAELPPKPFLEALVKELRSLLGLRLFNIDMIREHGSKNVFYVIDINYFPGYGKLPDYEQVFVDFFQNLAQVKYKKRQHCK

SEQ ID NO: 41709 - protein, 348 aa, Arabidopsis thaliana
  peptide (1)..(348): Ceres Seq. ID no. 12602781
MVPYKGEEQEEEEDQVVVNETTPFQFQQPLFLQQQQKLVVGYALTSKKKKSFLQPKLELLARRKGIFFVAIDLNRPLSEQGPFDVVLHKLLGKEWEEVIEDYQQKHPEVTVLDPPGSIQRIYNRQSMLQGMADLKLSDCSGSLFVPKQMVVLKDSAASADAVVEAGLKFPLVAKPLWIDGTPKSHQLYLAYDRRSLAELDPPLVLQEFVNHGGVMFKVFVVGDVIKVMRRFSLPNVSNCEKAKVDGVFQFPRVSSAAASADNADLDPRVAELPPKPFLEALVKELRSLLGLRLFNIDMIREHGSKNVFYVIDINYFPGYGKLPDYEQVFVDFFQNLAQVKYKKRQHCK

SEQ ID NO: 41710 - DNA, 1273 bp, Arabidopsis thaliana
  misc_feature (1)..(1273): Ceres Seq. ID no. 12421174
  misc_feature (1)..(1273): Ortholog of  Ceres SEQ ID NO 13594298 as cited in SEQ ID NO 57803
  misc_feature (1)..(1273): Ortholog of  Ceres SEQ ID NO 13503476 as cited in SEQ ID NO 61978
  misc_feature (1)..(1273): Ortholog of  Ceres SEQ ID NO 12578438 as cited in SEQ ID NO 62201
  misc_feature (1)..(1273): Ortholog of  Ceres SEQ ID NO 12617675 as cited in SEQ ID NO 64656
attcatttcatacatatttgtctctcttaaatgtgtttatttccccttttgtagtaaccactcaaaaggttttacttcactcaaaaatggctttgtctcttatctttctagctctcttagtgttgtgccctagtagtggtcacagccaacgttctccttcaccgggatactacccgagttcccgagtaccgacttcaccttttgatcgtgaattccgtactttatggggctctcaacaccaacgtagagagcaagacgttgtcactctttggctcgacaaatccactgggagtgggttcaagtctcttcgtccataccggtcgggctactttggtgcttccattaagctccaaccaggcttcactgctggagtggatacatccctctatctctcaaacaaccaagagcatcctggagaccacgatgaggtcgatatcgagtttctagggacaacgccagggaagccttattcccttcaaacgaatgtcttcgttaggggaagtggcgaccgaaatgtcattggaagagaaatgaaatttaccttgtggtttgaccctactcaagattttcaccattacgcaattttgtggaaccctaaccaaattgtattctttgtagacgatgtaccgatacgtacatataatagaaagaatgaagctatattccccacaagaccgatgtgggtttacggatcgatatgggatgcatcggactgggccacagaaaatggaaggatcaaagccgactatcgataccaaccatttgtggctaagtacaaaaactttaagctagcgggatgcacagcggatagctctagctcatgcagaccgccatcgcctgcacccatgcgcaaccgcgggttgagccggcagcagatggcggcattgacatgggcacagaggaacttcttggtctataactattgccatgatccgaaaagagaccatacccaaacaccagaatgttaaaacaaacaaacaaaagaaaggttataataattttattttgcattatcaaacatacatgaataattggaggtcttgtgacgggtccacactggaaactatattgaagcagttgagcgtccggtcctctatgatttgagattaaaaagaaaaggttttgtttttcaatactttgtaatgtttccatttggtatctttcttataattgtaatattgtgtgatcacatatattaatatctggtattgtattgttgtgtgaaccaaaaaagaaagaaaaagaatggaagttgttctttcgaaggtggctt

SEQ ID NO: 41711 - protein, 321 aa, Arabidopsis thaliana
  peptide (1)..(321): Ceres Seq. ID no. 12421175
SFHTYLSLLNVFISPFVVTTQKVLLHSKMALSLIFLALLVLCPSSGHSQRSPSPGYYPSSRVPTSPFDREFRTLWGSQHQRREQDVVTLWLDKSTGSGFKSLRPYRSGYFGASIKLQPGFTAGVDTSLYLSNNQEHPGDHDEVDIEFLGTTPGKPYSLQTNVFVRGSGDRNVIGREMKFTLWFDPTQDFHHYAILWNPNQIVFFVDDVPIRTYNRKNEAIFPTRPMWVYGSIWDASDWATENGRIKADYRYQPFVAKYKNFKLAGCTADSSSSCRPPSPAPMRNRGLSRQQMAALTWAQRNFLVYNYCHDPKRDHTQTPEC

SEQ ID NO: 41712 - protein, 293 aa, Arabidopsis thaliana
  peptide (1)..(293): Ceres Seq. ID no. 12421176
MALSLIFLALLVLCPSSGHSQRSPSPGYYPSSRVPTSPFDREFRTLWGSQHQRREQDVVTLWLDKSTGSGFKSLRPYRSGYFGASIKLQPGFTAGVDTSLYLSNNQEHPGDHDEVDIEFLGTTPGKPYSLQTNVFVRGSGDRNVIGREMKFTLWFDPTQDFHHYAILWNPNQIVFFVDDVPIRTYNRKNEAIFPTRPMWVYGSIWDASDWATENGRIKADYRYQPFVAKYKNFKLAGCTADSSSSCRPPSPAPMRNRGLSRQQMAALTWAQRNFLVYNYCHDPKRDHTQTPEC

SEQ ID NO: 41713 - DNA, 1027 bp, Arabidopsis thaliana
  misc_feature (1)..(1027): Ceres Seq. ID no. 13580388
  misc_feature (1)..(1027): Ortholog of  Ceres SEQ ID NO 12557497 as cited in SEQ ID NO 43
  misc_feature (1)..(1027): Ortholog of  Ceres SEQ ID NO 13600601 as cited in SEQ ID NO 497
  misc_feature (1)..(1027): Ortholog of  Ceres SEQ ID NO 13664283 as cited in SEQ ID NO 61283
  misc_feature (1)..(1027): Ortholog of  Ceres SEQ ID NO 12635513 as cited in SEQ ID NO 0
  misc_feature (1)..(1027): Ortholog of  Ceres SEQ ID NO 15179044 as cited in SEQ ID NO 0
  misc_feature (1)..(1027): Ortholog of  Ceres SEQ ID NO 15179333 as cited in SEQ ID NO 0
gattacacaacacacgttcgtttctttcttcttctaacacactctgagtcttgaaggtcaacaacgtcgagaataatggcatcatctctttgtgcttcttctgccatcgctgccatttcttctccaagtttcttgggctaagaaactgaggctgaagaagaagttgactgttccagctgtgtccaggccagatgcgtcggtgcgcgccgtcgcagctgatccagatagaccaatctggttcccgggaagcactcctccagagtggctagacggtagcctccctggtgacttcggatttgatcctcttggtctttcatcggacccggacagtctaaaatggaacgtacaagccgagatagtccactgccgatgggctatgctaggagccgccgggatattcatcccagagttcctaacgaagatcggaatcctcaacactccgtcatggtacacggcgggagagcaagagtatttcacggacaaaaccacactctttgtcgttgagctcatcttgatcggatgggcagaaggacgtagatgggccgatatcatcaagcccggtagcgtcaacactgacccagtcttcccaaacaacaaactgacgggcacagacgttggttacccaggtgggttatggttcgacccgttgggttggggatccggtagcccggctaaactcaaggagttgaggaccaaggagatcaagaacggaaggttggctatgttggcagtgatgggtgcttggttccaacacatctacacgggcactggtcctattgataacctttttgcacatcttgctgatcctggtcacgccacaatcttcgctgctttcacacccaagtgagacaacgaaaaagggttatggggaggtgaatgcgtttgtgtgtgatcatgtttgtacaaatatcattttgaacttaaaattattatgtactttatataaattgtggtcgaatgcaaattaaggttccccgtaacactctcttttcctaactcaatgatcataagatgcttttacattgtc

SEQ ID NO: 41714 - protein, 156 aa, Arabidopsis thaliana
  peptide (1)..(156): Ceres Seq. ID no. 13580389
MLGAAGIFIPEFLTKIGILNTPSWYTAGEQEYFTDKTTLFVVELILIGWAEGRRWADIIKPGSVNTDPVFPNNKLTGTDVGYPGGLWFDPLGWGSGSPAKLKELRTKEIKNGRLAMLAVMGAWFQHIYTGTGPIDNLFAHLADPGHATIFAAFTPK

SEQ ID NO: 41715 - DNA, 954 bp, Arabidopsis thaliana
  misc_feature (1)..(954): Ceres Seq. ID no. 12370854
  misc_feature (1)..(954): Ortholog of  Ceres SEQ ID NO 15174410 as cited in SEQ ID NO 0
acatttccttttaaattaaattgcgttaatttctcacttccctttacttcttcttcttcaccatcacaaacatcttcgtctcttgaagattccaaaaaaaacaaatcaaaagctatgcaagatccatcacgacccgctacaggttacccatacccatacccatacccgaatccacaacaacaacaaccacccaccaacgggtacccaaaccccgccgccggaaccgcttacccctaccaaaaccacaacccatactacgcgccacaaccaaacccacgcgccgtcataatccgccgtctcttcatcgtcttcacaacattcctcctactcctaggtctaatcctcttcatcttcttcctaatcgttcgtcctcaactaccagacgttaacctaaactcactctccgtctccaatttcaatgtctccaacaatcaagtctctggtaaatgggatcttcaactccaatttcgaaaccctaattcaaagatgtcacttcactacgagactgctctttgcgctatgtattacaatcgtgtctctctatccgagactaggttacaaccgtttgatcaagggaagaaagatcaaacggtggttaatgcgactctctctgtttctggtacttatgttgatggacgtttggttgattctattggtaaagagagaagtgttaaaggaaatgttgagtttgatttgaggatgatttcttatgttacgtttcgatacggtgcgtttcggaggaggagatatgttactgtgtattgtgatgatgttgctgttggtgttccggtgagtagtggtgaagggaagatggttggttcgtctaagagatgcaaaacttattgagttttagggatattatctttgactaatcttttgtaaatcgactatgtgttgttgattgattagtactattggtgatgataattgcaatgagaatagattgctactgtt

SEQ ID NO: 41716 - protein, 281 aa, Arabidopsis thaliana
  peptide (1)..(281): Ceres Seq. ID no. 12370855
TFPFKLNCVNFSLPFTSSSSPSQTSSSLEDSKKNKSKAMQDPSRPATGYPYPYPYPNPQQQQPPTNGYPNPAAGTAYPYQNHNPYYAPQPNPRAVIIRRLFIVFTTFLLLLGLILFIFFLIVRPQLPDVNLNSLSVSNFNVSNNQVSGKWDLQLQFRNPNSKMSLHYETALCAMYYNRVSLSETRLQPFDQGKKDQTVVNATLSVSGTYVDGRLVDSIGKERSVKGNVEFDLRMISYVTFRYGAFRRRRYVTVYCDDVAVGVPVSSGEGKMVGSSKRCKTY

SEQ ID NO: 41717 - protein, 243 aa, Arabidopsis thaliana
  peptide (1)..(243): Ceres Seq. ID no. 12370856
MQDPSRPATGYPYPYPYPNPQQQQPPTNGYPNPAAGTAYPYQNHNPYYAPQPNPRAVIIRRLFIVFTTFLLLLGLILFIFFLIVRPQLPDVNLNSLSVSNFNVSNNQVSGKWDLQLQFRNPNSKMSLHYETALCAMYYNRVSLSETRLQPFDQGKKDQTVVNATLSVSGTYVDGRLVDSIGKERSVKGNVEFDLRMISYVTFRYGAFRRRRYVTVYCDDVAVGVPVSSGEGKMVGSSKRCKTY

SEQ ID NO: 41718 - DNA, 1004 bp, Arabidopsis thaliana
  misc_feature (1)..(1004): Ceres Seq. ID no. 13488041
  misc_feature (1)..(1004): Ortholog of  Ceres SEQ ID NO 13599613 as cited in SEQ ID NO 0
  misc_feature (1)..(1004): Ortholog of  Ceres SEQ ID NO 15179570 as cited in SEQ ID NO 0
attacagccatacagaaatatcacactaactacaaaagatagtgcaaggaatgtgatgtacgagaagaggattaaagatgagtgagcatcattttgtgtttgtgcatggtgcagggcatggaggatggtgttggtacaagctggctaattcactgagggataatggacataaggctacatgtatagacctcaagggtgctggtatcaacccaactgatccaaacactgtctcttctttggatgactacgacgagcctctctatgccttcctctcccaacttcccaacgatcaaaaggtcattcttgtgagccacagcgttggaggagggagcatgacggctgccatgtgcctctttccttccaaagtttccttggcggtttacgtcgcagcagccatggtcaaacctggtaccttgattcctgaaagactcaaaaatgtaatgaagatatgttcaggattgatagaggaggaaactgagaagatatgggactttactttcggaaatggaccacaaaatctcccaacaagcatcatgatgaaacctgagtatgttcgggacaagttttacaacgagagccccatggaggattacacactggcaaccacacttctgcgtccggcccctgtcatggcattcataggcataatggatattccgggagctccagagactgacaaaatcccaagagtgtacgtgaagacaggcaaggaccatttgttcgaaccagttcttcaagaggtaatgttggccctgtggcctcctgctcacaccttccttcttccggacagtgaccactctgcttttttctcccaacctcaagaactctatcaattcctccttcaagcagcctcatctctttctccctgatatttatgtctctctggaactcttttaaatccatcttttggatacttacttagcttgcataaaactgaatcatattcatatatattatgagatacagaaaaaggagcctacaataataattgctatgtaaatgtt

SEQ ID NO: 41719 - protein, 263 aa, Arabidopsis thaliana
  peptide (1)..(263): Ceres Seq. ID no. 13488042
MSEHHFVFVHGAGHGGWCWYKLANSLRDNGHKATCIDLKGAGINPTDPNTVSSLDDYDEPLYAFLSQLPNDQKVILVSHSVGGGSMTAAMCLFPSKVSLAVYVAAAMVKPGTLIPERLKNVMKICSGLIEEETEKIWDFTFGNGPQNLPTSIMMKPEYVRDKFYNESPMEDYTLATTLLRPAPVMAFIGIMDIPGAPETDKIPRVYVKTGKDHLFEPVLQEVMLALWPPAHTFLLPDSDHSAFFSQPQELYQFLLQAASSLSP

SEQ ID NO: 41720 - protein, 178 aa, Arabidopsis thaliana
  peptide (1)..(178): Ceres Seq. ID no. 13488043
MTAAMCLFPSKVSLAVYVAAAMVKPGTLIPERLKNVMKICSGLIEEETEKIWDFTFGNGPQNLPTSIMMKPEYVRDKFYNESPMEDYTLATTLLRPAPVMAFIGIMDIPGAPETDKIPRVYVKTGKDHLFEPVLQEVMLALWPPAHTFLLPDSDHSAFFSQPQELYQFLLQAASSLSP

SEQ ID NO: 41721 - protein, 174 aa, Arabidopsis thaliana
  peptide (1)..(174): Ceres Seq. ID no. 13488044
MCLFPSKVSLAVYVAAAMVKPGTLIPERLKNVMKICSGLIEEETEKIWDFTFGNGPQNLPTSIMMKPEYVRDKFYNESPMEDYTLATTLLRPAPVMAFIGIMDIPGAPETDKIPRVYVKTGKDHLFEPVLQEVMLALWPPAHTFLLPDSDHSAFFSQPQELYQFLLQAASSLSP

SEQ ID NO: 41722 - DNA, 769 bp, Arabidopsis thaliana
  misc_feature (1)..(769): Ceres Seq. ID no. 12559300
  misc_feature (1)..(769): Ortholog of  Ceres SEQ ID NO 13589868 as cited in SEQ ID NO 55521
  misc_feature (1)..(769): Ortholog of  Ceres SEQ ID NO 14312250 as cited in SEQ ID NO 59168
  misc_feature (1)..(769): Ortholog of  Ceres SEQ ID NO 15173326 as cited in SEQ ID NO 63793
  misc_feature (1)..(769): Ortholog of  Ceres SEQ ID NO 12617659 as cited in SEQ ID NO 65286
  misc_feature (1)..(769): Ortholog of  Ceres SEQ ID NO 12780566 as cited in SEQ ID NO 65822
  misc_feature (1)..(769): Ortholog of  Ceres SEQ ID NO 15179979 as cited in SEQ ID NO 0
gaagaagaaaagatctgagaggtggtcgaatgatccaagagaagaagaacaatctctcttagatcgtttgatctgatccaatcgaagaagaagaagaagatgggaatcttgttcacgcggatgttctcttccgtctttggtaacaaagaagctcgaatcctcgtcctcggtctcgacaatgctggaaaaaccacaatcctctatcggcttcagatgggggaagttgtctctacgattccgactattggatttaacgttgagactgtgcagtacaacaatatcaagtttcaggtctgggatttaggtggacaaacaagcatcaggccatactggcgatgctatttcccgaatacacaagcagtgatctatgttgttgactcgagtgatacagatagaatcggggtggcgaaagaggagtttcatgcaattttagaggaagatgaattgaaaggtgcggtggttctgatatttgcaaacaagcagaagccttggagttgcataagataaagagtcgtcaatgggcaatcttcaaaacttgtgctgtgaaaggcgagggacttttcgagggattggactggttgagtaatacattggaagtcgggaagtggctaaaaatcatcgtcatacaccaatctgtcacatttctcaagagtgtaactttgatcatttttacttattggtttgtttagtatttttttttgtcttagttcttcatcttaaagagttaatatcaatgacatgttcacttaatattctctttttgttgttt

SEQ ID NO: 41723 - protein, 135 aa, Arabidopsis thaliana
  peptide (1)..(135): Ceres Seq. ID no. 12559301
MGILFTRMFSSVFGNKEARILVLGLDNAGKTTILYRLQMGEVVSTIPTIGFNVETVQYNNIKFQVWDLGGQTSIRPYWRCYFPNTQAVIYVVDSSDTDRIGVAKEEFHAILEEDELKGAVVLIFANKQKPWSCIR

SEQ ID NO: 41724 - protein, 128 aa, Arabidopsis thaliana
  peptide (1)..(128): Ceres Seq. ID no. 12559302
MFSSVFGNKEARILVLGLDNAGKTTILYRLQMGEVVSTIPTIGFNVETVQYNNIKFQVWDLGGQTSIRPYWRCYFPNTQAVIYVVDSSDTDRIGVAKEEFHAILEEDELKGAVVLIFANKQKPWSCIR

SEQ ID NO: 41725 - protein, 97 aa, Arabidopsis thaliana
  peptide (1)..(97): Ceres Seq. ID no. 12559303
MGEVVSTIPTIGFNVETVQYNNIKFQVWDLGGQTSIRPYWRCYFPNTQAVIYVVDSSDTDRIGVAKEEFHAILEEDELKGAVVLIFANKQKPWSCIR

SEQ ID NO: 41726 - DNA, 936 bp, Arabidopsis thaliana
  misc_feature (1)..(936): Ceres Seq. ID no. 13575113
  misc_feature (1)..(936): Ortholog of  Ceres SEQ ID NO 15170627 as cited in SEQ ID NO 52703
  misc_feature (1)..(936): Ortholog of  Ceres SEQ ID NO 13655124 as cited in SEQ ID NO 62896
  misc_feature (1)..(936): Ortholog of  Ceres SEQ ID NO 13597493 as cited in SEQ ID NO 64613
  misc_feature (1)..(936): Ortholog of  Ceres SEQ ID NO 14313540 as cited in SEQ ID NO 68110
  misc_feature (1)..(936): Ortholog of  Ceres SEQ ID NO 13596175 as cited in SEQ ID NO 68297
acatttcgtttgaaacattcttgtctgaactaaaacctagaaaaaatggctgaggaatcaccaagatatgctatagttactggagggaatagaggaattggatttgagatatgcagacaattagcaaacaaagggattagggttattttgacatctagagatgagaaacaagggcttgaagctgttgagacattgaagaaagagcttgagatttctgatcaaagcattgtctttcatcagcttgatgtctctgatcctgttagtgtcacttctcttgctgagtttgtgaaaacccatttcggaaaactcgatatcttgatcaataatgctggggttggtggtgtaatcactgatgttgatgctttaagagctgggacagggaaagaaggtttcaagtgggaggaaactatcactgagacttatgagctagctgaggaatgcataaagattaactattatggaccaaagagaatgtgtgaggcgtttattccacttttgcagttatctgattctccaagaatcattaacgtatcatccttcatgggtcaagtaaagaatttagtaaacgaatgggcaaaagggatcctgagtgacgcagagaatctaacggaggtaagaattgaccaagtgatcaaccaacttctcaatgatctgaaagaagatacggctaagacaaaatattgggctaaagtcatgtcggcttacgttgtttcgaaagccggtttgaatgcttacacgaggatcttagcgaagaaacatcccgagattcgcgttaactcggtttgtcctggatttgttaagactgatatgaattttaaaactggaattttatctgtggaagaaggagcatcaagtcctgtgaggttagctttgcttccacatcaagaatctccttctggttgcttctttgatcgcaaacaagtttcagagttctga

SEQ ID NO: 41727 - protein, 296 aa, Arabidopsis thaliana
  peptide (1)..(296): Ceres Seq. ID no. 13575114
MAEESPRYAIVTGGNRGIGFEICRQLANKGIRVILTSRDEKQGLEAVETLKKELEISDQSIVFHQLDVSDPVSVTSLAEFVKTHFGKLDILINNAGVGGVITDVDALRAGTGKEGFKWEETITETYELAEECIKINYYGPKRMCEAFIPLLQLSDSPRIINVSSFMGQVKNLVNEWAKGILSDAENLTEVRIDQVINQLLNDLKEDTAKTKYWAKVMSAYVVSKAGLNAYTRILAKKHPEIRVNSVCPGFVKTDMNFKTGILSVEEGASSPVRLALLPHQESPSGCFFDRKQVSEF

SEQ ID NO: 41728 - protein, 154 aa, Arabidopsis thaliana
  peptide (1)..(154): Ceres Seq. ID no. 13575115
MCEAFIPLLQLSDSPRIINVSSFMGQVKNLVNEWAKGILSDAENLTEVRIDQVINQLLNDLKEDTAKTKYWAKVMSAYVVSKAGLNAYTRILAKKHPEIRVNSVCPGFVKTDMNFKTGILSVEEGASSPVRLALLPHQESPSGCFFDRKQVSEF

SEQ ID NO: 41729 - DNA, 1396 bp, Arabidopsis thaliana
  misc_feature (1)..(1396): Ceres Seq. ID no. 13491738
  misc_feature (1)..(1396): Ortholog of  Ceres SEQ ID NO 12618563 as cited in SEQ ID NO 65025
gtttccgaaacgttgggctttgcttagctgcgacattttcagtgaacgaagaaaaccacggtagtagactagtagttgtagaaaaaaacaaaacgaaatcgaagaagaagagaggaaggatgaagaagatcccggtgcttctcatgggctgcggaggcgttggccgccaccttcttcaacacatcgtctcttgccgatcgcttcacgccaaaatgggagttcatatacgggtgattggagtatgtgatagtaaatccttagttgctccaatggatgtgctcaaagaggaactgaatgatgaactcttgtcagaagtttgccttatcaaatcaactggttctgcattatcgaagttgggtgctttgggtggatatcgagtcgtccatgattccgagttaagcacggaaacagaagagattgcaaaacttcttggtaaatctacaggcttagctgtggtggattgctcagccagcatggagacgattgaaatattgatgaaggcagttgacttgggttgctgtattgtcctggcaaataagaagcctgttacttcaacgctggaacattacgacaaattggctttgcatccgcgattcatccgccatgaatctactgttggtgctggtcttcctgtcatcgcatccttgaaccgcataatttcgtctggagatcctgttcataggattgtcggtagtttgagcggtaccttgggatatgtaatgagtgagcttgaagatggcaagcctctaagccaagttgttcaagctgccaaaaagctggggtacactgaaccagatccacgtgacgacctcggtggcatggatgttgctagaaagggtttgattcttgctcgacttcttgggaagaggataattatggacagcattaagatagagagcttgtatccagaagagatgggacctggactcatgtctgtggatgatttcctccataatggaatagtaaaacttgatcagaatatagaggagagagttaaaaaagcttcatcaaaagggtgtgtgcttcgttatgtctgtgtgattgagggttcaagcgttcaagttggcattcgagaagtttcaaaagattcaccattgggacggctaagaggcagtgacaatatagtagagatatatagccgttgctacaaggagcagcctttggtgattcaaggtgccggagccgggaacgacacaactgcagccggtgttcttgcagacatcatcgacttgcaggatctttttcactgagaggaggctgtggtatttagtttttatcaaaataataataacacaattcataattgatctcttctctgatcttgtcaaggcagaaaattagccaacaagaacgtggcctctccttaacattaccaaaaagagattttttttttttc

SEQ ID NO: 41730 - protein, 415 aa, Arabidopsis thaliana
  peptide (1)..(415): Ceres Seq. ID no. 13491739
FRNVGLCLAATFSVNEENHGSRLVVVEKNKTKSKKKRGRMKKIPVLLMGCGGVGRHLLQHIVSCRSLHAKMGVHIRVIGVCDSKSLVAPMDVLKEELNDELLSEVCLIKSTGSALSKLGALGGYRVVHDSELSTETEEIAKLLGKSTGLAVVDCSASMETIEILMKAVDLGCCIVLANKKPVTSTLEHYDKLALHPRFIRHESTVGAGLPVIASLNRIISSGDPVHRIVGSLSGTLGYVMSELEDGKPLSQVVQAAKKLGYTEPDPRDDLGGMDVARKGLILARLLGKRIIMDSIKIESLYPEEMGPGLMSVDDFLHNGIVKLDQNIEERVKKASSKGCVLRYVCVIEGSSVQVGIREVSKDSPLGRLRGSDNIVEIYSRCYKEQPLVIQGAGAGNDTTAAGVLADIIDLQDLFH

SEQ ID NO: 41731 - protein, 376 aa, Arabidopsis thaliana
  peptide (1)..(376): Ceres Seq. ID no. 13491740
MKKIPVLLMGCGGVGRHLLQHIVSCRSLHAKMGVHIRVIGVCDSKSLVAPMDVLKEELNDELLSEVCLIKSTGSALSKLGALGGYRVVHDSELSTETEEIAKLLGKSTGLAVVDCSASMETIEILMKAVDLGCCIVLANKKPVTSTLEHYDKLALHPRFIRHESTVGAGLPVIASLNRIISSGDPVHRIVGSLSGTLGYVMSELEDGKPLSQVVQAAKKLGYTEPDPRDDLGGMDVARKGLILARLLGKRIIMDSIKIESLYPEEMGPGLMSVDDFLHNGIVKLDQNIEERVKKASSKGCVLRYVCVIEGSSVQVGIREVSKDSPLGRLRGSDNIVEIYSRCYKEQPLVIQGAGAGNDTTAAGVLADIIDLQDLFH

SEQ ID NO: 41732 - protein, 368 aa, Arabidopsis thaliana
  peptide (1)..(368): Ceres Seq. ID no. 13491741
MGCGGVGRHLLQHIVSCRSLHAKMGVHIRVIGVCDSKSLVAPMDVLKEELNDELLSEVCLIKSTGSALSKLGALGGYRVVHDSELSTETEEIAKLLGKSTGLAVVDCSASMETIEILMKAVDLGCCIVLANKKPVTSTLEHYDKLALHPRFIRHESTVGAGLPVIASLNRIISSGDPVHRIVGSLSGTLGYVMSELEDGKPLSQVVQAAKKLGYTEPDPRDDLGGMDVARKGLILARLLGKRIIMDSIKIESLYPEEMGPGLMSVDDFLHNGIVKLDQNIEERVKKASSKGCVLRYVCVIEGSSVQVGIREVSKDSPLGRLRGSDNIVEIYSRCYKEQPLVIQGAGAGNDTTAAGVLADIIDLQDLFH

SEQ ID NO: 41733 - DNA, 1455 bp, Arabidopsis thaliana
  misc_feature (1)..(1455): Ceres Seq. ID no. 12348463
  misc_feature (1)..(1455): Ortholog of  Ceres SEQ ID NO 14308430 as cited in SEQ ID NO 55350
  misc_feature (1)..(1455): Ortholog of  Ceres SEQ ID NO 15177799 as cited in SEQ ID NO 59221
  misc_feature (1)..(1455): Ortholog of  Ceres SEQ ID NO 13662846 as cited in SEQ ID NO 65519
aataaacaatcaaaaagagaaaaaaagaaagaaggtctgtgagatcccaattacaatttcgcaaggctttttgcaatttccatctgtcgctcaccggaggaattagaacgtgctccgaatctcttctcttccccaaatagattccgatcgattacgcaaccaaattctcggcgtttgaatttttttttccggagaacaggtggtttcttcttctccaggaagatttttgattcttctgtcggatgatttctcagtgaaaatcatggaatcggtatcatcacgcggcggagaccccgtcgtaaaaccgtcgatggaggtctggcatttccagattgctgtctatttcgctttcggattcttcttcttgaggcttgtcctcgatagatacgtctttcaaaggatagctctttggcttttgagtactggttctgctccgattaaattgaatgatgctgctactcgggcaaaaatcgtcaaatgcaaagagtccttgtggaaattgttgtattatgctgcttgtgactttttcgttctacaagtcatttatcacgagccgtgggctagagatatcaaactctacttccacggttggcctaatcaagagttgaagctttcaataaagctttactatatgtgccagtgcggtttttatgtgtatggtgtggctgcgttgcttgcatgggagacaagaagaaaggattttgctgtcatgatgtctcaccatgtaattacaatcatcctgcttagctactcctacttaaccagttttttccggattggagcaatcatcctagcccttcatgatgcaagtgatgtctttatggaaactgctaaaattttcaagtactctgaaaaagaatttggagcaagtgtatgttttgcattatttgctgtctcctggctattgctacggttgatatacttcccattttggatcatcagggccacgagcattgaactcctggattatttggatatgacatcagctgaaggcacattgatgtactattctttcaacactatgttactaatgctgcttgttttccacatatattggtggtatctcatttgtgccatgattgtaagactacttaaaaacagaggaaaagttggagaagacataagatccgattcagaggatgatgatgattagtcttgtaagatacggaacatgtttccacttctccaaccaaaccatttagctgctgaagaatttgttttcagcttcattaccttactgactagcgttggaggtaaacaaaaaaaagaagaaaaggttatagattttttttcagttttgtattggtctgagtccatttcgacattagactgcatattctctttgacatataagaaaaaaaaaacagaaactctgggtttcttgtgttgttcggtgatgtataaaacaatattggaagtctctctgtaaatgcaattcctcattgtatggttttc

SEQ ID NO: 41734 - protein, 296 aa, Arabidopsis thaliana
  peptide (1)..(296): Ceres Seq. ID no. 12348464
MESVSSRGGDPVVKPSMEVWHFQIAVYFAFGFFFLRLVLDRYVFQRIALWLLSTGSAPIKLNDAATRAKIVKCKESLWKLLYYAACDFFVLQVIYHEPWARDIKLYFHGWPNQELKLSIKLYYMCQCGFYVYGVAALLAWETRRKDFAVMMSHHVITIILLSYSYLTSFFRIGAIILALHDASDVFMETAKIFKYSEKEFGASVCFALFAVSWLLLRLIYFPFWIIRATSIELLDYLDMTSAEGTLMYYSFNTMLLMLLVFHIYWWYLICAMIVRLLKNRGKVGEDIRSDSEDDDD

SEQ ID NO: 41735 - protein, 280 aa, Arabidopsis thaliana
  peptide (1)..(280): Ceres Seq. ID no. 12348465
MEVWHFQIAVYFAFGFFFLRLVLDRYVFQRIALWLLSTGSAPIKLNDAATRAKIVKCKESLWKLLYYAACDFFVLQVIYHEPWARDIKLYFHGWPNQELKLSIKLYYMCQCGFYVYGVAALLAWETRRKDFAVMMSHHVITIILLSYSYLTSFFRIGAIILALHDASDVFMETAKIFKYSEKEFGASVCFALFAVSWLLLRLIYFPFWIIRATSIELLDYLDMTSAEGTLMYYSFNTMLLMLLVFHIYWWYLICAMIVRLLKNRGKVGEDIRSDSEDDDD

SEQ ID NO: 41736 - protein, 173 aa, Arabidopsis thaliana
  peptide (1)..(173): Ceres Seq. ID no. 12348466
MCQCGFYVYGVAALLAWETRRKDFAVMMSHHVITIILLSYSYLTSFFRIGAIILALHDASDVFMETAKIFKYSEKEFGASVCFALFAVSWLLLRLIYFPFWIIRATSIELLDYLDMTSAEGTLMYYSFNTMLLMLLVFHIYWWYLICAMIVRLLKNRGKVGEDIRSDSEDDDD

SEQ ID NO: 41737 - DNA, 1793 bp, Arabidopsis thaliana
  misc_feature (1)..(1793): Ceres Seq. ID no. 12327929
  misc_feature (1)..(1793): Ortholog of  Ceres SEQ ID NO 15176959 as cited in SEQ ID NO 52610
  misc_feature (1)..(1793): Ortholog of  Ceres SEQ ID NO 15176571 as cited in SEQ ID NO 54430
aaaagagtctttgtcattgtcttccttcttcttcctttttctctccccccccattatcttcggcgaatcatgaatctagggttttgttttctcccataaccctagattttcttccatcaatcttatatttttctcatttcttcttctccgttttagctcatctcccgattcatctcgatttccatggagggagcgggagagacgacgacgtcggaggggcatttgacttcggcagcagcttttgtggaagggggaattcaagatgcttgtgatgatgcttgtagcatttgtcttgaatccttctgcgaaagcgatccttctactttgactagttgcaagcatgagtatcatcttcaatgcattcttgagtggtgtcaaagaagctcacagtgccctatgtgttggcaatcaattagtctcaaagaccccacaagtcaggagttgcttgaggctgtggaacaggagaggaatttccgcttcaatccaactagaaatgccaccatatttcgtcatccaactcttggtgattttgaattacaacatcttccagtgggggtggataatgctgagattgaagaacgaatcattcagcacttggctgctgctgctgctatgggacgagcaagacatggggtaagaagggaaggccacagaagcaggtcgtcaagtcaaggacatcaacagttcatggtgttctcttcgcaacctaatgcttcttctcctccacctcatcctcccatgccttcttctccatctcagagagatgagagtgacacagtgtcaaaccttcctcacaatgctttaggggagggttctcatcagtcaaacacgcagccaccaacttcttctcatccccgccaggtttctccctcagcatctgattcaaacagcaggcctcttaatcaatcttccccaagtgaacaagatagagctggaccatcagaactccagtcattttcggaatcacttaagtctcgattaaacgctgtctccacgagatacaaagaatcgatatcaaagaatacaaggaactggaaagatagacttttttctcgcaacacgtccatggcagatcttggctctgaggttaaaagagaggtcagtgccggaatcgccactgtgtcccgcatgatggaacgtttagaaacgagagaaaacagtagacccagcactgcatctgtatcagatgtctctgaaaatcacactcctgaaacaaacaatgagcacaatagagcagcagcgggtgatgaacattctgtgaatgaaagaggtgttaaagaaacatgtgcgactggttctggttcaagctaataagtgagtgccagcatcttgttggcaaagagagaggaagatgttgtccattgtgaaattctgataatatatatatacagagtcagaagtctcaaaagtgtggagcataggaagaaggttattattgataaagaaaaagagttttccgattatcaataaataagaaaagttatatatatgaccaaaaggaggccttaaagacgcctctttctgtgttatgtcaaacaaacaaaaaaaaaactaaagagaaaaattagagtaaaagacctgtgtggggttgttggttatttggtcggtctgttgtaaattcacattgtcgttcacattacggatttctatgaatttctacttatgtatcttcaaaaacttggtctagcaaaaccaatttaatgtatcgattccagtgtactatagttatgatggtgtcgtgtgacttctgtcgaacaaacaaaattatggtgcttaataatggttttcgattt

SEQ ID NO: 41738 - protein, 375 aa, Arabidopsis thaliana
  peptide (1)..(375): Ceres Seq. ID no. 12327930
MEGAGETTTSEGHLTSAAAFVEGGIQDACDDACSICLESFCESDPSTLTSCKHEYHLQCILEWCQRSSQCPMCWQSISLKDPTSQELLEAVEQERNFRFNPTRNATIFRHPTLGDFELQHLPVGVDNAEIEERIIQHLAAAAAMGRARHGVRREGHRSRSSSQGHQQFMVFSSQPNASSPPPHPPMPSSPSQRDESDTVSNLPHNALGEGSHQSNTQPPTSSHPRQVSPSASDSNSRPLNQSSPSEQDRAGPSELQSFSESLKSRLNAVSTRYKESISKNTRNWKDRLFSRNTSMADLGSEVKREVSAGIATVSRMMERLETRENSRPSTASVSDVSENHTPETNNEHNRAAAGDEHSVNERGVKETCATGSGSS

SEQ ID NO: 41739 - protein, 304 aa, Arabidopsis thaliana
  peptide (1)..(304): Ceres Seq. ID no. 12327931
MCWQSISLKDPTSQELLEAVEQERNFRFNPTRNATIFRHPTLGDFELQHLPVGVDNAEIEERIIQHLAAAAAMGRARHGVRREGHRSRSSSQGHQQFMVFSSQPNASSPPPHPPMPSSPSQRDESDTVSNLPHNALGEGSHQSNTQPPTSSHPRQVSPSASDSNSRPLNQSSPSEQDRAGPSELQSFSESLKSRLNAVSTRYKESISKNTRNWKDRLFSRNTSMADLGSEVKREVSAGIATVSRMMERLETRENSRPSTASVSDVSENHTPETNNEHNRAAAGDEHSVNERGVKETCATGSGSS

SEQ ID NO: 41740 - protein, 232 aa, Arabidopsis thaliana
  peptide (1)..(232): Ceres Seq. ID no. 12327932
MGRARHGVRREGHRSRSSSQGHQQFMVFSSQPNASSPPPHPPMPSSPSQRDESDTVSNLPHNALGEGSHQSNTQPPTSSHPRQVSPSASDSNSRPLNQSSPSEQDRAGPSELQSFSESLKSRLNAVSTRYKESISKNTRNWKDRLFSRNTSMADLGSEVKREVSAGIATVSRMMERLETRENSRPSTASVSDVSENHTPETNNEHNRAAAGDEHSVNERGVKETCATGSGSS

SEQ ID NO: 41741 - DNA, 1253 bp, Arabidopsis thaliana
  misc_feature (1)..(1253): Ceres Seq. ID no. 12348467
  misc_feature (1)..(1253): Ortholog of  Ceres SEQ ID NO 15178173 as cited in SEQ ID NO 54139
  misc_feature (1)..(1253): Ortholog of  Ceres SEQ ID NO 14304136 as cited in SEQ ID NO 59024
aactttgtccatcccaattctctctttttttttttttttgtttccctaatgttttagacaaacacaattttccataattatttatttattcaatttttatctgtttttgggttacatatatcatcatcatcggagactgccatatttgttaatcgtgatattaatttaactaatgtctcaaacaagctactaccgatcaccgttcggagacacgacttacaccaaagtgttcgtcggaggattagcgtgggaaactcctaccgacgaaatgcgtcgttacttcgaacagttcggagagattcttgaagccgtcatcatcaccgataaaaacaccggcaagtctaaaggctacggattcgtgacgtttcgggagtcggactcagccacgagagccgtcgctgatccaaatccggtgatcgacggaagaaaagccaattgtaatattgcatcttttggacggcctcgaccatcgccgcctcgaggtcgaggacaaacaggaagtccgagtcagtaccaaagtggaggaccatcaacctataccgggatggctgcaccactgccaccggctgcagctccccagctcatgtatccgtcatacgggtacacctataaccctgatcaatttgggtaccaccaagcattgtacaacacacagttgcaacaagcacaatactatcagcagcagcaacagctttatggaggaggagcaacatcaccatcatcatcaggagcaaccatcatgccttctccatactattatggctattctcttcaagctcctagagtaccataccaacaccatcatcatcttcctcaaccatataatcctcaacaacatcatcatcaacggttttcttctccttctttcctcgtttacccatccaattcctcttttgcccctcctctccaaggagtactatcttcttccaccgaatctgaagcagtaccacaacaagtaccagctgcagaaggcgaagcaacaacgactgctcctgaaatcacaacaagcaacaccaaagaacctatttcttcttgatctctctctcatttcccaatttgtacaatcttcacatttttacctctctctctctgaaaaaaagaaaacagctaattcatttatttctcaaccagagcaatgacttgagccccaagaagacagactcaacactgtcaaacttaaaaagacggctcaagataaatctcttgtcatattttgctctttttctgacggaatatatataaaaattagagcc

SEQ ID NO: 41742 - protein, 287 aa, Arabidopsis thaliana
  peptide (1)..(287): Ceres Seq. ID no. 12348468
MSQTSYYRSPFGDTTYTKVFVGGLAWETPTDEMRRYFEQFGEILEAVIITDKNTGKSKGYGFVTFRESDSATRAVADPNPVIDGRKANCNIASFGRPRPSPPRGRGQTGSPSQYQSGGPSTYTGMAAPLPPAAAPQLMYPSYGYTYNPDQFGYHQALYNTQLQQAQYYQQQQQLYGGGATSPSSSGATIMPSPYYYGYSLQAPRVPYQHHHHLPQPYNPQQHHHQRFSSPSFLVYPSNSSFAPPLQGVLSSSTESEAVPQQVPAAEGEATTTAPEITTSNTKEPISS

SEQ ID NO: 41743 - protein, 255 aa, Arabidopsis thaliana
  peptide (1)..(255): Ceres Seq. ID no. 12348469
MRRYFEQFGEILEAVIITDKNTGKSKGYGFVTFRESDSATRAVADPNPVIDGRKANCNIASFGRPRPSPPRGRGQTGSPSQYQSGGPSTYTGMAAPLPPAAAPQLMYPSYGYTYNPDQFGYHQALYNTQLQQAQYYQQQQQLYGGGATSPSSSGATIMPSPYYYGYSLQAPRVPYQHHHHLPQPYNPQQHHHQRFSSPSFLVYPSNSSFAPPLQGVLSSSTESEAVPQQVPAAEGEATTTAPEITTSNTKEPISS

SEQ ID NO: 41744 - protein, 163 aa, Arabidopsis thaliana
  peptide (1)..(163): Ceres Seq. ID no. 12348470
MAAPLPPAAAPQLMYPSYGYTYNPDQFGYHQALYNTQLQQAQYYQQQQQLYGGGATSPSSSGATIMPSPYYYGYSLQAPRVPYQHHHHLPQPYNPQQHHHQRFSSPSFLVYPSNSSFAPPLQGVLSSSTESEAVPQQVPAAEGEATTTAPEITTSNTKEPISS

SEQ ID NO: 41745 - DNA, 1736 bp, Arabidopsis thaliana
  misc_feature (1)..(1736): Ceres Seq. ID no. 13489087
  misc_feature (1)..(1736): Ortholog of  Ceres SEQ ID NO 13599602 as cited in SEQ ID NO 0
tagttatcgtcgctgattcaccaacaacaacaacatcacaagaaagcgtcctcttttataggaccctctgtccctgtttctctctccagttttattgtagaattcgctgtcattttcacaacgactcacttctttcagctctctccattcggcgctctcttctggaattgaagaatcaagattagcaatggcccatacatcagaatctgtgaatcctagagatgtttgcattgtgggtgttgcacgtactccaatgggtggctttctcggatctctttcatctttacctgccacaaagcttggatctttagctattgcagctgctttgaagagagcaaatgttgatccagctcttgttcaagaagttgtctttggcaatgttcttagtgctaatttgggtcaagctcctgctcgtcaagctgctttaggtgcaggaatccctaactctgttatctgtactacagttaacaaggtttgtgcatcaggcatgaaagcggtaatgattgctgctcaaagtatccagttagggatcaatgatgtagttgtggcgggtggtatggaaagcatgtctaatacaccaaaatatttggcagaagcaaggaagggatctcgttttggtcatgattctttagtagatggaatgttgaaggatggactatgggatgtctataacgactgtgggatgggaagctgtgcagaattatgcgctgagaagtttcagattacaagggagcagcaagatgactatgcagttcagagttttgagcgtggtattgctgcccaggaagctggcgccttcacatgggaaatcgtcccggttgaagtttctggaggaagaggtaggccatcaaccattgttgacaaggacgaaggtcttgggaagtttgatgctgcaaaattgaggaaactccgtcctagtttcaaagagaatggagggactgttacagctggaaatgcgtctagcataagtgatggtgcagctgcccttgtcctagtgagcggagagaaggctcttcagctaggacttctagtattagcaaaaattaaagggtatggtgacgcagctcaggaaccagagtttttcactactgctcctgctcttgctataccaaaagccattgcacatgctggtttggaatcttctcaagttgattactatgagatcaatgaagcatttgcagttgtagcacttgcaaatcaaaagctactcgggattgctccagagaaagtgaacgtaaatggaggagctgtctccttaggacaccctctaggctgcagtggcgcccgtattctaatcacgttgcttgggatactaaagaagagaaacggaaagtacggtgtgggaggagtgtgcaacggaggaggaggtgcttctgctctagttcttgagctcctttgatgcattatgaatccaggttggtaaactaaatagatggatctatctctcatccaacttccatgagtcagtcattgcactttacgttttatgttagttggtctctcaataaaggagtgatcgttgatgttgttaagtctatttatttatatgaactcggcttctttttttctcttaccggtgacagtcagttattgaatcatggaccgatttaccgtagttaatgatttatcctcatgtactcattaaaacgtcgaccaagatttgacatttgatggataaatttaagtacacaatgtgtatgtaagacaagaaaataataataattggacatttctgt

SEQ ID NO: 41746 - protein, 403 aa, Arabidopsis thaliana
  peptide (1)..(403): Ceres Seq. ID no. 13489088
MAHTSESVNPRDVCIVGVARTPMGGFLGSLSSLPATKLGSLAIAAALKRANVDPALVQEVVFGNVLSANLGQAPARQAALGAGIPNSVICTTVNKVCASGMKAVMIAAQSIQLGINDVVVAGGMESMSNTPKYLAEARKGSRFGHDSLVDGMLKDGLWDVYNDCGMGSCAELCAEKFQITREQQDDYAVQSFERGIAAQEAGAFTWEIVPVEVSGGRGRPSTIVDKDEGLGKFDAAKLRKLRPSFKENGGTVTAGNASSISDGAAALVLVSGEKALQLGLLVLAKIKGYGDAAQEPEFFTTAPALAIPKAIAHAGLESSQVDYYEINEAFAVVALANQKLLGIAPEKVNVNGGAVSLGHPLGCSGARILITLLGILKKRNGKYGVGGVCNGGGGASALVLELL

SEQ ID NO: 41747 - protein, 381 aa, Arabidopsis thaliana
  peptide (1)..(381): Ceres Seq. ID no. 13489089
MGGFLGSLSSLPATKLGSLAIAAALKRANVDPALVQEVVFGNVLSANLGQAPARQAALGAGIPNSVICTTVNKVCASGMKAVMIAAQSIQLGINDVVVAGGMESMSNTPKYLAEARKGSRFGHDSLVDGMLKDGLWDVYNDCGMGSCAELCAEKFQITREQQDDYAVQSFERGIAAQEAGAFTWEIVPVEVSGGRGRPSTIVDKDEGLGKFDAAKLRKLRPSFKENGGTVTAGNASSISDGAAALVLVSGEKALQLGLLVLAKIKGYGDAAQEPEFFTTAPALAIPKAIAHAGLESSQVDYYEINEAFAVVALANQKLLGIAPEKVNVNGGAVSLGHPLGCSGARILITLLGILKKRNGKYGVGGVCNGGGGASALVLELL

SEQ ID NO: 41748 - protein, 303 aa, Arabidopsis thaliana
  peptide (1)..(303): Ceres Seq. ID no. 13489090
MKAVMIAAQSIQLGINDVVVAGGMESMSNTPKYLAEARKGSRFGHDSLVDGMLKDGLWDVYNDCGMGSCAELCAEKFQITREQQDDYAVQSFERGIAAQEAGAFTWEIVPVEVSGGRGRPSTIVDKDEGLGKFDAAKLRKLRPSFKENGGTVTAGNASSISDGAAALVLVSGEKALQLGLLVLAKIKGYGDAAQEPEFFTTAPALAIPKAIAHAGLESSQVDYYEINEAFAVVALANQKLLGIAPEKVNVNGGAVSLGHPLGCSGARILITLLGILKKRNGKYGVGGVCNGGGGASALVLELL

SEQ ID NO: 41749 - DNA, 1651 bp, Arabidopsis thaliana
  misc_feature (1)..(1651): Ceres Seq. ID no. 12338072
  misc_feature (1)..(1651): Ortholog of  Ceres SEQ ID NO 15168378 as cited in SEQ ID NO 59129
  misc_feature (1)..(1651): Ortholog of  Ceres SEQ ID NO 13584744 as cited in SEQ ID NO 69137
ccattggtgttcggaacataagagagaatccaactgatcatcagcttctaatagatctattggtctttccattgggaagagatagttttaatcagacaggaatgtcacttgttggttttgcatttagcaaccagacttataagcctcctccgatatttggcccttatattttcaaagctgatttgtacaaacagttctctggtatgatgaacccttgtcacacacacaatcaaactagaactaaaggttgttattgataactcatttgctctgcctttctttttgtcacagatgtagaagtttcatcaaagtcatcaaacaaaagcattctcattggagcagtagttggtgttgttgttcttctactattgttaacaatagctgggatttacgctcttaggcagaagaagagagctgaaagagcaactggtcaaaataatccttttgctaaatgggatacaagtaagagtagtattgatgctccgcagctaatgggagcaaaagcgtttacttttgaggagctgaagaaatgcactgacaacttttcagaggcaaatgatgttggcggtggaggttacggcaaggtttatagagggattcttcctaatgggcaactcatagcaatcaaaagggctcaacaaggatctttgcaaggagggttggagttcaaaactgagattgagcttctctcaagggtccatcataagaatgttgtcagactcttgggcttctgctttgaccggaatgaacaaatgctcgtatatgagtacatttcaaacgggtctcttaaagacagtctgtcagggaagagtgggattcgattggattggaccagaaggcttaaaatagcacttggttcaggcaagggcttggcttatcttcatgaacttgctgatcctccaattatacatagagacatcaaatcaaataacatattacttgatgaaaatctaaccgcaaaggttgccgacttcggtctctccaaacttgtgggagaccctgagaaaactcatgtcacaacacaagtcaaaggaaccatgggctacttggatccagagtactacatgacgaatcaattaacggagaagagcgatgtgtatgggtttggtgtggttttactcgagctattaaccggtagaagtccgatagagagaggcaaatatgtggtgagagaggtgaagacaaagatgaataaatctcgtagtttgtatgacctgcaggagttgttggacacaacgatcatagcaagcagtgggaatctaaaagggttcgagaagtatgtagacttggctttgagatgtgtggaggaggaaggagttaataggccatcaatgggtgaggttgtgaaagagattgagaacataatgcagcttgcgggattaaatcctaactcagattcagcaacgagttcaagaacgtatgaggacgcaatcaaaggatctggtgatccttatggcagtgaatcgtttcagtacagtgggaattttccagcttcaaagcttgagccccaatgattgattatgtttctttttgttattttgttatttcgtaagtgacttcatacttgaaatgccttgtgaatgtggagtagcatgattctgtttgatatgtggtcgctgattataaagcagatgaatgaagagccaaacgc

SEQ ID NO: 41750 - protein, 340 aa, Arabidopsis thaliana; identical to SEQ ID NO: 40084
  peptide (1)..(340): Ceres Seq. ID no. 12338073

SEQ ID NO: 41751 - protein, 253 aa, Arabidopsis thaliana; identical to SEQ ID NO: 40085
  peptide (1)..(253): Ceres Seq. ID no. 12338074

SEQ ID NO: 41752 - DNA, 1175 bp, Arabidopsis thaliana
  misc_feature (1)..(1175): Ceres Seq. ID no. 12371056
  misc_feature (1)..(1175): Ortholog of  Ceres SEQ ID NO 13594341 as cited in SEQ ID NO 57917
  misc_feature (1)..(1175): Ortholog of  Ceres SEQ ID NO 13656441 as cited in SEQ ID NO 65703
aattaaaaacattcagacacaaatttagtttcttcttcttttggttctgtctgaatccaatttttttttattttatttcctccaccaccgtgaaatatgatcgccgccggagctaaatcgctactagggctttcgatggcttctccaaaagggctttccgatagcaattcaagatctgttgttgttgttcgtgcttgtgtttcgatggatggatctcaaactctgagtcataacaaaaatggatctattcctgagcttaaatccattaacggtcacactggacaaaagcaaggacctttgtctacggtcggaaactcgacaaatataaagtggcatgaatgttctgttgagaaagttgatagacagagattgcttgatcagaaaggatgtgttatttgggtcaccggtcttagtggttcagggaagagtactttggcttgtgctttgaatcagatgttgtatcaaaaggggaagctttgttatattcttgatggtgataatgttaggcatggcttaaaccgtgatcttagctttaaagctgaggatcgtgcagagaatattcgtagagttggagaggttgctaagctttttgcggatgctggaataatctgcattgcgagtttgatatctccttatagaacagatagggacgcttgtcgaaatttgctccccgagggagattttgttgaggtgttcatggatgtaccgcttagtgtttgcgaagcgagggatccaaagggtctttacaagcttgctcgtgcaggaaagatcaaaggttttaccgggatcgatgacccttacgagccaccattgaactgcgagatttctctaggacgcgaaggaggaacttctcctatcgaaatggctgaaaaggtcgtcggatacttagataacaagggttatcttcaagcataacatacttctagatacacaaatttgttatctcacggtcatagttctattttacgagccaaagtataaaagtaagcatgatccatggctgttttatggaatcacaagttcgacaaaatatatataaatctcataatttttcttgtccctttttcttgtattataaatctttgatgttatggttctgtatataatatgagtaaaatgaaggttaagcctaataaccatttgatatgatctataatacaatatactttgtatgc

SEQ ID NO: 41753 - protein, 272 aa, Arabidopsis thaliana
  peptide (1)..(272): Ceres Seq. ID no. 12371057
MIAAGAKSLLGLSMASPKGLSDSNSRSVVVVRACVSMDGSQTLSHNKNGSIPELKSINGHTGQKQGPLSTVGNSTNIKWHECSVEKVDRQRLLDQKGCVIWVTGLSGSGKSTLACALNQMLYQKGKLCYILDGDNVRHGLNRDLSFKAEDRAENIRRVGEVAKLFADAGIICIASLISPYRTDRDACRNLLPEGDFVEVFMDVPLSVCEARDPKGLYKLARAGKIKGFTGIDDPYEPPLNCEISLGREGGTSPIEMAEKVVGYLDNKGYLQA

SEQ ID NO: 41754 - protein, 259 aa, Arabidopsis thaliana
  peptide (1)..(259): Ceres Seq. ID no. 12371058
MASPKGLSDSNSRSVVVVRACVSMDGSQTLSHNKNGSIPELKSINGHTGQKQGPLSTVGNSTNIKWHECSVEKVDRQRLLDQKGCVIWVTGLSGSGKSTLACALNQMLYQKGKLCYILDGDNVRHGLNRDLSFKAEDRAENIRRVGEVAKLFADAGIICIASLISPYRTDRDACRNLLPEGDFVEVFMDVPLSVCEARDPKGLYKLARAGKIKGFTGIDDPYEPPLNCEISLGREGGTSPIEMAEKVVGYLDNKGYLQA

SEQ ID NO: 41755 - protein, 236 aa, Arabidopsis thaliana
  peptide (1)..(236): Ceres Seq. ID no. 12371059
MDGSQTLSHNKNGSIPELKSINGHTGQKQGPLSTVGNSTNIKWHECSVEKVDRQRLLDQKGCVIWVTGLSGSGKSTLACALNQMLYQKGKLCYILDGDNVRHGLNRDLSFKAEDRAENIRRVGEVAKLFADAGIICIASLISPYRTDRDACRNLLPEGDFVEVFMDVPLSVCEARDPKGLYKLARAGKIKGFTGIDDPYEPPLNCEISLGREGGTSPIEMAEKVVGYLDNKGYLQA

SEQ ID NO: 41756 - DNA, 1996 bp, Arabidopsis thaliana
  misc_feature (1)..(1996): Ceres Seq. ID no. 12639081
  misc_feature (1)..(1996): Ortholog of  Ceres SEQ ID NO 13660024 as cited in SEQ ID NO 67241
ctagtctgccatttttctttctcgtcctgtttccattctctctccgatcaaaaccagcccaattcgatcggagacatcacagaatggaaccagatcttcatgaccagcaacaacaacaacgagtccacagcgtagtcataatcactctcccaccatctgatgatccttcacaaggcaaaacaatctctgctttcactctcactgaccacgattacccactcgaaatcccacccgaggataacccaaacccgagttttcaacccgacccacttcaccgaaaccaacaatctcgcctcttgttctcggatctctcaatgaattcgccgagattagttctgggtcttctcggaatctcgcttctcgcggttgctttctacgcctctgtttttcccaactctgttcaaatgtttagggtttctcctgatgagaggaaccgtgacgacgacgataatctccgtgaaacggcgtcgtttgttttccctgtatatcacaaattgagagctcgagagttccacgagcggatcttagaggaagatttaggtttagagaatgaaaactttgtggaatcaatggatttagagctggtcaaccctgtaaaagtcaacgatgttttatctacaagtgccggttctattgactcctccactacgatttttcccgtcggtggtaatgtgtatccagatgggctgtattatacacgcattcttgttggaaagcctgaagatggacaatactatcatcttgatattgatacgggaagtgaattgacttggatccaatgtgatgctccttgtactagttgtgctaagggagcaaatcaactatataagcctagaaaagataacttagtgagatcttcagaggccttttgtgtagaagtccaaaggaatcaactgacagaacattgtgaaaattgtcatcaatgtgactacgagattgaatatgctgatcatagctactccatgggagttctcaccaaagataagtttcatctcaaactccataacggatcactagccgagtcagatatagttttcgggtgcgggtatgatcagcaaggactactgttgaatactctgctaaagacagacgggattctcggtctaagcagagctaaaattagcttaccttctcaacttgcaagcagaggtattatcagcaatgtggttggccattgccttgcctctgatttaaacggtgaaggatatatcttcatgggaagtgatttggttccatcacacggaatgacatgggttcctatgcttcacgattcccgcttggatgcttatcagatgcaagttacaaagatgagctacgggcagggtatgcttagcttagatggggaaaacggaagagtagggaaagtcttatttgacacaggaagttcctatacatacttccctaaccaggcttactcccaattggtcacatcacttcaagaagtttctggtttagaactaacacgcgatgattcagacgaaacactgcctatctgctggcgagccaaaactaacttcccgtttagttccttgtcggatgttaagaagttcttcagaccaataactctgcaaatagggagcaaatggttgatcatatcaagaaaacttttgattcaacccgaggattacttgatcatcagcaacaaaggaaatgtctgtcttgggatattagatggaagcagtgttcatgatggttccactattattcttggagatatctcgatgcgtggacacttgatcgtgtacgacaatgtgaaacggagaatcggatggatgaaatcagattgcgtccggcctcgtgagattgatcacaatgtacctttctttcaaggctgaaggagccataattcttacatatgtgatatgtgtataattaacctgacacatacacgcttgtataatagtactcgtgattacatattgtgtaacataaattgtaaaagactaatcaagttttgatctgtaacatatcaatgcaatcatattaataataagac

SEQ ID NO: 41757 - protein, 610 aa, Arabidopsis thaliana
  peptide (1)..(610): Ceres Seq. ID no. 12639082
SLPFFFLVLFPFSLRSKPAQFDRRHHRMEPDLHDQQQQQRVHSVVIITLPPSDDPSQGKTISAFTLTDHDYPLEIPPEDNPNPSFQPDPLHRNQQSRLLFSDLSMNSPRLVLGLLGISLLAVAFYASVFPNSVQMFRVSPDERNRDDDDNLRETASFVFPVYHKLRAREFHERILEEDLGLENENFVESMDLELVNPVKVNDVLSTSAGSIDSSTTIFPVGGNVYPDGLYYTRILVGKPEDGQYYHLDIDTGSELTWIQCDAPCTSCAKGANQLYKPRKDNLVRSSEAFCVEVQRNQLTEHCENCHQCDYEIEYADHSYSMGVLTKDKFHLKLHNGSLAESDIVFGCGYDQQGLLLNTLLKTDGILGLSRAKISLPSQLASRGIISNVVGHCLASDLNGEGYIFMGSDLVPSHGMTWVPMLHDSRLDAYQMQVTKMSYGQGMLSLDGENGRVGKVLFDTGSSYTYFPNQAYSQLVTSLQEVSGLELTRDDSDETLPICWRAKTNFPFSSLSDVKKFFRPITLQIGSKWLIISRKLLIQPEDYLIISNKGNVCLGILDGSSVHDGSTIILGDISMRGHLIVYDNVKRRIGWMKSDCVRPREIDHNVPFFQG

SEQ ID NO: 41758 - protein, 583 aa, Arabidopsis thaliana [sequence omitted]

SEQ ID NO: 41759 - protein, 506 aa, Arabidopsis thaliana
  peptide (1)..(506): Ceres Seq. ID no. 12639084
MNSPRLVLGLLGISLLAVAFYASVFPNSVQMFRVSPDERNRDDDDNLRETASFVFPVYHKLRAREFHERILEEDLGLENENFVESMDLELVNPVKVNDVLSTSAGSIDSSTTIFPVGGNVYPDGLYYTRILVGKPEDGQYYHLDIDTGSELTWIQCDAPCTSCAKGANQLYKPRKDNLVRSSEAFCVEVQRNQLTEHCENCHQCDYEIEYADHSYSMGVLTKDKFHLKLHNGSLAESDIVFGCGYDQQGLLLNTLLKTDGILGLSRAKISLPSQLASRGIISNVVGHCLASDLNGEGYIFMGSDLVPSHGMTWVPMLHDSRLDAYQMQVTKMSYGQGMLSLDGENGRVGKVLFDTGSSYTYFPNQAYSQLVTSLQEVSGLELTRDDSDETLPICWRAKTNFPFSSLSDVKKFFRPITLQIGSKWLIISRKLLIQPEDYLIISNKGNVCLGILDGSSVHDGSTIILGDISMRGHLIVYDNVKRRIGWMKSDCVRPREIDHNVPFFQG

SEQ ID NO: 41760 - DNA, 817 bp, Arabidopsis thaliana
  misc_feature (1)..(817): Ceres Seq. ID no. 12323971
  misc_feature (1)..(817): Ortholog of  Ceres SEQ ID NO 12616895 as cited in SEQ ID NO 63909
atatatcgagagagacaagccagcaagaattttcagcacacatacacacacaaaagattcaaagaatcatctagtaacaattaaaaaaggagagagaaggaaaatgaacagaatgagcaatacagtgataggattcttgaatatcctaacactaatttcctccatagttctattaggatcagctctatggatgggtaggagcaaaacgacatgcgagcattttcttcagaagccacttttgatcttaggcctagctatcttgatcttgtcagtagctggtctagtcggtgcatgttgtgacgtggcttgggtcttgtgggtgtacctcttcttcatggtcttcatcatagtcgcactcatgggtttgaccttgtttggattcatagtgactagccatagtggtggtgtggttgtcgatggtagggtttataaagagtttaagcttgaagcatatcacccttggcttaagacaagggtggtagatactaattattgggttactataaagacttgtctcttgggctcagtcacttgttccaagctcgctctttggactcctcttgattatctccaaaaagacttatctcctcttcagctgtttactgtgttggctgttgcgcgtttaaaaacgccaaacgccctcaacattacggcttcccttatggacgttacggcatgtccaaatccagacctggatgggaacagtcctggtttgttctcttttctaatgcaacaattatttttattattttcgcggcatgtaggtcaaggtggtggcatgggagagatcggtattagtgaaaaatatttatgttaa

SEQ ID NO: 41761 - protein, 271 aa, Arabidopsis thaliana
  peptide (1)..(271): Ceres Seq. ID no. 12323972
YIERDKPARIFSTHTHTKDSKNHLVTIKKGERRKMNRMSNTVIGFLNILTLISSIVLLGSALWMGRSKTTCEHFLQKPLLILGLAILILSVAGLVGACCDVAWVLWVYLFFMVFIIVALMGLTLFGFIVTSHSGGVVVDGRVYKEFKLEAYHPWLKTRVVDTNYWVTIKTCLLGSVTCSKLALWTPLDYLQKDLSPLQLFTVLAVARLKTPNALNITASLMDVTACPNPDLDGNSPGLFSFLMQQLFLLFSRHVGQGGGMGEIGISEKYLC

SEQ ID NO: 41762 - protein, 237 aa, Arabidopsis thaliana
  peptide (1)..(237): Ceres Seq. ID no. 12323973
MNRMSNTVIGFLNILTLISSIVLLGSALWMGRSKTTCEHFLQKPLLILGLAILILSVAGLVGACCDVAWVLWVYLFFMVFIIVALMGLTLFGFIVTSHSGGVVVDGRVYKEFKLEAYHPWLKTRVVDTNYWVTIKTCLLGSVTCSKLALWTPLDYLQKDLSPLQLFTVLAVARLKTPNALNITASLMDVTACPNPDLDGNSPGLFSFLMQQLFLLFSRHVGQGGGMGEIGISEKYLC

SEQ ID NO: 41763 - protein, 234 aa, Arabidopsis thaliana
  peptide (1)..(234): Ceres Seq. ID no. 12323974
MSNTVIGFLNILTLISSIVLLGSALWMGRSKTTCEHFLQKPLLILGLAILILSVAGLVGACCDVAWVLWVYLFFMVFIIVALMGLTLFGFIVTSHSGGVVVDGRVYKEFKLEAYHPWLKTRVVDTNYWVTIKTCLLGSVTCSKLALWTPLDYLQKDLSPLQLFTVLAVARLKTPNALNITASLMDVTACPNPDLDGNSPGLFSFLMQQLFLLFSRHVGQGGGMGEIGISEKYLC

SEQ ID NO: 41764 - DNA, 1461 bp, Arabidopsis thaliana
  misc_feature (1)..(1461): Ceres Seq. ID no. 13593429
  misc_feature (1)..(1461): Ortholog of  Ceres SEQ ID NO 13502952 as cited in SEQ ID NO 62271
  misc_feature (1)..(1461): Ortholog of  Ceres SEQ ID NO 13502973 as cited in SEQ ID NO 68052
  misc_feature (1)..(1461): Ortholog of  Ceres SEQ ID NO 13596000 as cited in SEQ ID NO 68188
atcttaaaagaaaccgaaagctaatctccaaagggaaaaagacgtgtagcagagacctatacatacacctatacattcacgttgcgtgtgataatctactgagggttctatctatattaatccttctctgcttccttcaatctaattgcaaatcaaatggatcgtcttaagctttatttctccgttttcgttttgtctttctttatcgtctcggtttcgtcgtctgatgtcaacgacggcgatgatctcgtgatccgtcaggtggttggtggagccgagcctcaggttttgacctcagaggatcacttttctctcttcaagcggaagttcgggaaggtctacgcttccaacgaggagcatgactatagattctcggttttcaaagcgaatctcaggcgagcgaggcgtcaccagaagttggatccgtcggcgactcatggtgttacgcagttctcagatctgactcggtctgagttccgtaagaagcacttgggggttagaagtggctttaagcttcctaaagatgccaacaaggctccgattctccctaccgaaaatctccctgaggattttgattggagagatcatggcgccgttactcccgtcaaaaatcagggatcttgcggctcttgctggagtttcagcgccactggagctttggaaggtgctaacttcctcgctaccggcaaactcgtcagcctcagcgaacaacagctcgtcgactgtgatcacgagtgtgatcccgaggaggcagattcctgcgactctggttgcaatggtgggctaatgaacagcgcttttgaatacaccctcaaaaccggagggctcatgaaagaagaagactatccttacaccggaaaggacggcaagacctgcaagctagacaagtccaagatcgttgcctctgtctccaacttcagtgttatctccattgatgaagaacagattgctgcaaaccttgtcaagaacggacctcttgctgtagccatcaacgctggctatatgcagacttacattggaggagtctcatgcccttacatatgcaccaggaggctcaaccacggtgtcttattggttggctatggagcggcaggttacgctccggctaggttcaaggagaagccttactggatcatcaagaactcgtggggagagacttggggtgaaaatggtttctacaaaatctgcaaaggccgtaacatttgtggtgttgacagtatggtctccactgttgcagccaccgtctcaaccaccgcccattaagcatctcgtcaataagttttaattactttggtgatttgtatgagcgagctctctttgcgctgctgactctctctatttatctctgcttcttgcttgtaaataaaatgcgttctattgagcaaaaccgtacaatgctcattagcaatgagcccactttaacaagtatcagtttatggcccaatatatgaaagttaaatc

SEQ ID NO: 41765 - protein, 368 aa, Arabidopsis thaliana; identical to SEQ ID NO: 23807
  peptide (1)..(368): Ceres Seq. ID no. 13593430

SEQ ID NO: 41766 - DNA, 1430 bp, Arabidopsis thaliana
  misc_feature (1)..(1430): Ceres Seq. ID no. 12394423
  misc_feature (1)..(1430): Ortholog of  Ceres SEQ ID NO 15176294 as cited in SEQ ID NO 60388
acaactctgttccaagtcttatcctttcatcatcatcatcacttaccttcttcacagagagagagcttcatcatcatatgtaatgtgagatgtctcttgaacaatgcaacaagaagctctctctttcctctcgtcctctctcccttcccttcaccacaattttccctctctttctcgcctccgcttcaacaattttcccgcactttccttcaaaccaaacacttcatcatcatcttcatcattcttcaaatccccagatataccctctctctcctccaccacaacaacaacaacaacaacaaccaccgaaaccctagaatcctcaatccacgagaaactcatttacctcgattcactcggaatcgatttcctaaccctaatcaaccgtcatccacctctcctctccaccgctctctccgccgttgaatccgtcgtcgattacatgaccactccaccaataaacttcactttagaagactttcgccgcctcgtctcaatgtgtccagagcttctcacttcacctttaacctcacacacaatcccagtcatcactttcctcctccgtgaagtcggcgttgactctatctttgacctccgtcaagctttacgacgtcgtcctcgtcttctcgcttgtagcgtcgatcaccagcttagaccaacgctttactttctccagagaatcggaatcttagatccgcataaacatacgtatcttctctcttgtagcgttgacaataaactcgtaccacggattgattacttcgagaagttaggattctcgcggcggagcgccaccgcgatgtttaagagattcccgcagctgtttaattacagtattgctgagaattatgagccgaagttgaagtatttgatggtggagatggggagagatgttagagaggttcttgagtttcctcagtatttctcgtttagtttggagaatcggattaaaccgagacatgaagcttgtgctgcgaaaggtgtgaggtttccattgccggtgatgttgaagactaatgaagctggttttagagatacattggaggtacatttttgtaatgaatgatgatgaagaactcaatgaatgaagaaaccagcctctgcctacattttgagacacacacagggatggtgagttaaatcttgataagagaaagaatgttcatttacaattcacgattccgatgtatttcggtctagttattgttagtgaacgagaaatcaagtgtatgtaagtccagaaaccgtgtagagttgcgatttgcagagaattgtgattctacaattggaggcaagatgatgaatgtgtgaactgattagcgtaacggtttagttattggtcttaagtcttaacagggagaattggttctagagcttttagtccctttgatggttcgtgaaatgccattggtctatgatcggattctctg

SEQ ID NO: 41767 - protein, 320 aa, Arabidopsis thaliana
  peptide (1)..(320): Ceres Seq. ID no. 12394424
MQQEALSFLSSSLPSLHHNFPSLSRLRFNNFPALSFKPNTSSSSSSFFKSPDIPSLSSTTTTTTTTTTETLESSIHEKLIYLDSLGIDFLTLINRHPPLLSTALSAVESVVDYMTTPPINFTLEDFRRLVSMCPELLTSPLTSHTIPVITFLLREVGVDSIFDLRQALRRRPRLLACSVDHQLRPTLYFLQRIGILDPHKHTYLLSCSVDNKLVPRIDYFEKLGFSRRSATAMFKRFPQLFNYSIAENYEPKLKYLMVEMGRDVREVLEFPQYFSFSLENRIKPRHEACAAKGVRFPLPVMLKTNEAGFRDTLEVHFCNE

SEQ ID NO: 41768 - protein, 207 aa, Arabidopsis thaliana
  peptide (1)..(207): Ceres Seq. ID no. 12394425
MTTPPINFTLEDFRRLVSMCPELLTSPLTSHTIPVITFLLREVGVDSIFDLRQALRRRPRLLACSVDHQLRPTLYFLQRIGILDPHKHTYLLSCSVDNKLVPRIDYFEKLGFSRRSATAMFKRFPQLFNYSIAENYEPKLKYLMVEMGRDVREVLEFPQYFSFSLENRIKPRHEACAAKGVRFPLPVMLKTNEAGFRDTLEVHFCNE

SEQ ID NO: 41769 - protein, 189 aa, Arabidopsis thaliana
  peptide (1)..(189): Ceres Seq. ID no. 12394426
MCPELLTSPLTSHTIPVITFLLREVGVDSIFDLRQALRRRPRLLACSVDHQLRPTLYFLQRIGILDPHKHTYLLSCSVDNKLVPRIDYFEKLGFSRRSATAMFKRFPQLFNYSIAENYEPKLKYLMVEMGRDVREVLEFPQYFSFSLENRIKPRHEACAAKGVRFPLPVMLKTNEAGFRDTLEVHFCNE

SEQ ID NO: 41770 - DNA, 1109 bp, Arabidopsis thaliana; identical to SEQ ID NO: 39262
  misc_feature (1)..(1109): Ceres Seq. ID no. 13600811
  misc_feature (1)..(1109): Ortholog of  Ceres SEQ ID NO 14310443 as cited in SEQ ID NO 54695
  misc_feature (1)..(1109): Ortholog of  Ceres SEQ ID NO 13596354 as cited in SEQ ID NO 68027

SEQ ID NO: 41771 - protein, 326 aa, Arabidopsis thaliana; identical to SEQ ID NO: 39263
  peptide (1)..(326): Ceres Seq. ID no. 13600812

SEQ ID NO: 41772 - protein, 302 aa, Arabidopsis thaliana; identical to SEQ ID NO: 39264
  peptide (1)..(302): Ceres Seq. ID no. 13600813

SEQ ID NO: 41773 - protein, 251 aa, Arabidopsis thaliana; identical to SEQ ID NO: 39265
  peptide (1)..(251): Ceres Seq. ID no. 13600814

SEQ ID NO: 41774 - DNA, 866 bp, Arabidopsis thaliana
  misc_feature (1)..(866): Ceres Seq. ID no. 12325818
  misc_feature (1)..(866): Ortholog of  Ceres SEQ ID NO 12611884 as cited in SEQ ID NO 51018
  misc_feature (1)..(866): Ortholog of  Ceres SEQ ID NO 15177083 as cited in SEQ ID NO 51917
  misc_feature (1)..(866): Ortholog of  Ceres SEQ ID NO 12609093 as cited in SEQ ID NO 52008
  misc_feature (1)..(866): Ortholog of  Ceres SEQ ID NO 12609839 as cited in SEQ ID NO 52022
  misc_feature (1)..(866): Ortholog of  Ceres SEQ ID NO 13638931 as cited in SEQ ID NO 52200
  misc_feature (1)..(866): Ortholog of  Ceres SEQ ID NO 13638885 as cited in SEQ ID NO 55803
  misc_feature (1)..(866): Ortholog of  Ceres SEQ ID NO 14301452 as cited in SEQ ID NO 60984
  misc_feature (1)..(866): Ortholog of  Ceres SEQ ID NO 12587429 as cited in SEQ ID NO 63113
  misc_feature (1)..(866): Ortholog of  Ceres SEQ ID NO 12615635 as cited in SEQ ID NO 63133
  misc_feature (1)..(866): Ortholog of  Ceres SEQ ID NO 12586351 as cited in SEQ ID NO 64028
  misc_feature (1)..(866): Ortholog of  Ceres SEQ ID NO 15173174 as cited in SEQ ID NO 64046
  misc_feature (1)..(866): Ortholog of  Ceres SEQ ID NO 13654441 as cited in SEQ ID NO 67814
  misc_feature (1)..(866): Ortholog of  Ceres SEQ ID NO 14309027 as cited in SEQ ID NO 0
taaaaataatttagacaaaacaaagatgggagagagagagcaagtgaaactgttgggaacatggtacagtccggtcgtgataagagcaaagatcgatcttcgtctcaaatcggttgattatgattacgttgaagagaacttgttcggatctaagagtgagcttcttctcaaatcgaacccggtttacaagaaagtcccggttctcatccacaacactaaaccggtttgtgtgtctcttaacatcgttgaatacatcgacgagacgtggaactcatctggatcgtccattcttccttctcatccttatgatcgtgcccttgctcgcttctggtctgtctttgttgatgacaagtggttaccgactttgatggcagctgtggtcgctaaatcggaagaagcaaaagcaaaaggcatggaagaagtggaagaagggttgttgcaactagatgctgcgtttattgctctaagcaaagggaaatctttttttggcggtgaaacaatcgggttcatagacatttgccttggaagctttttagttctcttaaaagctagagagaagcttaaaaacgaaaagattttagacgaattaaaaactccttctctttatagatgggccaaccagtttttgtcaaatgaaatggtgaagaatgtggtgccggatattgataaagtcgccaagtttatagaagagtttgaggatagagctcaatatatccggtgcttctagatcttgagatcatcacagaaatagttagaaaagagtggaggtttagtcttggcttcaaagtcaaacttgttatctccaaaaacagagtttcatatggtttattcatatgttagttaatctaaaagaagaacatggttcc

SEQ ID NO: 41775 - protein, 241 aa, Arabidopsis thaliana
  peptide (1)..(241): Ceres Seq. ID no. 12325819
KNNLDKTKMGEREQVKLLGTWYSPVVIRAKIDLRLKSVDYDYVEENLFGSKSELLLKSNPVYKKVPVLIHNTKPVCVSLNIVEYIDETWNSSGSSILPSHPYDRALARFWSVFVDDKWLPTLMAAVVAKSEEAKAKGMEEVEEGLLQLDAAFIALSKGKSFFGGETIGFIDICLGSFLVLLKAREKLKNEKILDELKTPSLYRWANQFLSNEMVKNVVPDIDKVAKFIEEFEDRAQYIRCF

SEQ ID NO: 41776 - protein, 233 aa, Arabidopsis thaliana
  peptide (1)..(233): Ceres Seq. ID no. 12325820
MGEREQVKLLGTWYSPVVIRAKIDLRLKSVDYDYVEENLFGSKSELLLKSNPVYKKVPVLIHNTKPVCVSLNIVEYIDETWNSSGSSILPSHPYDRALARFWSVFVDDKWLPTLMAAVVAKSEEAKAKGMEEVEEGLLQLDAAFIALSKGKSFFGGETIGFIDICLGSFLVLLKAREKLKNEKILDELKTPSLYRWANQFLSNEMVKNVVPDIDKVAKFIEEFEDRAQYIRCF

SEQ ID NO: 41777 - DNA, 1747 bp, Arabidopsis thaliana
  misc_feature (1)..(1747): Ceres Seq. ID no. 13489173
  misc_feature (1)..(1747): Ortholog of  Ceres SEQ ID NO 13648575 as cited in SEQ ID NO 20407
tgaatcgaactcagatttcgaagaagcagatctcacaatgtctggaaaacagcaaaatcatcgttctacttcctccagacccagatccaaaaccctaatcctcatcggctctctcttcaccgtctctctactcgtcatcctctacacctcttcttcctcctcccgagcctccatctccaatcccaacccgtcggaccgaccagagacgtccttcgttacctcgcttgagcatttcttaatatataaagctccgaagctctcgttaccggttagagacgacacggtgcgtggcgagagtgatgatgatgtgaggaagctcgatgagatggtgttcgagagagagaatcgttggttgaacgaagatccgggatatcctgttgaatttccgattaaggtttacgtgtatgagatgccgaagaagtttactttcgatcttctctggttatttcacaatacttacaaagagacttcgaatgctacctctaatggtagccctgtgcatcgtctaatcgaacagcattctattgactattggctttgggctgatctgatatctcctgaatctgaaaggcgtttgaaaagtgtcgtgagagttcagaagcagcaggacgccgactttttctatgttccgtttttcactacaatcagctttttcttgttggagaagcagcaatgcaaagcactctatagggaagctttgaagtgggtcactgatcagcctgcttggaagaggtccgagggaagggatcacatatttcctattcatcatccttggtccttcaagtctgtccgcaaatttgtgaaaaacgcaatctggcttttaccagatatggactccactggcaattggtataagcctgggcaagtttcattggagaaagacctaattcttccttatgttcccaatgttgatatctgtgataccaaatgcttgtcagaaagtgcaccaatgagaaccacattactttttttccgagggcggcttaagcgaaatgcagggggtaaaatacgtgccaaacttggtgcagaattaagtggtatcaaggatataataatttctgaggggactgccggagagggaggaaaattggcagcgcaacgtggcatgcgtagatctttattctgtttgtgtcctgctggtgacacaccatcttcagcgaggttgtttgatgccattgtcagtggctgtatacctgttatagtcagtgacgagttggaatttccttttgaaggaatacttgattacaagaaggttgctgtgcttgtttcttccagtgatgcaatacagccagggtggcttgtaaaccatctgagaagtcttacgcccttccaagtcaaggggttgcagaataatcttgctcaatactctcgccatttcctatattcgagccctgctcagccattaggtccagaggacttgacatggagaatgatagccggaaagctggtgaatatcaagcttcacacgaggaggtcacagcgggtcgtgaaaggatctaggagtatttgcagatgcgattgctggagatccaactctacagcctccaattctttgagttctctcttgtcttaagaccgatcactctgacttcacattccagtcttgaataccctagatatatactgtggaatgtgtatcctattcaattttaacattgtttgctattttatataatgtaattcctgttcatcttcgcaacttggctacttttagctacgtggaaatattatgaaactaacattttat

SEQ ID NO: 41778 - protein, 523 aa, Arabidopsis thaliana
  peptide (1)..(523): Ceres Seq. ID no. 13489174
ESNSDFEEADLTMSGKQQNHRSTSSRPRSKTLILIGSLFTVSLLVILYTSSSSSRASISNPNPSDRPETSFVTSLEHFLIYKAPKLSLPVRDDTVRGESDDDVRKLDEMVFERENRWLNEDPGYPVEFPIKVYVYEMPKKFTFDLLWLFHNTYKETSNATSNGSPVHRLIEQHSIDYWLWADLISPESERRLKSVVRVQKQQDADFFYVPFFTTISFFLLEKQQCKALYREALKWVTDQPAWKRSEGRDHIFPIHHPWSFKSVRKFVKNAIWLLPDMDSTGNWYKPGQVSLEKDLILPYVPNVDICDTKCLSESAPMRTTLLFFRGRLKRNAGGKIRAKLGAELSGIKDIIISEGTAGEGGKLAAQRGMRRSLFCLCPAGDTPSSARLFDAIVSGCIPVIVSDELEFPFEGILDYKKVAVLVSSSDAIQPGWLVNHLRSLTPFQVKGLQNNLAQYSRHFLYSSPAQPLGPEDLTWRMIAGKLVNIKLHTRRSQRVVKGSRSICRCDCWRSNSTASNSLSSLLS

SEQ ID NO: 41779 - protein, 511 aa, Arabidopsis thaliana
  peptide (1)..(511): Ceres Seq. ID no. 13489175
MSGKQQNHRSTSSRPRSKTLILIGSLFTVSLLVILYTSSSSSRASISNPNPSDRPETSFVTSLEHFLIYKAPKLSLPVRDDTVRGESDDDVRKLDEMVFERENRWLNEDPGYPVEFPIKVYVYEMPKKFTFDLLWLFHNTYKETSNATSNGSPVHRLIEQHSIDYWLWADLISPESERRLKSVVRVQKQQDADFFYVPFFTTISFFLLEKQQCKALYREALKWVTDQPAWKRSEGRDHIFPIHHPWSFKSVRKFVKNAIWLLPDMDSTGNWYKPGQVSLEKDLILPYVPNVDICDTKCLSESAPMRTTLLFFRGRLKRNAGGKIRAKLGAELSGIKDIIISEGTAGEGGKLAAQRGMRRSLFCLCPAGDTPSSARLFDAIVSGCIPVIVSDELEFPFEGILDYKKVAVLVSSSDAIQPGWLVNHLRSLTPFQVKGLQNNLAQYSRHFLYSSPAQPLGPEDLTWRMIAGKLVNIKLHTRRSQRVVKGSRSICRCDCWRSNSTASNSLSSLLS

SEQ ID NO: 41780 - protein, 415 aa, Arabidopsis thaliana
  peptide (1)..(415): Ceres Seq. ID no. 13489176
MVFERENRWLNEDPGYPVEFPIKVYVYEMPKKFTFDLLWLFHNTYKETSNATSNGSPVHRLIEQHSIDYWLWADLISPESERRLKSVVRVQKQQDADFFYVPFFTTISFFLLEKQQCKALYREALKWVTDQPAWKRSEGRDHIFPIHHPWSFKSVRKFVKNAIWLLPDMDSTGNWYKPGQVSLEKDLILPYVPNVDICDTKCLSESAPMRTTLLFFRGRLKRNAGGKIRAKLGAELSGIKDIIISEGTAGEGGKLAAQRGMRRSLFCLCPAGDTPSSARLFDAIVSGCIPVIVSDELEFPFEGILDYKKVAVLVSSSDAIQPGWLVNHLRSLTPFQVKGLQNNLAQYSRHFLYSSPAQPLGPEDLTWRMIAGKLVNIKLHTRRSQRVVKGSRSICRCDCWRSNSTASNSLSSLLS

SEQ ID NO: 41781 - DNA, 1291 bp, Arabidopsis thaliana
  misc_feature (1)..(1291): Ceres Seq. ID no. 12421839
  misc_feature (1)..(1291): Ortholog of  Ceres SEQ ID NO 14314327 as cited in SEQ ID NO 57354
atccaaaactctctcagtcatggctcttcttcgtcttcctggcatttccctccaaattctaggtcacaaatcaaaccagaagaaccctaatcccaatgttgccttcaccaatcactctctctctttatctactccttcactatgtcgtctccatcgtcacgcgacgtttccagactcaattccagcaaaatccagaaacctcacttcgtacttctccaccacaacacaagagatttctaaaaccagattgattgctcagaatgttccatggacatctacacctgaagatattagatcgttgttcgagaagtacgggagtgttatcgacattgagatgtctatgcataagaaggaaagaaatagaggtttggtgttcattgaaatggcttctcctgaagaagctgcaacagctcttaaatctcttgaatcgtgtgaatatgagggtcgtcgtttgaaggtagactatgcaaagaccaaaaagaagaagacatatgcgccgcgtgagacgccttcaccagtgcctacattcaatttgtttgttgcaaacttggcatttgaagcaagggccaagcatcttaaggagttctttgatgcagacactggtaatgttgtctccactgaagttatattccatgaaaatccaaggaggtcgagtggttacgggtttgtctctttcaaaaccaagaaacaggccgaggcagcgcttattgagttccaaggaaaggattttttgggaaggccaatccgattagctaaaagcaaacagtttgtgaagttgcaagcaaaagaagggttgcagccaccagaggaggaagcagaggaggaaccatctcagtctgagacaatgacccaagagcacgaaactccggctgcataaaacttagaagtcttcgttgcaggatcattgttggagatattggaattgacgaagaagcttcgagcttttaggtctttattcttcttagtttttgaccaacaagaggagtgggtacatacaagtagtacctaccttgagtaaatggtggagaggtaagaagtacaagaccgattttgttagaactgaaaactagtaagagacaggtattaccaaacgtcagtatcagaccagatcaaatctcaagaaacaaactcatgtggctcctacgaaacttgctttgttcagttaaacacaatgcttctttgtttgtcatctactttcgattacttgtttgcgtttgttatatgcttagtgtgtaacttcatatatgaacccgtactcttaagaaagttatgttagtaatttgtaaaacgc

SEQ ID NO: 41782 - protein, 291 aa, Arabidopsis thaliana
  peptide (1)..(291): Ceres Seq. ID no. 12421840
SKTLSVMALLRLPGISLQILGHKSNQKNPNPNVAFTNHSLSLSTPSLCRLHRHATFPDSIPAKSRNLTSYFSTTTQEISKTRLIAQNVPWTSTPEDIRSLFEKYGSVIDIEMSMHKKERNRGLVFIEMASPEEAATALKSLESCEYEGRRLKVDYAKTKKKKTYAPRETPSPVPTFNLFVANLAFEARAKHLKEFFDADTGNVVSTEVIFHENPRRSSGYGFVSFKTKKQAEAALIEFQGKDFLGRPIRLAKSKQFVKLQAKEGLQPPEEEAEEEPSQSETMTQEHETPAA

SEQ ID NO: 41783 - protein, 285 aa, Arabidopsis thaliana
  peptide (1)..(285): Ceres Seq. ID no. 12421841
MALLRLPGISLQILGHKSNQKNPNPNVAFTNHSLSLSTPSLCRLHRHATFPDSIPAKSRNLTSYFSTTTQEISKTRLIAQNVPWTSTPEDIRSLFEKYGSVIDIEMSMHKKERNRGLVFIEMASPEEAATALKSLESCEYEGRRLKVDYAKTKKKKTYAPRETPSPVPTFNLFVANLAFEARAKHLKEFFDADTGNVVSTEVIFHENPRRSSGYGFVSFKTKKQAEAALIEFQGKDFLGRPIRLAKSKQFVKLQAKEGLQPPEEEAEEEPSQSETMTQEHETPAA

SEQ ID NO: 41784 - protein, 180 aa, Arabidopsis thaliana
  peptide (1)..(180): Ceres Seq. ID no. 12421842
MSMHKKERNRGLVFIEMASPEEAATALKSLESCEYEGRRLKVDYAKTKKKKTYAPRETPSPVPTFNLFVANLAFEARAKHLKEFFDADTGNVVSTEVIFHENPRRSSGYGFVSFKTKKQAEAALIEFQGKDFLGRPIRLAKSKQFVKLQAKEGLQPPEEEAEEEPSQSETMTQEHETPAA

SEQ ID NO: 41785 - DNA, 1779 bp, Arabidopsis thaliana
  misc_feature (1)..(1779): Ceres Seq. ID no. 12370733
  misc_feature (1)..(1779): Ortholog of  Ceres SEQ ID NO 14307374 as cited in SEQ ID NO 54073
gctttttctgattgcttctctgatctcttatctctaattctaatccatagtaaactcgatttcatcatcttctgctcacaacacttactgttgttgttgttgttgttattgttcttctcgattcactcgatcgatgttgttcaaaatgcgttcttttgtggcttttgtgctccttctgagctggttcggttcgtgttgttctctcaaggaccaagctgtagattttctcaaaagtgaagatagtttaaagaaagatctatcgtcagatgaagattccacgtatttgaaagcttttggatttcacaggaaaacacttgtccgtaacccttacaaagacttgccttcaagaaaagaccgcaaaaaccgtgttgtggctgcaactacaacaccatcatcatccccagaacctgctccaaaacatgtttcaactaaagcttcaacagtttcagagccacaaaagagatcatctacacaagatgtttcaccttctccatctgcgccacttgcaaactctcccattccaagaaactctcattcttctgttcctttagttgttggctgcgtaggcggtgctttttttcttctccttgtagctaccggtctctactttttcacaagtaaggccgggaaaactgtgaatccttggcgtactggtcttagtggacaacttcagaaagtattcgttactggtattcctgtactcaaaagatctgagattgaagctgcatgtgaagattttagtaatgtcattggatcttgtcccattgggaagttgttcaaaggaacattatcaagtggagtggagattgctgttgcttcttttgctactactactgccaaagactggaaggacagtacagaaattcacttcaggaagaagatcgaaatgttatcgaagatcaaccacaagaattttgcaaaccttcttggttattgtgaagaaaaggaacctttcaccaggatcttgatctttgagtatgctccaaatggatcactctttgagcatttacattataaagaatcagaacacttggattggggaatgcggttaagaattgcaatgggattagcatattgccttgaccatatgcaccaactcaatccacctatagctcacaccaatctcgtctcatcatctcttcagctcacagaggattatgctgtcaaagtatcagatttcagtttcggttcatctgagacagagactaacatcaacaacaacacagtcatagacacacacatctcagccttgaatccagaagacaacatttacagctttggtttactgttattcgaaatgataaccgggaaactcatagaatccgttaacaaacctgactcagtagatagctcgctggttgatttcttaagaggagagactctagccaaaatggtagatccaacactggaatcttatgatgccaagattgagaatataggtgaagtgatcaaatcatgccttaggactgacccgaaagagagacctacaatgcaagaagtcacaggatggttacgggagatcacgggattgtcaccgaacgatgctacaccgaaattgtcacctctttggtgggcagagttggaggttttgtccacggcgtaagagagaccccttcactaataaaactgtatatattttgaagatgtgagttttgtaagtgtctgttttatttatctctcgtaatattggtaaagcaaaattgaagttctcttcaagtttagtaaatttacaaacatgtatatgataaattagtgtgcatatcggaaaaaagttcttgc

SEQ ID NO: 41786 - protein, 489 aa, Arabidopsis thaliana
  peptide (1)..(489): Ceres Seq. ID no. 12370734
MLFKMRSFVAFVLLLSWFGSCCSLKDQAVDFLKSEDSLKKDLSSDEDSTYLKAFGFHRKTLVRNPYKDLPSRKDRKNRVVAATTTPSSSPEPAPKHVSTKASTVSEPQKRSSTQDVSPSPSAPLANSPIPRNSHSSVPLVVGCVGGAFFLLLVATGLYFFTSKAGKTVNPWRTGLSGQLQKVFVTGIPVLKRSEIEAACEDFSNVIGSCPIGKLFKGTLSSGVEIAVASFATTTAKDWKDSTEIHFRKKIEMLSKINHKNFANLLGYCEEKEPFTRILIFEYAPNGSLFEHLHYKESEHLDWGMRLRIAMGLAYCLDHMHQLNPPIAHTNLVSSSLQLTEDYAVKVSDFSFGSSETETNINNNTVIDTHISALNPEDNIYSFGLLLFEMITGKLIESVNKPDSVDSSLVDFLRGETLAKMVDPTLESYDAKIENIGEVIKSCLRTDPKERPTMQEVTGWLREITGLSPNDATPKLSPLWWAELEVLSTA

SEQ ID NO: 41787 - protein, 485 aa, Arabidopsis thaliana
  peptide (1)..(485): Ceres Seq. ID no. 12370735
MRSFVAFVLLLSWFGSCCSLKDQAVDFLKSEDSLKKDLSSDEDSTYLKAFGFHRKTLVRNPYKDLPSRKDRKNRVVAATTTPSSSPEPAPKHVSTKASTVSEPQKRSSTQDVSPSPSAPLANSPIPRNSHSSVPLVVGCVGGAFFLLLVATGLYFFTSKAGKTVNPWRTGLSGQLQKVFVTGIPVLKRSEIEAACEDFSNVIGSCPIGKLFKGTLSSGVEIAVASFATTTAKDWKDSTEIHFRKKIEMLSKINHKNFANLLGYCEEKEPFTRILIFEYAPNGSLFEHLHYKESEHLDWGMRLRIAMGLAYCLDHMHQLNPPIAHTNLVSSSLQLTEDYAVKVSDFSFGSSETETNINNNTVIDTHISALNPEDNIYSFGLLLFEMITGKLIESVNKPDSVDSSLVDFLRGETLAKMVDPTLESYDAKIENIGEVIKSCLRTDPKERPTMQEVTGWLREITGLSPNDATPKLSPLWWAELEVLSTA

SEQ ID NO: 41788 - DNA, 1952 bp, Arabidopsis thaliana
  misc_feature (1)..(1952): Ceres Seq. ID no. 12330636
  misc_feature (1)..(1952): Ortholog of  Ceres SEQ ID NO 13574398 as cited in SEQ ID NO 0
aaaggagtcttttttatttgttatctctcatctctctctctctttctctctgagctttgctttttatcaaacaagcatcatcatcacatccacttccttcttcttcctttctctgtctgtctcttaacccaaatgtggactctttgagccgttattagatctctgccgcttcaataatggggagcttatcttctgaggaagacgacgaagtctcttccgagagatgcggaagttacagtcccagcgccgacattagcgagtccgagagttccagcagcttctcctgccaccgcttcgacggcgagggtgcctctagctccatcccttcttcccctcgagttgtcgctggtagaggattttacttcccggccccagtcatgcttccggtgatcggcggcaaagatgtggtctgggatgacaaacaaccagacaacgatttatccgaaattgagatgatgaaggagagatttgctaagctacttctcggggaagacatgtctggtggaggtaaaggggtttgtacggcgcttgctatctccaacgccatcaccaatctctctgcgactgtgtttggcgaactatggaggcttgagcctcttgctcctcagaagaaggccatgtggcgcagagaacttgagtggctgctctgtgttagcgattctatcgttgagctcattccttccattcagcagttccctggaggcggaacttatgagatcatggagacccgtccacgttctgatctctatgccaatctccctgctctcaagaagctcgatgctatgttgatcgatatgcttgacgctttctccgatactgagttctggtacactgatcgcggcatagttcttggtgattgtgacaaggattcttacaattctccagcttccgttaggcaggaggacaagtggtggctgccttgccctaaggttccgcctaacggtttgtcagaagaggccaggaagaaactgcagcagtgtcgggactttgctaaccagattctcaaggctgcattggcaattaacagtggcgtgcttgccgaaatggagattcccgacccttacttggagactttgcccaagagcgggaaggaatgtcttggagagatcatctaccagtacttaactgcaaacaagttctctcccgaatgcctcctggactgtcttgatctctcatcggaacatcagactcttgaaatcgccaaccggattgaggcggctgtgcatgtttggagacaaaagaatgggaggaggcacaagaagcaggcgaaactaaagctgtcttcttggggtggcaaggttaaaggccttgttaatgacaacgaaagaaatgatttccttgtgcagagagccgagaccctcttgcagagtctcaggatccgtttcccgggacttccccagacaacgctggacatgaacaagattcagtacaacaaggatgtagggcaatcaattctggagagttactctagggtgatggagagcatggccttcaacatcacggccagaatagatgatgtgctttatgttgatgatgccatgagaagatccatctctgtcacagaatcgctatccctattcagcatcaatggactcaaccctcaaaaagcgttctctgtgcagagctctccgcacggttcaccatttgcaacgcctgccctaagtgtagcatcaagaagcccgaggagagcaccgccgctgtattcagtgaagaggaatgggacgagagagaagggaatagtgggagaaacagagaaagcatggtcgtatgcagggaatctgagttcaagaagagtaacgggagtgacgccggaaagagattaagattgaaaatagaagaatgtaaatcaatggttgtagagactgtagttgtttcttgtttgtctgactacgaagacgaatgtggtaatagcaacaagaatgttatcttatgtggagttttgaaatgttgtt

SEQ ID NO: 41789 - protein, 548 aa, Arabidopsis thaliana
  peptide (1)..(548): Ceres Seq. ID no. 12330637
MGSLSSEEDDEVSSERCGSYSPSADISESESSSSFSCHRFDGEGASSSIPSSPRVVAGRGFYFPAPVMLPVIGGKDVVWDDKQPDNDLSEIEMMKERFAKLLLGEDMSGGGKGVCTALAISNAITNLSATVFGELWRLEPLAPQKKAMWRRELEWLLCVSDSIVELIPSIQQFPGGGTYEIMETRPRSDLYANLPALKKLDAMLIDMLDAFSDTEFWYTDRGIVLGDCDKDSYNSPASVRQEDKWWLPCPKVPPNGLSEEARKKLQQCRDFANQILKAALAINSGVLAEMEIPDPYLETLPKSGKECLGEIIYQYLTANKFSPECLLDCLDLSSEHQTLEIANRIEAAVHVWRQKNGRRHKKQAKLKLSSWGGKVKGLVNDNERNDFLVQRAETLLQSLRIRFPGLPQTTLDMNKIQYNKDVGQSILESYSRVMESMAFNITARIDDVLYVDDAMRRSISVTESLSLFSINGLNPQKAFSVQSSPHGSPFATPALSVASRSPRRAPPLYSVKRNGTREKGIVGETEKAWSYAGNLSSRRVTGVTPERD

SEQ ID NO: 41790 - protein, 481 aa, Arabidopsis thaliana
  peptide (1)..(481): Ceres Seq. ID no. 12330638
MLPVIGGKDVVWDDKQPDNDLSEIEMMKERFAKLLLGEDMSGGGKGVCTALAISNAITNLSATVFGELWRLEPLAPQKKAMWRRELEWLLCVSDSIVELIPSIQQFPGGGTYEIMETRPRSDLYANLPALKKLDAMLIDMLDAFSDTEFWYTDRGIVLGDCDKDSYNSPASVRQEDKWWLPCPKVPPNGLSEEARKKLQQCRDFANQILKAALAINSGVLAEMEIPDPYLETLPKSGKECLGEIIYQYLTANKFSPECLLDCLDLSSEHQTLEIANRIEAAVHVWRQKNGRRHKKQAKLKLSSWGGKVKGLVNDNERNDFLVQRAETLLQSLRIRFPGLPQTTLDMNKIQYNKDVGQSILESYSRVMESMAFNITARIDDVLYVDDAMRRSISVTESLSLFSINGLNPQKAFSVQSSPHGSPFATPALSVASRSPRRAPPLYSVKRNGTREKGIVGETEKAWSYAGNLSSRRVTGVTPERD

SEQ ID NO: 41791 - protein, 456 aa, Arabidopsis thaliana
  peptide (1)..(456): Ceres Seq. ID no. 12330639
MMKERFAKLLLGEDMSGGGKGVCTALAISNAITNLSATVFGELWRLEPLAPQKKAMWRRELEWLLCVSDSIVELIPSIQQFPGGGTYEIMETRPRSDLYANLPALKKLDAMLIDMLDAFSDTEFWYTDRGIVLGDCDKDSYNSPASVRQEDKWWLPCPKVPPNGLSEEARKKLQQCRDFANQILKAALAINSGVLAEMEIPDPYLETLPKSGKECLGEIIYQYLTANKFSPECLLDCLDLSSEHQTLEIANRIEAAVHVWRQKNGRRHKKQAKLKLSSWGGKVKGLVNDNERNDFLVQRAETLLQSLRIRFPGLPQTTLDMNKIQYNKDVGQSILESYSRVMESMAFNITARIDDVLYVDDAMRRSISVTESLSLFSINGLNPQKAFSVQSSPHGSPFATPALSVASRSPRRAPPLYSVKRNGTREKGIVGETEKAWSYAGNLSSRRVTGVTPERD

SEQ ID NO: 41792 - DNA, 1885 bp, Arabidopsis thaliana
  misc_feature (1)..(1885): Ceres Seq. ID no. 13497214
  misc_feature (1)..(1885): Ortholog of  Ceres SEQ ID NO 13596509 as cited in SEQ ID NO 62004
  misc_feature (1)..(1885): Ortholog of  Ceres SEQ ID NO 13659971 as cited in SEQ ID NO 67565
  misc_feature (1)..(1885): Ortholog of  Ceres SEQ ID NO 13500385 as cited in SEQ ID NO 67583
agaagaggaaacaaagagaagtagcgtcctctcttcaatttcaaccggcactttcttctcttcttcttcttcttcccaatcttcctcgtctctttacctacacctatatatatatatatatatatatctccttccctcacacacatacctgcacagctacaataatctacttcccctctttcaataacggaattaatagtaatctaatcggaagattcaagcgagaaatcgatttggttgtctgttaatttgttgggaaataaattgaaataggagattgattggatggtgagaaggcaagaggaggagaagaaggcggagaagggaatgcgtctggggaaatacgagctagggaggacgctcggcgagggtaatttcggtaaagttaaattcgctaaagataccgtctccggtcattccttcgccgttaaaatcatcgacaagtctcgtatcgccgatctcaacttctccttacagataaaaagagagatccggactctgaaaatgttgaaacatccccacattgttagattacatgaggtcttggctagcaaaacgaaaattaatatggtaatggaacttgttaccggaggagaattgttcgacagaattgtttccaacggaaaattaacagaaactgatggaagaaaaatgtttcagcagcttatcgatggaatcagctactgtcatagcaaaggtgttttccacagggatctcaagctagagaatgttcttcttgatgcaaagggacatataaagatcactgattttggcctcagtgctctgcctcagcattttagggatgacggattgttgcatacaacctgtggaagtcctaattacgttgcgcctgaggttttagctaacagaggctacgatggtgcagcatcagacatatggtcctgtggtgtaatcttgtatgtgattctaaccggatgtcttcctttcgacgacagaaaccttgcagttctttaccagaagatatgtaaaggagacccaccaataccaagatggttatccccgggtgcaagaaccatgattaagagaatgcttgatccaaatccagtcacgaggatcacagttgtgggtattaaagccagcgagtggttcaaacttgagtacattccttcaattcccgatgatgatgacgaagaagaagttgacacagacgatgatgctttctcaatccaagaactcggatcagaagaagggaagggcagtgattcaccgaccatcatcaatgcgtttcagttaatcggaatgtcttcctttcttgacctgtccggtttctttgaacaagagaatgtatcagagaggagaataagattcacttcaaatagctcagcaaaagatttactggagaaaatcgaaacagccgttacagaaatgggattcagtgtacaaaagaaacatgccaagttaagagtaaaccaggaggagagaacccagaaaggtcaagttggtttatcagtaacagctgaggttttcgagataaagccgtcactgaacgtggttgagctaagaaaatcttatggcgattcatgtttatatagacagttgtacgagagactattaaaagacgtgggcacatcctcgccggagcaagagatagtaacttaggtgttggtgttttcggctgaagagatatacatagctctaataatttatcatatggaacacaccatccatgttcatataatttattatcttaagtatatataaaaggagctcgatttatatgattagtgcaaatagtaattgcatttaagtataaaccgtggcgtagatctttcctcaagaattagagattttattcactacctttgtatttgtttttattattatttggtgtggcaaatctgcctactagcaaaaaagatcccat

SEQ ID NO: 41793 - protein, 444 aa, Arabidopsis thaliana
  peptide (1)..(444): Ceres Seq. ID no. 13497215
MVRRQEEEKKAEKGMRLGKYELGRTLGEGNFGKVKFAKDTVSGHSFAVKIIDKSRIADLNFSLQIKREIRTLKMLKHPHIVRLHEVLASKTKINMVMELVTGGELFDRIVSNGKLTETDGRKMFQQLIDGISYCHSKGVFHRDLKLENVLLDAKGHIKITDFGLSALPQHFRDDGLLHTTCGSPNYVAPEVLANRGYDGAASDIWSCGVILYVILTGCLPFDDRNLAVLYQKICKGDPPIPRWLSPGARTMIKRMLDPNPVTRITVVGIKASEWFKLEYIPSIPDDDDEEEVDTDDDAFSIQELGSEEGKGSDSPTIINAFQLIGMSSFLDLSGFFEQENVSERRIRFTSNSSAKDLLEKIETAVTEMGFSVQKKHAKLRVNQEERTQKGQVGLSVTAEVFEIKPSLNVVELRKSYGDSCLYRQLYERLLKDVGTSSPEQEIVT

SEQ ID NO: 41794 - protein, 430 aa, Arabidopsis thaliana
  peptide (1)..(430): Ceres Seq. ID no. 13497216
MRLGKYELGRTLGEGNFGKVKFAKDTVSGHSFAVKIIDKSRIADLNFSLQIKREIRTLKMLKHPHIVRLHEVLASKTKINMVMELVTGGELFDRIVSNGKLTETDGRKMFQQLIDGISYCHSKGVFHRDLKLENVLLDAKGHIKITDFGLSALPQHFRDDGLLHTTCGSPNYVAPEVLANRGYDGAASDIWSCGVILYVILTGCLPFDDRNLAVLYQKICKGDPPIPRWLSPGARTMIKRMLDPNPVTRITVVGIKASEWFKLEYIPSIPDDDDEEEVDTDDDAFSIQELGSEEGKGSDSPTIINAFQLIGMSSFLDLSGFFEQENVSERRIRFTSNSSAKDLLEKIETAVTEMGFSVQKKHAKLRVNQEERTQKGQVGLSVTAEVFEIKPSLNVVELRKSYGDSCLYRQLYERLLKDVGTSSPEQEIVT

SEQ ID NO: 41795 - protein, 371 aa, Arabidopsis thaliana
  peptide (1)..(371): Ceres Seq. ID no. 13497217
MLKHPHIVRLHEVLASKTKINMVMELVTGGELFDRIVSNGKLTETDGRKMFQQLIDGISYCHSKGVFHRDLKLENVLLDAKGHIKITDFGLSALPQHFRDDGLLHTTCGSPNYVAPEVLANRGYDGAASDIWSCGVILYVILTGCLPFDDRNLAVLYQKICKGDPPIPRWLSPGARTMIKRMLDPNPVTRITVVGIKASEWFKLEYIPSIPDDDDEEEVDTDDDAFSIQELGSEEGKGSDSPTIINAFQLIGMSSFLDLSGFFEQENVSERRIRFTSNSSAKDLLEKIETAVTEMGFSVQKKHAKLRVNQEERTQKGQVGLSVTAEVFEIKPSLNVVELRKSYGDSCLYRQLYERLLKDVGTSSPEQEIVT

SEQ ID NO: 41796 - DNA, 1239 bp, Arabidopsis thaliana
  misc_feature (1)..(1239): Ceres Seq. ID no. 13488045
  misc_feature (1)..(1239): Ortholog of  Ceres SEQ ID NO 13596474 as cited in SEQ ID NO 62169
  misc_feature (1)..(1239): Ortholog of  Ceres SEQ ID NO 13598714 as cited in SEQ ID NO 62656
  misc_feature (1)..(1239): Ortholog of  Ceres SEQ ID NO 13596969 as cited in SEQ ID NO 63375
  misc_feature (1)..(1239): Ortholog of  Ceres SEQ ID NO 13597519 as cited in SEQ ID NO 64759
  misc_feature (1)..(1239): Ortholog of  Ceres SEQ ID NO 13597870 as cited in SEQ ID NO 64982
  misc_feature (1)..(1239): Ortholog of  Ceres SEQ ID NO 13656123 as cited in SEQ ID NO 65212
aaattcatcaaagccaatcaaattgagagagatatcaagaaagcaaaataatgaagttggccgtggtctcagtcgttgtcatactcggagttctcgtggcttggccggtatcggctggccgaaaagacttacctggagcgggaggatacggaggcgatgacgatgatgatacaaagtcattgttccctttggacaacctattatcgtttgaattattatgataggatttgtccagattttgagaaaatcgttgttacgaaagtgagggaatggactaagagtgactcttcccttggtcccgccctcctccgccttatcttccacgattgtggcgtcacgggatgtgatgcgtctgttcttctagactacgaagggacagagagaagatctccggctagcaaaacactaagaggcttcgagctaattgacgatatcaagtccgagatggagaaatcatgccccggcaaagtatcctgcgccgacatcctaacatcagccagccgtgccgccaccgtccaacttggtggtccttactggcccaacgtctacggtcgtcgtgactccaaacactcttacgctagagacgtagagaaagtcccttcaggccgtcgtgatgttaccgcccttctcgaaacgtttcagtcatacggtctcaacgtcctcgacctagttgtcctttccggggcccacaccatcggaaaagcgtcctgtggcaccatccagtcgaggctttacaactacaacgcaaccagtggttcagatccttcgattgacgcaaaatacgctgattacttgcaacgcaggtgtcgctgggcctctgagaccgtcgatctcgaccctgtaactccagcagtgttcgataatcagtactacattaatcttcagaagcatatgggagttttgtcgactgatcaggagcttgttaaggacccaaggactgctccgcttgtaaagactttcgcagagcaatcacctcagatattcagacagcagtttgctgtgtccatggctaagctggtcaacgttggagttctcactggtgaagatcgtgtcggagagatcaggaaggtttgcagcaaatctaactccagagcttactaaattataatcatcatccctcatgagaaggatcttttgtttcttgaaataatttcttgtttggtttttgagctcttttctattgcaattttgtaatttgttgtatgaacaagaacaaaaactgtgaattattttcgttgc

SEQ ID NO: 41797 - protein, 314 aa, Arabidopsis thaliana
  peptide (1)..(314): Ceres Seq. ID no. 13488046
MTMMIQSHCSLWTTYYRLNYYDRICPDFEKIVVTKVREWTKSDSSLGPALLRLIFHDCGVTGCDASVLLDYEGTERRSPASKTLRGFELIDDIKSEMEKSCPGKVSCADILTSASRAATVQLGGPYWPNVYGRRDSKHSYARDVEKVPSGRRDVTALLETFQSYGLNVLDLVVLSGAHTIGKASCGTIQSRLYNYNATSGSDPSIDAKYADYLQRRCRWASETVDLDPVTPAVFDNQYYINLQKHMGVLSTDQELVKDPRTAPLVKTFAEQSPQIFRQQFAVSMAKLVNVGVLTGEDRVGEIRKVCSKSNSRAY

SEQ ID NO: 41798 - protein, 312 aa, Arabidopsis thaliana
  peptide (1)..(312): Ceres Seq. ID no. 13488047
MMIQSHCSLWTTYYRLNYYDRICPDFEKIVVTKVREWTKSDSSLGPALLRLIFHDCGVTGCDASVLLDYEGTERRSPASKTLRGFELIDDIKSEMEKSCPGKVSCADILTSASRAATVQLGGPYWPNVYGRRDSKHSYARDVEKVPSGRRDVTALLETFQSYGLNVLDLVVLSGAHTIGKASCGTIQSRLYNYNATSGSDPSIDAKYADYLQRRCRWASETVDLDPVTPAVFDNQYYINLQKHMGVLSTDQELVKDPRTAPLVKTFAEQSPQIFRQQFAVSMAKLVNVGVLTGEDRVGEIRKVCSKSNSRAY

SEQ ID NO: 41799 - protein, 311 aa, Arabidopsis thaliana
  peptide (1)..(311): Ceres Seq. ID no. 13488048
MIQSHCSLWTTYYRLNYYDRICPDFEKIVVTKVREWTKSDSSLGPALLRLIFHDCGVTGCDASVLLDYEGTERRSPASKTLRGFELIDDIKSEMEKSCPGKVSCADILTSASRAATVQLGGPYWPNVYGRRDSKHSYARDVEKVPSGRRDVTALLETFQSYGLNVLDLVVLSGAHTIGKASCGTIQSRLYNYNATSGSDPSIDAKYADYLQRRCRWASETVDLDPVTPAVFDNQYYINLQKHMGVLSTDQELVKDPRTAPLVKTFAEQSPQIFRQQFAVSMAKLVNVGVLTGEDRVGEIRKVCSKSNSRAY

SEQ ID NO: 41800 - DNA, 1262 bp, Arabidopsis thaliana
  misc_feature (1)..(1262): Ceres Seq. ID no. 12395472
  misc_feature (1)..(1262): Ortholog of  Ceres SEQ ID NO 15226540 as cited in SEQ ID NO 58479
  misc_feature (1)..(1262): Ortholog of  Ceres SEQ ID NO 13581611 as cited in SEQ ID NO 59028
  misc_feature (1)..(1262): Ortholog of  Ceres SEQ ID NO 13596689 as cited in SEQ ID NO 62728
aatggattacttttcttccacacatatataacttaactctctctttttctcttttgctttaaccccctcaaagaaaagataagagccttttaaagttttttttttaccttctcttcatggacttgtctgtacttgataggcttaagtggctgcaacagcaacaaatggtttcacctgagtttcttcagatacttggctcagatgggagagaagagctcaaaagagttgagagttacttgggaaacaacaatgatgagctgcagagtttcagacattttcccgaattcggaccggattatgatactactgatggctgcatttctaggacaagtagcttccatatggagccagtgaagaataatggacacagcagagccattaccttgcagaacaagagaaaaccagagggtaagacagaaaagagagagaagaagaagatcaaagcagaggatgaaacagagccaagcatgaaagggaaatcaaacatgagtaacacagagacatcttcagaaattcagaaaccagattacattcatgttagggctagacgaggtgaagccaccgacagacatagcttagcagagagggcaagaagagaaaagataagcaagaagatgaaatgtctacaagatattgttcctggatgcaacaaagttactggaaaagctggtatgcttgatgagatcatcaactatgtccaatctctgcaacaacaagtcgagttcttgtcgatgaaactctctgtcataaatccagaacttgagtgtcatatcgatgatttatccgcaaaacagtttcaggcttacttcacaggtcctccagaaggtgactcgaagcagtcaatcatggcggattttcggtcttttccattacatcagcaaggatctttagattactcagtcataaactcagaccacaccacatctctcggcgctaaagatcatacatcatcaagctgggaaactcactcacagtgtctttacaacagcttgagaaccgattctgtttccagtttcttcagcctcaagtaaaaaaattagggatagcctcattaaaaaaatcgcggttttttgttgttgtcttatccatttatctatcttatctgaaatttgaaccagaaagacagaggaaaccaatccaaagatctttctcaatctattatcttcatacaaatatagtgatttacatatattccaggggatatgtatatgtgtagaagaaagagaaaaaactcttgtggtcatagcaattcctttttttgt

SEQ ID NO: 41801 - protein, 304 aa, Arabidopsis thaliana
  peptide (1)..(304): Ceres Seq. ID no. 12395473
MDLSVLDRLKWLQQQQMVSPEFLQILGSDGREELKRVESYLGNNNDELQSFRHFPEFGPDYDTTDGCISRTSSFHMEPVKNNGHSRAITLQNKRKPEGKTEKREKKKIKAEDETEPSMKGKSNMSNTETSSEIQKPDYIHVRARRGEATDRHSLAERARREKISKKMKCLQDIVPGCNKVTGKAGMLDEIINYVQSLQQQVEFLSMKLSVINPELECHIDDLSAKQFQAYFTGPPEGDSKQSIMADFRSFPLHQQGSLDYSVINSDHTTSLGAKDHTSSSWETHSQCLYNSLRTDSVSSFFSLK

SEQ ID NO: 41802 - protein, 288 aa, Arabidopsis thaliana
  peptide (1)..(288): Ceres Seq. ID no. 12395474
MVSPEFLQILGSDGREELKRVESYLGNNNDELQSFRHFPEFGPDYDTTDGCISRTSSFHMEPVKNNGHSRAITLQNKRKPEGKTEKREKKKIKAEDETEPSMKGKSNMSNTETSSEIQKPDYIHVRARRGEATDRHSLAERARREKISKKMKCLQDIVPGCNKVTGKAGMLDEIINYVQSLQQQVEFLSMKLSVINPELECHIDDLSAKQFQAYFTGPPEGDSKQSIMADFRSFPLHQQGSLDYSVINSDHTTSLGAKDHTSSSWETHSQCLYNSLRTDSVSSFFSLK

SEQ ID NO: 41803 - protein, 229 aa, Arabidopsis thaliana
  peptide (1)..(229): Ceres Seq. ID no. 12395475
MEPVKNNGHSRAITLQNKRKPEGKTEKREKKKIKAEDETEPSMKGKSNMSNTETSSEIQKPDYIHVRARRGEATDRHSLAERARREKISKKMKCLQDIVPGCNKVTGKAGMLDEIINYVQSLQQQVEFLSMKLSVINPELECHIDDLSAKQFQAYFTGPPEGDSKQSIMADFRSFPLHQQGSLDYSVINSDHTTSLGAKDHTSSSWETHSQCLYNSLRTDSVSSFFSLK

SEQ ID NO: 41804 - DNA, 1141 bp, Arabidopsis thaliana
  misc_feature (1)..(1141): Ceres Seq. ID no. 12738927
  misc_feature (1)..(1141): Ortholog of  Ceres SEQ ID NO 14306565 as cited in SEQ ID NO 53000
  misc_feature (1)..(1141): Ortholog of  Ceres SEQ ID NO 14312192 as cited in SEQ ID NO 59249
aacaaaggcagacagacaaaaggctaattcggagctctcctccacatcttcttccaaaacacaaacaaacccccaaatttccagaaaaatcagatcattctttcatcaatctcgtcttctttaatcataggtgggaattcatcagctcaaaaacgctgtacccgatcgttttacgactcaaatcagagaagctgattcttttccaatcattccaatttccatttcttccttgggaggttttacaccaaattagccgtcgaaaggggtgcttctttgatctaatttcgatggcgggattagagaaaaacgctgatttctcagggaagacgacgaaatcggctacaacgacgtcgtttttcaacaggtcgcttacaattcacggaagaacagtggtggattcgggccccaaatcccacaatctcaatccttctctcaatcgtaccacctccattaccaaattctacacccccgtagaatcgatgggaacttctcttaaaggcaaagtcaaaaacctttgtagattattcgagacttccaaacccgtcaaacctgccttagctgagattcctcagaagcagaaatccggtaaatcccttttacccgaatcgcggatatcgcctttttcgagcttaaacaactcggtcatccgtcttcccgggacagaggacaggattgtggtgtattttactagcttgagagggattagacggacgtatgaggattgctatgctgtcagaatgatatttagagggtttcgggtttggatcgatgagcgcgacgtctccatggatatcgcttataggaaagagttgcagattgcaatgggagagaagtctgtgtctttgcctcaagttttcattatgggcaagtatgttggtggtgctgatgtgatcaagagtttgtttgagattggtgagcttgctaagattcttaaagagtttccaatgagacaaccagggtttgtttgccattgctgtggggacattagatttgttccgtgttccaattgtagtggcagcaagaaactgtttgatgaggatgaagatagggtcaagagatgtcctgaatgcaatgagaatggattgatacgttgtcctgattgctcttcttgagatatatcatcaatgaacctgaaaaaacc

SEQ ID NO: 41805 - protein, 369 aa, Arabidopsis thaliana
  peptide (1)..(369): Ceres Seq. ID no. 12738928
QRQTDKRLIRSSPPHLLPKHKQTPKFPEKSDHSFINLVFFNHRWEFISSKTLYPIVLRLKSEKLILFQSFQFPFLPWEVLHQISRRKGCFFDLISMAGLEKNADFSGKTTKSATTTSFFNRSLTIHGRTVVDSGPKSHNLNPSLNRTTSITKFYTPVESMGTSLKGKVKNLCRLFETSKPVKPALAEIPQKQKSGKSLLPESRISPFSSLNNSVIRLPGTEDRIVVYFTSLRGIRRTYEDCYAVRMIFRGFRVWIDERDVSMDIAYRKELQIAMGEKSVSLPQVFIMGKYVGGADVIKSLFEIGELAKILKEFPMRQPGFVCHCCGDIRFVPCSNCSGSKKLFDEDEDRVKRCPECNENGLIRCPDCSS

SEQ ID NO: 41806 - protein, 274 aa, Arabidopsis thaliana; identical to SEQ ID NO: 40766
  peptide (1)..(274): Ceres Seq. ID no. 12738929

SEQ ID NO: 41807 - protein, 210 aa, Arabidopsis thaliana; identical to SEQ ID NO: 40767
  peptide (1)..(210): Ceres Seq. ID no. 12738930

SEQ ID NO: 41808 - DNA, 1801 bp, Arabidopsis thaliana
  misc_feature (1)..(1801): Ceres Seq. ID no. 12328410
  misc_feature (1)..(1801): Ortholog of  Ceres SEQ ID NO 13594209 as cited in SEQ ID NO 59089
  misc_feature (1)..(1801): Ortholog of  Ceres SEQ ID NO 15169627 as cited in SEQ ID NO 64517
  misc_feature (1)..(1801): Ortholog of  Ceres SEQ ID NO 14307952 as cited in SEQ ID NO 66029
  misc_feature (1)..(1801): Ortholog of  Ceres SEQ ID NO 12614124 as cited in SEQ ID NO 68392
ttattcaaaatattttcaccaactaaaaagagatacatcgaaacaaatctctctaatcatatctaagttatacctttttctttataaacaataaacaatagctttgatttgaagcaagaggagcaacaatggagatcaccactatcatattcctcatcatatcctctctcaccttctccatcttccttaaactcatcttcttcttctcaactcacaaactcccaccgggaccacctcgttttccggtcatcggaaacatcatctggcttaagaaaaacaacttctccgatttccaaggcgttctccgtgacttagcctcccgtcacggaccaatcataacactccacgtaggctccaaaccttccatctgggtcacagacagatcactcgctcaccaagcccttgtccaaaacggtgccgttttctccgaccgttctctcgctctccctaccaccaaagtcatcaccagcaaccaacacgacatccactcctccgtctatggctctctctggagaaccctccgccgcaacctcacctccgaaatcctccagccctcgcgcgtgaaagcacacgcgccgtcgaggaaatggtctctcgagattctcgtggatctgttcgagacagagcagagagagaaaggacatatctccgacgctttagatcatttacgtcacgctatgttttatttgttggctctgatgtgtttcggagagaaactgagaaaagaagagatcagagagatcgaagaagctcagtaccaaatgctcataagctacaccaagttcagcgtcctcaacatcttcccaagcgtaaccaagttcttgctccggcgaaaatggaaagagtttttagaactaaggaaatctcaagagagcgttatacttcgatacgtgaacgcaagaagcaaagaaaccaccggagatgttctctgttacgtcgatacgctgctgaatcttgagatcccgacggaggagaaagaaggagggaagaagaggaaactgagtgactcggagatcgtgagtctgtgttcggagtttcttaacgcagctacggatccaacggcgacgtcgatgcagtggatcatggcgatcatggtgaagtatccagagatacagaggaaagtatacgaggaaatgaagactgtgttcgccggagaagaagaagaaagagaagagatcagagaagaggatttggggaagttgagttacctcaaagctgtgatcttggagtgtctaagaagacaccctcctggtcattacttgtcttaccataaggtcacacgcgacaccgttttgggtggatttctcattccgcgccaaggtactataaactttatggtaggagaaatgggccgggacccaaaaatatgggaagatcctctaacgttcaagccagaaagatttctagagaacggagaagcatgtgattttgatatgacgggaactcgcgagattaaaatgatgccgtttggagcgggacgacggatgtgtcccggctacgcgctttcgttgcttcacctggaatattatgtggccaatttggtttggaaattcgagtggaaatgtgtggaaggtgaagaagttgatctatccgagaagcaacagttcatcacaatggtcatgaaaaaccctttcaaagcaaatatttatccaaggagaaagtgatatttgcttttgtcatattatcaaaaaggcccattgggcttatttgtcgtatgtatattaaaaactttgtctcatatgtattaaaacaatttgggcctttaatgggtttcaatataaagatgtcaacacttttagtc

SEQ ID NO: 41809 - protein, 511 aa, Arabidopsis thaliana
  peptide (1)..(511): Ceres Seq. ID no. 12328411
MEITTIIFLIISSLTFSIFLKLIFFFSTHKLPPGPPRFPVIGNIIWLKKNNFSDFQGVLRDLASRHGPIITLHVGSKPSIWVTDRSLAHQALVQNGAVFSDRSLALPTTKVITSNQHDIHSSVYGSLWRTLRRNLTSEILQPSRVKAHAPSRKWSLEILVDLFETEQREKGHISDALDHLRHAMFYLLALMCFGEKLRKEEIREIEEAQYQMLISYTKFSVLNIFPSVTKFLLRRKWKEFLELRKSQESVILRYVNARSKETTGDVLCYVDTLLNLEIPTEEKEGGKKRKLSDSEIVSLCSEFLNAATDPTATSMQWIMAIMVKYPEIQRKVYEEMKTVFAGEEEEREEIREEDLGKLSYLKAVILECLRRHPPGHYLSYHKVTRDTVLGGFLIPRQGTINFMVGEMGRDPKIWEDPLTFKPERFLENGEACDFDMTGTREIKMMPFGAGRRMCPGYALSLLHLEYYVANLVWKFEWKCVEGEEVDLSEKQQFITMVMKNPFKANIYPRRK

SEQ ID NO: 41810 - protein, 328 aa, Arabidopsis thaliana
  peptide (1)..(328): Ceres Seq. ID no. 12328412
MFYLLALMCFGEKLRKEEIREIEEAQYQMLISYTKFSVLNIFPSVTKFLLRRKWKEFLELRKSQESVILRYVNARSKETTGDVLCYVDTLLNLEIPTEEKEGGKKRKLSDSEIVSLCSEFLNAATDPTATSMQWIMAIMVKYPEIQRKVYEEMKTVFAGEEEEREEIREEDLGKLSYLKAVILECLRRHPPGHYLSYHKVTRDTVLGGFLIPRQGTINFMVGEMGRDPKIWEDPLTFKPERFLENGEACDFDMTGTREIKMMPFGAGRRMCPGYALSLLHLEYYVANLVWKFEWKCVEGEEVDLSEKQQFITMVMKNPFKANIYPRRK

SEQ ID NO: 41811 - protein, 321 aa, Arabidopsis thaliana
  peptide (1)..(321): Ceres Seq. ID no. 12328413
MCFGEKLRKEEIREIEEAQYQMLISYTKFSVLNIFPSVTKFLLRRKWKEFLELRKSQESVILRYVNARSKETTGDVLCYVDTLLNLEIPTEEKEGGKKRKLSDSEIVSLCSEFLNAATDPTATSMQWIMAIMVKYPEIQRKVYEEMKTVFAGEEEEREEIREEDLGKLSYLKAVILECLRRHPPGHYLSYHKVTRDTVLGGFLIPRQGTINFMVGEMGRDPKIWEDPLTFKPERFLENGEACDFDMTGTREIKMMPFGAGRRMCPGYALSLLHLEYYVANLVWKFEWKCVEGEEVDLSEKQQFITMVMKNPFKANIYPRRK

SEQ ID NO: 41812 - DNA, 1285 bp, Arabidopsis thaliana
  misc_feature (1)..(1285): Ceres Seq. ID no. 12330888
  misc_feature (1)..(1285): Ortholog of  Ceres SEQ ID NO 14312769 as cited in SEQ ID NO 55493
  misc_feature (1)..(1285): Ortholog of  Ceres SEQ ID NO 13639300 as cited in SEQ ID NO 56701
gtcatttatttcagatgttcagtctcacctctgctgggattcgggtgcattcaaagagatcattcttcttcttcttcttctttgaagatgctaatatcgcctccgatcaaagccaatgatccaaaatctcgacttgttttacatgcagtatcagagtcaaaatccagctcagagatgagtggtgttgcaaaggatgaagagaaatctgatgaatatagccaagacatgactcaagctatgggtgctgttctaacttacaggcacgagttaggaatgaactacaactttattcgtccagatctaattgttggatcctgcttacagacccctgaagatgttgacaagcttcgtaaaattggagttaaaaccatattttgcttgcaacaagatccagacctggaatattttggagtagacataagcagcatccaagcctatgctaagaaatatagtgatattcagcatattcgctgtgaaattagagactttgatgcatttgatttgagaatgcgtcttccagccgtggttggtactctttacaaagctgttaagcgaaatggaggagttacatatgtgcactgcactgctggaatgggaaggcctcctgctgttgcgttgacatacatgttctgggtgcaaggctataagcttatggaagctcataaattacttatgagcaaaaggtcgtgctttccgaagctggatgctatcagaaatgcaacaattgatattcttacaggactcaagaggaagactgttactctgacactgaaagataaggggttctccagagtagaaatttctggccttgacattggatggggacagaggatacctctaacactggacaagggaacaggattctggatcctaaagagagaactgcctgaaggacagtttgaatataaatacatcatagatggtgaatggacacacaatgaggccgaaccgtttataggacctaacaaagacggccataccaacaattacgctaaagtagtggacgatccaacaagtgtggatggtacaactcgggagagactatcgagcgaagaccctgagctgttggaggaagaacgctcgaaactaatccagttcttggagacttgttctgaggcagaagtttgagagttgagagcatccgactagactatgtgaatgtacaacttactagtaacaataaaatgcttcatgttagtaatacatacagttacgcttatagcagcaaaagaaaaaaacatgaagttagtagtactatgttcaagtataatatatagtttaaaag

SEQ ID NO: 41813 - protein, 375 aa, Arabidopsis thaliana
  peptide (1)..(375): Ceres Seq. ID no. 12330889
VIYFRCSVSPLLGFGCIQRDHSSSSSSLKMLISPPIKANDPKSRLVLHAVSESKSSSEMSGVAKDEEKSDEYSQDMTQAMGAVLTYRHELGMNYNFIRPDLIVGSCLQTPEDVDKLRKIGVKTIFCLQQDPDLEYFGVDISSIQAYAKKYSDIQHIRCEIRDFDAFDLRMRLPAVVGTLYKAVKRNGGVTYVHCTAGMGRPPAVALTYMFWVQGYKLMEAHKLLMSKRSCFPKLDAIRNATIDILTGLKRKTVTLTLKDKGFSRVEISGLDIGWGQRIPLTLDKGTGFWILKRELPEGQFEYKYIIDGEWTHNEAEPFIGPNKDGHTNNYAKVVDDPTSVDGTTRERLSSEDPELLEEERSKLIQFLETCSEAEV

SEQ ID NO: 41814 - protein, 346 aa, Arabidopsis thaliana
  peptide (1)..(346): Ceres Seq. ID no. 12330890
MLISPPIKANDPKSRLVLHAVSESKSSSEMSGVAKDEEKSDEYSQDMTQAMGAVLTYRHELGMNYNFIRPDLIVGSCLQTPEDVDKLRKIGVKTIFCLQQDPDLEYFGVDISSIQAYAKKYSDIQHIRCEIRDFDAFDLRMRLPAVVGTLYKAVKRNGGVTYVHCTAGMGRPPAVALTYMFWVQGYKLMEAHKLLMSKRSCFPKLDAIRNATIDILTGLKRKTVTLTLKDKGFSRVEISGLDIGWGQRIPLTLDKGTGFWILKRELPEGQFEYKYIIDGEWTHNEAEPFIGPNKDGHTNNYAKVVDDPTSVDGTTRERLSSEDPELLEEERSKLIQFLETCSEAEV

SEQ ID NO: 41815 - protein, 317 aa, Arabidopsis thaliana
  peptide (1)..(317): Ceres Seq. ID no. 12330891
MSGVAKDEEKSDEYSQDMTQAMGAVLTYRHELGMNYNFIRPDLIVGSCLQTPEDVDKLRKIGVKTIFCLQQDPDLEYFGVDISSIQAYAKKYSDIQHIRCEIRDFDAFDLRMRLPAVVGTLYKAVKRNGGVTYVHCTAGMGRPPAVALTYMFWVQGYKLMEAHKLLMSKRSCFPKLDAIRNATIDILTGLKRKTVTLTLKDKGFSRVEISGLDIGWGQRIPLTLDKGTGFWILKRELPEGQFEYKYIIDGEWTHNEAEPFIGPNKDGHTNNYAKVVDDPTSVDGTTRERLSSEDPELLEEERSKLIQFLETCSEAEV

SEQ ID NO: 41816 - DNA, 1349 bp, Arabidopsis thaliana
  misc_feature (1)..(1349): Ceres Seq. ID no. 13492429
  misc_feature (1)..(1349): Ortholog of  Ceres SEQ ID NO 15174863 as cited in SEQ ID NO 51281
  misc_feature (1)..(1349): Ortholog of  Ceres SEQ ID NO 12614972 as cited in SEQ ID NO 61986
  misc_feature (1)..(1349): Ortholog of  Ceres SEQ ID NO 12625706 as cited in SEQ ID NO 64144
  misc_feature (1)..(1349): Ortholog of  Ceres SEQ ID NO 13584933 as cited in SEQ ID NO 65009
  misc_feature (1)..(1349): Ortholog of  Ceres SEQ ID NO 12634984 as cited in SEQ ID NO 0
  misc_feature (1)..(1349): Ortholog of  Ceres SEQ ID NO 13599377 as cited in SEQ ID NO 0
acaccaacacacaaagattccattacaaataaacaattttcatatatatctataacaaaaaaaaacaatggctacctcaagcatgaagagcattccaatggcgatcccaagtttctccatgtgtcacaagctcgagctccttaaagaaggcaaaactcgcgacgtcccgaaagccgaagaagatgaagggctaagctgcgagttccaagagatgttggattctcttcctaaggagagaggatggagaactcgttacctttacctattccaagggttttggtgccaagccaaagagattcaagccatcatgtctttccaaaaacatttccaatccctcgaaaacgacgtcgttctcgccaccatacctaaatccggtacaacctggctaaaagctttaactttcaccatccttaaccgtcaccggtttgatccggttgcctcgagtaccaaccaccctcttttcacttccaaccctcatgaccttgtacctttcttcgagtacaagctttacgccaacggagatgttcccgatctctcgggtctagccagtccaagaacgttcgcaacccacttaccgttcggttccctaaaggaaacgatcgagaaacccggtgtgaaggtcgtgtacttgtgccggaacccgtttgacacattcatctcttcgtggcattacaccaacaacatcaaatccgagtcagtgagcccagtcttgctagaccaagcttttgatctgtattgccggggagtgatcgggtttggcccgttttgggaacacatgttgggatactggagagagagcttgaagagaccagagaaagtcttctttttaaggtacgaggatctcaaagacgacatcgagaccaacttgaagaggcttgcaactttcttagagcttcctttcaccgaagaagaggaacgaaagggagttgtgaaggctatcgccgagctgtgtagcttcgagaatctgaagaagttggaggtgaacaagtcaaacaagtcgatcaagaactttgagaatcgattcttgtttcggaaaggagaagtgagtgattgggttaactatttgtcaccttcacaagtggaaagattgtcagccttagtggatgacaagttaggtggatctggtctcactttcaggttgagctaaatataaggccacgtgcccccatttctactcttgttctgagggcctactatatacgttaagctaagttaaggcagttgtattgttgttacagatagacatcgaagcaacgtaacgtccataattaagttaatttgtcgtttttatttttgtcaacaccgaagtttgtcgaatttttattttattaaatatcgcttgtttttgc

SEQ ID NO: 41817 - protein, 359 aa, Arabidopsis thaliana
  peptide (1)..(359): Ceres Seq. ID no. 13492430
MATSSMKSIPMAIPSFSMCHKLELLKEGKTRDVPKAEEDEGLSCEFQEMLDSLPKERGWRTRYLYLFQGFWCQAKEIQAIMSFQKHFQSLENDVVLATIPKSGTTWLKALTFTILNRHRFDPVASSTNHPLFTSNPHDLVPFFEYKLYANGDVPDLSGLASPRTFATHLPFGSLKETIEKPGVKVVYLCRNPFDTFISSWHYTNNIKSESVSPVLLDQAFDLYCRGVIGFGPFWEHMLGYWRESLKRPEKVFFLRYEDLKDDIETNLKRLATFLELPFTEEEERKGVVKAIAELCSFENLKKLEVNKSNKSIKNFENRFLFRKGEVSDWVNYLSPSQVERLSALVDDKLGGSGLTFRLS

SEQ ID NO: 41818 - protein, 354 aa, Arabidopsis thaliana
  peptide (1)..(354): Ceres Seq. ID no. 13492431
MKSIPMAIPSFSMCHKLELLKEGKTRDVPKAEEDEGLSCEFQEMLDSLPKERGWRTRYLYLFQGFWCQAKEIQAIMSFQKHFQSLENDVVLATIPKSGTTWLKALTFTILNRHRFDPVASSTNHPLFTSNPHDLVPFFEYKLYANGDVPDLSGLASPRTFATHLPFGSLKETIEKPGVKVVYLCRNPFDTFISSWHYTNNIKSESVSPVLLDQAFDLYCRGVIGFGPFWEHMLGYWRESLKRPEKVFFLRYEDLKDDIETNLKRLATFLELPFTEEEERKGVVKAIAELCSFENLKKLEVNKSNKSIKNFENRFLFRKGEVSDWVNYLSPSQVERLSALVDDKLGGSGLTFRLS

SEQ ID NO: 41819 - protein, 349 aa, Arabidopsis thaliana
  peptide (1)..(349): Ceres Seq. ID no. 13492432
MAIPSFSMCHKLELLKEGKTRDVPKAEEDEGLSCEFQEMLDSLPKERGWRTRYLYLFQGFWCQAKEIQAIMSFQKHFQSLENDVVLATIPKSGTTWLKALTFTILNRHRFDPVASSTNHPLFTSNPHDLVPFFEYKLYANGDVPDLSGLASPRTFATHLPFGSLKETIEKPGVKVVYLCRNPFDTFISSWHYTNNIKSESVSPVLLDQAFDLYCRGVIGFGPFWEHMLGYWRESLKRPEKVFFLRYEDLKDDIETNLKRLATFLELPFTEEEERKGVVKAIAELCSFENLKKLEVNKSNKSIKNFENRFLFRKGEVSDWVNYLSPSQVERLSALVDDKLGGSGLTFRLS

SEQ ID NO: 41820 - DNA, 1333 bp, Arabidopsis thaliana
  misc_feature (1)..(1333): Ceres Seq. ID no. 12738345
  misc_feature (1)..(1333): Ortholog of  Ceres SEQ ID NO 13596319 as cited in SEQ ID NO 67933
gatggaatgtttgctggttctgctacagtcttttttgcattcattgggtttgattcggttgcaagtaccgcagaggaggtgagaaatcctcaacgggatttaccgattggtattggtcttgctctcttgttatgttgttctctctacatgatggtctccatagttattgttggtttaattccttactatgcaatggatcccgacaccccgatatcctctgcattcgctagtcatgacatgcaatgggctgtatacttaataactttaggagctgtcatggcactctgctcagctttaatgggtgcccttctccctcagccacgaattctgatggcaatggctagggatggtctgctcccttctattttttcagacattaataaacgcacacaggttccggttaaagcaacagtggcaactgggttgtgtgctgcagccttagccttctttatggatgtttcacagcttgcagggatggtgagtgttgggacacttctggcatttacaatggtggcaatatcagtgttgatactcagatatgttcctccagatgagcaacctcttccgtcatctcttcaagagagaattgattctgtttcctttatatgtggtgaaacaacgtcatccggtcatgttggtacttccgatagcagtcaccagcctttaataattaataatgatgctttggtcgatgtcccgcttatcaagaatcaagaagctctagggtgtttggttctcagcgaggaaaccagaaggatagtcgctggatggagcattatgttcacatgtgttggggccttccttttaagttattcggcatcaagcctgagcttcccagggcttattagatatccgttgtgtggtgttggtggatgtctcctccttgctggtttgattgctctgagttctatagatcaggatgatgcgagacacacttttggacattctggaggttacatgtgcccgtttgttcccctcctacctatcatctgcattctcatcaacatgtaccttttggttaaccttggatctgcgacatgggctcgtgtatcggtgtggctgcttataggagtgattgtgtatgttttctatggtcggaaaaacagttcgcttgccaatgcagtttacgtaactacagctcatgcggaggagatatatcgcgaacatgaaggttctttggcatagtctgagaaagcagcatctcttttgttatatatgtaacacaattctgtattatctttatctggatgtaacagcaagagtggcactatctatttgtttgcaaaaagatctgtccacggcctttgtaaataatatatatcatcatcaattc

SEQ ID NO: 41821 - protein, 394 aa, Arabidopsis thaliana
  peptide (1)..(394): Ceres Seq. ID no. 12738346
DGMFAGSATVFFAFIGFDSVASTAEEVRNPQRDLPIGIGLALLLCCSLYMMVSIVIVGLIPYYAMDPDTPISSAFASHDMQWAVYLITLGAVMALCSALMGALLPQPRILMAMARDGLLPSIFSDINKRTQVPVKATVATGLCAAALAFFMDVSQLAGMVSVGTLLAFTMVAISVLILRYVPPDEQPLPSSLQERIDSVSFICGETTSSGHVGTSDSSHQPLIINNDALVDVPLIKNQEALGCLVLSEETRRIVAGWSIMFTCVGAFLLSYSASSLSFPGLIRYPLCGVGGCLLLAGLIALSSIDQDDARHTFGHSGGYMCPFVPLLPIICILINMYLLVNLGSATWARVSVWLLIGVIVYVFYGRKNSSLANAVYVTTAHAEEIYREHEGSLA

SEQ ID NO: 41822 - protein, 392 aa, Arabidopsis thaliana
  peptide (1)..(392): Ceres Seq. ID no. 12738347
MFAGSATVFFAFIGFDSVASTAEEVRNPQRDLPIGIGLALLLCCSLYMMVSIVIVGLIPYYAMDPDTPISSAFASHDMQWAVYLITLGAVMALCSALMGALLPQPRILMAMARDGLLPSIFSDINKRTQVPVKATVATGLCAAALAFFMDVSQLAGMVSVGTLLAFTMVAISVLILRYVPPDEQPLPSSLQERIDSVSFICGETTSSGHVGTSDSSHQPLIINNDALVDVPLIKNQEALGCLVLSEETRRIVAGWSIMFTCVGAFLLSYSASSLSFPGLIRYPLCGVGGCLLLAGLIALSSIDQDDARHTFGHSGGYMCPFVPLLPIICILINMYLLVNLGSATWARVSVWLLIGVIVYVFYGRKNSSLANAVYVTTAHAEEIYREHEGSLA

SEQ ID NO: 41823 - protein, 345 aa, Arabidopsis thaliana
  peptide (1)..(345): Ceres Seq. ID no. 12738348
MMVSIVIVGLIPYYAMDPDTPISSAFASHDMQWAVYLITLGAVMALCSALMGALLPQPRILMAMARDGLLPSIFSDINKRTQVPVKATVATGLCAAALAFFMDVSQLAGMVSVGTLLAFTMVAISVLILRYVPPDEQPLPSSLQERIDSVSFICGETTSSGHVGTSDSSHQPLIINNDALVDVPLIKNQEALGCLVLSEETRRIVAGWSIMFTCVGAFLLSYSASSLSFPGLIRYPLCGVGGCLLLAGLIALSSIDQDDARHTFGHSGGYMCPFVPLLPIICILINMYLLVNLGSATWARVSVWLLIGVIVYVFYGRKNSSLANAVYVTTAHAEEIYREHEGSLA

SEQ ID NO: 41824 - DNA, 1344 bp, Arabidopsis thaliana
  misc_feature (1)..(1344): Ceres Seq. ID no. 13645789
  misc_feature (1)..(1344): Ortholog of  Ceres SEQ ID NO 14302824 as cited in SEQ ID NO 67794
gttgctctgaaaccctaaaagaagctaaatctagcaatggcgagaagatccgtttcgatatttaatcgccttctggcgaatcctccttctccattcacatcactgtcccgatccatcacctacatgcctagacccggagatggagctccacgaaccgtaaccctaattcccggcgacggaatcggacctttggtgaccggtgcggtggaacaggtcatggaagcgatgcacgcgccagtgcatttcgagagatacgaggttctaggaaacatgagaaaagtccctgaagaagtgatcgagtctgtgaagaaaaacaaggtttgtctcaaaggtggattagcgactcctgttggtgggggtgtcagttctttgaatatgcaattgaggaaagaactcgatatcttcgcttctcttgtcaattgcatcaatgtccctggattagtgacgcgacacgaaaatgttgatatcgttgtgataagagagaacactgaaggagagtactcaagtctcgagcatgaggttgttcctggtgttgtcgagagccttaaggtgataacaaagttttgttctgagagaatagcgagatatgcatttgagtatgcgtatctaaacaataggaagaaagtgactgctgttcataaagctaacattatgaagcttgcggatgggctcttccttgaatcttgtagagaggttgctaaacattattcggggattacttacaatgaaataatcgtagacaattgctgtatgcagcttgtcgccaagcctgagcaatttgatgtcatggtcacacctaatttgtatggtaaccttatagcaaacacggcggctggaatagccggtggcactggagtgatgccaggagggaatgttggtgcagaacatgcgatattcgagcaaggcgcatcagcagggaatgtggggaatgataagatggtggaacagaagaaagcgaatccggtggctctacttctctcgtcggctatgatgctaagacatctccggtttcctacttttgctgatcggcttgaaacagcagtgaaacaagtgattaaagaaggaaaatatagaacaaaagatcttggaggagattgtaccacgcaggaagttgttgatgctgtcatagcagctcttgagtgaaaccatgtgagcttctctgcttctgcttgcttcttctttcgtcttttccatttcaactaagagaaaagtgttggttttctctgttttacgtcgctcttttttgtttcttgattcattttacaagttcattttttcttgtttgagcatgagctctatgatacagaataaaaacaataaagacagacatatgcaatgttgttt

SEQ ID NO: 41825 - protein, 368 aa, Arabidopsis thaliana
  peptide (1)..(368): Ceres Seq. ID no. 13645790
MARRSVSIFNRLLANPPSPFTSLSRSITYMPRPGDGAPRTVTLIPGDGIGPLVTGAVEQVMEAMHAPVHFERYEVLGNMRKVPEEVIESVKKNKVCLKGGLATPVGGGVSSLNMQLRKELDIFASLVNCINVPGLVTRHENVDIVVIRENTEGEYSSLEHEVVPGVVESLKVITKFCSERIARYAFEYAYLNNRKKVTAVHKANIMKLADGLFLESCREVAKHYSGITYNEIIVDNCCMQLVAKPEQFDVMVTPNLYGNLIANTAAGIAGGTGVMPGGNVGAEHAIFEQGASAGNVGNDKMVEQKKANPVALLLSSAMMLRHLRFPTFADRLETAVKQVIKEGKYRTKDLGGDCTTQEVVDAVIAALE

SEQ ID NO: 41826 - protein, 339 aa, Arabidopsis thaliana
  peptide (1)..(339): Ceres Seq. ID no. 13645791
MPRPGDGAPRTVTLIPGDGIGPLVTGAVEQVMEAMHAPVHFERYEVLGNMRKVPEEVIESVKKNKVCLKGGLATPVGGGVSSLNMQLRKELDIFASLVNCINVPGLVTRHENVDIVVIRENTEGEYSSLEHEVVPGVVESLKVITKFCSERIARYAFEYAYLNNRKKVTAVHKANIMKLADGLFLESCREVAKHYSGITYNEIIVDNCCMQLVAKPEQFDVMVTPNLYGNLIANTAAGIAGGTGVMPGGNVGAEHAIFEQGASAGNVGNDKMVEQKKANPVALLLSSAMMLRHLRFPTFADRLETAVKQVIKEGKYRTKDLGGDCTTQEVVDAVIAALE

SEQ ID NO: 41827 - protein, 308 aa, Arabidopsis thaliana
  peptide (1)..(308): Ceres Seq. ID no. 13645792
MEAMHAPVHFERYEVLGNMRKVPEEVIESVKKNKVCLKGGLATPVGGGVSSLNMQLRKELDIFASLVNCINVPGLVTRHENVDIVVIRENTEGEYSSLEHEVVPGVVESLKVITKFCSERIARYAFEYAYLNNRKKVTAVHKANIMKLADGLFLESCREVAKHYSGITYNEIIVDNCCMQLVAKPEQFDVMVTPNLYGNLIANTAAGIAGGTGVMPGGNVGAEHAIFEQGASAGNVGNDKMVEQKKANPVALLLSSAMMLRHLRFPTFADRLETAVKQVIKEGKYRTKDLGGDCTTQEVVDAVIAALE

SEQ ID NO: 41828 - DNA, 1390 bp, Arabidopsis thaliana
  misc_feature (1)..(1390): Ceres Seq. ID no. 13489498
  misc_feature (1)..(1390): Ortholog of  Ceres SEQ ID NO 13600141 as cited in SEQ ID NO 0
ctactactctttttgggtatatctgtttacttgaatctcttaccatgaaagttcttcaattatttccttacttaaatctaagttgctttatgttgcgtttgattaatgggatcgtacttttctaaagttctagccttttatacgaaaaagcaacttttcgtgattttcttcaattgaatagctaaaattaggaaattttccttttcagtgttgtttttctttttctattttctttcttttctcttcttcttcttcttcaagcgatgaaccagaaaagttttgattttgattttggtgaaccaggaaagtggtactcgatctgtggtttgttgattctgaattagtatattcctggaaaattctgttcagtttcataatttaaacaagatgcagctcaaagtccctgaacatcaggttgcaggacacattgctaaagacgggaagcctggtcctctcgtagatgacaagggtcggttcttcaagccacttcagggcgattctcgtggtgaaatcgaggtaaagttctacgaatctttctcctcaaacacagaggttccagaacacatccatagatatttcccggtgtatcacggcactcaagcagttgaaggttctgatggagcagccatgatggtgttggaaaatcttcttgcagaatacacaaaaccatcagtaatggatgttaagatgggttcgagaacatggtatcctgatgcatctgaagaatacatccaaaaatgtttgaagaaagacacgggtaccacaaccgtgtcatcgggtttcaggatctctggtttcgaagtgtatgatcacaaagaatcgagtttctggaagcccgagaggaagcttcttcgcgggctcgatgtagatggagcgagattgactctgaggaagtttgtatcatctaactcactttcggacactggctcgaaacctgactctgcttttgcctcgagtgtttacggcggttcccacgggatcttaacgcagttgctggaactcaagacctggttcgagaaccaaacgctctaccatttcaactcttgttcgattttaatggtctatgagaatgaatccatcttaaagggaaatgatgatgatgctagaccacaagtcaagctggtggattttgctcatgttcttgatggtaatggtgtcattgaccataacttcttgggtggtctttgctctttcataaacttcattcgtgagattcttcagagcccagatgagtctgcagattcttagatttaagttaatttgtttgttatggctttggctgattccaatttttggatataaacttatgtttccttcacatatgtacttgattacctaaagagcagaatacattcgtactcttttctcaaagagtattccatttctaggc

SEQ ID NO: 41829 - protein, 286 aa, Arabidopsis thaliana
  peptide (1)..(286): Ceres Seq. ID no. 13489499
MQLKVPEHQVAGHIAKDGKPGPLVDDKGRFFKPLQGDSRGEIEVKFYESFSSNTEVPEHIHRYFPVYHGTQAVEGSDGAAMMVLENLLAEYTKPSVMDVKMGSRTWYPDASEEYIQKCLKKDTGTTTVSSGFRISGFEVYDHKESSFWKPERKLLRGLDVDGARLTLRKFVSSNSLSDTGSKPDSAFASSVYGGSHGILTQLLELKTWFENQTLYHFNSCSILMVYENESILKGNDDDARPQVKLVDFAHVLDGNGVIDHNFLGGLCSFINFIREILQSPDESADS

SEQ ID NO: 41830 - protein, 206 aa, Arabidopsis thaliana
  peptide (1)..(206): Ceres Seq. ID no. 13489500
MMVLENLLAEYTKPSVMDVKMGSRTWYPDASEEYIQKCLKKDTGTTTVSSGFRISGFEVYDHKESSFWKPERKLLRGLDVDGARLTLRKFVSSNSLSDTGSKPDSAFASSVYGGSHGILTQLLELKTWFENQTLYHFNSCSILMVYENESILKGNDDDARPQVKLVDFAHVLDGNGVIDHNFLGGLCSFINFIREILQSPDESADS

SEQ ID NO: 41831 - protein, 205 aa, Arabidopsis thaliana
  peptide (1)..(205): Ceres Seq. ID no. 13489501
MVLENLLAEYTKPSVMDVKMGSRTWYPDASEEYIQKCLKKDTGTTTVSSGFRISGFEVYDHKESSFWKPERKLLRGLDVDGARLTLRKFVSSNSLSDTGSKPDSAFASSVYGGSHGILTQLLELKTWFENQTLYHFNSCSILMVYENESILKGNDDDARPQVKLVDFAHVLDGNGVIDHNFLGGLCSFINFIREILQSPDESADS

SEQ ID NO: 41832 - DNA, 1375 bp, Arabidopsis thaliana
  misc_feature (1)..(1375): Ceres Seq. ID no. 12357743
  misc_feature (1)..(1375): Ortholog of  Ceres SEQ ID NO 13595497 as cited in SEQ ID NO 51127
tccataaggccacaacagatcttcttgttcctctctctcaatctctctctctaaaactcttattttcttcgtaagagatggaactagcgttgtctctaggcgacaatactaagaaacagttctcttttatggagaagaactcgaagattaagaatccctctgtctcgtcgacatctatttccgagacgatcttgggttctgcatggctttagatgttgcttttggtggtcacagatcgttgtcatcctcttcgtctccgtcggtagaggatgagaagaagaaaccggcgcccagaacaaaaacttctgacgaatttagggtttcgtcttctgtagatccaccattacagcttcagcttcacttccctaattggctccctgagaacagtaaaggtcgacaaggaggaagaattcccttaggagcagctacggttgtggaggaggaagaggaggaggaggaagcggtgcctagtatgtcagtatcgccgccggatagtgtaacgtcgtcgtttcaattggactttgggattaaaagttatggttatgagagaagaagcaataagagagatattgatgatgaagtggagagatcagcttcaagagccagcaacgaagacaacgatgacgagaatggatccactaggaagaaacttagactctccaaagaccaatctgcttttcttgaagacagcttcaaagaacacagtacccttaatcctaaacagaagattgcattggcgaagcagttgaatcttcgtcctcgtcaggttgaagtctggtttcaaaacagacgagccaggacaaagctgaattgagaaccttgaagacttccacacccttttacatgcaacttccggccactactctcactatgtgcccttcttgtgaacgtgttgccacttcagcagcacagccctccacgtcagctgcccacaacctctgtttgtccacgtcatcattgattccggttaagcctcggccggccaaacaagtttcatgaaagcacctgcgaaatacagtttgagcaaacggtcgagctagagtggttttaaaagttgtcttcttgtgtatatatttattttacttttcatattttattagaaaccgctattttgaaagacgaatagattgattatccggttagtgttttgtttttcttagataggaccggataaaaaacagatggagcaaaagggttgacatgttttattgaatgatagaggaatatagaagaagacaaaaggaaaaggggaaaatatttggtttgatcttatagacttttatttgtgattaaagcaaaagggtttgtcgtgcaaaaaatcttcactagatacgtttaattatcgtgttttaaatttattaaacttatttttctc

SEQ ID NO: 41833 - protein, 203 aa, Arabidopsis thaliana
  peptide (1)..(203): Ceres Seq. ID no. 12357744
MALDVAFGGHRSLSSSSSPSVEDEKKKPAPRTKTSDEFRVSSSVDPPLQLQLHFPNWLPENSKGRQGGRIPLGAATVVEEEEEEEEAVPSMSVSPPDSVTSSFQLDFGIKSYGYERRSNKRDIDDEVERSASRASNEDNDDENGSTRKKLRLSKDQSAFLEDSFKEHSTLNPKQKIALAKQLNLRPRQVEVWFQNRRARTKLN

SEQ ID NO: 41834 - protein, 113 aa, Arabidopsis thaliana
  peptide (1)..(113): Ceres Seq. ID no. 12357745
MSVSPPDSVTSSFQLDFGIKSYGYERRSNKRDIDDEVERSASRASNEDNDDENGSTRKKLRLSKDQSAFLEDSFKEHSTLNPKQKIALAKQLNLRPRQVEVWFQNRRARTKLN

SEQ ID NO: 41835 - DNA, 762 bp, Arabidopsis thaliana
  misc_feature (1)..(762): Ceres Seq. ID no. 13488184
  misc_feature (1)..(762): Ortholog of  Ceres SEQ ID NO 15169037 as cited in SEQ ID NO 58715
  misc_feature (1)..(762): Ortholog of  Ceres SEQ ID NO 15224680 as cited in SEQ ID NO 59829
agtgtagcgtcgcatcatacactccttcggttcccgacgaatcgctgcttttttctctctctctctccgtcgctgaaaaatgtcggcaagacctgaaggaagtccgccggaggttacgctcgagacctccatgggtcctttcaccgtcgagatgtattacaaacactccccgagaacttgccggaacttccttgagctatcccggagaggttactatgacaacgttctgtttcacagaatcgtcaaggatttcattgtgcaaggtggggatcctacaggaactggaagaggtggtgaatccatttatggttcgaagtttgaggatgagataaacaaagagttgaagcacacaggagccggaattttatcaatggcgaacgctggtcctaatacaaatgggagtcaatttttcatcaccttagccccacaaccgtccttggatggaaaacacacaatatttggtagagtgtgccgaggcatggaggtgatcaagaggctcggtagtgtccaaaccgataacaccgacaggccgatccatgaagtgaagattctaaggaccaaagtgatcgattgattgggtcagaggagtttttgtcaaggagaagaagaagcatttagtaaaccgtttatgacatgaagaactataactctgtgtactgatcccttgatactattgtagactggtttttgtctaagtcttgactctactttgatggaaaaaaatgattgaaatacgttaaatcactctctatttctttttgc

SEQ ID NO: 41836 - protein, 164 aa, Arabidopsis thaliana
  peptide (1)..(164): Ceres Seq. ID no. 13488185
MSARPEGSPPEVTLETSMGPFTVEMYYKHSPRTCRNFLELSRRGYYDNVLFHRIVKDFIVQGGDPTGTGRGGESIYGSKFEDEINKELKHTGAGILSMANAGPNTNGSQFFITLAPQPSLDGKHTIFGRVCRGMEVIKRLGSVQTDNTDRPIHEVKILRTKVID

SEQ ID NO: 41837 - protein, 147 aa, Arabidopsis thaliana
  peptide (1)..(147): Ceres Seq. ID no. 13488186
MGPFTVEMYYKHSPRTCRNFLELSRRGYYDNVLFHRIVKDFIVQGGDPTGTGRGGESIYGSKFEDEINKELKHTGAGILSMANAGPNTNGSQFFITLAPQPSLDGKHTIFGRVCRGMEVIKRLGSVQTDNTDRPIHEVKILRTKVID

SEQ ID NO: 41838 - protein, 140 aa, Arabidopsis thaliana
  peptide (1)..(140): Ceres Seq. ID no. 13488187
MYYKHSPRTCRNFLELSRRGYYDNVLFHRIVKDFIVQGGDPTGTGRGGESIYGSKFEDEINKELKHTGAGILSMANAGPNTNGSQFFITLAPQPSLDGKHTIFGRVCRGMEVIKRLGSVQTDNTDRPIHEVKILRTKVID

SEQ ID NO: 41839 - DNA, 2861 bp, Arabidopsis thaliana
  misc_feature (1)..(2861): Ceres Seq. ID no. 13499928
  misc_feature (1)..(2861): Ortholog of  Ceres SEQ ID NO 15227026 as cited in SEQ ID NO 52193
  misc_feature (1)..(2861): Ortholog of  Ceres SEQ ID NO 13595454 as cited in SEQ ID NO 56502
gattctgtcttctccttcttccaaccgcgtcatcaatttatatttagacaacaaaaaaaaaaaaagccagagcctctccggtaatttctcattttcccgagcgatcgtccatggcggacatcgacatcggaaccgcagcaacaacaggaggaaacgaaggaagaggaggcacacgagaacgtctaataaaccgagaaaacaagttcacacgtagcgtatctcacgcacaagacgagctccacagtttccggaaatatctccgatggatgtgcgtagatcagtcgagtccttggacggcggttctatcatggtctatgttcgttgttttcacgctcgttgttcctgccacgtctcacttcatgctcgcttgctctgactgcgatagccatcactctaggccgtacgattccgttgttcagctttctcttagcagtttcgctgctctttcgtttctttgtctctccagattcgttagcaagtatggtctccgacggttcctattctttgataagctttgggatgagagcgagaccgttcgtctaggctacaccaatcagctcaatagatcgcttaagattctctcctacttcgtgtctccttgtttcttagcgatgagctcttataagatatggtggtatgcttcaggagcttctcagattcctttccttggtaatgttatcttgagtgatacagttgcttgtttgatggagctctgctcgtggttgtaccgtactaccgtgatctttctggtttgtgtcctcttccgtctcatctgccatctccagattcttaggctgcaagactttgcccaggttttccagatggattcagatgttggttctatcttgtctgaacatctccgtatcagacgtcatctgagaatcatcagccaccgataccgaacctttatattgttgtccttgatattagtcactggaagtcagttttactctctgcttattaccactaaggcctacgctgaattgaatatctacagagctggagaactagcactatgttcaatgacgctggtcactgcactgctcattttactacgaagtgcatcaaagatcacacacaaggctcaggcggtgacttgtcttgcagccaagtggcatgtatgtgcgacgatagaatcctttgagactgtggatggagagactccaaggttagttgatagagcaagcggacacggatactatccaacagatgatgataatggagaatcagatagtgaagattatggagacgaagaagatgatttcgataacaacaatctcattcctgcttatgcttatagcaccatatcattccaaaaacggcaagctctagtgaattactttgagaacaatagatcaggaatcacggtgtttgggtttacacttgatagaagcactctccatacaatcttcggtatcgaaatgtcgcttgttctctggttacttggtaagaccattggaatttcttgaatcattctttggatcattaaagttctcaaagttttggctcccttgttggatgatgttggtatatgcatgtatgtatacacagaggctctatgtaaaataacgttttctcgtttttttatcactgtaaatcatcttattttttctttaacatgtcgatttgtaatagaattcatgtgttcaacaaaaaaaaaaaaaaaaaaaaaaaaaaaaaaaaaaaaaaaaaaaaaaaaaaaaaaaaaaaaaaaaaaaaaaaaaaaaaaaaaaaaaaaataaaaaaaaaaaaaaaagagctcttggatccatgagaacaaagatgagattgaatatttcaggcttagtgatctttgggactgttttgatgagccaagcgcgtatggacttggatcaaaggtcgacttaaacaatggtgaatccgttatgcagtactatgtcccgtatctatccgccattcaaatctatactaacaaatctacagccatttctaggattcatagtgatgtggttgattgtgagagtgaatgttggagtgatgatagtgagattgagaagttgtctaggtcaatgagcagtggttctagcaaaatatgggattctgtttctgatgattcgggttatgagatcgatggtacttcttcattgatgcgagataagctcggttctattgattttcagtactttgagtccgttaaaccgcacttgcgtgttcctcttaccgctaaggtaaatgaattggctgagaagtatccgggactttcgactctaaggagtgttgatttgtctccagcaagttggttggccattgcttggtatccaatttaccacattccctctcggaagaccgataaagatttatcgacatgtttcttgagttatcatactttatcttcggctttccaaggtaacttgatagagggagacgatgagattaacgaaaccatgaaagaagaaacattgtgttttgatgaaggaccggtgaccaagagtatacctttggctccttttggtttagttagttacaaattgcaaggagatttgtggaggaatcaagaatgtggtgaccaaggacgtatagtttatcttcgcagtgcagctgattcgtggctgaaacagcttaatgttcaagatcaccatgaccatagcttcttctccatgaacatgagcttgtagatccaaaaaaagagagccaagactctgtttttttgctctgtttttagttgttttcttagccaagactctgtttttttgctctgtttttagttgttttaagaatcttaggtatatagcaactcgaaatgtagaggtttcgtttccttctgcttgaacccgtggaaaataaagagaattaggcttgtttttggctttatgagaaggaagttttttttgttttgtgag

SEQ ID NO: 41840 - protein, 452 aa, Arabidopsis thaliana
  peptide (1)..(452): Ceres Seq. ID no. 13499929
MADIDIGTAATTGGNEGRGGTRERLINRENKFTRSVSHAQDELHSFRKYLRWMCVDQSSPWTAVLSWSMFVVFTLVVPATSHFMLACSDCDSHHSRPYDSVVQLSLSSFAALSFLCLSRFVSKYGLRRFLFFDKLWDESETVRLGYTNQLNRSLKILSYFVSPCFLAMSSYKIWWYASGASQIPFLGNVILSDTVACLMELCSWLYRTTVIFLVCVLFRLICHLQILRLQDFAQVFQMDSDVGSILSEHLRIRRHLRIISHRYRTFILLSLILVTGSQFYSLLITTKAYAELNIYRAGELALCSMTLVTALLILLRSASKITHKAQAVTCLAAKWHVCATIESFETVDGETPRLVDRASGHGYYPTDDDNGESDSEDYGDEEDDFDNNNLIPAYAYSTISFQKRQALVNYFENNRSGITVFGFTLDRSTLHTIFGIEMSLVLWLLGKTIGIS

SEQ ID NO: 41841 - protein, 400 aa, Arabidopsis thaliana
  peptide (1)..(400): Ceres Seq. ID no. 13499930
MCVDQSSPWTAVLSWSMFVVFTLVVPATSHFMLACSDCDSHHSRPYDSVVQLSLSSFAALSFLCLSRFVSKYGLRRFLFFDKLWDESETVRLGYTNQLNRSLKILSYFVSPCFLAMSSYKIWWYASGASQIPFLGNVILSDTVACLMELCSWLYRTTVIFLVCVLFRLICHLQILRLQDFAQVFQMDSDVGSILSEHLRIRRHLRIISHRYRTFILLSLILVTGSQFYSLLITTKAYAELNIYRAGELALCSMTLVTALLILLRSASKITHKAQAVTCLAAKWHVCATIESFETVDGETPRLVDRASGHGYYPTDDDNGESDSEDYGDEEDDFDNNNLIPAYAYSTISFQKRQALVNYFENNRSGITVFGFTLDRSTLHTIFGIEMSLVLWLLGKTIGIS

SEQ ID NO: 41842 - protein, 384 aa, Arabidopsis thaliana
  peptide (1)..(384): Ceres Seq. ID no. 13499931
MFVVFTLVVPATSHFMLACSDCDSHHSRPYDSVVQLSLSSFAALSFLCLSRFVSKYGLRRFLFFDKLWDESETVRLGYTNQLNRSLKILSYFVSPCFLAMSSYKIWWYASGASQIPFLGNVILSDTVACLMELCSWLYRTTVIFLVCVLFRLICHLQILRLQDFAQVFQMDSDVGSILSEHLRIRRHLRIISHRYRTFILLSLILVTGSQFYSLLITTKAYAELNIYRAGELALCSMTLVTALLILLRSASKITHKAQAVTCLAAKWHVCATIESFETVDGETPRLVDRASGHGYYPTDDDNGESDSEDYGDEEDDFDNNNLIPAYAYSTISFQKRQALVNYFENNRSGITVFGFTLDRSTLHTIFGIEMSLVLWLLGKTIGIS

SEQ ID NO: 41843 - DNA, 1489 bp, Arabidopsis thaliana
  misc_feature (1)..(1489): Ceres Seq. ID no. 12337654
  misc_feature (1)..(1489): Ortholog of  Ceres SEQ ID NO 12609146 as cited in SEQ ID NO 52118
  misc_feature (1)..(1489): Ortholog of  Ceres SEQ ID NO 13638136 as cited in SEQ ID NO 58644
  misc_feature (1)..(1489): Ortholog of  Ceres SEQ ID NO 15225826 as cited in SEQ ID NO 64774
  misc_feature (1)..(1489): Ortholog of  Ceres SEQ ID NO 13599119 as cited in SEQ ID NO 0
aatccgctatgtccgtcagatcataagaagagcaaaatcgatgcttttcagtcaaaatatggtcgctgattccgccgagatcagtgttatcgatgtcaagtctcatctctccgttgcgaaagatcctagtaactttcagattgccgaaattcgaattcatgattcaatttgtattgatattccgagctctgaagaaacgcctcttttagaatcgatcaagagttgttctgcaactactattgaagagcatgttactgagtttgtaccaaatataagctcagggagttatgcagataagggtgactaccgggagtacatggaagatgaacacatatgcatagacgacctttcagatcatcttgggtcttccttttacagatttccggtgcctatggctttctacggtgtgtttgatggccatggtggatctgacgcatcacagtatataaaagagaatgctatgagcttgttctttgaagatgctgtttttcgacaatcgccctctgttgtggactctcttttcttgaaagaactggagacatctcaccgggaagcttataggcttgctgatcttgcaatggaggacgaaagaatagttagtagttcgtgcggaacaaccgcattgactgctcttgtaatcggaagacatttaatggtcgctaatgttggtgattgtcgtgcggtgctctgcagaaaaggaaaagctgttgatatgtcatttgatcacaaatctacatttgagccagaacggagacgagtagaggatttaggagggtactttgaaggcgagtatctctatggtgaccttgctgttacaagagctcttggagactggtcaataaagaggttttcaccccttggtgaatctttgtcacctctgatctcagacccggacattcaacagatgattctaactgaggaagacgagttcttgattatgggatgtgacggtgtttgggacgtgatgacaagccagtatgctgttactttcgtcaggcaaggacttaggagacacggtgatcctagaaggtgcgctatggaacttggaagggaagcgttaaggctagactcatcagataacgttacagtggtggtcatctgcttctcatcatccccagctcctcagagaagaaggatacggttctgtgtttccgatgaagctcgagcccggttacagacaatgctagaaggctaactgatgaaggttttttagcggtcttgaggagggcacaatgtatatattatagcaacaaagatggggttttgagataacaaccctcccaaggccaaattatttgatgacattattacatctctctgatattggatgaaataaaaggaaggcaaaaagagaagatgaaggacttcttctttatgttgttaaaatgttcacaagtgttagccattttttatctatttattctgtaggattattgagcacttatgtacaaaaactgattaagattaaggaattcaggtgattaagttt

SEQ ID NO: 41844 - protein, 397 aa, Arabidopsis thaliana
  peptide (1)..(397): Ceres Seq. ID no. 12337655
IRYVRQIIRRAKSMLFSQNMVADSAEISVIDVKSHLSVAKDPSNFQIAEIRIHDSICIDIPSSEETPLLESIKSCSATTIEEHVTEFVPNISSGSYADKGDYREYMEDEHICIDDLSDHLGSSFYRFPVPMAFYGVFDGHGGSDASQYIKENAMSLFFEDAVFRQSPSVVDSLFLKELETSHREAYRLADLAMEDERIVSSSCGTTALTALVIGRHLMVANVGDCRAVLCRKGKAVDMSFDHKSTFEPERRRVEDLGGYFEGEYLYGDLAVTRALGDWSIKRFSPLGESLSPLISDPDIQQMILTEEDEFLIMGCDGVWDVMTSQYAVTFVRQGLRRHGDPRRCAMELGREALRLDSSDNVTVVVICFSSSPAPQRRRIRFCVSDEARARLQTMLEG

SEQ ID NO: 41845 - protein, 384 aa, Arabidopsis thaliana
  peptide (1)..(384): Ceres Seq. ID no. 12337656
MLFSQNMVADSAEISVIDVKSHLSVAKDPSNFQIAEIRIHDSICIDIPSSEETPLLESIKSCSATTIEEHVTEFVPNISSGSYADKGDYREYMEDEHICIDDLSDHLGSSFYRFPVPMAFYGVFDGHGGSDASQYIKENAMSLFFEDAVFRQSPSVVDSLFLKELETSHREAYRLADLAMEDERIVSSSCGTTALTALVIGRHLMVANVGDCRAVLCRKGKAVDMSFDHKSTFEPERRRVEDLGGYFEGEYLYGDLAVTRALGDWSIKRFSPLGESLSPLISDPDIQQMILTEEDEFLIMGCDGVWDVMTSQYAVTFVRQGLRRHGDPRRCAMELGREALRLDSSDNVTVVVICFSSSPAPQRRRIRFCVSDEARARLQTMLEG

SEQ ID NO: 41846 - protein, 378 aa, Arabidopsis thaliana
  peptide (1)..(378): Ceres Seq. ID no. 12337657
MVADSAEISVIDVKSHLSVAKDPSNFQIAEIRIHDSICIDIPSSEETPLLESIKSCSATTIEEHVTEFVPNISSGSYADKGDYREYMEDEHICIDDLSDHLGSSFYRFPVPMAFYGVFDGHGGSDASQYIKENAMSLFFEDAVFRQSPSVVDSLFLKELETSHREAYRLADLAMEDERIVSSSCGTTALTALVIGRHLMVANVGDCRAVLCRKGKAVDMSFDHKSTFEPERRRVEDLGGYFEGEYLYGDLAVTRALGDWSIKRFSPLGESLSPLISDPDIQQMILTEEDEFLIMGCDGVWDVMTSQYAVTFVRQGLRRHGDPRRCAMELGREALRLDSSDNVTVVVICFSSSPAPQRRRIRFCVSDEARARLQTMLEG

SEQ ID NO: 41847 - DNA, 923 bp, Arabidopsis thaliana
  misc_feature (1)..(923): Ceres Seq. ID no. 12439752
  misc_feature (1)..(923): Ortholog of  Ceres SEQ ID NO 15172968 as cited in SEQ ID NO 51755
  misc_feature (1)..(923): Ortholog of  Ceres SEQ ID NO 12610046 as cited in SEQ ID NO 55841
  misc_feature (1)..(923): Ortholog of  Ceres SEQ ID NO 13663630 as cited in SEQ ID NO 67065
gataaagtagaaaccctagtttgaattttcacggccgacctctctctcatcctccgagtattgttggcttcagaccaaatcttctccggcgctgcggcgtttcccccgcaaaaggtagaagtagctgattacaggaacaatgatgtcctttgaaatgaatgaccggaaaaaaatcgggttaggcctgacaggatttggcgtattcttctcgtttttgggaatagtcttcgtctttgataagggattacttgccatgggaaatattcttttcatctcgggggttagtctaaccattggcttcaagtctaccatgcagttcttcatgaagcgtcaaaattataagggaaccatctcttttggcgtcggtttcttctttgttatcatcgggtggcctatcttgggaatgatgttggagacctatggctttttcgtactcttcagtggcttctggcctaccttggcagtctttgctcagaagatacccgttctgggttggattattcagcaaccatatattagatcgttctttgacaagtaccggggcaagcgagtgccggtctagtcttccatcccgagcagagagacgattcactgagctagatgcagctgaacaggcgattaaagtttttggaagaagaagtttcgtgatcctgtagaaaactaaaaccataggagaaagaaaataggaaggaaaagaacgtacaatttgaagctgtgtgtctatgtttcaggtgaagtagatgaatcttcgtccaggttgcaaattgcaacagaatgttaaaaatgtaatgttttatttttgggttagttataggttacacctcaattttggaaactaattaaagagaaacaattgtttctattcacaaaaactttttgtaaccattacgcattacataattttaatcatattgttattaact

SEQ ID NO: 41848 - protein, 140 aa, Arabidopsis thaliana; identical to SEQ ID NO: 25588
  peptide (1)..(140): Ceres Seq. ID no. 12439753

SEQ ID NO: 41849 - protein, 139 aa, Arabidopsis thaliana; identical to SEQ ID NO: 25589
  peptide (1)..(139): Ceres Seq. ID no. 12439754

SEQ ID NO: 41850 - protein, 135 aa, Arabidopsis thaliana; identical to SEQ ID NO: 25590
  peptide (1)..(135): Ceres Seq. ID no. 12439755

SEQ ID NO: 41851 - DNA, 1353 bp, Arabidopsis thaliana
  misc_feature (1)..(1353): Ceres Seq. ID no. 13488887
  misc_feature (1)..(1353): Ortholog of  Ceres SEQ ID NO 13662367 as cited in SEQ ID NO 67774
ctcatcagcaaacacaaacacacgactagataaactctaaatcctcacagcagatcacgtgctaatcacatggctccggggcttactcaaaccgctgatgctatgtccaccgtgacgataacaaaaccgtcactgccatcagtccaagacagcgatcgagcttacgtgacgtttcttgctggaaacggtgattacgtgaaaggagtcgttggtttagccaaagggttaaggaaagtcaaatcggcttatccactcgtagtagcgatgttacccgacgtcccggaggaacaccgtcgtatacttgtggatcaaggatgcatcgtccgtgaaatcgaacccgtttacccacccgagaaccaaactcagttcgccatggcttattacgtcatcaactactctaaactccgtatctggaagtttgtggagtatagtaaaatgatatatttagatggagacattcaagtttacgaaaacatcgatcacttgtttgacctaccagatggctatttgtacgcggtgatggattgtttctgtgagaaaacatggagtcacacgccgcaatacaagatcagatattgccaacaatgccccgacaaagtccagtggccaaaagcggagcttggagagccaccggctctttacttcaacgccggaatgttcttgtacgagcctaacctcgagacttacgaggatctactacgaacacttaaaatcactcctccgactcctttcgctgaacaggattttttgaacatgtactttaagaaaatctacaagccgattcctttagtgtacaatctcgtccttgcgatgttatggcgtcacccagaaaatgtagagcttggaaaagtcaaggtggttcactactgtgcagcgggttcgaagccgtggagatacacagggaaagaagcgaacatggagagggaagatataaaaatgttagtgaaaaaatggtgggacatttacgacgacgaatccttggattacaagaaacctgttaccgttgtggacacagaggtcgatctcgtgaatctgaagccgttcatcaccgctcttactgaagctggccggctcaactacgtgaccgcaccgtccgctgcttgaatgttgccaggagttaaaattgtcggtggatcaggtagttatttttctttccggtcagtaagaggttggggattatgtgtcgggtcgacaaccacacatactgtctctggttccaatgctttggacgttgacatgtgatttgctttacttttttgtctataatgtgtgttatcctcaattttagcgtctatcttcgaatatcaaacttgagtgacaaaataaatattccaaataacaggtcttcttcac

SEQ ID NO: 41852 - protein, 344 aa, Arabidopsis thaliana
  peptide (1)..(344): Ceres Seq. ID no. 13488888
MAPGLTQTADAMSTVTITKPSLPSVQDSDRAYVTFLAGNGDYVKGVVGLAKGLRKVKSAYPLVVAMLPDVPEEHRRILVDQGCIVREIEPVYPPENQTQFAMAYYVINYSKLRIWKFVEYSKMIYLDGDIQVYENIDHLFDLPDGYLYAVMDCFCEKTWSHTPQYKIRYCQQCPDKVQWPKAELGEPPALYFNAGMFLYEPNLETYEDLLRTLKITPPTPFAEQDFLNMYFKKIYKPIPLVYNLVLAMLWRHPENVELGKVKVVHYCAAGSKPWRYTGKEANMEREDIKMLVKKWWDIYDDESLDYKKPVTVVDTEVDLVNLKPFITALTEAGRLNYVTAPSAA

SEQ ID NO: 41853 - protein, 333 aa, Arabidopsis thaliana
  peptide (1)..(333): Ceres Seq. ID no. 13488889
MSTVTITKPSLPSVQDSDRAYVTFLAGNGDYVKGVVGLAKGLRKVKSAYPLVVAMLPDVPEEHRRILVDQGCIVREIEPVYPPENQTQFAMAYYVINYSKLRIWKFVEYSKMIYLDGDIQVYENIDHLFDLPDGYLYAVMDCFCEKTWSHTPQYKIRYCQQCPDKVQWPKAELGEPPALYFNAGMFLYEPNLETYEDLLRTLKITPPTPFAEQDFLNMYFKKIYKPIPLVYNLVLAMLWRHPENVELGKVKVVHYCAAGSKPWRYTGKEANMEREDIKMLVKKWWDIYDDESLDYKKPVTVVDTEVDLVNLKPFITALTEAGRLNYVTAPSAA

SEQ ID NO: 41854 - protein, 279 aa, Arabidopsis thaliana
  peptide (1)..(279): Ceres Seq. ID no. 13488890
MLPDVPEEHRRILVDQGCIVREIEPVYPPENQTQFAMAYYVINYSKLRIWKFVEYSKMIYLDGDIQVYENIDHLFDLPDGYLYAVMDCFCEKTWSHTPQYKIRYCQQCPDKVQWPKAELGEPPALYFNAGMFLYEPNLETYEDLLRTLKITPPTPFAEQDFLNMYFKKIYKPIPLVYNLVLAMLWRHPENVELGKVKVVHYCAAGSKPWRYTGKEANMEREDIKMLVKKWWDIYDDESLDYKKPVTVVDTEVDLVNLKPFITALTEAGRLNYVTAPSAA

SEQ ID NO: 41855 - DNA, 1423 bp, Arabidopsis thaliana
  misc_feature (1)..(1423): Ceres Seq. ID no. 13495814
  misc_feature (1)..(1423): Ortholog of  Ceres SEQ ID NO 13595525 as cited in SEQ ID NO 56679
  misc_feature (1)..(1423): Ortholog of  Ceres SEQ ID NO 15226984 as cited in SEQ ID NO 62173
  misc_feature (1)..(1423): Ortholog of  Ceres SEQ ID NO 14302236 as cited in SEQ ID NO 68793
aattttctgtctatatatatattaaggatccaaattagggagagaccaaagaggaaattaataaccatcaatccaacaacgaatggagattgaagaagcgagtcgtgaaagtggacatgttgtgtgcggatcatggattcgtcgcccgaagaaagtaaactgggttcttatcgctaaagcttccaaacgccgtggctcatctgtttcttctcctgctctcctcaacatcttctcttttgaccccattactgcttctctttcctcctctcctttggcaacacacacgcttaaggatagtgatggtgatcctgtggctgtttcagtgcaccctggtggggattactttgtttgctcaacctccaaaggtggttgcaagttatttgagcttgtcggaggagcaacaggtattacgatcttagccaaagaactccttcctctccaaaatgctggactacaaaagtgtatggccttcagctttgatgggtctaaattagctgttgggggagtggatggatgtcttagaattatggagtggccaaacctaagtgtaattttggatgagccaaaggcacacaaatccatccgggacatggattttagtcttgactcagagttcttagctacaacatcaactgatggatcagctagaatatggaaagcagaagatggttttcctttgtctactttggaacgtagtggggatgaaaatattgaactgtgccgtttctctaaagacggaacaaaaccttttttgttttgtgctgctcaaagaggtgatacgcctatggtcaatgtttatgacattagtacatggaagaagcttgggttcaagaagctgtcaaggaagactgcatcgacaatggcagtgagcttggacgggaaatatattgctttgggtgggaaagatggagatgtatctgttgctgaagttaagacaatggaaatctaccactacagtaagaggctgcatcttggtcaatccattgcttcacttgagttctgccccagtgaaagggttatgctgacaacttctagcgaatggggagagatggtgaccaaactcactgtaccaaaggagtggaaagagtggcagatatatgcactgctgttttgcttgttcatggcatcagtgatagctgcatacgtattcttcgagaactcagattcgttttggaagttaccaatgggaaaagatcaaaaaagaccaaagattagtctatttggaggttcctcctccacgccttctgaggatcatagtaggtggaacttggacctatagaaagattatgtaactttcctctgctttttcttctttcttccttatcttgttgcagcgtttttttttgtttttttcctttcttctgattttgctctgacaaatacctgttgattaattgatttatttacagacaattactgttgc

SEQ ID NO: 41856 - protein, 398 aa, Arabidopsis thaliana
  peptide (1)..(398): Ceres Seq. ID no. 13495815
MEIEEASRESGHVVCGSWIRRPKKVNWVLIAKASKRRGSSVSSPALLNIFSFDPITASLSSSPLATHTLKDSDGDPVAVSVHPGGDYFVCSTSKGGCKLFELVGGATGITILAKELLPLQNAGLQKCMAFSFDGSKLAVGGVDGCLRIMEWPNLSVILDEPKAHKSIRDMDFSLDSEFLATTSTDGSARIWKAEDGFPLSTLERSGDENIELCRFSKDGTKPFLFCAAQRGDTPMVNVYDISTWKKLGFKKLSRKTASTMAVSLDGKYIALGGKDGDVSVAEVKTMEIYHYSKRLHLGQSIASLEFCPSERVMLTTSSEWGEMVTKLTVPKEWKEWQIYALLFCLFMASVIAAYVFFENSDSFWKLPMGKDQKRPKISLFGGSSSTPSEDHSRWNLDL

SEQ ID NO: 41857 - protein, 271 aa, Arabidopsis thaliana
  peptide (1)..(271): Ceres Seq. ID no. 13495816
MAFSFDGSKLAVGGVDGCLRIMEWPNLSVILDEPKAHKSIRDMDFSLDSEFLATTSTDGSARIWKAEDGFPLSTLERSGDENIELCRFSKDGTKPFLFCAAQRGDTPMVNVYDISTWKKLGFKKLSRKTASTMAVSLDGKYIALGGKDGDVSVAEVKTMEIYHYSKRLHLGQSIASLEFCPSERVMLTTSSEWGEMVTKLTVPKEWKEWQIYALLFCLFMASVIAAYVFFENSDSFWKLPMGKDQKRPKISLFGGSSSTPSEDHSRWNLDL

SEQ ID NO: 41858 - protein, 250 aa, Arabidopsis thaliana
  peptide (1)..(250): Ceres Seq. ID no. 13495817
MEWPNLSVILDEPKAHKSIRDMDFSLDSEFLATTSTDGSARIWKAEDGFPLSTLERSGDENIELCRFSKDGTKPFLFCAAQRGDTPMVNVYDISTWKKLGFKKLSRKTASTMAVSLDGKYIALGGKDGDVSVAEVKTMEIYHYSKRLHLGQSIASLEFCPSERVMLTTSSEWGEMVTKLTVPKEWKEWQIYALLFCLFMASVIAAYVFFENSDSFWKLPMGKDQKRPKISLFGGSSSTPSEDHSRWNLDL

SEQ ID NO: 41859 - DNA, 1089 bp, Arabidopsis thaliana
  misc_feature (1)..(1089): Ceres Seq. ID no. 12422180
  misc_feature (1)..(1089): Ortholog of  Ceres SEQ ID NO 14314775 as cited in SEQ ID NO 56844
  misc_feature (1)..(1089): Ortholog of  Ceres SEQ ID NO 14314628 as cited in SEQ ID NO 56888
aagtaaagcttttacctaattctcaaacattctttacacaaaaatatcaagagtgatatagatagcgagaaaaaatggacggtaggggagggtgttgcatagctaggtacgccattggctctggaccgtacgatctttccaaagcagatcgcatcatgcttcgatttcgtcccattgctcctaaaccggccagccccgtcggagtaaatcccgtatccagcggagatagcggcggcggaggctccgacgtttcctttagatcagctagtagaagaaagaggaaatgtcatcagctgaaggagaatggtggtaacgccaagaggtgcacccggcggaagacgtcggataaacccgtcgttcacggcagtgctaatgcggtgactctttctctattaccggagaaacctatagatcttaaggcggcggtggagaagcagaagcggcagggtccgttatggttgagtttcaaagacggcggagggatgctcacaccggcttatcagacaccggagattgtgcagaggacggtggtgatttcgtcgtgtatgacggtggagcgtgtaacggacgcttggattgacggttacggtttagggaggtcagatgaagaaaggaagatgaatcttgtgagagacacgtgtcctggtttcatatccgacggttcagggagagtcacgtggactaatgacgcgtatcggaagatggctagggatattattcccgtggaagaaggtgcaccggagataactagcggcgatagttttcacgtgatcgtacggttggtgatgagggagaggccgatgctaacgtcccctggattcacatgcagaatgaaactccagtacacgtgtcaaaatcgtgagagaggctcagtcacggtgccttgcgacgtgtggagaatggacgtcggtggtggttttgcttggaggctcgacgttaaggccgctttgtgcctttgacaccgttagatcaactttagtcactatgggcacgaacattacacatgatatgtcctccaatgataaaatatggattcagaactaattagatttctaatggtttaacatatatttatgtcgtttttgntct

SEQ ID NO: 41860 - protein, 294 aa, Arabidopsis thaliana
  peptide (1)..(294): Ceres Seq. ID no. 12422181
MDGRGGCCIARYAIGSGPYDLSKADRIMLRFRPIAPKPASPVGVNPVSSGDSGGGGSDVSFRSASRRKRKCHQLKENGGNAKRCTRRKTSDKPVVHGSANAVTLSLLPEKPIDLKAAVEKQKRQGPLWLSFKDGGGMLTPAYQTPEIVQRTVVISSCMTVERVTDAWIDGYGLGRSDEERKMNLVRDTCPGFISDGSGRVTWTNDAYRKMARDIIPVEEGAPEITSGDSFHVIVRLVMRERPMLTSPGFTCRMKLQYTCQNRERGSVTVPCDVWRMDVGGGFAWRLDVKAALCL

SEQ ID NO: 41861 - protein, 267 aa, Arabidopsis thaliana
  peptide (1)..(267): Ceres Seq. ID no. 12422182
MLRFRPIAPKPASPVGVNPVSSGDSGGGGSDVSFRSASRRKRKCHQLKENGGNAKRCTRRKTSDKPVVHGSANAVTLSLLPEKPIDLKAAVEKQKRQGPLWLSFKDGGGMLTPAYQTPEIVQRTVVISSCMTVERVTDAWIDGYGLGRSDEERKMNLVRDTCPGFISDGSGRVTWTNDAYRKMARDIIPVEEGAPEITSGDSFHVIVRLVMRERPMLTSPGFTCRMKLQYTCQNRERGSVTVPCDVWRMDVGGGFAWRLDVKAALCL

SEQ ID NO: 41862 - protein, 158 aa, Arabidopsis thaliana
  peptide (1)..(158): Ceres Seq. ID no. 12422183
MLTPAYQTPEIVQRTVVISSCMTVERVTDAWIDGYGLGRSDEERKMNLVRDTCPGFISDGSGRVTWTNDAYRKMARDIIPVEEGAPEITSGDSFHVIVRLVMRERPMLTSPGFTCRMKLQYTCQNRERGSVTVPCDVWRMDVGGGFAWRLDVKAALCL

SEQ ID NO: 41863 - DNA, 1633 bp, Arabidopsis thaliana
  misc_feature (1)..(1633): Ceres Seq. ID no. 13645815
  misc_feature (1)..(1633): Ortholog of  Ceres SEQ ID NO 15177285 as cited in SEQ ID NO 52481
  misc_feature (1)..(1633): Ortholog of  Ceres SEQ ID NO 13594068 as cited in SEQ ID NO 58624
ttttttcacactttttctgtctgttacgattcttgcttgatttctttctaaacaaagcaaaagttgtctttttggagttgtgagcaactaattctctgaaattgaggaagagaaagcgagaaggtttttttggagtcagagacagaagaagaatttaacagattcttgtcggaaacatggatacgagtgaagcaaggaaccgtaaagttgttgcagttgaacaattcgatctcgaagtccctgagactgctcatcagattagcagcgattcatggtttcaggtagcttttgttctaacgaccggtataaacagtgcctatgtgttgggatattccgggacagtcatggttcctttgggttggattggtggtgtggttggtctcattcttgctaccgcaatctctctttacgcaaacactcttatcgccaaacttcatgagtttggtggcaaaagacacattcgttatagagatcttgcaggcttcatctatggtaaaaagatgtatcgtgttacatggggattgcaatatgtcaatcttttcatgattaattgtggcttcatcatacttgctggttcggccttaaaggctgtttatgtactttttagagatgatagtctcatgaaactgcctcacttcatcgccatcgcgggtgttgtatgcgcgattttcgcaatcggtattcctcatttatcagctcttggaatctggctaggagtttcaacaatcctcagcataatctacattattgttgcaatagttctatcagctaaagatggagtaaacaagcctgaaagagattacaacatacaaggatcatcaataaacaaactctttaccataacaggagcagctgcaaatctagttttcgcattcaacacgggaatgctcccggaaatacaggcgacggtgaagcaaccggtcgttaaaaacatgatgaaggctctgtattttcaattcactgttggtgttttacctatgtacgcggttacattcatcggatattgggcttacgggtcctcgacatcgacttatctcttaaacagcgtcagtggacctgtttgggtcaaagcactcgctaacatttcagcttttctccaatctgttatctctttacatatttttgcaagtccgacttatgagtatatggacacaaagtatggagtcaaaggaagtccattggcaatgaagaatctgttgtttagaacagtagcaagaggaagctacattgcggtgagcactcttctctctgcgcttttaccgtttctcggagatttcatgagccttaccggagcgataagcacgttccctctcacattcatattagcgaatcacatgtatcttgttgctatgaatgatgagcttagtcttgtgcaaaagctatggcattggctcaatgtttgcttctttggattaatgtctcttgctgctgctattgctgctgttagactcatctctgttgactccaagaacttccatgtttttgctgatgtttgattaaaatgtcttcgacatttttaacgatgtaatctttataccaattagaaaaaattgtaatccttttgttgttacttttattatttcaaatgaaagaaattttttataacataatatatatatttatttttcggttc

SEQ ID NO: 41864 - protein, 439 aa, Arabidopsis thaliana
  peptide (1)..(439): Ceres Seq. ID no. 13645816
MDTSEARNRKVVAVEQFDLEVPETAHQISSDSWFQVAFVLTTGINSAYVLGYSGTVMVPLGWIGGVVGLILATAISLYANTLIAKLHEFGGKRHIRYRDLAGFIYGKKMYRVTWGLQYVNLFMINCGFIILAGSALKAVYVLFRDDSLMKLPHFIAIAGVVCAIFAIGIPHLSALGIWLGVSTILSIIYIIVAIVLSAKDGVNKPERDYNIQGSSINKLFTITGAAANLVFAFNTGMLPEIQATVKQPVVKNMMKALYFQFTVGVLPMYAVTFIGYWAYGSSTSTYLLNSVSGPVWVKALANISAFLQSVISLHIFASPTYEYMDTKYGVKGSPLAMKNLLFRTVARGSYIAVSTLLSALLPFLGDFMSLTGAISTFPLTFILANHMYLVAMNDELSLVQKLWHWLNVCFFGLMSLAAAIAAVRLISVDSKNFHVFADV

SEQ ID NO: 41865 - protein, 383 aa, Arabidopsis thaliana
  peptide (1)..(383): Ceres Seq. ID no. 13645817
MVPLGWIGGVVGLILATAISLYANTLIAKLHEFGGKRHIRYRDLAGFIYGKKMYRVTWGLQYVNLFMINCGFIILAGSALKAVYVLFRDDSLMKLPHFIAIAGVVCAIFAIGIPHLSALGIWLGVSTILSIIYIIVAIVLSAKDGVNKPERDYNIQGSSINKLFTITGAAANLVFAFNTGMLPEIQATVKQPVVKNMMKALYFQFTVGVLPMYAVTFIGYWAYGSSTSTYLLNSVSGPVWVKALANISAFLQSVISLHIFASPTYEYMDTKYGVKGSPLAMKNLLFRTVARGSYIAVSTLLSALLPFLGDFMSLTGAISTFPLTFILANHMYLVAMNDELSLVQKLWHWLNVCFFGLMSLAAAIAAVRLISVDSKNFHVFADV

SEQ ID NO: 41866 - protein, 331 aa, Arabidopsis thaliana
  peptide (1)..(331): Ceres Seq. ID no. 13645818
MYRVTWGLQYVNLFMINCGFIILAGSALKAVYVLFRDDSLMKLPHFIAIAGVVCAIFAIGIPHLSALGIWLGVSTILSIIYIIVAIVLSAKDGVNKPERDYNIQGSSINKLFTITGAAANLVFAFNTGMLPEIQATVKQPVVKNMMKALYFQFTVGVLPMYAVTFIGYWAYGSSTSTYLLNSVSGPVWVKALANISAFLQSVISLHIFASPTYEYMDTKYGVKGSPLAMKNLLFRTVARGSYIAVSTLLSALLPFLGDFMSLTGAISTFPLTFILANHMYLVAMNDELSLVQKLWHWLNVCFFGLMSLAAAIAAVRLISVDSKNFHVFADV

SEQ ID NO: 41867 - DNA, 848 bp, Arabidopsis thaliana
  misc_feature (1)..(848): Ceres Seq. ID no. 13488188
  misc_feature (1)..(848): Ortholog of  Ceres SEQ ID NO 13495070 as cited in SEQ ID NO 53216
  misc_feature (1)..(848): Ortholog of  Ceres SEQ ID NO 13661333 as cited in SEQ ID NO 61620
  misc_feature (1)..(848): Ortholog of  Ceres SEQ ID NO 15173749 as cited in SEQ ID NO 61775
  misc_feature (1)..(848): Ortholog of  Ceres SEQ ID NO 13596812 as cited in SEQ ID NO 62283
  misc_feature (1)..(848): Ortholog of  Ceres SEQ ID NO 13623021 as cited in SEQ ID NO 0
aattcggatagcttgcaaataacgctgacaaaaaaagaaacagtgaagaagaaaaaaaagaaggtcattttcattttctccatttgatttttgccgaccggagaaaatatcttcttgccgtcttcttcttcatttcaccaggaacttttatttgaaatcggtttgatttagccatggcaaacgcggcatcgggaatggctgtgcatgatgattgcaagctgaaatttatggaactgaaggcgaaaagaacattccgtaccatagtctacaagattgaggataagcaagtgattgtagagaaactcggtgaacctgaacaatcatatgatgactttgcagctagtcttccagctgatgattgccgatattgcatttacgatttcgactttgtcactgcggagaactgccagaagagcaagatcttcttcattgcatggtctccggacactgccaaagtgagagacaagatgatttacgcgagctctaaagataggttcaagagagaactagatggaattcaagtggaacttcaagctactgatccaacagaaatgggtcttgatgttttcaaaagccgcaccaactaagtaaaacaaaaccctgtaagggcatttgaataagtttggtttctggagtgaatatgtttcctctgactgttatgaaaactttttaacaccttcaacttcattctacttggtattattgtatgtctttgatgtgttatgtgtgccttgtgatggttttcaattagttttacatgtacaatacttgaaatcagattgttgctaggcttcaagccttgtctcagttatctatctgataatttattcgtatatgtttggagtcct

SEQ ID NO: 41868 - protein, 137 aa, Arabidopsis thaliana
  peptide (1)..(137): Ceres Seq. ID no. 13488189
MANAASGMAVHDDCKLKFMELKAKRTFRTIVYKIEDKQVIVEKLGEPEQSYDDFAASLPADDCRYCIYDFDFVTAENCQKSKIFFIAWSPDTAKVRDKMIYASSKDRFKRELDGIQVELQATDPTEMGLDVFKSRTN

SEQ ID NO: 41869 - protein, 130 aa, Arabidopsis thaliana; identical to SEQ ID NO: 25156
  peptide (1)..(130): Ceres Seq. ID no. 13488190

SEQ ID NO: 41870 - protein, 119 aa, Arabidopsis thaliana; identical to SEQ ID NO: 25157
  peptide (1)..(119): Ceres Seq. ID no. 13488191

SEQ ID NO: 41871 - DNA, 1495 bp, Arabidopsis thaliana
  misc_feature (1)..(1495): Ceres Seq. ID no. 12328705
  misc_feature (1)..(1495): Ortholog of  Ceres SEQ ID NO 13584744 as cited in SEQ ID NO 69137
cttttaaagaaaagttccatttcatatctctatcaaacccttttctgaatattattttgcttgtgaatttgaatttgagcttttttcctctgttcttgggaggaatttttgtctgtgtttgtgatgcgttataattgcttcggacttcttgatatgtgcaacggaagtgatcgtcttggacaaagagaagctgaagagatttgcaccaacaatgtgagggtcttttcatataattcattaagatcagccactgatagtttccatccaacgaacagaatcggaggtggtggctatggcgttgtctttaagggagttttgagagatggcacacaagtagctgtgaaatcactatcagcagaatctaaacaagggacacgcgagttcttgaccgagattaacttgatatcaaacattcatcatcctaaccttgttaaactcatcggttgctgcatcgaagggaacaatcggattcttgtctatgagtaccttgagaacaacagtcttgctagtgttttgcttggttcaaggagtagatatgtaccgcttgattggtccaaaagagctgcgatttgcgttgggacagcttcgggtttagctttccttcacgaggaagtcgaacctcatgttgttcaccgtgacatcaaggcgagtaatatcttactagactcaaacttttctcccaaaattggtgatttcgggttggctaagctttttccagacaatgtcactcatgtcagtacccgagtcgctggaacagtgggatacttggctccagaatatgcacttcttggtcaactgacaaaaaaagcagacgtttacagcttcgggatacttgtgcttgaggtcattagtggtaatagtagcaccagagccgcctttggagacgagtacatggttcttgttgaatgggtgtggaagctgagagaagaaaggaggctactagagtgtgtagatccagaactaaccaagttccccgcagatgaagtgacccgtttcatcaaggtggctcttttctgcactcaagccgcggcgcaaaagagaccaaacatgaagcaagtgatggagatgcttcgcaggaaagagcttaacctcaacgaggatgccttaacggaacctggcgtctacagaggtgtcaacaggggacgcaaccaccgtggaatcggtcttagggtcggccaaggaggcagctcacaggagagctcgtcaacgcaacgtgacaaagggaaaagctcagccgttcctcaagggtcgacgtccaactctaatatttccttccagagcatcacagagttggctcctagatgatttttttctgttaatagagcacaattttattcttgagtatattaattagtttatgatgtgttaatatcttatacatagggtatatatgaataaaccaaagatgctatctgataaaatgtaatgtagttgtctgacatttccctttgtgtcagaagccagcagtttaaaattatgattggcatgattttgc

SEQ ID NO: 41872 - protein, 393 aa, Arabidopsis thaliana
  peptide (1)..(393): Ceres Seq. ID no. 12328706
MRYNCFGLLDMCNGSDRLGQREAEEICTNNVRVFSYNSLRSATDSFHPTNRIGGGGYGVVFKGVLRDGTQVAVKSLSAESKQGTREFLTEINLISNIHHPNLVKLIGCCIEGNNRILVYEYLENNSLASVLLGSRSRYVPLDWSKRAAICVGTASGLAFLHEEVEPHVVHRDIKASNILLDSNFSPKIGDFGLAKLFPDNVTHVSTRVAGTVGYLAPEYALLGQLTKKADVYSFGILVLEVISGNSSTRAAFGDEYMVLVEWVWKLREERRLLECVDPELTKFPADEVTRFIKVALFCTQAAAQKRPNMKQVMEMLRRKELNLNEDALTEPGVYRGVNRGRNHRGIGLRVGQGGSSQESSSTQRDKGKSSAVPQGSTSNSNISFQSITELAPR

SEQ ID NO: 41873 - protein, 383 aa, Arabidopsis thaliana
  peptide (1)..(383): Ceres Seq. ID no. 12328707
MCNGSDRLGQREAEEICTNNVRVFSYNSLRSATDSFHPTNRIGGGGYGVVFKGVLRDGTQVAVKSLSAESKQGTREFLTEINLISNIHHPNLVKLIGCCIEGNNRILVYEYLENNSLASVLLGSRSRYVPLDWSKRAAICVGTASGLAFLHEEVEPHVVHRDIKASNILLDSNFSPKIGDFGLAKLFPDNVTHVSTRVAGTVGYLAPEYALLGQLTKKADVYSFGILVLEVISGNSSTRAAFGDEYMVLVEWVWKLREERRLLECVDPELTKFPADEVTRFIKVALFCTQAAAQKRPNMKQVMEMLRRKELNLNEDALTEPGVYRGVNRGRNHRGIGLRVGQGGSSQESSSTQRDKGKSSAVPQGSTSNSNISFQSITELAPR

SEQ ID NO: 41874 - DNA, 1999 bp, Arabidopsis thaliana
  misc_feature (1)..(1999): Ceres Seq. ID no. 13499840
  misc_feature (1)..(1999): Ortholog of  Ceres SEQ ID NO 13596319 as cited in SEQ ID NO 67933
gtggatttgagatgatccctgcttcaatggaggaagctcaccagctggagtcgagatccgatgacctaagtcaacggagaagctactggagatggaggaagcaggattttttcccggaattctcttttcagagcttctctacctacaaatcagctctctccgccacttgtccacgcctcgccgatcgtcttctctctcgctcttccgatgcgtacgagctcgatgcagcccgccgcgaaagcgagaaccctatgcgtcgttgtctcacttggtgggacttgctctggcttagctttggttctgttgttggttcgggtgtgttcgtgatcacgggtcaggaggctcgagttggagctggtcctgctgttgttctctcctacgctatctctggtgtctctgcattgctctcagttctctgttatgctgagtttggagttgagattcctgtcgctggaggttctttctcttatcttagggttgaattgggggattttattgcctttattgctgctgggaatattcttcttgaggctatggttggtgctgctggattagggaggtcatggtcttcgtatctagctagtttggtcaagaatgattctgattattttcggattaaagtcgattcctttgctaaagggtttgatcttttggatccggttgctgttgcagtgcttttagttgctaatggtattgccatgactggaacaaagaggacttcttggttgaatttgattacttccatggtcactgtttgtattattgtgtttatcgtcgttgtggggtttactcattcaaaaacctcaaatttggttccttttttcccttatggagcgaaaggtgtggtgcaatctgctgcagttgtctactggtcatacactggttttgatatggtggctaacatggctgaagaaaccgagaaaccttccagagatattccaattggtttggttggttcgatgtctatgatcactgtggtttactgtttgatggctctggccttgactatgatggtgaaatacactgaaattgatgcgaatgcagcttattctgttgcttttgctcagattgggatgaaatgggcgaagtacttggttggtatatgcgctttaaagggaatgaccacaagcctgcttgttggctctctaggccaagctcggtacaccactcagattgctcggtctcatatgattcctccatggtttgctttggttcatccaaaaacaggaacccctatttatgctactctccttgtaaccatactcagttcaataatatccttcttcaccagcttagaggttttatcaagcgttttctcctttgctaccctcttcattttcatgctcgtggcagtagcattgcttgtgagacgttactacgtgaaggatgtcactcctgaggccggtttgttgaagtttcttggttttctgtttttgataattgcttcctccattggagtatcagcgctttggaactcaggcgttaaaggttggatcgcttacacagtgactggagttatttggtttataggcactttagggttggcattgcttccgaaatatcgtgttcctaaggtatggggagtcccactagttccgtggttgccatcgttttcaatcgccatgaatctattccttatcggatcactcggttatgtagcattcttgagattcattatctgcaccatggtgatgcttttgtactacctattcgttggtcttcatgcaacctatgatgtagctcatcagcctttggaggaagcaaagtttgagggagagagataaaagaatcgatcgtaacacttcactacgtttggtaaattgtataaattcccttgttttctgatgtgatttcaatattcttctattaaaatgtacaataatactatcgatcttgttttcgtgttttctcattcttttcatttttcaatgttgaaacttattaacttgttgaactctgttgtatttgtttctatcttggaaatttaaaattggagttg

SEQ ID NO: 41875 - protein, 593 aa, Arabidopsis thaliana
  peptide (1)..(593): Ceres Seq. ID no. 13499841
GFEMIPASMEEAHQLESRSDDLSQRRSYWRWRKQDFFPEFSFQSFSTYKSALSATCPRLADRLLSRSSDAYELDAARRESENPMRRCLTWWDLLWLSFGSVVGSGVFVITGQEARVGAGPAVVLSYAISGVSALLSVLCYAEFGVEIPVAGGSFSYLRVELGDFIAFIAAGNILLEAMVGAAGLGRSWSSYLASLVKNDSDYFRIKVDSFAKGFDLLDPVAVAVLLVANGIAMTGTKRTSWLNLITSMVTVCIIVFIVVVGFTHSKTSNLVPFFPYGAKGVVQSAAVVYWSYTGFDMVANMAEETEKPSRDIPIGLVGSMSMITVVYCLMALALTMMVKYTEIDANAAYSVAFAQIGMKWAKYLVGICALKGMTTSLLVGSLGQARYTTQIARSHMIPPWFALVHPKTGTPIYATLLVTILSSIISFFTSLEVLSSVFSFATLFIFMLVAVALLVRRYYVKDVTPEAGLLKFLGFLFLIIASSIGVSALWNSGVKGWIAYTVTGVIWFIGTLGLALLPKYRVPKVWGVPLVPWLPSFSIAMNLFLIGSLGYVAFLRFIICTMVMLLYYLFVGLHATYDVAHQPLEEAKFEGER

SEQ ID NO: 41876 - protein, 590 aa, Arabidopsis thaliana
  peptide (1)..(590): Ceres Seq. ID no. 13499842
MIPASMEEAHQLESRSDDLSQRRSYWRWRKQDFFPEFSFQSFSTYKSALSATCPRLADRLLSRSSDAYELDAARRESENPMRRCLTWWDLLWLSFGSVVGSGVFVITGQEARVGAGPAVVLSYAISGVSALLSVLCYAEFGVEIPVAGGSFSYLRVELGDFIAFIAAGNILLEAMVGAAGLGRSWSSYLASLVKNDSDYFRIKVDSFAKGFDLLDPVAVAVLLVANGIAMTGTKRTSWLNLITSMVTVCIIVFIVVVGFTHSKTSNLVPFFPYGAKGVVQSAAVVYWSYTGFDMVANMAEETEKPSRDIPIGLVGSMSMITVVYCLMALALTMMVKYTEIDANAAYSVAFAQIGMKWAKYLVGICALKGMTTSLLVGSLGQARYTTQIARSHMIPPWFALVHPKTGTPIYATLLVTILSSIISFFTSLEVLSSVFSFATLFIFMLVAVALLVRRYYVKDVTPEAGLLKFLGFLFLIIASSIGVSALWNSGVKGWIAYTVTGVIWFIGTLGLALLPKYRVPKVWGVPLVPWLPSFSIAMNLFLIGSLGYVAFLRFIICTMVMLLYYLFVGLHATYDVAHQPLEEAKFEGER

SEQ ID NO: 41877 - protein, 585 aa, Arabidopsis thaliana
  peptide (1)..(585): Ceres Seq. ID no. 13499843
MEEAHQLESRSDDLSQRRSYWRWRKQDFFPEFSFQSFSTYKSALSATCPRLADRLLSRSSDAYELDAARRESENPMRRCLTWWDLLWLSFGSVVGSGVFVITGQEARVGAGPAVVLSYAISGVSALLSVLCYAEFGVEIPVAGGSFSYLRVELGDFIAFIAAGNILLEAMVGAAGLGRSWSSYLASLVKNDSDYFRIKVDSFAKGFDLLDPVAVAVLLVANGIAMTGTKRTSWLNLITSMVTVCIIVFIVVVGFTHSKTSNLVPFFPYGAKGVVQSAAVVYWSYTGFDMVANMAEETEKPSRDIPIGLVGSMSMITVVYCLMALALTMMVKYTEIDANAAYSVAFAQIGMKWAKYLVGICALKGMTTSLLVGSLGQARYTTQIARSHMIPPWFALVHPKTGTPIYATLLVTILSSIISFFTSLEVLSSVFSFATLFIFMLVAVALLVRRYYVKDVTPEAGLLKFLGFLFLIIASSIGVSALWNSGVKGWIAYTVTGVIWFIGTLGLALLPKYRVPKVWGVPLVPWLPSFSIAMNLFLIGSLGYVAFLRFIICTMVMLLYYLFVGLHATYDVAHQPLEEAKFEGER

SEQ ID NO: 41878 - DNA, 1529 bp, Arabidopsis thaliana
  misc_feature (1)..(1529): Ceres Seq. ID no. 12579645
  misc_feature (1)..(1529): Ortholog of  Ceres SEQ ID NO 15177742 as cited in SEQ ID NO 1202
  misc_feature (1)..(1529): Ortholog of  Ceres SEQ ID NO 15226750 as cited in SEQ ID NO 58711
cctaatcgaaaaaatcttcctcttcatcttcttctgttctctctctataaatacaagtttactcttcctcttcctcaaatctctgactcttctctgcattatctcttcgatctctccaactctccaaaaccttcctcagaatgggaactaccaatggaacagactatggagcatacacatacaaggagctagaaagagagcaatattggccatctgagaatctcaagatatcaataacaggagctggaggtttcattgcatctcacattgctcgtcgtttgaagcacgaaggtcattacgtgattgcttctgactggaaaaagaatgaacacatgactgaagacatgttctgtgatgagttccatcttgttgatcttagggttatggagaattgtctcaaagttactgaaggagttgatcatgtttttaacttagctgctgatatgggtggtatgggttttatccagagtaatcactctgtgattatgtataataatactatgattagtttcaatatgattgaggctgctaggatcaatgggattaagaggttcttttatgcttcgagtgcttgtatctatccagagtttaagcagttggagactactaatgtgagcttgaaggagtcagatgcttggcctgcagagcctcaagatgcttatggtttggagaagcttgctacggaggagttgtgtaagcattacaacaaagattttggtattgagtgtcgaattggaaggttccataacatttatggtccttttggaacatggaaaggtggaagggagaaggctccagctgctttctgtaggaaggctcagacttccactgataggtttgagatgtggggagatgggcttcagacccgttcttttacctttatcgatgagtgtgttgaaggtgtactcaggttgacaaaatcagatttccgtgagccggtgaacatcggaagcgatgagatggtgagcatgaatgagatggctgagatggttctcagctttgaggaaaagaagcttccaattcaccacattcctggcccggaaggtgttcgtggtcgtaactcagacaacaatctgatcaaagaaaagcttggttgggctcctaatatgagattgaaggaggggcttagaataacctacttctggataaaggaacagatcgagaaagagaaagcaaagggaagcgatgtgtcgctttacgggtcatcaaaggtggttggaactcaagcaccggttcagctaggctcactccgcgcggctgatggaaaagagtgaagttcaccaaagtataagtcaagctcaaatatggccttttaagttcagcaaaatgtttagatatatttttaggtagcttcctattaaaaaagcaataataagtgttttggattttggttccttctattctgctaatccttgtttatgtttagttgaaaaagtttgcttgcattgttaagtctgttatcatattattgtggtcctttcaaaaaaaaaaaaaaagagctcttggatccggccataagggcctgatcc

SEQ ID NO: 41879 - protein, 377 aa, Arabidopsis thaliana; identical to SEQ ID NO: 23828
  peptide (1)..(377): Ceres Seq. ID no. 12579646

SEQ ID NO: 41880 - protein, 313 aa, Arabidopsis thaliana; identical to SEQ ID NO: 23829
  peptide (1)..(313): Ceres Seq. ID no. 12579647

SEQ ID NO: 41881 - protein, 309 aa, Arabidopsis thaliana
  peptide (1)..(309): Ceres Seq. ID no. 12579648
MFCDEFHLVDLRVMENCLKVTEGVDHVFNLAADMGGMGFIQSNHSVIMYNNTMISFNMIEAARINGIKRFFYASSACIYPEFKQLETTNVSLKESDAWPAEPQDAYGLEKLATEELCKHYNKDFGIECRIGRFHNIYGPFGTWKGGREKAPAAFCRKAQTSTDRFEMWGDGLQTRSFTFIDECVEGVLRLTKSDFREPVNIGSDEMVSMNEMAEMVLSFEEKKLPIHHIPGPEGVRGRNSDNNLIKEKLGWAPNMRLKEGLRITYFWIKEQIEKEKAKGSDVSLYGSSKVVGTQAPVQLGSLRAADGKE

SEQ ID NO: 41882 - DNA, 1134 bp, Arabidopsis thaliana
  misc_feature (1)..(1134): Ceres Seq. ID no. 13488637
  misc_feature (1)..(1134): Ortholog of  Ceres SEQ ID NO 15175857 as cited in SEQ ID NO 59046
acaacaataaacactcatcgattaaatcttcttcaccggaaaaaatgccttcgatgccagaggaaccaatcctaacaccaacaccagatcgattctgtatgttcccaatccaatacccacagatttgggagatgtacaagaaagccgaagcatccttctggacagccgaagaagtcgatctctctcaagacaatcgcgactgggaaaactcactaaccaacgacgaacgtcacttcattaaacacgtcctcgccttcttcgccgcatcagacggaatcgttctcgagaatctctcaactagattcatgtccgatgttcagatctcagaagctcgtgccttctacggattccaaatcgcgattgagaatattcactccgagatgtatagtctccttctcgacacgtatatcaaagacaacaaagagagagatcatctttttcgtgcaatcgaaaccattccttgtgacgaaaaaagcagaatgggctatgaaatggatcaacggatctcaaagcttcgctgagagaatcgtagcgtttgcttgcgttgaaggtatattcttctccggtagcttttgttcgatattctggttgaagaaacgaggtttaatgcctggactcactttttcaaacgaattgatttcgagagacgaaggtcttcactgtgatttcgcttgtttgatatatagtcttcttagaactaagtttgatgaagatcgtttgaaagcgattgtttgtgatgctgttgagattgagagagagtttgtttgtgacgcgctttcttgtgccttggttgggatgaatcgtgagttgatgagtcagtacattgagttcgttgctgataggttgttggctgcgcttgggtgtggtaaggtgtatggtgtgactaatccttttgattggatggaattgatttcgcttcagggtaagaccaacttttttgagaagagagttggtgagtatcagaaagcttctgttatgtctagtgttcatggaaacgctgcgtttaatgatgatcatgtcttcaagcttgacgaggatttttagattttgcttacttgctttatttttagttttgtaattttcagtataatgaaaaacagatgaagtttaatttgataatggacatttaattcc

SEQ ID NO: 41883 - protein, 243 aa, Arabidopsis thaliana
  peptide (1)..(243): Ceres Seq. ID no. 13488638
MFRSQKLVPSTDSKSRLRIFTPRCIVSFSTRISKTTKREIIFFVQSKPFLVTKKAEWAMKWINGSQSFAERIVAFACVEGIFFSGSFCSIFWLKKRGLMPGLTFSNELISRDEGLHCDFACLIYSLLRTKFDEDRLKAIVCDAVEIEREFVCDALSCALVGMNRELMSQYIEFVADRLLAALGCGKVYGVTNPFDWMELISLQGKTNFFEKRVGEYQKASVMSSVHGNAAFNDDHVFKLDEDF

SEQ ID NO: 41884 - protein, 185 aa, Arabidopsis thaliana
  peptide (1)..(185): Ceres Seq. ID no. 13488639
MKWINGSQSFAERIVAFACVEGIFFSGSFCSIFWLKKRGLMPGLTFSNELISRDEGLHCDFACLIYSLLRTKFDEDRLKAIVCDAVEIEREFVCDALSCALVGMNRELMSQYIEFVADRLLAALGCGKVYGVTNPFDWMELISLQGKTNFFEKRVGEYQKASVMSSVHGNAAFNDDHVFKLDEDF

SEQ ID NO: 41885 - protein, 172 aa, Arabidopsis thaliana
  peptide (1)..(172): Ceres Seq. ID no. 13488640
NNKHSSIKSSSPEKMPSMPEEPILTPTPDRFCMFPIQYPQIWEMYKKAEASFWTAEEVDLSQDNRDWENSLTNDERHFIKHVLAFFAASDGIVLENLSTRFMSDVQISEARAFYGFQIAIENIHSEMYSLLLDTYIKDNKERDHLFRAIETIPCDEKSRMGYEMDQRISKLR

SEQ ID NO: 41886 - DNA, 1444 bp, Arabidopsis thaliana
  misc_feature (1)..(1444): Ceres Seq. ID no. 12339420
  misc_feature (1)..(1444): Ortholog of  Ceres SEQ ID NO 14310524 as cited in SEQ ID NO 58840
  misc_feature (1)..(1444): Ortholog of  Ceres SEQ ID NO 15169541 as cited in SEQ ID NO 67500
aaaatatcaaaacacgagacagatttgattccatttttattactgttactatcatccaaaaccttggtatttgtagccatgagtcttgtttcagatctcatcaaccttaacctctcagactccactgacaaaatcattgctgaatacatatgggttggtggttctggaatggacatgagaagcaaagccaggactctacctggaccagtgactgacccttcgcagctaccaaagtggaactatgatggttcaagcacaggacaagctcctggtgaagacagtgaagtcatcttatagttaataatctttctttcttgatctttaaataagtttcttctcattggtttttttttcgattcttgtttactaatcttttgtgtgtttgtatatctttgtttagccctcaagccatattcaaagatcctttccgtagaggaaacaacattcttgtcatgtgcgatgcgtacactcccgcgggtgaaccaatcccgactaacaaaagacacgctgcggctaaggtctttagcaaccctgatgttgcagctgaagtgccatggtatggtattgagcaagaatacactttactccagaaagatgtgaggtggcctgttggttggcctattggcggttatcccggccctcagggaccgtactattgcggtattggagcagacaaatcttttggcagagatgttgttgattctcactacaaggcctgtttatacgctggaatcaacattagtggcatcaatggagaagtcatgccgggtcagtgggagttccaggtcggtccagctgttggtatctcggctgctgatgaaatttgggtcgctcgttacattttggagaggatcacagagattgctggtgtagtggtatcttttgacccgaaaccgattcccggtgactggaacggtgctggtgctcactgcaactacagtaccaagtcaatgagggaagaaggcggttacgagatcatcaagaaagcaatcgataaattgggactgagacacaaagaacacattgctgcttacggtgaaggcaatgagcgtcgtctcacaggacaccacgagactgctgacatcaacactttcctttggggtgttgcgaaccgtggagcatcgatccgagtaggacgtgatacggagaaagaagggaaaggatactttgaggacaggaggccagcttcgaacatggatccttacattgtcacttccatgattgcagagactacaatcctctggaatccttgatgatcatcagatcaagaaaaaatcttgaatgtcactcaaatttgtgtttcttgcaagattcaaagtttgtgttctctatcaagcaatgtcttaggataagtcaaagatttgctctgcttattctgctttttatttacttcacatcctattgaaaacatttctgtgtattatttatgaataaacattatctt

SEQ ID NO: 41887 - protein, 266 aa, Arabidopsis thaliana
  peptide (1)..(266): Ceres Seq. ID no. 12339421
MCDAYTPAGEPIPTNKRHAAAKVFSNPDVAAEVPWYGIEQEYTLLQKDVRWPVGWPIGGYPGPQGPYYCGIGADKSFGRDVVDSHYKACLYAGINISGINGEVMPGQWEFQVGPAVGISAADEIWVARYILERITEIAGVVVSFDPKPIPGDWNGAGAHCNYSTKSMREEGGYEIIKKAIDKLGLRHKEHIAAYGEGNERRLTGHHETADINTFLWGVANRGASIRVGRDTEKEGKGYFEDRRPASNMDPYIVTSMIAETTILWNP

SEQ ID NO: 41888 - protein, 163 aa, Arabidopsis thaliana
  peptide (1)..(163): Ceres Seq. ID no. 12339422
MPGQWEFQVGPAVGISAADEIWVARYILERITEIAGVVVSFDPKPIPGDWNGAGAHCNYSTKSMREEGGYEIIKKAIDKLGLRHKEHIAAYGEGNERRLTGHHETADINTFLWGVANRGASIRVGRDTEKEGKGYFEDRRPASNMDPYIVTSMIAETTILWNP

SEQ ID NO: 41889 - DNA, 1146 bp, Arabidopsis thaliana
  misc_feature (1)..(1146): Ceres Seq. ID no. 12641954
  misc_feature (1)..(1146): Ortholog of  Ceres SEQ ID NO 13589868 as cited in SEQ ID NO 55521
  misc_feature (1)..(1146): Ortholog of  Ceres SEQ ID NO 12617659 as cited in SEQ ID NO 65286
  misc_feature (1)..(1146): Ortholog of  Ceres SEQ ID NO 12780566 as cited in SEQ ID NO 65822
aacctttgctttcttgggaaactctctgcaattcctggagaaatcgaccatcatcatcttagctttgattctctctgtgtttcttcactttcaatttctgttttggtttatcgataagagaaagtaaaattcgtctgtgggggtttaagcttttttggggtgagagatgggtcaaacttttcgcaagcttttcgataccttcttcggcaaccaggagatgagggtcgttatgctgggtctggatgcggctggcaaaacaacgatactatacaagctccacataggagaagttctgtctactgttcccacaatcggtttcaatgttgagaaagttcagtacaagaatgtcatcttcacagtttgggatgttggtggccaagagaagctgaggcccttgtggaggcattacttcaataataccgatggacttatatacgtggtagactccttggaccgagagaggattggtaaagcgaagcaagaatttcaggatatcataagggacccattcatgctcaacagtgtcattctagtgtttgcaaacaaacaagacatgagaggagccatgtctcctcgagaagtatgtgaagggcttggcttacttgatctcaagaacaggaaatggcatatacaaggcacatgtgctcttcaaggagatgggctctatgaaggcttagactggttatccgctacactcaaagaggttaaagccgctggttactcatcagttggtccctcgttttagcacccctaccatttgcaaagaaaaaaatccctgactagctaaattgacatacgaaagtaccaaatcaagctcatggtgtctcctgtctactcaccattatatactttacatccatggccacacccttcttcgtggccactgatatggtaatatcacaaaactaatgaaaatctctcaagacttttgtaatggaagtgtttttgtttttctttcgtcttcacatggctctgcttcttaaagctaatgttagtatcaattaggctcctttttgcataatatgactttggagctttattgtaaattctgatggatacaaaatgtataaatctgacaaaaattgcaaaattctcatgagattattaaagtctcccttatagctatgatagatgattgatcttttt

SEQ ID NO: 41890 - protein, 192 aa, Arabidopsis thaliana
  peptide (1)..(192): Ceres Seq. ID no. 12641955
MGQTFRKLFDTFFGNQEMRVVMLGLDAAGKTTILYKLHIGEVLSTVPTIGFNVEKVQYKNVIFTVWDVGGQEKLRPLWRHYFNNTDGLIYVVDSLDRERIGKAKQEFQDIIRDPFMLNSVILVFANKQDMRGAMSPREVCEGLGLLDLKNRKWHIQGTCALQGDGLYEGLDWLSATLKEVKAAGYSSVGPSF

SEQ ID NO: 41891 - protein, 175 aa, Arabidopsis thaliana
  peptide (1)..(175): Ceres Seq. ID no. 12641956
MRVVMLGLDAAGKTTILYKLHIGEVLSTVPTIGFNVEKVQYKNVIFTVWDVGGQEKLRPLWRHYFNNTDGLIYVVDSLDRERIGKAKQEFQDIIRDPFMLNSVILVFANKQDMRGAMSPREVCEGLGLLDLKNRKWHIQGTCALQGDGLYEGLDWLSATLKEVKAAGYSSVGPSF

SEQ ID NO: 41892 - protein, 171 aa, Arabidopsis thaliana
  peptide (1)..(171): Ceres Seq. ID no. 12641957
MLGLDAAGKTTILYKLHIGEVLSTVPTIGFNVEKVQYKNVIFTVWDVGGQEKLRPLWRHYFNNTDGLIYVVDSLDRERIGKAKQEFQDIIRDPFMLNSVILVFANKQDMRGAMSPREVCEGLGLLDLKNRKWHIQGTCALQGDGLYEGLDWLSATLKEVKAAGYSSVGPSF

SEQ ID NO: 41893 - DNA, 561 bp, Arabidopsis thaliana
  misc_feature (1)..(561): Ceres Seq. ID no. 12421177
  misc_feature (1)..(561): Ortholog of  Ceres SEQ ID NO 12563124 as cited in SEQ ID NO 57104
acacatctcactgctcactactctcactgtaatcccttagatcttcttttcaaatttcaatggcgtccggtgatgttgagtatcggtgcttcgttggaggtctagcatgggccactgatgacagagctcttgagactgccttcgctcaatacggcgacgttattgattccaagatcattaacgatcgtgagactggaagatcaaggggattcggattcgtcaccttcaaggatgagaaagccatgaaagatgcgattgagggaatgaacggacaagatctcgatggccgtagcatcactgttaacgaggctcagtcacgaggaagcggtggcggcggaggccaccgtggaggtggttggcggtggataccgcagcggcggtggtggtggaggatggtaattcctttaattaggtttgggattaccaatgaatgttctctctctcgcttgttatgcttctacttggttttgtgtgttctctattttgttctggttctgctttagatttgatgtaacagttcgtgattaggtattttggtatctggaaacgtaatgttaagtc

SEQ ID NO: 41894 - protein, 147 aa, Arabidopsis thaliana
  peptide (1)..(147): Ceres Seq. ID no. 12421178
MASGDVEYRCFVGGLAWATDDRALETAFAQYGDVIDSKIINDRETGRSRGFGFVTFKDEKAMKDAIEGMNGQDLDGRSITVNEAQSRGSGGGGGHRGGGWRWIPQRRWWWRMVIPLIRFGITNECSLSRLLCFYLVLCVLYFVLVLL

SEQ ID NO: 41895 - protein, 86 aa, Arabidopsis thaliana
  peptide (1)..(86): Ceres Seq. ID no. 12421179
MKDAIEGMNGQDLDGRSITVNEAQSRGSGGGGGHRGGGWRWIPQRRWWWRMVIPLIRFGITNECSLSRLLCFYLVLCVLYFVLVLL

SEQ ID NO: 41896 - protein, 79 aa, Arabidopsis thaliana
  peptide (1)..(79): Ceres Seq. ID no. 12421180
MNGQDLDGRSITVNEAQSRGSGGGGGHRGGGWRWIPQRRWWWRMVIPLIRFGITNECSLSRLLCFYLVLCVLYFVLVLL

SEQ ID NO: 41897 - DNA, 2089 bp, Arabidopsis thaliana
  misc_feature (1)..(2089): Ceres Seq. ID no. 12323979
  misc_feature (1)..(2089): Ortholog of  Ceres SEQ ID NO 12617323 as cited in SEQ ID NO 64129
agatttctcccaaaacggaactgctgattccttgaataaaattccctaatcggagtctgtgaagcaaatgggagcatcagattcaactctgctaggctctcaggaaaatcgaggtgatgtgattacgactatatctcatcgatcagaaatagtcgatcccattctcgagaatcttaaagctctcacagtaagtaggccaatattgaagtctcctcccacggaaagtagcttaacagatatcttagtgagaaaagctctatccagttcctcttccaatacggttgatcctcaaatacttgtagagctcttctccatttaccgagaatggcaagagaacaaagctcaagaaattaccaagagacaggaagatatagaaaacaagatagaagtcgcagatgctttggcgactaaacttttacagaggtttaaccactctgtttctgcaatgaggacaactgcccagcatttatctcaagttcatggtttgcaggtggagctcggggagcttaaaggaagattgacagaggtgatcagcaactgcgatacattatgtaagagaattaattctgagggacctgaatctctgaggtccacagtggcgcctttttctcttgcatctcccgattcgtgtatggagttgaacaacttgaaacaacgaaagagaacaacaacaaatgaaacaaaattacatttcaatgaaaaagcagataatgattactcttctttgccacctccccatatcaaggttgctgctgagcgtccatgtaaccagcgtcggcgagcactttctccctcttggccagctcaaggtcttcgtccaccatcatcttcaccagcttctcgaaccctacttttggcttccaccccaacatttcctttgccttgcttgcgtctcctttcagattgtcgacctccgtgggccggaagtaccttttgtcgatctcgacatggtctttccagttgagccccacgtacccgaaagacacgtccagaaactccttgacggtgtgtgattcctcagttgcaaccacatagtcatctggtttctcctgctgcagcatcagccacattgcttccacgtagtctcctgcgaaaccccagtctcttgaagcctgtatatttcccaggaagagcttggtctgcaatccgaccttgatccttcccaaggcccgagtgattttccgagtcacgaagttctcgcctctgcgaggtgactcgtggttgaagaggattccgttgcaggcgtacagaccgtaggcctctcggtaattgactgtgtaccaatgagcagcgcatttggacgcagcgtagggagatctcggatggaagggcgtggtctctgactgcggaggaggagttgacccgaacatctccgaagagccagcctggtagtacttgatggcgcggccattgtcaatgttgtgagatctgacagcctccaggagacgaagagctccagtagcgacaacgtcagcagtgtaatcagggatctcgaaggagacggcaacgtgggactgagcagcaaggttgtagacctcgtcaggcttgatgacgtcgagccaacggcggagggaggaggcatcagagagatcaccgtagtggagcttcatgagagctttgttgacgttgtggggatcaacgtagatatggttgagtcgctgagtgttaaaattggaggatcgtcggatgaggccgtgaacttcgtagcctttctcgagcaggaactcggtcaggtaagatccatcttggccagtgattccggtgaccagtgcaatcttcctcggcttcacaatgtcggaatcgccattgagagatctggaggccattgatgggtgggtgcagagtcagatcggatcagaagaaatgattgggcacgtcgcgctttctgtttttgattttagcgtcaactgattcgatgacttatatataataaagcccaaggacgaagaagacagagagagagggttacttctgtaaactttaaaggtgaatctgtatggctacgtaaagttgtacttgtatggcaaatcgccggcaagcgttgaccgattacgaatattttactatctattgggccaagatgggcttt

SEQ ID NO: 41898 - protein, 298 aa, Arabidopsis thaliana
  peptide (1)..(298): Ceres Seq. ID no. 12323980
MGASDSTLLGSQENRGDVITTISHRSEIVDPILENLKALTVSRPILKSPPTESSLTDILVRKALSSSSSNTVDPQILVELFSIYREWQENKAQEITKRQEDIENKIEVADALATKLLQRFNHSVSAMRTTAQHLSQVHGLQVELGELKGRLTEVISNCDTLCKRINSEGPESLRSTVAPFSLASPDSCMELNNLKQRKRTTTNETKLHFNEKADNDYSSLPPPHIKVAAERPCNQRRRALSPSWPAQGLRPPSSSPASRTLLLASTPTFPLPCLRLLSDCRPPWAGSTFCRSRHGLSS

SEQ ID NO: 41899 - protein, 172 aa, Arabidopsis thaliana
  peptide (1)..(172): Ceres Seq. ID no. 12323981
MRTTAQHLSQVHGLQVELGELKGRLTEVISNCDTLCKRINSEGPESLRSTVAPFSLASPDSCMELNNLKQRKRTTTNETKLHFNEKADNDYSSLPPPHIKVAAERPCNQRRRALSPSWPAQGLRPPSSSPASRTLLLASTPTFPLPCLRLLSDCRPPWAGSTFCRSRHGLSS

SEQ ID NO: 41900 - DNA, 955 bp, Arabidopsis thaliana
  misc_feature (1)..(955): Ceres Seq. ID no. 12325788
  misc_feature (1)..(955): Ortholog of  Ceres SEQ ID NO 15172948 as cited in SEQ ID NO 51777
  misc_feature (1)..(955): Ortholog of  Ceres SEQ ID NO 12784416 as cited in SEQ ID NO 61324
atatatacattttacaatcacttgctagaccaacgggcttcacttgtttctctcccaaagtttcttcatcatccttgcgataaagaaaacaacaatcggctgtttcgtttcgatccaaagatgagtgaagaaactaaagataaccagaggctgcagcgaccagctcctcgtcttaacgagaggattctctcatccttgtcaagaagatccgtagctgctcatccatggcatgatcttgagattggacctggagctccacagattttcaatgtggttgttgagatcactaaaggaagcaaggtcaaatacgagcttgacaaaaagacaggactcatcaaggttgatcgtattctctactcatcagttgtgtaccctcacaactatggttttgttcctcgcacattgtgtgaagacaatgaccccattgatgtcttagtcatcatgcaggaacctgtgcttccgggttgttttctgcgtgccagagccattggattaatgcctatgattgaccagggtgaaaaagatgacaagatcattgcagtgtgtgttgatgatcctgaatataagcactacactgacatcaaagaacttcctcctcaccgtctctctgaaatccgtcgtttcttcgaagactacaagaaaaacgagaacaaggaagttgcagtgaatgattttctgccatctgagtctgcggttgaagctatccagtactcaatggacctctatgctgaatacattctccacaccctgaggcgttgaagcttctcctcagaagatttctgcagcatctatgtttctgttacttttcattgataataagaagcatatgatcctaattgatattacttttatctctgcatttttcttccttatcatttggtccttctgtaatttcgttttaaagaccctttcttggcattgaaatttttggtttaatttgtttgaagagttctat

SEQ ID NO: 41901 - protein, 252 aa, Arabidopsis thaliana
  peptide (1)..(252): Ceres Seq. ID no. 12325789
IYTFYNHLLDQRASLVSLPKFLHHPCDKENNNRLFRFDPKMSEETKDNQRLQRPAPRLNERILSSLSRRSVAAHPWHDLEIGPGAPQIFNVVVEITKGSKVKYELDKKTGLIKVDRILYSSVVYPHNYGFVPRTLCEDNDPIDVLVIMQEPVLPGCFLRARAIGLMPMIDQGEKDDKIIAVCVDDPEYKHYTDIKELPPHRLSEIRRFFEDYKKNENKEVAVNDFLPSESAVEAIQYSMDLYAEYILHTLRR

SEQ ID NO: 41902 - protein, 212 aa, Arabidopsis thaliana
  peptide (1)..(212): Ceres Seq. ID no. 12325790
MSEETKDNQRLQRPAPRLNERILSSLSRRSVAAHPWHDLEIGPGAPQIFNVVVEITKGSKVKYELDKKTGLIKVDRILYSSVVYPHNYGFVPRTLCEDNDPIDVLVIMQEPVLPGCFLRARAIGLMPMIDQGEKDDKIIAVCVDDPEYKHYTDIKELPPHRLSEIRRFFEDYKKNENKEVAVNDFLPSESAVEAIQYSMDLYAEYILHTLRR

SEQ ID NO: 41903 - DNA, 2156 bp, Arabidopsis thaliana
  misc_feature (1)..(2156): Ceres Seq. ID no. 12329174
  misc_feature (1)..(2156): Ortholog of  Ceres SEQ ID NO 15176298 as cited in SEQ ID NO 58961
aattaccacaaagaagaacttgcaaatcccttctcttttgttcaagtcgtacgacagagcctttgaaagaaagaactggtggggaagcgttaagctacatataactccaagatacgggtctttgtttgttttgaagatcagattcattttacgataattccgttactctttattgtgtatatatatctctttcccggaaatttcggttcttgttgtacaaaaactccaaaaaaacgcataaaaaatattctgtaaatggttgaaattctctggggatttcaacgggtgttgtggtatcatgtcacagaagagagagtttgaagaagggaaaggtcgaattgagggcggctcatccgaagacaagcgtagaagattcaaaagtgtggttcaggaggtaatgagattacaaaccgtcaaacattttctcgaacctgttctcgagcccttaattcgtaaagtggtcaaagaagaagttgaattagctcttggaaagcatctagcaggcatcaagtggatttgtgagaaagagactcatcctttggaatcaaggaatctacagttaaagttcttgaacaatctatcgcttcccgtgtttacttcagctcggatagaaggagatgaaggccaagctataagagttggattaatagacccttcaactggccaaattttctcttctggtcctgcatcatccgccaaactcgaagtttttgtcgttgagggtgattttaacagtgttagtgattggactgatgaggatatcaggaataacattgtaagagagagagaaggaaagaaacctctactcaatgggaatgtatttgcggttcttaatgatggcattggtgttatggatgaaatctcatttacagataactctagctggactaggagcaggaagttcagactcggggtacgaatagtggatcagtttgattatgtcaaaattagagaggcaataacagagtcctttgtcgtaagagatcatcgaggagagttgtacaaaaagcatcatcctccttctcttttcgatgaagtatggagattggaaaagatagtgaaagatggagcatttcacagactactgaatttgtcaaatataaacactgtcaaggatttcttaacacatttccatttaaactcttcaaaactccgacaagttcttggtacgggtatgtcttcaaagatgtgggaaattactttggaccatgctcgatcatgtgttctagatagtagcgtccatgtgtaccaagctcctggatttcagaagaaaacagctgttgtcttcaacgtcgtagctcaagtgcttggactgctcgtggattttcagtatattcctgctgaaaagttatcagagattgaaaaggctcaagcggaggtgatggtaattgatgcattgagtcacctaaatgaagtaatctcgtatgatgatgaggtttccatgatgaggaacgttctcaatgccccggcttctcaaggcagtgttgccgggattgattattcgggtctgagtttgaccagtttggacggatacggttttgtgtcaagtcttcacaacacagcagaatgtagtggcaagcacagtgatgatgttgacatggaagttactccacatggtttatatgaagactacgacaatctctggaactgctctcacattctaggcttagaagaaccgcaatctgagttgcagagtgcgcttgacgatttcatgtcacagaagaatgcttcggtcggtggtaaggctcacagcaaaagatggacaaagcttttcagtgtctcgagatggctctctgttttcaagtatgtcaagttaggaaaaatataaaatgagtttagtacacaaaagaacaaaacgactcgctgcgccgcgccctggacagattcgtgtatatatatactcggggaaagcttgggtttctgatgatccagaggcgttcaaaagtgttttctttcttcttcttcttctggttgtctccatctttgtgttaaagatgtgaatatatgttttaggacagcttcatttttgttgaaagcttaaaaaacagggtcttttataatctctgtgattagtaccaaattgcagatttgcagaactacgtttttcttggtttgtcaggtaatgtgaaactgaataaaatgaatattatttgaat

SEQ ID NO: 41904 - protein, 509 aa, Arabidopsis thaliana
  peptide (1)..(509): Ceres Seq. ID no. 12329175
MSQKREFEEGKGRIEGGSSEDKRRRFKSVVQEVMRLQTVKHFLEPVLEPLIRKVVKEEVELALGKHLAGIKWICEKETHPLESRNLQLKFLNNLSLPVFTSARIEGDEGQAIRVGLIDPSTGQIFSSGPASSAKLEVFVVEGDFNSVSDWTDEDIRNNIVREREGKKPLLNGNVFAVLNDGIGVMDEISFTDNSSWTRSRKFRLGVRIVDQFDYVKIREAITESFVVRDHRGELYKKHHPPSLFDEVWRLEKIVKDGAFHRLLNLSNINTVKDFLTHFHLNSSKLRQVLGTGMSSKMWEITLDHARSCVLDSSVHVYQAPGFQKKTAVVFNVVAQVLGLLVDFQYIPAEKLSEIEKAQAEVMVIDALSHLNEVISYDDEVSMMRNVLNAPASQGSVAGIDYSGLSLTSLDGYGFVSSLHNTAECSGKHSDDVDMEVTPHGLYEDYDNLWNCSHILGLEEPQSELQSALDDFMSQKNASVGGKAHSKRWTKLFSVSRWLSVFKYVKLGKI

SEQ ID NO: 41905 - protein, 476 aa, Arabidopsis thaliana
  peptide (1)..(476): Ceres Seq. ID no. 12329176
MRLQTVKHFLEPVLEPLIRKVVKEEVELALGKHLAGIKWICEKETHPLESRNLQLKFLNNLSLPVFTSARIEGDEGQAIRVGLIDPSTGQIFSSGPASSAKLEVFVVEGDFNSVSDWTDEDIRNNIVREREGKKPLLNGNVFAVLNDGIGVMDEISFTDNSSWTRSRKFRLGVRIVDQFDYVKIREAITESFVVRDHRGELYKKHHPPSLFDEVWRLEKIVKDGAFHRLLNLSNINTVKDFLTHFHLNSSKLRQVLGTGMSSKMWEITLDHARSCVLDSSVHVYQAPGFQKKTAVVFNVVAQVLGLLVDFQYIPAEKLSEIEKAQAEVMVIDALSHLNEVISYDDEVSMMRNVLNAPASQGSVAGIDYSGLSLTSLDGYGFVSSLHNTAECSGKHSDDVDMEVTPHGLYEDYDNLWNCSHILGLEEPQSELQSALDDFMSQKNASVGGKAHSKRWTKLFSVSRWLSVFKYVKLGKI

SEQ ID NO: 41906 - protein, 325 aa, Arabidopsis thaliana
  peptide (1)..(325): Ceres Seq. ID no. 12329177
MDEISFTDNSSWTRSRKFRLGVRIVDQFDYVKIREAITESFVVRDHRGELYKKHHPPSLFDEVWRLEKIVKDGAFHRLLNLSNINTVKDFLTHFHLNSSKLRQVLGTGMSSKMWEITLDHARSCVLDSSVHVYQAPGFQKKTAVVFNVVAQVLGLLVDFQYIPAEKLSEIEKAQAEVMVIDALSHLNEVISYDDEVSMMRNVLNAPASQGSVAGIDYSGLSLTSLDGYGFVSSLHNTAECSGKHSDDVDMEVTPHGLYEDYDNLWNCSHILGLEEPQSELQSALDDFMSQKNASVGGKAHSKRWTKLFSVSRWLSVFKYVKLGKI

SEQ ID NO: 41907 - DNA, 1149 bp, Arabidopsis thaliana
  misc_feature (1)..(1149): Ceres Seq. ID no. 12357529
  misc_feature (1)..(1149): Ortholog of  Ceres SEQ ID NO 13664220 as cited in SEQ ID NO 61151
  misc_feature (1)..(1149): Ortholog of  Ceres SEQ ID NO 13597477 as cited in SEQ ID NO 65160
aatttttgagaataattgagcgataaagaaaagaaacggtatgacgtcgttttgctccatgatttctcttcttcttcttcttcttcttctctctctttcatcggcggttatctccgatgacgcttctttccagaaacttccggtgccggaaactaggtcaggtcccgaagctttcgcttttgattccaccggtaaagggttctataccggtgtctccggtggtaaaatcctcaagtacctccccgagacgggttatgttgactttgcccagatcactgaatcctcgaactcttcatggtgcgatggtactattggaacggctttagccggacgctgtggtcgaccagcaggaatagcattcaacgagaaaacaggtgatctttacgtcgccgatgctccgttgggtcttcacgttatttctcccgccggtggtttggctacgaagatcaccgacagtgttgacggaaagcctttcaagtttcttgacggtcttgacgttgatcccactactggtgtcgtctacttcacttccttcagctcacgcttctccccaatccaagtgttgattgcattggggttaaaggacgcgaccggaaagctctacaaatacgacccatcgaccaaagtcgtgactgtactgatggaagggctaagtggttcagccgggtgtgcagtgagctcagatggttcgtttgtgctggttagtcagttcacaaaaagtaacatcaagaggtattggatcaagggacccaaagctggttcttctgaagacttcaccaactcagtctcaaaccctgacaatatcaaaagaattggctctactggaaacttttgggtcgcttcagtggtgaacaagatcatcgtacctacgaacccatcagcagtcaaagttaactctaatggtgaagttcttcaaaccattcctctcaaagataaatttggagacactttgctcagcgaagtcaacgaattcgagggcaatttatatataggaactctcaccggaccatttgctggaattcttaagctcgaaaagggttcttgtcctgccacttagatctcttatttgaatgcagccgatgtgttacaatcatatatatatatttgagctttttatttatttctgaataaaataaccacttatctcct

SEQ ID NO: 41908 - protein, 338 aa, Arabidopsis thaliana
  peptide (1)..(338): Ceres Seq. ID no. 12357530
MTSFCSMISLLLLLLLLSLSSAVISDDASFQKLPVPETRSGPEAFAFDSTGKGFYTGVSGGKILKYLPETGYVDFAQITESSNSSWCDGTIGTALAGRCGRPAGIAFNEKTGDLYVADAPLGLHVISPAGGLATKITDSVDGKPFKFLDGLDVDPTTGVVYFTSFSSRFSPIQVLIALGLKDATGKLYKYDPSTKVVTVLMEGLSGSAGCAVSSDGSFVLVSQFTKSNIKRYWIKGPKAGSSEDFTNSVSNPDNIKRIGSTGNFWVASVVNKIIVPTNPSAVKVNSNGEVLQTIPLKDKFGDTLLSEVNEFEGNLYIGTLTGPFAGILKLEKGSCPAT

SEQ ID NO: 41909 - protein, 332 aa, Arabidopsis thaliana
  peptide (1)..(332): Ceres Seq. ID no. 12357531
MISLLLLLLLLSLSSAVISDDASFQKLPVPETRSGPEAFAFDSTGKGFYTGVSGGKILKYLPETGYVDFAQITESSNSSWCDGTIGTALAGRCGRPAGIAFNEKTGDLYVADAPLGLHVISPAGGLATKITDSVDGKPFKFLDGLDVDPTTGVVYFTSFSSRFSPIQVLIALGLKDATGKLYKYDPSTKVVTVLMEGLSGSAGCAVSSDGSFVLVSQFTKSNIKRYWIKGPKAGSSEDFTNSVSNPDNIKRIGSTGNFWVASVVNKIIVPTNPSAVKVNSNGEVLQTIPLKDKFGDTLLSEVNEFEGNLYIGTLTGPFAGILKLEKGSCPAT

SEQ ID NO: 41910 - DNA, 2290 bp, Arabidopsis thaliana
  misc_feature (1)..(2290): Ceres Seq. ID no. 13500189
  misc_feature (1)..(2290): Ortholog of  Ceres SEQ ID NO 13597706 as cited in SEQ ID NO 65326
atctttctctctttcggatcattctctcctctgattccgaatcgggtaaattattatggattcttcttcttcgtcttcctccgccgccgcacgccgccgcatcaacgctatccactctcacctcgtcacctcttctcgctcttcccctctcctccgctccaatcccaccgccggcgagttctgtcttgataatggctatagtgttgttcttcccgagaaattgaatactggcaattggaacgtctacagatctgcaaaatctccgttcaagctcgttagtagattcccagatcatcctgacatcgctactctccatgacaattttgagcatgctgttcatgattttcgagattacaagtatttaggaactcgtgttcgtgtcgacggaactgttggagactacaaatggatgacatatggagaagctggtacagcaagaactgctttaggttctggtttggttcatcacggaatccccatgggatcttctgttggaatttacttcatcaatcgcccagagtggctcattgttgatcatgcttgttcttcttattcttatgtgtctgttcctttgtatgatactcttggtcctgatgctgtgaaatttattgtcaatcatgcaactgtgcaagccatattttgtgtggcagagactttaaactctttacttagctgtttgtctgagatgccaagtgtacgcctggtggtggttgttggagggttaaatgaatctttaccctcgcttccctcatcatcaggagtgaaagttgtatcctattcggtgttactgaatcagggtcgtagtaaccctcagcgattttttccaccaaaacccgatgatgttgcaaccatatgctatacaagcggaacaactgggacacccaagggagtcgtattaactcatgcaaacttgattgccaatgttgctggctctagctttagtgtgaagtttttctcttcagatgtttacatttcgtatcttccacttgctcacatttacgaacgagctaatcagatcctaacagtgtactttggagttgctgttggattctaccaaggggacaatatgaaactactggatgatttggctgctctgagacctactgtatttagcagtgtccctcgattatacaatagaatatatgctggtatcattaatgcagtaaaaacctctggtggtctgaaagagagactcttcaatgctgcctataatgcaaagaagcaggctctcttgaatggaaagagtgcttctcccatatgggacaggttggtatttaataaaataaaggacagacttggagggcgggttcgttttatgacgtctggtgcttcacctctctctcctgaagtgatggaatttttgaaagtatgctttggaggaagggtaacagagggatatggaatgactgaaacatcttgtgttataagtggaatggacgagggtgataacctcactggacatgttggctctcctaatccagcttgtgaagtaaagcttgtggatgtcccagaaatgaactatacatcagcggatcagccccatccccgtggcgaaatatgtgttaggggtcctatcatttttacaggctattacaaagatgaagttcaaacgaaagaggtgattgatgaagatggatggcttcacactggagatataggtctgtggctgccgggaggacgtctaaaaattattgacagaaagaagaacatcttcaaattggcgcagggggagtacatagctccagagaaaattgaaaacgtctatgccaaatgcaaatttgtgggccagtgcttcatatatggtgatagctttaattcatcattggtagctgttgtatcggttgatccagatgtgctgaaaagctgggctgcttcagaaggcattaagggaggagatctgagagaattgtgtaataatccgagagtgaaagcagcagtactatctgacatggacactgttggaagagaagctcagttgagaggctttgagtttgcaaaggctgtgacattggtgctggaaccatttactctggaaaatggcttgttgactccgacgttcaagattaagagaccacaagcaaaggaatatttcgcagaagcaataacaaacatgtacaaggagcttggtgcttctgatccctctgctaatagaggtttgtgatgatggtataatcgtgtgattaataaaaagcctacgcaaaagttgtttctcccacaaattgtattcttttttgttttcttgctacatatttattgaatagtaaaggtaataaaggtgctacattacatt

SEQ ID NO: 41911 - protein, 701 aa, Arabidopsis thaliana
  peptide (1)..(701): Ceres Seq. ID no. 13500190
MDSSSSSSSAAARRRINAIHSHLVTSSRSSPLLRSNPTAGEFCLDNGYSVVLPEKLNTGNWNVYRSAKSPFKLVSRFPDHPDIATLHDNFEHAVHDFRDYKYLGTRVRVDGTVGDYKWMTYGEAGTARTALGSGLVHHGIPMGSSVGIYFINRPEWLIVDHACSSYSYVSVPLYDTLGPDAVKFIVNHATVQAIFCVAETLNSLLSCLSEMPSVRLVVVVGGLNESLPSLPSSSGVKVVSYSVLLNQGRSNPQRFFPPKPDDVATICYTSGTTGTPKGVVLTHANLIANVAGSSFSVKFFSSDVYISYLPLAHIYERANQILTVYFGVAVGFYQGDNMKLLDDLAALRPTVFSSVPRLYNRIYAGIINAVKTSGGLKERLFNAAYNAKKQALLNGKSASPIWDRLVFNKIKDRLGGRVRFMTSGASPLSPEVMEFLKVCFGGRVTEGYGMTETSCVISGMDEGDNLTGHVGSPNPACEVKLVDVPEMNYTSADQPHPRGEICVRGPIIFTGYYKDEVQTKEVIDEDGWLHTGDIGLWLPGGRLKIIDRKKNIFKLAQGEYIAPEKIENVYAKCKFVGQCFIYGDSFNSSLVAVVSVDPDVLKSWAASEGIKGGDLRELCNNPRVKAAVLSDMDTVGREAQLRGFEFAKAVTLVLEPFTLENGLLTPTFKIKRPQAKEYFAEAITNMYKELGASDPSANRGL

SEQ ID NO: 41912 - protein, 583 aa, Arabidopsis thaliana
  peptide (1)..(583): Ceres Seq. ID no. 13500191
MTYGEAGTARTALGSGLVHHGIPMGSSVGIYFINRPEWLIVDHACSSYSYVSVPLYDTLGPDAVKFIVNHATVQAIFCVAETLNSLLSCLSEMPSVRLVVVVGGLNESLPSLPSSSGVKVVSYSVLLNQGRSNPQRFFPPKPDDVATICYTSGTTGTPKGVVLTHANLIANVAGSSFSVKFFSSDVYISYLPLAHIYERANQILTVYFGVAVGFYQGDNMKLLDDLAALRPTVFSSVPRLYNRIYAGIINAVKTSGGLKERLFNAAYNAKKQALLNGKSASPIWDRLVFNKIKDRLGGRVRFMTSGASPLSPEVMEFLKVCFGGRVTEGYGMTETSCVISGMDEGDNLTGHVGSPNPACEVKLVDVPEMNYTSADQPHPRGEICVRGPIIFTGYYKDEVQTKEVIDEDGWLHTGDIGLWLPGGRLKIIDRKKNIFKLAQGEYIAPEKIENVYAKCKFVGQCFIYGDSFNSSLVAVVSVDPDVLKSWAASEGIKGGDLRELCNNPRVKAAVLSDMDTVGREAQLRGFEFAKAVTLVLEPFTLENGLLTPTFKIKRPQAKEYFAEAITNMYKELGASDPSANRGL

SEQ ID NO: 41913 - protein, 560 aa, Arabidopsis thaliana
  peptide (1)..(560): Ceres Seq. ID no. 13500192
MGSSVGIYFINRPEWLIVDHACSSYSYVSVPLYDTLGPDAVKFIVNHATVQAIFCVAETLNSLLSCLSEMPSVRLVVVVGGLNESLPSLPSSSGVKVVSYSVLLNQGRSNPQRFFPPKPDDVATICYTSGTTGTPKGVVLTHANLIANVAGSSFSVKFFSSDVYISYLPLAHIYERANQILTVYFGVAVGFYQGDNMKLLDDLAALRPTVFSSVPRLYNRIYAGIINAVKTSGGLKERLFNAAYNAKKQALLNGKSASPIWDRLVFNKIKDRLGGRVRFMTSGASPLSPEVMEFLKVCFGGRVTEGYGMTETSCVISGMDEGDNLTGHVGSPNPACEVKLVDVPEMNYTSADQPHPRGEICVRGPIIFTGYYKDEVQTKEVIDEDGWLHTGDIGLWLPGGRLKIIDRKKNIFKLAQGEYIAPEKIENVYAKCKFVGQCFIYGDSFNSSLVAVVSVDPDVLKSWAASEGIKGGDLRELCNNPRVKAAVLSDMDTVGREAQLRGFEFAKAVTLVLEPFTLENGLLTPTFKIKRPQAKEYFAEAITNMYKELGASDPSANRGL

SEQ ID NO: 41914 - DNA, 2001 bp, Arabidopsis thaliana
  misc_feature (1)..(2001): Ceres Seq. ID no. 13491637
  misc_feature (1)..(2001): Ortholog of  Ceres SEQ ID NO 15177289 as cited in SEQ ID NO 59364
atcttcttcctcatctttcttctctcttcaacattttcttctcttcttcacacaaacacacacagatctcttcttcatcacattacttctggctttacatcttttttcttctccatgaggaaagggagaggctcttccgtcgttggacccgcccttccagtaaccgccggtggatctgtgaaggagccgaggtatagaggcgttaggaagagaccttggggtcgattcgcagctgagatccgtgatccattaaaaaaatctcgtgtctggctcggtactttcgattccgccgtagatgctgcacgcgcttacgataccgccgcacgtaacctccgtggtccaaaggccaagaccaatttcccgatcgattgttctccttcttctcctctccaacctctcacctacctccacaatcaaaacctctgttctcctccggtgattcagaaccagatcgatccgtttatggaccatcggttatacggcggaggtaatttccaggagcagcagcagcagcagattattagtcggccggcgagtagcagcatgagcagcaccgttaaatcttgtagcggaccgagaccgatggaagccgcggcggcgtcttcgtcggtggcgaaaccgttacatgcgattaagagatatccgagaactccaccggtagctccggaggattgtcatagcgactgcgattcttcgtcgtctgttattgacgacggagatgatatcgcatcttcgtcttcccgccggaaaacgccgtttcagtttgatcttaatttcccgccgttggatggcgttgacttattcgctggcgggatagatgatctccactgtaccgatctacgtctctgatttgctgctttacaaaaaaaatccgttgattacacacaaaaaaaattctcaaattttacaaaatgataactttatgctcttttgtttttccattttcctttgatatcatattgaaagagaaaaaaaggaagaacaaaaaaaaaagattgagcgtgatgattttatcatcaacgaagatgatgacgattaaaaagagagagagattgtgttaagatctgttactgtaagaaccagatctgggtttcatttttatctgtttcttcttataaaagatccaacaaccctttgttacatatatataacattctgaagctggtgatgatttctgaatgattcaaatccattatctttagatttctacttattcatagagtgtcccctgatgtaagtaggaagctgcatttacatagtatgtaacagaaccacacagggcacaagtatttgtttgtgttttgtctcttggcttgatcttgatcaattcagggtttcttctattcaacaagtaaagcttagtggttctctgagatggaagcaataaaaagatgaaaggaagaaagacggtgaagctcctttgctatctaattgggtgattcgaagaggaagttagaatactcattgtcattgttaagcctcaagttttcattcatcagcgaggagacaagaaaggctttcccttttgtgtacccaatgaatattttggatggtgaagaacatagagattaagggcatggtcaatgggcggtgagtggttttgttgtgatcgataaagctcaatgagcacaggccaaatctttaggttaaagtttggtggctgagatgattgttttgatctttaagagctgtgggttgaggtggcagaattcgttgtgtgtttgacctttttgatttgaatttgctggtagagagttttcccaattttggtatctactttgcttctatgccacggattcagacagtgaatctttgtgtctgaagcaaaaaccgagtatttttttaccgttttggggtaggcttcttcttaacttaaagtggaagtcaaaagcaatgtcttgttattttcactgtaacgatttaagacaactgatctcaagtcgcttttcctgtttcggttcgtactcttaataatcttctattattctggagttgagattg

SEQ ID NO: 41915 - protein, 282 aa, Arabidopsis thaliana
  peptide (1)..(282): Ceres Seq. ID no. 13491638
IFFLIFLLSSTFSSLLHTNTHRSLLHHITSGFTSFFFSMRKGRGSSVVGPALPVTAGGSVKEPRYRGVRKRPWGRFAAEIRDPLKKSRVWLGTFDSAVDAARAYDTAARNLRGPKAKTNFPIDCSPSSPLQPLTYLHNQNLCSPPVIQNQIDPFMDHRLYGGGNFQEQQQQQIISRPASSSMSSTVKSCSGPRPMEAAAASSSVAKPLHAIKRYPRTPPVAPEDCHSDCDSSSSVIDDGDDIASSSSRRKTPFQFDLNFPPLDGVDLFAGGIDDLHCTDLRL

SEQ ID NO: 41916 - protein, 244 aa, Arabidopsis thaliana
  peptide (1)..(244): Ceres Seq. ID no. 13491639
MRKGRGSSVVGPALPVTAGGSVKEPRYRGVRKRPWGRFAAEIRDPLKKSRVWLGTFDSAVDAARAYDTAARNLRGPKAKTNFPIDCSPSSPLQPLTYLHNQNLCSPPVIQNQIDPFMDHRLYGGGNFQEQQQQQIISRPASSSMSSTVKSCSGPRPMEAAAASSSVAKPLHAIKRYPRTPPVAPEDCHSDCDSSSSVIDDGDDIASSSSRRKTPFQFDLNFPPLDGVDLFAGGIDDLHCTDLRL

SEQ ID NO: 41917 - DNA, 1037 bp, Arabidopsis thaliana
  misc_feature (1)..(1037): Ceres Seq. ID no. 13501430
  misc_feature (1)..(1037): Ortholog of  Ceres SEQ ID NO 13637842 as cited in SEQ ID NO 54650
  misc_feature (1)..(1037): Ortholog of  Ceres SEQ ID NO 12608127 as cited in SEQ ID NO 57579
  misc_feature (1)..(1037): Ortholog of  Ceres SEQ ID NO 12634558 as cited in SEQ ID NO 0
aracatcaaaaactaaacaataaaccatataccataaaaaacatgaaaatcctctcactttcacttctcttgctcttggccgctacggtctctgcatccattccagagctcatcgaactcgtcgattcgaacaccatctttacgaacgaagccgaactcttagagaaagagaaactttccatcaactacgccaactgcagaagctggcaccttggtgttgagacctctaatatcatagacttcgacacggtgcccgcaaattgcaaagactatgttgaagactacttgatcacttccaaacagtaccaatacgactccaaaaccgtgtgcaaagaggcttatttctatgccaaaggacttgccctaaagaacgacaccgttaatgtttggatctttgacctagatgataccctcctctctagtattccctactacgcaaaatatggatacgggacagagaagaccgacccgggggcgtactggttgtggttagggaccggagcatcaacccctggactcccggaggccttgcatctttaccaaaacatcatagagctcgggattgaacccatcatactcagtgaccgttggaaattgtggaagaatgtcactctcgacaatctcgaagctgctggcgtggcctactggaagcatctcatattgaagcctaatggttcgaacttgaggcaagtggtttacaagtcaaaggtgaggaagagtctcgttaagaaaggatacaacatcgttggcaatatcggagaccaatgggctgatttggttgaggatacccctggaagggtttttaagctcccaaatccactctactacgtaccttcttaagcatttatcttcatggcattttccccttgtatccacttcatatctatgtcgtttcgtttatctttgtagccgttttggcaccgttgcataaataaaatttctatcctatcgcaacttaataagyacaaagacttcgtactaaatgttgtttttctttaaaggggtcattaattaagtggccatgaaatgatattcac

SEQ ID NO: 41918 - protein, 279 aa, Arabidopsis thaliana
  peptide (1)..(279): Ceres Seq. ID no. 15223123
  misc_feature (1)..(1): Xaa is any aa, unknown or other
XHQKLNNKPYTIKNMKILSLSLLLLLAATVSASIPELIELVDSNTIFTNEAELLEKEKLSINYANCRSWHLGVETSNIIDFDTVPANCKDYVEDYLITSKQYQYDSKTVCKEAYFYAKGLALKNDTVNVWIFDLDDTLLSSIPYYAKYGYGTEKTDPGAYWLWLGTGASTPGLPEALHLYQNIIELGIEPIILSDRWKLWKNVTLDNLEAAGVAYWKHLILKPNGSNLRQVVYKSKVRKSLVKKGYNIVGNIGDQWADLVEDTPGRVFKLPNPLYYVPS

SEQ ID NO: 41919 - protein, 265 aa, Arabidopsis thaliana
  peptide (1)..(265): Ceres Seq. ID no. 15223124
MKILSLSLLLLLAATVSASIPELIELVDSNTIFTNEAELLEKEKLSINYANCRSWHLGVETSNIIDFDTVPANCKDYVEDYLITSKQYQYDSKTVCKEAYFYAKGLALKNDTVNVWIFDLDDTLLSSIPYYAKYGYGTEKTDPGAYWLWLGTGASTPGLPEALHLYQNIIELGIEPIILSDRWKLWKNVTLDNLEAAGVAYWKHLILKPNGSNLRQVVYKSKVRKSLVKKGYNIVGNIGDQWADLVEDTPGRVFKLPNPLYYVPS

SEQ ID NO: 41920 - DNA, 1221 bp, Arabidopsis thaliana
  misc_feature (1)..(1221): Ceres Seq. ID no. 12328669
  misc_feature (1)..(1221): Ortholog of  Ceres SEQ ID NO 14310369 as cited in SEQ ID NO 54765
  misc_feature (1)..(1221): Ortholog of  Ceres SEQ ID NO 13638746 as cited in SEQ ID NO 59296
  misc_feature (1)..(1221): Ortholog of  Ceres SEQ ID NO 13596474 as cited in SEQ ID NO 62169
  misc_feature (1)..(1221): Ortholog of  Ceres SEQ ID NO 13598714 as cited in SEQ ID NO 62656
  misc_feature (1)..(1221): Ortholog of  Ceres SEQ ID NO 13596969 as cited in SEQ ID NO 63375
  misc_feature (1)..(1221): Ortholog of  Ceres SEQ ID NO 14302434 as cited in SEQ ID NO 63410
  misc_feature (1)..(1221): Ortholog of  Ceres SEQ ID NO 13597519 as cited in SEQ ID NO 64759
  misc_feature (1)..(1221): Ortholog of  Ceres SEQ ID NO 13587054 as cited in SEQ ID NO 0
aacgactcataactcatagctatatcttgtcttaaaaagaagaagcaaagagaattagtggagtacgataagcagagaagtatgttaaaggtggtgttgttgatgatgataatgatgttggcgtcacagtccgaggctcagctgaaccgtgacttttacaaggaaagctgtccatcattgttccttgtcgtgagacgagtcgtgaaacgggccgtggccagagagcctcgcatgggtgcttctctccttcgtttgttcttccatgattgttttgtcaatgggtgtgacggatccttactgttggatgacacaccgtcttttttgggagagaaaacctcaggacccagcaataactctgtgagggggttcgaagtgatcgacaaaatcaagtttaaggttgagaaaatgtgcccgggcatcgtctcatgcgcagacattctagccatcactgctcgggactccgttctcctcctaggtggaccggggtggagcgtgaaacttggaagaagagactctacgacggcgaacttcgcggccgcgaactccggagtcatccctcctccgatcactacccttagcaacctcataaaccgtttcaaagcacaaggtttgtccacacgtgacatggtcgccctctctggttctcacaccattggacgagcccaatgtgttacattcagaaaccgaatctacaacgcaagcaatatcgacacctctttcgccatctctaaacggaggaagctgtcctgccaccagtggctccggagacaacaagaaagccaatcttgacgtccgctctcccgataggttcgaccacggcttctacaagcaacttctgagcaaaaaaggtttgcttacgtcagaccaagtcctctttaataatggtcctaccgactcgctcgtcatagcttacagccacaatctcaatgccttctaccgcgactttgcaagggcaatgattaagatgggagacatcagccccctcaccggatccaatggtcagatccgccaaaactgtcggaggcccaactgaatgattctcttttatattatcccaagcccattgagctcaataatcacctcttcgtcaactgttttttcatgtgcattccccttcttcgtcaactgttaaaatacatcttcattatataaaaaacaataaacacgtaaaagtttgtgactatgcagttttccattataaattactgtctatattctctt

SEQ ID NO: 41921 - protein, 235 aa, Arabidopsis thaliana
  peptide (1)..(235): Ceres Seq. ID no. 12328670
MLKVVLLMMIMMLASQSEAQLNRDFYKESCPSLFLVVRRVVKRAVAREPRMGASLLRLFFHDCFVNGCDGSLLLDDTPSFLGEKTSGPSNNSVRGFEVIDKIKFKVEKMCPGIVSCADILAITARDSVLLLGGPGWSVKLGRRDSTTANFAAANSGVIPPPITTLSNLINRFKAQGLSTRDMVALSGSHTIGRAQCVTFRNRIYNASNIDTSFAISKRRKLSCHQWLRRQQESQS

SEQ ID NO: 41922 - protein, 228 aa, Arabidopsis thaliana
  peptide (1)..(228): Ceres Seq. ID no. 12328671
MMIMMLASQSEAQLNRDFYKESCPSLFLVVRRVVKRAVAREPRMGASLLRLFFHDCFVNGCDGSLLLDDTPSFLGEKTSGPSNNSVRGFEVIDKIKFKVEKMCPGIVSCADILAITARDSVLLLGGPGWSVKLGRRDSTTANFAAANSGVIPPPITTLSNLINRFKAQGLSTRDMVALSGSHTIGRAQCVTFRNRIYNASNIDTSFAISKRRKLSCHQWLRRQQESQS

SEQ ID NO: 41923 - protein, 227 aa, Arabidopsis thaliana
  peptide (1)..(227): Ceres Seq. ID no. 12328672
MIMMLASQSEAQLNRDFYKESCPSLFLVVRRVVKRAVAREPRMGASLLRLFFHDCFVNGCDGSLLLDDTPSFLGEKTSGPSNNSVRGFEVIDKIKFKVEKMCPGIVSCADILAITARDSVLLLGGPGWSVKLGRRDSTTANFAAANSGVIPPPITTLSNLINRFKAQGLSTRDMVALSGSHTIGRAQCVTFRNRIYNASNIDTSFAISKRRKLSCHQWLRRQQESQS

SEQ ID NO: 41924 - DNA, 1189 bp, Arabidopsis thaliana
  misc_feature (1)..(1189): Ceres Seq. ID no. 12348483
  misc_feature (1)..(1189): Ortholog of  Ceres SEQ ID NO 12608620 as cited in SEQ ID NO 60192
  misc_feature (1)..(1189): Ortholog of  Ceres SEQ ID NO 13662898 as cited in SEQ ID NO 66199
  misc_feature (1)..(1189): Ortholog of  Ceres SEQ ID NO 14313358 as cited in SEQ ID NO 67347
  misc_feature (1)..(1189): Ortholog of  Ceres SEQ ID NO 13654314 as cited in SEQ ID NO 67914
gccattagcttttacattaagagaaaacacttgcaaaactaagtgctatctttcttcttcttccttctcctaaaagcccttaacaacttatataccatgagtctcttcaacactgaaaacacatgggcctttgtctttggcttgctcggcaaccttatctcctttgccgtgttcctatctcctgtgccaacgttctataggatttggaagaagaagacaacagaagggtttcagtctattccttatgttgtggcgctcttcagtgcgacgctttggctttactatgcgacacagaagaaagatgtcttcctcctcgtaaccattaacgcctttggttgcttcatcgaaaccatctacatctctatgttccttgcctacgctcccaagccagctcggatgttgacagtgaagatgctacttcttatgaactttggaggattctgtgcgattctccttctttgccaattcttggtaaaaggagccacacgtgctaagattatcggaggaatctgtgtcggattctctgtttgtgttttcgctgctcctctaagcataatcaggacggtaataaagacaagaagtgtggagtacatgccctttagcttatccttaacccttaccatcagtgctgtcatatggctcctttatggtcttgctctcaaggacatctatgttgctttcccgaatgtgcttggttttgctctcggtgcactccaaatgatactctacgttgtctacaaatactgtaaaacgtcgccgcatctaggagagaaagaagtcgaagctgctaagttaccggaggtgagcctcgatatgttgaagctaggcacagtttcatcccctgagccaatctcagtggttcgtcaagcgaacaagtgtacctgcggaaatgatcgaagggctgagattgaagatggacaaacccctaaacatggcaagcagtcctcttccgcagcagctacatgaataaaaatacgttaatgttgactttaccccaacttgatataccaaccaccacgtgtaccccgttacgctgtcgtatttttctgagtttatcaagtgtgcgaagtagagaattaattttccggagttagtttctctacttctttataaaaatttgtgtaattatctattggggataatgtatatttcctattttctgatttaacgaaaactatttaaaatatcc

SEQ ID NO: 41925 - protein, 289 aa, Arabidopsis thaliana
  peptide (1)..(289): Ceres Seq. ID no. 12348484
MSLFNTENTWAFVFGLLGNLISFAVFLSPVPTFYRIWKKKTTEGFQSIPYVVALFSATLWLYYATQKKDVFLLVTINAFGCFIETIYISMFLAYAPKPARMLTVKMLLLMNFGGFCAILLLCQFLVKGATRAKIIGGICVGFSVCVFAAPLSIIRTVIKTRSVEYMPFSLSLTLTISAVIWLLYGLALKDIYVAFPNVLGFALGALQMILYVVYKYCKTSPHLGEKEVEAAKLPEVSLDMLKLGTVSSPEPISVVRQANKCTCGNDRRAEIEDGQTPKHGKQSSSAAAT

SEQ ID NO: 41926 - protein, 200 aa, Arabidopsis thaliana
  peptide (1)..(200): Ceres Seq. ID no. 12348485
MFLAYAPKPARMLTVKMLLLMNFGGFCAILLLCQFLVKGATRAKIIGGICVGFSVCVFAAPLSIIRTVIKTRSVEYMPFSLSLTLTISAVIWLLYGLALKDIYVAFPNVLGFALGALQMILYVVYKYCKTSPHLGEKEVEAAKLPEVSLDMLKLGTVSSPEPISVVRQANKCTCGNDRRAEIEDGQTPKHGKQSSSAAAT

SEQ ID NO: 41927 - protein, 189 aa, Arabidopsis thaliana
  peptide (1)..(189): Ceres Seq. ID no. 12348486
MLTVKMLLLMNFGGFCAILLLCQFLVKGATRAKIIGGICVGFSVCVFAAPLSIIRTVIKTRSVEYMPFSLSLTLTISAVIWLLYGLALKDIYVAFPNVLGFALGALQMILYVVYKYCKTSPHLGEKEVEAAKLPEVSLDMLKLGTVSSPEPISVVRQANKCTCGNDRRAEIEDGQTPKHGKQSSSAAAT

SEQ ID NO: 41928 - DNA, 1339 bp, Arabidopsis thaliana
  misc_feature (1)..(1339): Ceres Seq. ID no. 13489605
  misc_feature (1)..(1339): Ortholog of  Ceres SEQ ID NO 14313955 as cited in SEQ ID NO 54407
gtctctttagcccccactggttcgtctctttcttcgatttctctttctatctggtttccattttcgtctcgttggtgttctggtgggtttggtttgtctctgttcttctatttgtggcgttatccatcggttcaattgtcatcttcatcgtttccgtcgtgttatttggtgtttctcgtttgggtctttcgaacatctttcattcttctctttttggtgttgctccccacgaacaggtagattgatgaaaagcaaccatggatgacctacatggaagcaatgctcgaatgcacattagagaagctcaagatccaatgcatgtgcaatttgaacatcatgctttgcatcacatccacaatggaagcggtatggttgatgaccaggctgatgatggcaatgctggtgggatgagtgagggtgtggaaacagacattccttctcaccctggaaatgtaactgacaatcgtggtgaagtggtcgaccgtggtagtgaacaaggagatcagttaacattgtcttttcagggccaagtctacgtttttgacagtgtcttgcctgagaaggttcaagctgtgcttctattattgggtggtcgtgaattacctcaggcagcccctcctggcctaggatcacctcatcagaacaacagagtatcgagtttacctggtactcctcaaaggtttagtattccgcagcgattagcttctttggtcagatttcgagagaaacggaaaggaaggaattttgataagaagattcggtatacagtccgcaaggaggtagctttgaggatgcaacgcaataaaggtcagttcacatctgccaagtcaaacaatgatgaagctgcatctgctggatctagctgggggtcgaatcaaacctgggccatagaaagtagtgaggctcagcatcaagagatctcatgtcggcactgtggaattggcgagaagtcaactccaatgatgcgacgtggacctgccgggccaagaacactttgcaatgcatgtggacttatgtgggcaaacaagggtgcttttagggacttatccaaagcctctcctcaaacagcccagaatcttcctttaaataagaatgaagatgcaaatcttgagactgatcatcaaataatgataacagtggccaatgacataagcaactcacagtgaggacatgttggctcttgccattacaagcaagagaaagatcccaacagagtttgaatcgcctcaggttctgtagctttatcattccctttgaaagaatctgactcgatttaggttatcaggatttgatctatgacaatgtaatctgagtgataatgatctgcaatgttttgctt

SEQ ID NO: 41929 - protein, 302 aa, Arabidopsis thaliana
  peptide (1)..(302): Ceres Seq. ID no. 13489606
MDDLHGSNARMHIREAQDPMHVQFEHHALHHIHNGSGMVDDQADDGNAGGMSEGVETDIPSHPGNVTDNRGEVVDRGSEQGDQLTLSFQGQVYVFDSVLPEKVQAVLLLLGGRELPQAAPPGLGSPHQNNRVSSLPGTPQRFSIPQRLASLVRFREKRKGRNFDKKIRYTVRKEVALRMQRNKGQFTSAKSNNDEAASAGSSWGSNQTWAIESSEAQHQEISCRHCGIGEKSTPMMRRGPAGPRTLCNACGLMWANKGAFRDLSKASPQTAQNLPLNKNEDANLETDHQIMITVANDISNSQ

SEQ ID NO: 41930 - protein, 292 aa, Arabidopsis thaliana
  peptide (1)..(292): Ceres Seq. ID no. 13489607
MHIREAQDPMHVQFEHHALHHIHNGSGMVDDQADDGNAGGMSEGVETDIPSHPGNVTDNRGEVVDRGSEQGDQLTLSFQGQVYVFDSVLPEKVQAVLLLLGGRELPQAAPPGLGSPHQNNRVSSLPGTPQRFSIPQRLASLVRFREKRKGRNFDKKIRYTVRKEVALRMQRNKGQFTSAKSNNDEAASAGSSWGSNQTWAIESSEAQHQEISCRHCGIGEKSTPMMRRGPAGPRTLCNACGLMWANKGAFRDLSKASPQTAQNLPLNKNEDANLETDHQIMITVANDISNSQ

SEQ ID NO: 41931 - protein, 283 aa, Arabidopsis thaliana
  peptide (1)..(283): Ceres Seq. ID no. 13489608
MHVQFEHHALHHIHNGSGMVDDQADDGNAGGMSEGVETDIPSHPGNVTDNRGEVVDRGSEQGDQLTLSFQGQVYVFDSVLPEKVQAVLLLLGGRELPQAAPPGLGSPHQNNRVSSLPGTPQRFSIPQRLASLVRFREKRKGRNFDKKIRYTVRKEVALRMQRNKGQFTSAKSNNDEAASAGSSWGSNQTWAIESSEAQHQEISCRHCGIGEKSTPMMRRGPAGPRTLCNACGLMWANKGAFRDLSKASPQTAQNLPLNKNEDANLETDHQIMITVANDISNSQ

SEQ ID NO: 41932 - DNA, 1138 bp, Arabidopsis thaliana
  misc_feature (1)..(1138): Ceres Seq. ID no. 13488750
  misc_feature (1)..(1138): Ortholog of  Ceres SEQ ID NO 13594341 as cited in SEQ ID NO 57917
  misc_feature (1)..(1138): Ortholog of  Ceres SEQ ID NO 13656441 as cited in SEQ ID NO 65703
tctacaagtttttgatttcagagtccaccgttgagcctgttcaattaaatcgttgaatctcgcggtgcgttttactttgattctttcgaattttttttatatggatgttgccgcgatggcgagatgtgtgggaaggtgctacgtttcgccggcgttcggtgagtctgaatcgcaccggttatcggagcggcggtttctgaaattgtctagctccacgaattcggatcccgccggtagtaaaagtttgaagcttcgcgggaaaattcatcggagaatgagctacttccgtccgatcatggcaaaagatgaatccatttcatcgcggtccggtgaaacgaagcaaatcaatggaaagcaaaagaacattgtctggcatgattgtcccgttactaaatccgacaggcaagaattaattaagcaaaagggatgtgtgatttggattactggcttaagtggttcaggtaaaagtagtctggcatgtgctcttagtcgagctttgcacaatcgtggaaagctttcgtatatacttgatggtgacaatgttcgacatggtttaaacagcgatcttagtttcgaagcagatgatcgagctgaaaacattcgaagagttggtgaagtggctaaactgtttgcagattctggtattatctgtattgcaagtttaatatctccttaccggatagaacgagctgcctgccgtgcattattaccacaaggagatttcattgaggtatttatggatgtgccactccatgtttgtgaagctagagatccaaagggcttatacaaacgtgcacgcgctggtaaaatcaaaggttttacaggagtagatgatccatatgaagcgcctttggattgcgagattgtgatacaaaacagtagagacaaggggctttcttcttcatcttcatcttcatcttcaccttcatcttcgtcttcttctctgtgtgaaatggcagatattgttgtgtcgtacttggaccaaaatggatacctgaagaaacactccacaaaatcacgtaattgtatgtaaatgtaatattaatatcattgttgtaacgtttcttaaacctattttacctatggacgattaaattgtgaaaacataaatgtaattcacaatctgcaaagagttggc

SEQ ID NO: 41933 - protein, 310 aa, Arabidopsis thaliana
  peptide (1)..(310): Ceres Seq. ID no. 13488751
MDVAAMARCVGRCYVSPAFGESESHRLSERRFLKLSSSTNSDPAGSKSLKLRGKIHRRMSYFRPIMAKDESISSRSGETKQINGKQKNIVWHDCPVTKSDRQELIKQKGCVIWITGLSGSGKSSLACALSRALHNRGKLSYILDGDNVRHGLNSDLSFEADDRAENIRRVGEVAKLFADSGIICIASLISPYRIERAACRALLPQGDFIEVFMDVPLHVCEARDPKGLYKRARAGKIKGFTGVDDPYEAPLDCEIVIQNSRDKGLSSSSSSSSSPSSSSSSLCEMADIVVSYLDQNGYLKKHSTKSRNCM

SEQ ID NO: 41934 - protein, 305 aa, Arabidopsis thaliana
  peptide (1)..(305): Ceres Seq. ID no. 13488752
MARCVGRCYVSPAFGESESHRLSERRFLKLSSSTNSDPAGSKSLKLRGKIHRRMSYFRPIMAKDESISSRSGETKQINGKQKNIVWHDCPVTKSDRQELIKQKGCVIWITGLSGSGKSSLACALSRALHNRGKLSYILDGDNVRHGLNSDLSFEADDRAENIRRVGEVAKLFADSGIICIASLISPYRIERAACRALLPQGDFIEVFMDVPLHVCEARDPKGLYKRARAGKIKGFTGVDDPYEAPLDCEIVIQNSRDKGLSSSSSSSSSPSSSSSSLCEMADIVVSYLDQNGYLKKHSTKSRNCM

SEQ ID NO: 41935 - protein, 252 aa, Arabidopsis thaliana
  peptide (1)..(252): Ceres Seq. ID no. 13488753
MSYFRPIMAKDESISSRSGETKQINGKQKNIVWHDCPVTKSDRQELIKQKGCVIWITGLSGSGKSSLACALSRALHNRGKLSYILDGDNVRHGLNSDLSFEADDRAENIRRVGEVAKLFADSGIICIASLISPYRIERAACRALLPQGDFIEVFMDVPLHVCEARDPKGLYKRARAGKIKGFTGVDDPYEAPLDCEIVIQNSRDKGLSSSSSSSSSPSSSSSSLCEMADIVVSYLDQNGYLKKHSTKSRNCM

SEQ ID NO: 41936 - DNA, 1497 bp, Arabidopsis thaliana
  misc_feature (1)..(1497): Ceres Seq. ID no. 12328238
  misc_feature (1)..(1497): Ortholog of  Ceres SEQ ID NO 14313155 as cited in SEQ ID NO 54706
  misc_feature (1)..(1497): Ortholog of  Ceres SEQ ID NO 13639022 as cited in SEQ ID NO 59811
gattgtctctctcccggagatctctctttctcttcttctccatccttcttctctcggcgcgcgcttcatccccaccaccttcgaattcgtgccctttgagggaagctgctaggatgggtgtgaagcaggctctaaggagcattgatgcgtttccaagagcagaggatcatttgcttcagaagacacaatctggcgctgttgtatctattgttggacttcttataatggctactttgttcttacacgagctgagttattatcttaacacacttacagtgcaccagatgtcagtggacttaaagcgtggagaaactcttccaattcatgtaaatatgacgtttccatctttaccttgtgatgtactgagcgtagatgctatcgacatgtcagggaagcatgaagtggatcttgatacaaacatttggaagctccgtctcaacagtcatggtcatatcataggcacagaatatatatctgatcttgttgaaaaggggcatgagcatggccactcacctcacaagcatgatggcaaagaagaacacaagaatgagactgaaaccgaagcattgaatattcttggctttgaccaagctgctgagactatgattaaaaaagtgaagcaagcattggcagatggagaaggatgtcgggtttatggtgtcctagatgtacaacgggttgccggaaacttccatatttcagttcatgggctgaacatctatgttgctcagatgatatttggcgggtccaaaaacgtaaacgtgagccatatgattcacgatctatcatttgggccgaaataccccggaattcacaacccacttgatgacaccaaccgaatactccatgacaccagtggaacattcaaatactatattaagattgttcccacagaatatagatatctttcaaaagacgtactgtcaacaaatcagtactctgtaactgaatatttcacgccaatgactgaattcgaccgtacatggccagctgtttacttcttatatgatctttcacctatcactgtgaccatcaaggaagaacgccgtagttttctccacttaatcactcgtctttgcgctgtattaggcggtacatttgctttgacaggaatgttagatcgttggatgttccgctttattgaatctttcaacaagaagccgagtactagagcgtaaactagctgaaacagagacaaaacaatgagaaacaaaaaaaaccaaaggaaggaagaagaatctctcaaatcccaaaacttgtatctgccttcttcagacaacaacacccaccagagattccaggattgatgattacattactcagaaactctagaatccatggatatagtttttttttgagtctctcttatgtattactctgattatctctggttaaactagtagagttaatttgtaatttttattcaccttgcttcctgggattttaacatttttgcatcttttcacttgtctcagtaaaaaaacaaaattatactgt

SEQ ID NO: 41937 - protein, 391 aa, Arabidopsis thaliana
  peptide (1)..(391): Ceres Seq. ID no. 12328239
LSLSRRSLFLFFSILLLSARASSPPPSNSCPLREAARMGVKQALRSIDAFPRAEDHLLQKTQSGAVVSIVGLLIMATLFLHELSYYLNTLTVHQMSVDLKRGETLPIHVNMTFPSLPCDVLSVDAIDMSGKHEVDLDTNIWKLRLNSHGHIIGTEYISDLVEKGHEHGHSPHKHDGKEEHKNETETEALNILGFDQAAETMIKKVKQALADGEGCRVYGVLDVQRVAGNFHISVHGLNIYVAQMIFGGSKNVNVSHMIHDLSFGPKYPGIHNPLDDTNRILHDTSGTFKYYIKIVPTEYRYLSKDVLSTNQYSVTEYFTPMTEFDRTWPAVYFLYDLSPITVTIKEERRSFLHLITRLCAVLGGTFALTGMLDRWMFRFIESFNKKPSTRA

SEQ ID NO: 41938 - protein, 354 aa, Arabidopsis thaliana
  peptide (1)..(354): Ceres Seq. ID no. 12328240
MGVKQALRSIDAFPRAEDHLLQKTQSGAVVSIVGLLIMATLFLHELSYYLNTLTVHQMSVDLKRGETLPIHVNMTFPSLPCDVLSVDAIDMSGKHEVDLDTNIWKLRLNSHGHIIGTEYISDLVEKGHEHGHSPHKHDGKEEHKNETETEALNILGFDQAAETMIKKVKQALADGEGCRVYGVLDVQRVAGNFHISVHGLNIYVAQMIFGGSKNVNVSHMIHDLSFGPKYPGIHNPLDDTNRILHDTSGTFKYYIKIVPTEYRYLSKDVLSTNQYSVTEYFTPMTEFDRTWPAVYFLYDLSPITVTIKEERRSFLHLITRLCAVLGGTFALTGMLDRWMFRFIESFNKKPSTRA

SEQ ID NO: 41939 - protein, 317 aa, Arabidopsis thaliana
  peptide (1)..(317): Ceres Seq. ID no. 12328241
MATLFLHELSYYLNTLTVHQMSVDLKRGETLPIHVNMTFPSLPCDVLSVDAIDMSGKHEVDLDTNIWKLRLNSHGHIIGTEYISDLVEKGHEHGHSPHKHDGKEEHKNETETEALNILGFDQAAETMIKKVKQALADGEGCRVYGVLDVQRVAGNFHISVHGLNIYVAQMIFGGSKNVNVSHMIHDLSFGPKYPGIHNPLDDTNRILHDTSGTFKYYIKIVPTEYRYLSKDVLSTNQYSVTEYFTPMTEFDRTWPAVYFLYDLSPITVTIKEERRSFLHLITRLCAVLGGTFALTGMLDRWMFRFIESFNKKPSTRA

SEQ ID NO: 41940 - DNA, 1124 bp, Arabidopsis thaliana
  misc_feature (1)..(1124): Ceres Seq. ID no. 12323982
  misc_feature (1)..(1124): Ortholog of  Ceres SEQ ID NO 15170517 as cited in SEQ ID NO 52861
agcatcttctctctttttctcccccaattctctcaagagaatctctaagcttttgttcttcttacaaatcatgtacttataataaacccaagaaagaagaagaagaaaaacaaaaccaatcccaagctgtgatggcgaaacagagttacttcttcgtcttcaccttcttgtttctttctcttctctcatactgttcttcaacaactacacatcatgatgtgttaaacccaccaacggtctttcctacaaaccccacaactacaccgacggctacatttcctccggtgaccataacgccaacaaatccagccacaacagttcctattgttcctccagtcacaactattccacctcctacactcacaccacctccagtcataacaattcctcctcctacactcacaccacctgtgacaaacccagtaaccaacccagtgactcagtatcctccaacacaaccctcagggacggtcccagtacctgttcctgtggttgcaccgcctgttgtctcaaactctccatcggtttcaggccaaagctggtgtgtggccaagcctggagcctctcaagtctcactccaacaggctcttgactatgcctgcgggatcgcggattgctctcaactacagcaaggcggcaattgttattctcctatcagtcttcagagtcatgcctcatttgccttcaacagctattaccagaagaatccttctccacaaagctgtgattttggcggtgcagcctcattagttaacaccaacccaagcactggttcttgtatataccagacaggttcatcgacatcaacaccaatgacagcaggaacaacaacaccaactccatcaacacaaacagtgaaccagcctcctgtcacatcaacacctataataccaacaggaggcgggataatcggggttggaactccgccagcgatttttaaccccgcaaatcctacatcaaatacgctaaacaatccatcctcaggaggtttagcgggtggttacggttttgatggttcgccaaatgagaacaatccaacatcatcagactctacacacttgaagattcactttggtcatgctatggtggcaacattgattcttcacgcagtgctatttcattag

SEQ ID NO: 41941 - protein, 373 aa, Arabidopsis thaliana
  peptide (1)..(373): Ceres Seq. ID no. 12323983
HLLSFSPPILSRESLSFCSSYKSCTYNKPKKEEEEKQNQSQAVMAKQSYFFVFTFLFLSLLSYCSSTTTHHDVLNPPTVFPTNPTTTPTATFPPVTITPTNPATTVPIVPPVTTIPPPTLTPPPVITIPPPTLTPPVTNPVTNPVTQYPPTQPSGTVPVPVPVVAPPVVSNSPSVSGQSWCVAKPGASQVSLQQALDYACGIADCSQLQQGGNCYSPISLQSHASFAFNSYYQKNPSPQSCDFGGAASLVNTNPSTGSCIYQTGSSTSTPMTAGTTTPTPSTQTVNQPPVTSTPIIPTGGGIIGVGTPPAIFNPANPTSNTLNNPSSGGLAGGYGFDGSPNENNPTSSDSTHLKIHFGHAMVATLILHAVLFH

SEQ ID NO: 41942 - protein, 330 aa, Arabidopsis thaliana
  peptide (1)..(330): Ceres Seq. ID no. 12323984
MAKQSYFFVFTFLFLSLLSYCSSTTTHHDVLNPPTVFPTNPTTTPTATFPPVTITPTNPATTVPIVPPVTTIPPPTLTPPPVITIPPPTLTPPVTNPVTNPVTQYPPTQPSGTVPVPVPVVAPPVVSNSPSVSGQSWCVAKPGASQVSLQQALDYACGIADCSQLQQGGNCYSPISLQSHASFAFNSYYQKNPSPQSCDFGGAASLVNTNPSTGSCIYQTGSSTSTPMTAGTTTPTPSTQTVNQPPVTSTPIIPTGGGIIGVGTPPAIFNPANPTSNTLNNPSSGGLAGGYGFDGSPNENNPTSSDSTHLKIHFGHAMVATLILHAVLFH

SEQ ID NO: 41943 - DNA, 1161 bp, Arabidopsis thaliana
  misc_feature (1)..(1161): Ceres Seq. ID no. 12371205
  misc_feature (1)..(1161): Ortholog of  Ceres SEQ ID NO 13658400 as cited in SEQ ID NO 66403
aaacctccaacttttttttgttttatcagattgtagaattagggaagagactttcgcaagcaatctagaagcaaatcgatcgccaaatctccggattatttgcaagaatcattcccagataatcttccccagattctccacttctccagctctgatcggagtgttgctcgaacagcttgaagaagacgacgaagatatggctacttcgaagaaaatgattacacgtgaagagtgggagaagaaactaaatgctgtgaagcttaggaaagaagatatgaatactttggtgatgaattttcttgtgactgaaggatatgttgaagctgctgagaaattccaaagggagtctggaaccaaaccagagatagatcttgcgaccatcactgatcgaatggctgttaaaaaggctgttcaaaacggaaatgtcgaggatgcgattgaaaaagttaatgatttgaatcctgagatactagacacgaatccggagctcttttttcatcttcagcagcaaaggttgatagaattaattcgacaagggaagacagaagaggccttggagtttgctcaagaggaacttgcaccacgtggcgaagaaaaccaagcgtttctagaagaattggaaaaaactgtagccctacttgtttttgacgatgcctctacctgcccggttaaagagcttcttgatctttcccaccgtcttaagacagcaagtgaagtaaatgcagcgattcttacaagccagagccacgaaaaagatcctaaacttccaagcttgttgaagatgttgatttgggctcaaaatcaactggacgagaaagcagtgtatcctcacattaatgatttgtctaccggtaagctcgaagacccgtcagaatgattccgtacttctttcagccattggaaaacagtagcaacaaggaacaatgaatggtgctctcttctcttcccttcaatctcaataacttacaattcatatgctttctgcttttccttttcttctgcatcgggatttgttggacccgcaatggttaggatatgggaaggggaacataagctgttgtaggcaatgaattactctagtcaaatgttcttattatcaacatatttgatgactcattgcatatgtgcatttgatttgaatgaagttatcgactttgtttg

SEQ ID NO: 41944 - protein, 291 aa, Arabidopsis thaliana
  peptide (1)..(291): Ceres Seq. ID no. 12371206
NLQLFFVLSDCRIREETFASNLEANRSPNLRIICKNHSQIIFPRFSTSPALIGVLLEQLEEDDEDMATSKKMITREEWEKKLNAVKLRKEDMNTLVMNFLVTEGYVEAAEKFQRESGTKPEIDLATITDRMAVKKAVQNGNVEDAIEKVNDLNPEILDTNPELFFHLQQQRLIELIRQGKTEEALEFAQEELAPRGEENQAFLEELEKTVALLVFDDASTCPVKELLDLSHRLKTASEVNAAILTSQSHEKDPKLPSLLKMLIWAQNQLDEKAVYPHINDLSTGKLEDPSE

SEQ ID NO: 41945 - protein, 226 aa, Arabidopsis thaliana
  peptide (1)..(226): Ceres Seq. ID no. 12371207
MATSKKMITREEWEKKLNAVKLRKEDMNTLVMNFLVTEGYVEAAEKFQRESGTKPEIDLATITDRMAVKKAVQNGNVEDAIEKVNDLNPEILDTNPELFFHLQQQRLIELIRQGKTEEALEFAQEELAPRGEENQAFLEELEKTVALLVFDDASTCPVKELLDLSHRLKTASEVNAAILTSQSHEKDPKLPSLLKMLIWAQNQLDEKAVYPHINDLSTGKLEDPSE

SEQ ID NO: 41946 - protein, 220 aa, Arabidopsis thaliana
  peptide (1)..(220): Ceres Seq. ID no. 12371208
MITREEWEKKLNAVKLRKEDMNTLVMNFLVTEGYVEAAEKFQRESGTKPEIDLATITDRMAVKKAVQNGNVEDAIEKVNDLNPEILDTNPELFFHLQQQRLIELIRQGKTEEALEFAQEELAPRGEENQAFLEELEKTVALLVFDDASTCPVKELLDLSHRLKTASEVNAAILTSQSHEKDPKLPSLLKMLIWAQNQLDEKAVYPHINDLSTGKLEDPSE

SEQ ID NO: 41947 - DNA, 1273 bp, Arabidopsis thaliana
  misc_feature (1)..(1273): Ceres Seq. ID no. 13499936
  misc_feature (1)..(1273): Ortholog of  Ceres SEQ ID NO 14308401 as cited in SEQ ID NO 55082
cttgaaaagtcccattaacaaacaaacgagaaaaccaactctggagaatggcgaatctaccttcttctctctccatgggcacacctttcggtggtcctagcacctccgcacaaaatcctaccggagctccggccaacaaagatcgcaatttggcctctgctgaacagttggtactcgatctcagcaatcctgaactcagagaaaatgctcttctcgagctttccaagaaaagagaattgtttcaggatctggcgcctttgttgtggaactcttttggtaccattgctgccttgttacaggagattgtatcaatctactctgttcttgcacctccaaatctgactcctgctcagtccaaccgtgtttgcaactcgctcgctcttcttcagtgcgtagcatctcattctgacacgagaatgttatttctcaaggctcatatcccgttgtacctttatcccttccttaatacaacgagtaagtccagacctttcgaatacttgcggcttactagcctaggtgtcatcggtgcacttgtgaaggttgatgatacagaggtcattagcttccttctttcaactgaaattattcctctgtgcctccgtaccatggaaatggggagtgagctgtcaaaaacagtggcaacatttattgttcaaaagatactgttggatgatgtggggatggattacatctgcacaacagcagagcggttttttgcagttggtcgagtgttgggaaatatggttcagtcacttgtggagcagccttctccgcgccttttgaagcatatcattcgttgctatctccgtttatcagacaacccaagggcttgtgctgcactcgcaagctgtctccctgactcgctacgagatggatcctttagcaattgtcttcgcgaggatccaactgcaagaaggtggctgcaacagttggtgcacaatgttggagttggtcgcgtcccaacacatcaaggtggaggatttgagcacatgctttgagctgaatccatctcaaacccatccatggagtgtgtttcttctgtttttgtttctaattatacatgtgctttttaatgccttaacttagatgatgggttataggctttttagtctgtttgaaattcttattgtaattatttttaagctctagaaccaatcccccagaatgcataagtcttgggataataaaagattggttacaaaagaaatattatagagtttgtattatcatgttgaacggtaacaatttttattccagcaaaagctttagcggt

SEQ ID NO: 41948 - protein, 316 aa, Arabidopsis thaliana
  peptide (1)..(316): Ceres Seq. ID no. 13499937
MANLPSSLSMGTPFGGPSTSAQNPTGAPANKDRNLASAEQLVLDLSNPELRENALLELSKKRELFQDLAPLLWNSFGTIAALLQEIVSIYSVLAPPNLTPAQSNRVCNSLALLQCVASHSDTRMLFLKAHIPLYLYPFLNTTSKSRPFEYLRLTSLGVIGALVKVDDTEVISFLLSTEIIPLCLRTMEMGSELSKTVATFIVQKILLDDVGMDYICTTAERFFAVGRVLGNMVQSLVEQPSPRLLKHIIRCYLRLSDNPRACAALASCLPDSLRDGSFSNCLREDPTARRWLQQLVHNVGVGRVPTHQGGGFEHML

SEQ ID NO: 41949 - protein, 307 aa, Arabidopsis thaliana
  peptide (1)..(307): Ceres Seq. ID no. 13499938
MGTPFGGPSTSAQNPTGAPANKDRNLASAEQLVLDLSNPELRENALLELSKKRELFQDLAPLLWNSFGTIAALLQEIVSIYSVLAPPNLTPAQSNRVCNSLALLQCVASHSDTRMLFLKAHIPLYLYPFLNTTSKSRPFEYLRLTSLGVIGALVKVDDTEVISFLLSTEIIPLCLRTMEMGSELSKTVATFIVQKILLDDVGMDYICTTAERFFAVGRVLGNMVQSLVEQPSPRLLKHIIRCYLRLSDNPRACAALASCLPDSLRDGSFSNCLREDPTARRWLQQLVHNVGVGRVPTHQGGGFEHML

SEQ ID NO: 41950 - protein, 193 aa, Arabidopsis thaliana
  peptide (1)..(193): Ceres Seq. ID no. 13499939
MLFLKAHIPLYLYPFLNTTSKSRPFEYLRLTSLGVIGALVKVDDTEVISFLLSTEIIPLCLRTMEMGSELSKTVATFIVQKILLDDVGMDYICTTAERFFAVGRVLGNMVQSLVEQPSPRLLKHIIRCYLRLSDNPRACAALASCLPDSLRDGSFSNCLREDPTARRWLQQLVHNVGVGRVPTHQGGGFEHML

SEQ ID NO: 41951 - DNA, 1419 bp, Arabidopsis thaliana
  misc_feature (1)..(1419): Ceres Seq. ID no. 12602810
  misc_feature (1)..(1419): Ortholog of  Ceres SEQ ID NO 13596921 as cited in SEQ ID NO 62368
  misc_feature (1)..(1419): Ortholog of  Ceres SEQ ID NO 13600673 as cited in SEQ ID NO 0
atcccttgcccaacgcacaagtttcatctccttcccacataaaccccaatcccaaattctcttcatttttccttattcttgcgactaatcgattcaatcccaaatttcagaattcaaaatttcatctaaagtttagagatttctcgattatggtgaaatcgacggacggtggtggtgggtcttcttcttcttcttcagtggcgccgttcttgagaaaatgttacgatatggttgatgattctactactgactctataatctcatggagtccaagtgcagataatagcttcgttatcttggacaccaccgtcttctctgttcaactcttgcctaaatactttaaacacagcaatttctctagcttcattcgtcagctcaatatctacggttttagaaaagttgatgcagatcgatgggagtttgcgaatgacgggtttgtgagaggtcaaaaggatttgctgaagaatgttatcaggaggaagaatgttcaaagtagtgagcagagcaaacatgagagtacaagtacaacatatgctcaggaaaagagtggattgtggaaggaagttgatattttgaaaggtgataagcaggtattggcgcaggagttgatcaaagttaggcagtatcaggaggtgacggatactaagatgttacatttagaagacagagttcaaggaatggaagagagtcagcaggagatgctttcgtttttggttatggttatgaagaatccaagtcttttagttcagttacttcagccaaaggagaaaaacacttggcgaaaagcgggggaaggagcgaagattgtggaagaagtgactgatgaaggagaatcaaactcatatggtcttcctttagtaacataccagccaccatcggacaacaatggaactgcaaagtcaaactcgaacgacgtaaatgatttcttgagaaacgccgatatgttgaagttctgcttagatgaaaaccatgtgccattgatcatacctgatctatacgatgatggagcatgggaaaagcttttgttgttgagcccttcaaggaagaagacgaagaagcaggagaacattgtgaagaaaggaaaggatgatttgacattggaggaggaggaggaggatggaacaatggaattagacaagagctatatgcttaagctgatatcagaagagatggagaaaccagatgactttgaatttggacagcttactcctgagaggtctaggaaccttgagattttgacagagcagatggaattgctggcttcaaatgaatagttgattttttgaacatatcagcctcaaaacttttgttatgtaactctataacaaacaacgaagtatgcaccggatatattactttcaccggtgcaattctcaatgatgtgttatagcagcttactacaaaaacatggttgaaact

SEQ ID NO: 41952 - protein, 423 aa, Arabidopsis thaliana
  peptide (1)..(423): Ceres Seq. ID no. 12602811
PLPNAQVSSPSHINPNPKFSSFFLILATNRFNPKFQNSKFHLKFRDFSIMVKSTDGGGGSSSSSSVAPFLRKCYDMVDDSTTDSIISWSPSADNSFVILDTTVFSVQLLPKYFKHSNFSSFIRQLNIYGFRKVDADRWEFANDGFVRGQKDLLKNVIRRKNVQSSEQSKHESTSTTYAQEKSGLWKEVDILKGDKQVLAQELIKVRQYQEVTDTKMLHLEDRVQGMEESQQEMLSFLVMVMKNPSLLVQLLQPKEKNTWRKAGEGAKIVEEVTDEGESNSYGLPLVTYQPPSDNNGTAKSNSNDVNDFLRNADMLKFCLDENHVPLIIPDLYDDGAWEKLLLLSPSRKKTKKQENIVKKGKDDLTLEEEEEDGTMELDKSYMLKLISEEMEKPDDFEFGQLTPERSRNLEILTEQMELLASNE

SEQ ID NO: 41953 - protein, 374 aa, Arabidopsis thaliana
  peptide (1)..(374): Ceres Seq. ID no. 12602812
MVKSTDGGGGSSSSSSVAPFLRKCYDMVDDSTTDSIISWSPSADNSFVILDTTVFSVQLLPKYFKHSNFSSFIRQLNIYGFRKVDADRWEFANDGFVRGQKDLLKNVIRRKNVQSSEQSKHESTSTTYAQEKSGLWKEVDILKGDKQVLAQELIKVRQYQEVTDTKMLHLEDRVQGMEESQQEMLSFLVMVMKNPSLLVQLLQPKEKNTWRKAGEGAKIVEEVTDEGESNSYGLPLVTYQPPSDNNGTAKSNSNDVNDFLRNADMLKFCLDENHVPLIIPDLYDDGAWEKLLLLSPSRKKTKKQENIVKKGKDDLTLEEEEEDGTMELDKSYMLKLISEEMEKPDDFEFGQLTPERSRNLEILTEQMELLASNE

SEQ ID NO: 41954 - protein, 348 aa, Arabidopsis thaliana
  peptide (1)..(348): Ceres Seq. ID no. 12602813
MVDDSTTDSIISWSPSADNSFVILDTTVFSVQLLPKYFKHSNFSSFIRQLNIYGFRKVDADRWEFANDGFVRGQKDLLKNVIRRKNVQSSEQSKHESTSTTYAQEKSGLWKEVDILKGDKQVLAQELIKVRQYQEVTDTKMLHLEDRVQGMEESQQEMLSFLVMVMKNPSLLVQLLQPKEKNTWRKAGEGAKIVEEVTDEGESNSYGLPLVTYQPPSDNNGTAKSNSNDVNDFLRNADMLKFCLDENHVPLIIPDLYDDGAWEKLLLLSPSRKKTKKQENIVKKGKDDLTLEEEEEDGTMELDKSYMLKLISEEMEKPDDFEFGQLTPERSRNLEILTEQMELLASNE

SEQ ID NO: 41955 - DNA, 1091 bp, Arabidopsis thaliana
  misc_feature (1)..(1091): Ceres Seq. ID no. 13488786
  misc_feature (1)..(1091): Ortholog of  Ceres SEQ ID NO 14309202 as cited in SEQ ID NO 0
aaaaaaagataaattacaaaatatcattttccttatcttattgacttgtcaagattctcttcttcttcttcttcttcctcctcctccaaactcagttccctccgtccatggcagcaaccttacctctatctccgatcaatcatcagttgtgtcggttcgggaacaactctttgacgactcaccggttctgttctcctggcttcttgatttcttctccttgtttcattggtttgaccggaatgggctctgctactcagttacgtgctcgtcgttctctgatctcttcagcagttgcgacgaattcgctgttgcatgacgtcggagccgccgtggcagtgcttggtggagcatacgcgcttgtcttaagcttcgagagtctcaccaagcgaaacgtcattcaacagagtttgagcagaaagcttgtgcatatactctcaggtctgcttttcgtacttgcgtggccaatcttcagcggatcgaccgaggctcgatactttgctgcttttgttccgttagtgaatggcttaaggcttgttattaacggactatccatttccccaaattcgatgctaatcaaatccgtcacaagagaagggagagcagaagagttgcttaaaggtcctttgttctacgttctagctcttcttttctctgcggttttcttctggagagagtctcctatcggtatgatctcgttagcaatgatgtgtggtggcgatggaatagctgatataatgggacgtaagtttgggtcaactaagataccttacaacccaagaaagagttgggcaggaagcatctccatgttcatcttcggcttcttcatctccatcgcattactttactattactcaagccttgggtaccttcacatgaactgggaaacgaccttgcagagagtagcaatggtctcaatggtcgccacggtagtcgagtcgctacccatcaccgatcaattagacgacaatatttcggttcctctggctactattttagctgcttatttaagtttcggatattagattaatccctcataaaccgaatgtgtatatacgtatttttttaatgaatccgaccttacaaatgtttcc

SEQ ID NO: 41956 - protein, 304 aa, Arabidopsis thaliana
  peptide (1)..(304): Ceres Seq. ID no. 13488787
MAATLPLSPINHQLCRFGNNSLTTHRFCSPGFLISSPCFIGLTGMGSATQLRARRSLISSAVATNSLLHDVGAAVAVLGGAYALVLSFESLTKRNVIQQSLSRKLVHILSGLLFVLAWPIFSGSTEARYFAAFVPLVNGLRLVINGLSISPNSMLIKSVTREGRAEELLKGPLFYVLALLFSAVFFWRESPIGMISLAMMCGGDGIADIMGRKFGSTKIPYNPRKSWAGSISMFIFGFFISIALLYYYSSLGYLHMNWETTLQRVAMVSMVATVVESLPITDQLDDNISVPLATILAAYLSFGY

SEQ ID NO: 41957 - protein, 260 aa, Arabidopsis thaliana
  peptide (1)..(260): Ceres Seq. ID no. 13488788
MGSATQLRARRSLISSAVATNSLLHDVGAAVAVLGGAYALVLSFESLTKRNVIQQSLSRKLVHILSGLLFVLAWPIFSGSTEARYFAAFVPLVNGLRLVINGLSISPNSMLIKSVTREGRAEELLKGPLFYVLALLFSAVFFWRESPIGMISLAMMCGGDGIADIMGRKFGSTKIPYNPRKSWAGSISMFIFGFFISIALLYYYSSLGYLHMNWETTLQRVAMVSMVATVVESLPITDQLDDNISVPLATILAAYLSFGY

SEQ ID NO: 41958 - DNA, 1340 bp, Arabidopsis thaliana
  misc_feature (1)..(1340): Ceres Seq. ID no. 13488762
  misc_feature (1)..(1340): Ortholog of  Ceres SEQ ID NO 15171293 as cited in SEQ ID NO 51744
gtcttggtctccgacaggaccgactctgttctcgtgttcttttttccctgtcatttccagatttcataaagctaaaagaaatctaatttctttgtttaccagagacttaaactggtttctgtatcttttactgggttctttcagatatataaatggatcaaatcgttaacgtggatgagtttcaagagctggccaaacaggccctccctaagatgtactatgatttctacaatggaggagcagaggatcaacacactctcaatgaaaatgtccaagctttccgtagaatcatgtttaggcctagggttcttgttgatgtgagcaacatagatatgtctacaagtatgttgggttacccaatctcagctcccatcatgattgctccaacagcaatgcataagttggctcatcctaaaggagaaatcgccacagcgaaagctgcagctgcgtgtaacactatcatgatagtatcattcatgtctacttgcactattgaggaggttgcttccagttgtaacgctgttcggtttcttcaaatatatgtgtacaagagacgtgatgtaacagctcagattgtgaaaagagctgaaaaagctggattcaaggctatagttctaactgttgatgttcccagacttggtagaagggaagcagatataaagaacaaaatgatatccccacagctgaagaattttgaaggcttagtttcaaccgaagtccgacctaatgaaggttcaggggttgaagcctttgcctctagtgcatttgatgcttcgttaagctggaaggatatcgaatggttaagatctattacaaagttgccaattctggtcaaagggttactcacacgtgaagacgctcttaaggctgttgaagccggtgtagatggaatagtggtatccaaccacggggctcgccagctcgactattccccggctacgataactgttttagaagaggttgttcatgctgtgaaaggtaggattccggttttgcttgatggaggagtaagacgaggaacagatgttttcaaagcgctggcgctcggagcacaagctgttcttatagggaggcctatagtctatgggcttgcagctaagggtgaagatggagtgaaaaaagtgattgatatgctgaaaaatgagtttgagattactatggccctttctggctgtccaaccattgatgacgtaaccagaaaccatgttaggacagagaatgagagaattaaatctatgctctgatcctaaaaccaacagatctagtctcagagacttaatcagacagttggacaacagtatgaaatactgtcaatgcacataaataaaaagctctatttc

SEQ ID NO: 41959 - protein, 363 aa, Arabidopsis thaliana
  peptide (1)..(363): Ceres Seq. ID no. 13488763
MDQIVNVDEFQELAKQALPKMYYDFYNGGAEDQHTLNENVQAFRRIMFRPRVLVDVSNIDMSTSMLGYPISAPIMIAPTAMHKLAHPKGEIATAKAAAACNTIMIVSFMSTCTIEEVASSCNAVRFLQIYVYKRRDVTAQIVKRAEKAGFKAIVLTVDVPRLGRREADIKNKMISPQLKNFEGLVSTEVRPNEGSGVEAFASSAFDASLSWKDIEWLRSITKLPILVKGLLTREDALKAVEAGVDGIVVSNHGARQLDYSPATITVLEEVVHAVKGRIPVLLDGGVRRGTDVFKALALGAQAVLIGRPIVYGLAAKGEDGVKKVIDMLKNEFEITMALSGCPTIDDVTRNHVRTENERIKSML

SEQ ID NO: 41960 - protein, 343 aa, Arabidopsis thaliana
  peptide (1)..(343): Ceres Seq. ID no. 13488764
MYYDFYNGGAEDQHTLNENVQAFRRIMFRPRVLVDVSNIDMSTSMLGYPISAPIMIAPTAMHKLAHPKGEIATAKAAAACNTIMIVSFMSTCTIEEVASSCNAVRFLQIYVYKRRDVTAQIVKRAEKAGFKAIVLTVDVPRLGRREADIKNKMISPQLKNFEGLVSTEVRPNEGSGVEAFASSAFDASLSWKDIEWLRSITKLPILVKGLLTREDALKAVEAGVDGIVVSNHGARQLDYSPATITVLEEVVHAVKGRIPVLLDGGVRRGTDVFKALALGAQAVLIGRPIVYGLAAKGEDGVKKVIDMLKNEFEITMALSGCPTIDDVTRNHVRTENERIKSML

SEQ ID NO: 41961 - protein, 317 aa, Arabidopsis thaliana
  peptide (1)..(317): Ceres Seq. ID no. 13488765
MFRPRVLVDVSNIDMSTSMLGYPISAPIMIAPTAMHKLAHPKGEIATAKAAAACNTIMIVSFMSTCTIEEVASSCNAVRFLQIYVYKRRDVTAQIVKRAEKAGFKAIVLTVDVPRLGRREADIKNKMISPQLKNFEGLVSTEVRPNEGSGVEAFASSAFDASLSWKDIEWLRSITKLPILVKGLLTREDALKAVEAGVDGIVVSNHGARQLDYSPATITVLEEVVHAVKGRIPVLLDGGVRRGTDVFKALALGAQAVLIGRPIVYGLAAKGEDGVKKVIDMLKNEFEITMALSGCPTIDDVTRNHVRTENERIKSML

SEQ ID NO: 41962 - DNA, 1135 bp, Arabidopsis thaliana
  misc_feature (1)..(1135): Ceres Seq. ID no. 12385211
  misc_feature (1)..(1135): Ortholog of  Ceres SEQ ID NO 15178142 as cited in SEQ ID NO 1163
gggatcgtaagaacagaggatttttctcggccaagttttctctggctcaggtgtttgatgtgaattttttgagggaggggaatgagttcaatgagcagaagcagaagtagaagtagaagtcgtagtcgggatcggtttcgtagtcggagtccgagagacaggagaatgagatctgaacgagtttcttaccatgatgctccttctagaagggagagggagccacgtcgtgccttcagccaaggaaatctctgcaacaactgcaagcgacctggtcactttgcaagagactgttctaatgtttccgtctgtaacaactgtggtcttccagggcacattggcagcagaatgcactgcggaatcacgttgttggaactgtagagaaccgggccacgtagcctcaaactgttcaaacgaaggaatctgccactcctgtggtaaatctggacatcgagccagagactgctctaattcggattctcgtgcaggagacttaaggctctgcaacaactgcttcaaacagggacatcttgccgctgactgcacaaatgacaaggcgtgcaagaactgcaggacttcaggtcacatagctcgcgattgcaggaacgatccagtttgtaacatctgcagtatctcggggcatgttgctagacactgcccaaagggtgacagcaattactctgacagaggaagcagggttcgagatggtggtatgcaaagaggtggtttgagcagaatgagcagagacagagaaggcgttagtgctatgataatatgtcacaattgtggtggccgaggacacagggcgtacgagtgtccgtctgctcgagtcgctgaccgtggattccgccggtactgaggctcttaaatttaccaattgaagttccattcatcttcacctttacccttttagcttctgcactcttgtttttgttgagctacattgttgttttctaatctcatggtttttgtctattggagtgaatcaaggatcgttttagttttggtttgttttcggaaaatttgagacattgcttgtgttgtatgaagtattgaacagattagtgtgatgcagagttctgagttttcagaactcaatattatattaaaaacaaattttaatggtttgctttctccc

SEQ ID NO: 41963 - protein, 221 aa, Arabidopsis thaliana
  peptide (1)..(221): Ceres Seq. ID no. 12385212
MMLLLEGRGSHVVPSAKEISATTASDLVTLQETVLMFPSVTTVVFQGTLAAECTAESRCWNCREPGHVASNCSNEGICHSCGKSGHRARDCSNSDSRAGDLRLCNNCFKQGHLAADCTNDKACKNCRTSGHIARDCRNDPVCNICSISGHVARHCPKGDSNYSDRGSRVRDGGMQRGGLSRMSRDREGVSAMIICHNCGGRGHRAYECPSARVADRGFRRY

SEQ ID NO: 41964 - protein, 220 aa, Arabidopsis thaliana
  peptide (1)..(220): Ceres Seq. ID no. 12385213
MLLLEGRGSHVVPSAKEISATTASDLVTLQETVLMFPSVTTVVFQGTLAAECTAESRCWNCREPGHVASNCSNEGICHSCGKSGHRARDCSNSDSRAGDLRLCNNCFKQGHLAADCTNDKACKNCRTSGHIARDCRNDPVCNICSISGHVARHCPKGDSNYSDRGSRVRDGGMQRGGLSRMSRDREGVSAMIICHNCGGRGHRAYECPSARVADRGFRRY

SEQ ID NO: 41965 - protein, 186 aa, Arabidopsis thaliana
  peptide (1)..(186): Ceres Seq. ID no. 12385214
MFPSVTTVVFQGTLAAECTAESRCWNCREPGHVASNCSNEGICHSCGKSGHRARDCSNSDSRAGDLRLCNNCFKQGHLAADCTNDKACKNCRTSGHIARDCRNDPVCNICSISGHVARHCPKGDSNYSDRGSRVRDGGMQRGGLSRMSRDREGVSAMIICHNCGGRGHRAYECPSARVADRGFRRY

SEQ ID NO: 41966 - DNA, 1121 bp, Arabidopsis thaliana
  misc_feature (1)..(1121): Ceres Seq. ID no. 12739044
  misc_feature (1)..(1121): Ortholog of  Ceres SEQ ID NO 13502874 as cited in SEQ ID NO 66298
  misc_feature (1)..(1121): Ortholog of  Ceres SEQ ID NO 12614124 as cited in SEQ ID NO 68392
  misc_feature (1)..(1121): Ortholog of  Ceres SEQ ID NO 14307980 as cited in SEQ ID NO 69214
aagctgacgagtttcgatcgatggtgacggaaatgatggctctcgccggagtatttaacatcggagatttcgtgccgtcacttgattggttagatttacaaggcgtcgctggtaaaatgaaacggcttcacaaaagattcgacgcttttctatcgtcgattttgatagagcacgaaatgaacggtcaagatcaaaagcatactgatatgcttagcactttaatctcccttaaaggaactgatcttgacggtgacggaggaagcttaacggatactgagattaaagccttgctattgaacatgttcacagctgggactgacacgtcagcaagtacggtggactgggctatagctgaacttattcgtcacccggatataatggttaaagcccaagcagaacttgatattgttgtgggccgtgacaggcctgttaacgaatccgacatctctcagcttccttaccttcaggcggttatcaaagagaatttcaggcttcatccaccaacaccactctcgttaccacacatcgcgtcagagagctgtgagatcaacggctaccatatcccgaaaggatcgactctattgacaaacatatgggccatagcccgtgacccggatcaatggtccgacccattagcatttaaacccgagagattcttacccggtggtgaaaaatccggcgttgatgtgaaaggaagcgatttcgagctgataccgttcggagctgggaggagaatctgtgccggtttaagttagggttacgtacgattcagtttcttacggcgacgttggttcaaggatttgattgggaattagctggaggagttacgccggagaagctgaatatggaggagagttatgggcttacactgcaaagagcggttcctttggtggtacatcctaagccaaggttggctccgatcgtttatggagtcgggtcaggttaaaatttaactttgcttcttggacaaggtatatggcttgcacgaaaataaagttttaaaacagcgtagtttgatccggagttagctttatgtaagaacgtgtaacgccaaatcaagttattattaaatattgtgagttgtttgtaacctatatataaatcttgaagaggaagatttc

SEQ ID NO: 41967 - protein, 250 aa, Arabidopsis thaliana
  peptide (1)..(250): Ceres Seq. ID no. 12739045
ADEFRSMVTEMMALAGVFNIGDFVPSLDWLDLQGVAGKMKRLHKRFDAFLSSILIEHEMNGQDQKHTDMLSTLISLKGTDLDGDGGSLTDTEIKALLLNMFTAGTDTSASTVDWAIAELIRHPDIMVKAQAELDIVVGRDRPVNESDISQLPYLQAVIKENFRLHPPTPLSLPHIASESCEINGYHIPKGSTLLTNIWAIARDPDQWSDPLAFKPERFLPGGEKSGVDVKGSDFELIPFGAGRRICAGLS

SEQ ID NO: 41968 - protein, 244 aa, Arabidopsis thaliana
  peptide (1)..(244): Ceres Seq. ID no. 12739046
MVTEMMALAGVFNIGDFVPSLDWLDLQGVAGKMKRLHKRFDAFLSSILIEHEMNGQDQKHTDMLSTLISLKGTDLDGDGGSLTDTEIKALLLNMFTAGTDTSASTVDWAIAELIRHPDIMVKAQAELDIVVGRDRPVNESDISQLPYLQAVIKENFRLHPPTPLSLPHIASESCEINGYHIPKGSTLLTNIWAIARDPDQWSDPLAFKPERFLPGGEKSGVDVKGSDFELIPFGAGRRICAGLS

SEQ ID NO: 41969 - protein, 240 aa, Arabidopsis thaliana
  peptide (1)..(240): Ceres Seq. ID no. 12739047
MMALAGVFNIGDFVPSLDWLDLQGVAGKMKRLHKRFDAFLSSILIEHEMNGQDQKHTDMLSTLISLKGTDLDGDGGSLTDTEIKALLLNMFTAGTDTSASTVDWAIAELIRHPDIMVKAQAELDIVVGRDRPVNESDISQLPYLQAVIKENFRLHPPTPLSLPHIASESCEINGYHIPKGSTLLTNIWAIARDPDQWSDPLAFKPERFLPGGEKSGVDVKGSDFELIPFGAGRRICAGLS

SEQ ID NO: 41970 - DNA, 1146 bp, Arabidopsis thaliana; identical to SEQ ID NO: 22034
  misc_feature (1)..(1146): Ceres Seq. ID no. 12325970
  misc_feature (1)..(1146): Ortholog of  Ceres SEQ ID NO 14314434 as cited in SEQ ID NO 52401
  misc_feature (1)..(1146): Ortholog of  Ceres SEQ ID NO 14303939 as cited in SEQ ID NO 54286
  misc_feature (1)..(1146): Ortholog of  Ceres SEQ ID NO 14307760 as cited in SEQ ID NO 54741
  misc_feature (1)..(1146): Ortholog of  Ceres SEQ ID NO 14313391 as cited in SEQ ID NO 58556
  misc_feature (1)..(1146): Ortholog of  Ceres SEQ ID NO 14307540 as cited in SEQ ID NO 59670
  misc_feature (1)..(1146): Ortholog of  Ceres SEQ ID NO 15179003 as cited in SEQ ID NO 0
  misc_feature (1)..(1146): Ortholog of  Ceres SEQ ID NO 15179235 as cited in SEQ ID NO 0

SEQ ID NO: 41971 - protein, 299 aa, Arabidopsis thaliana; identical to SEQ ID NO: 22035
  peptide (1)..(299): Ceres Seq. ID no. 12325971

SEQ ID NO: 41972 - protein, 255 aa, Arabidopsis thaliana; identical to SEQ ID NO: 22036
  peptide (1)..(255): Ceres Seq. ID no. 12325972

SEQ ID NO: 41973 - protein, 230 aa, Arabidopsis thaliana; identical to SEQ ID NO: 22037
  peptide (1)..(230): Ceres Seq. ID no. 12325973

SEQ ID NO: 41974 - DNA, 912 bp, Arabidopsis thaliana; identical to SEQ ID NO: 35017
  misc_feature (1)..(912): Ceres Seq. ID no. 13488171
  misc_feature (1)..(912): Ortholog of  Ceres SEQ ID NO 13660862 as cited in SEQ ID NO 60846

SEQ ID NO: 41975 - protein, 207 aa, Arabidopsis thaliana; identical to SEQ ID NO: 35018
  peptide (1)..(207): Ceres Seq. ID no. 13488172

SEQ ID NO: 41976 - protein, 142 aa, Arabidopsis thaliana; identical to SEQ ID NO: 35019
  peptide (1)..(142): Ceres Seq. ID no. 13488173

SEQ ID NO: 41977 - DNA, 2325 bp, Arabidopsis thaliana
  misc_feature (1)..(2325): Ceres Seq. ID no. 12385500
  misc_feature (1)..(2325): Ortholog of  Ceres SEQ ID NO 13582534 as cited in SEQ ID NO 57409
  misc_feature (1)..(2325): Ortholog of  Ceres SEQ ID NO 14302384 as cited in SEQ ID NO 67177
  misc_feature (1)..(2325): Ortholog of  Ceres SEQ ID NO 13584744 as cited in SEQ ID NO 69137
acttctcatagagacagaaaaagactactaatttacctctcgtgtaggaaaacaaagcaaaactggagtcattctctgtttcaaagagttatggtggtttcagtgaccatacgtcgtcgttttgttcttcttctacttgcatgcacttgtttgttgtctcggagactctgttttggtgaggacagaatcactttctcaactcctatcaaagactcagagtcagagacccttctatgcaaaagtggtattttcaggtttggtttcttcactcctgttaattccactactcggttacgttatgttgggatttggtacgaaaagattccaatccaaactgtggtttgggttgctaacaaagactctcccatcaacgacacttccggtgttatctcgatctatcaagatggaaatctcgcggttaccgatggtcgaaagcgccttgtatggtcgacgaatgtctcagtaccagtagctccaaatgctacttgggttcagcttatggattccgggaatcttatgttacaagataacagaaacaatggtgagattctttgggagagtttcaagcatccttatgattctttcatgccaagaatgactcttggcaccgacggtagaactggaggtaacctaaagcttacttcttggacaagccacgatggtccttcaacaggaaactacacagctggtattgctcctttcacgtttcctgagcttcttatctggaagaacaatgtcccaacgtggcgtagcggaccgtggaacggtcaggttttcatcggtttaccgaatatggattcacttctgtttcttgatgggtttaatctaaacagtgataatcaaggaacgatctcaatgtcttatgctaatgattcgttcatgtatcactttaacttggatcctgaaggaattatttatcagaaagattggagtacttctatgagaacttggaggatcggtgtaaagtttccatacacagactgtgatgcatacggtagatgtggtcgattcgggagttgtcatgccggggaaaacccgccttgtaaatgtgttaaaggtttttttccaaagaataacacagagtggaatggtgggaattggagtaatggatgtgtgagaaaagctccattgcagtgtgaaagacagaggaatgtaagtaatggtggtggtggtggaaaagcagatgggtttttgaaactgcagaagatgaaagttccaatctctgcggaacggtctgaggctagtgaacaagtttgtcctaaagtttgtttagataactgttcttgcactgcttatgcttatgatagaggaatcgggtgcatgctttggagtggtgatttagttgatatgcaatcgtttttgggaagtggcattgatctttttattcgtgttgctaattcagaactcaaaacacatagcaatctagcagttatgatcgcagcacctgttataggcgttgcgttaattgctgctgtctgcgttcttttagcatgccgaaaatacagaaagcgtccagctccagcgaaagatagaagtgcagagctaatgtttaaaagaatggaagcacttacaagtgataatgagtctgcttctaaccaaatcaagctcaaggagcttccactctttgagtttcaagtgttagctacatcaactgatagcttctctctcagaaacaagctcgggcaaggcgggtttggtcctgtttacaagggaaaattacctgaaggacaagaaattgcagtgaagaggctctcacggaaatcaggtcaaggactagaggaacttatgaacgaagtggttgtgatatcgaagttgcaacatcggaatctagtgaaattacttggatgttgcattgaaggtgaagaaagaatgttagtatatgaatatatgccaaagaaaagcttggatgcatatctatttgacccaatgaagcaaaagattcttgattggaagactcggttcaacataatggaaggaatttgtagaggtcttttgtaccttcacagagattcaagactaaagatcatacacagagatttaaaagccagcaacattttgttagatgagaatctaaaccccaagatatctgatttcggacttgcaagaattttccgtgcgaatgaagatgaagctaacacaagaagggttgttggaacatacggctatatgtcaccggagtatgcaatggaaggtttcttttcagaaaaatcagatgttttcagcttgggggttatatttctagagatcataagtggaagaagaaactctagttctcacaaggaagagaataatctcaaccttttggcttatgcatggaagctgtgg

SEQ ID NO: 41978 - protein, 775 aa, Arabidopsis thaliana
  peptide (1)..(775): Ceres Seq. ID no. 12385501
TSHRDRKRLLIYLSCRKTKQNWSHSLFQRVMVVSVTIRRRFVLLLLACTCLLSRRLCFGEDRITFSTPIKDSESETLLCKSGIFRFGFFTPVNSTTRLRYVGIWYEKIPIQTVVWVANKDSPINDTSGVISIYQDGNLAVTDGRKRLVWSTNVSVPVAPNATWVQLMDSGNLMLQDNRNNGEILWESFKHPYDSFMPRMTLGTDGRTGGNLKLTSWTSHDGPSTGNYTAGIAPFTFPELLIWKNNVPTWRSGPWNGQVFIGLPNMDSLLFLDGFNLNSDNQGTISMSYANDSFMYHFNLDPEGIIYQKDWSTSMRTWRIGVKFPYTDCDAYGRCGRFGSCHAGENPPCKCVKGFFPKNNTEWNGGNWSNGCVRKAPLQCERQRNVSNGGGGGKADGFLKLQKMKVPISAERSEASEQVCPKVCLDNCSCTAYAYDRGIGCMLWSGDLVDMQSFLGSGIDLFIRVANSELKTHSNLAVMIAAPVIGVALIAAVCVLLACRKYRKRPAPAKDRSAELMFKRMEALTSDNESASNQIKLKELPLFEFQVLATSTDSFSLRNKLGQGGFGPVYKGKLPEGQEIAVKRLSRKSGQGLEELMNEVVVISKLQHRNLVKLLGCCIEGEERMLVYEYMPKKSLDAYLFDPMKQKILDWKTRFNIMEGICRGLLYLHRDSRLKIIHRDLKASNILLDENLNPKISDFGLARIFRANEDEANTRRVVGTYGYMSPEYAMEGFFSEKSDVFSLGVIFLEIISGRRNSSSHKEENNLNLLAYAWKLW

SEQ ID NO: 41979 - protein, 745 aa, Arabidopsis thaliana
  peptide (1)..(745): Ceres Seq. ID no. 12385502
MVVSVTIRRRFVLLLLACTCLLSRRLCFGEDRITFSTPIKDSESETLLCKSGIFRFGFFTPVNSTTRLRYVGIWYEKIPIQTVVWVANKDSPINDTSGVISIYQDGNLAVTDGRKRLVWSTNVSVPVAPNATWVQLMDSGNLMLQDNRNNGEILWESFKHPYDSFMPRMTLGTDGRTGGNLKLTSWTSHDGPSTGNYTAGIAPFTFPELLIWKNNVPTWRSGPWNGQVFIGLPNMDSLLFLDGFNLNSDNQGTISMSYANDSFMYHFNLDPEGIIYQKDWSTSMRTWRIGVKFPYTDCDAYGRCGRFGSCHAGENPPCKCVKGFFPKNNTEWNGGNWSNGCVRKAPLQCERQRNVSNGGGGGKADGFLKLQKMKVPISAERSEASEQVCPKVCLDNCSCTAYAYDRGIGCMLWSGDLVDMQSFLGSGIDLFIRVANSELKTHSNLAVMIAAPVIGVALIAAVCVLLACRKYRKRPAPAKDRSAELMFKRMEALTSDNESASNQIKLKELPLFEFQVLATSTDSFSLRNKLGQGGFGPVYKGKLPEGQEIAVKRLSRKSGQGLEELMNEVVVISKLQHRNLVKLLGCCIEGEERMLVYEYMPKKSLDAYLFDPMKQKILDWKTRFNIMEGICRGLLYLHRDSRLKIIHRDLKASNILLDENLNPKISDFGLARIFRANEDEANTRRVVGTYGYMSPEYAMEGFFSEKSDVFSLGVIFLEIISGRRNSSSHKEENNLNLLAYAWKLW

SEQ ID NO: 41980 - protein, 609 aa, Arabidopsis thaliana
  peptide (1)..(609): Ceres Seq. ID no. 12385503
MDSGNLMLQDNRNNGEILWESFKHPYDSFMPRMTLGTDGRTGGNLKLTSWTSHDGPSTGNYTAGIAPFTFPELLIWKNNVPTWRSGPWNGQVFIGLPNMDSLLFLDGFNLNSDNQGTISMSYANDSFMYHFNLDPEGIIYQKDWSTSMRTWRIGVKFPYTDCDAYGRCGRFGSCHAGENPPCKCVKGFFPKNNTEWNGGNWSNGCVRKAPLQCERQRNVSNGGGGGKADGFLKLQKMKVPISAERSEASEQVCPKVCLDNCSCTAYAYDRGIGCMLWSGDLVDMQSFLGSGIDLFIRVANSELKTHSNLAVMIAAPVIGVALIAAVCVLLACRKYRKRPAPAKDRSAELMFKRMEALTSDNESASNQIKLKELPLFEFQVLATSTDSFSLRNKLGQGGFGPVYKGKLPEGQEIAVKRLSRKSGQGLEELMNEVVVISKLQHRNLVKLLGCCIEGEERMLVYEYMPKKSLDAYLFDPMKQKILDWKTRFNIMEGICRGLLYLHRDSRLKIIHRDLKASNILLDENLNPKISDFGLARIFRANEDEANTRRVVGTYGYMSPEYAMEGFFSEKSDVFSLGVIFLEIISGRRNSSSHKEENNLNLLAYAWKLW

SEQ ID NO: 41981 - DNA, 654 bp, Arabidopsis thaliana
  misc_feature (1)..(654): Ceres Seq. ID no. 12385549
  misc_feature (1)..(654): Ortholog of  Ceres SEQ ID NO 12563124 as cited in SEQ ID NO 57104
  misc_feature (1)..(654): Ortholog of  Ceres SEQ ID NO 13598373 as cited in SEQ ID NO 62185
aacacatctcactgctcactactctcactgtaatcccttagatcttcttttcaaatttcaatggcgtccggtgatgttgagtatcggtgcttcgttggaggtctagcatgggccactgatgacagagctcttgagactgccttcgctcaatacggcgacgttattgattccaagatcattaacgatcgtgagactggaagatcaaggggattcggattcgtcaccttcaaggatgagaaagccatgaaggatgcgattgagggaatgaacggacaagatctcgatggccgtagcatcactgttaaagaggctcagtcacgaggaagcggtggcggcggaggccaccgtggaggtggtggaagacgtgagggaggaggaggatacggtggtggtgaaggaggaggttacggaggaagcggtggtggtggaggatggtaattcctttaattaggtttgggattaccaatgaatgttctctctctcgcttgttatgcttctacttggttttgtgtgttctctattttgttctggttctgctttagatttgatgtaacagttcgtgattaggtattttggtatctggaaacgtaatgttaagtcacttgtcattctctaaataacaaatttcttcggagatattatctctgttgattg

SEQ ID NO: 41982 - protein, 125 aa, Arabidopsis thaliana
  peptide (1)..(125): Ceres Seq. ID no. 12385550
MASGDVEYRCFVGGLAWATDDRALETAFAQYGDVIDSKIINDRETGRSRGFGFVTFKDEKAMKDAIEGMNGQDLDGRSITVKEAQSRGSGGGGGHRGGGGRREGGGGYGGGEGGGYGGSGGGGGW

SEQ ID NO: 41983 - protein, 64 aa, Arabidopsis thaliana
  peptide (1)..(64): Ceres Seq. ID no. 12385551
MKDAIEGMNGQDLDGRSITVKEAQSRGSGGGGGHRGGGGRREGGGGYGGGEGGGYGGSGGGGGW

SEQ ID NO: 41984 - DNA, 1252 bp, Arabidopsis thaliana
  misc_feature (1)..(1252): Ceres Seq. ID no. 12395490
  misc_feature (1)..(1252): Ortholog of  Ceres SEQ ID NO 13502952 as cited in SEQ ID NO 62271
  misc_feature (1)..(1252): Ortholog of  Ceres SEQ ID NO 13502973 as cited in SEQ ID NO 68052
  misc_feature (1)..(1252): Ortholog of  Ceres SEQ ID NO 13596000 as cited in SEQ ID NO 68188
aaaatcaaatggatcgtcttaagctttatttctccgttttcgttttgtctttctttatcgtctcggtttcgtcgtctgatgtcaacgacggcgatgatctcgtgatccgtcaggtggttggtggagccgagcctcaggttttgacctcagaggatcacttttctctcttcaggaagttcgggaaggtctacgcttccaacgaggagcatgactatatatctcaggcgagcgaggcgtcaccagaagttggatccgtcggcgactcatggtgttacgcagttctcagatctgactcggtctgagttccgtaagaagcacttgggggttagaagtggctttaagcttcctaaagatgccaacaaggctccgattctccctaccgaaaatctccctgaggattttgattggagagatcatggcgccgttactcccgtcaaaaatcagggatcttgcggctcttgctggagtttcagcgccactggagctttggaaggtgctaacttcctcgctaccggcaaactcgtcagcctcagcgaacaacagctcgtcgactgtgatcacgagtgtgatcccgaggaggcagattcctgcgactctggttgcaatggtgggctaatgaacagcgcttttgaatacaccctcaaaaccggagggctcatgaaagaagaagactatccttacaccggaaaggacggcaagacctgcaagctagacaagtccaagatcgttgcctctgtctccaacttcagtgttatctccattgatgaagaacagattgctgcaaaccttgtcaagaacggacctcttgctgtagccatcaacgctggctatatgcagacttacattggaggagtctcatgcccttacatatgcaccaggaggctcaaccacggtgtcttattggttggctatggagcggcaggttacgctccggctaggttcaaggagaagccttactggatcatcaagaactcgtggggagagacttggggtgaaaatggtttctacaaaatctgcaaaggccgtaacatttgtggtgttgacagtatggtctccactgttgcagccaccgtctcaaccaccgcccattaagcatctcgtcaataagttttaattactttggtgatttgtatgagcgagctctctttgcgctgctgactctctctatttatctctgcttcttgcttgtaaataaaatgcgttctattgagcaaaaccgtacaatgctcattagcaatgagcccactttaac

SEQ ID NO: 41985 - protein, 294 aa, Arabidopsis thaliana
  peptide (1)..(294): Ceres Seq. ID no. 12395491
MTIYLRRARRHQKLDPSATHGVTQFSDLTRSEFRKKHLGVRSGFKLPKDANKAPILPTENLPEDFDWRDHGAVTPVKNQGSCGSCWSFSATGALEGANFLATGKLVSLSEQQLVDCDHECDPEEADSCDSGCNGGLMNSAFEYTLKTGGLMKEEDYPYTGKDGKTCKLDKSKIVASVSNFSVISIDEEQIAANLVKNGPLAVAINAGYMQTYIGGVSCPYICTRRLNHGVLLVGYGAAGYAPARFKEKPYWIIKNSWGETWGENGFYKICKGRNICGVDSMVSTVAATVSTTAH

SEQ ID NO: 41986 - protein, 158 aa, Arabidopsis thaliana; identical to SEQ ID NO: 27260
  peptide (1)..(158): Ceres Seq. ID no. 12395492

SEQ ID NO: 41987 - DNA, 1140 bp, Arabidopsis thaliana
  misc_feature (1)..(1140): Ceres Seq. ID no. 13489385
  misc_feature (1)..(1140): Ortholog of  Ceres SEQ ID NO 15226612 as cited in SEQ ID NO 62700
tgcttattcaccagggaaaaatgttgcagaagatttctcagtctatttctttatgtaacggcgatcaatttaagccgttaatatacctcgccggagctccgacgaacttcatctcttcccctctctcagtttcaggcaagaagaaatcatcttctctgagaattaaaaggatacaacaacttcaaagtacattagaagatagaataaatccaccactagtatgtggaacagtatcgccacgtcttagtgttcctgatcatatactaaagcctctatatgttgagtctagcaaagttccagagatatcaagtgaattacagattcctgactctataggcattgtgaaaatgaagaaagcgtgtgagcttgcggctcgtgtattagactatgcaggaactttggttagaccgtttgttactacagatgaaattgataaagcagtgcatcagatggttattgagtttggtgcatatccttcacctcttggatatggtggatttcctaaaagtgtttgtacatcggttaatgaatgtatgtttcacgggattcccgattctcgtccgctacagaatggagatattataaacatcgatgttgcggtttacttggatgggtatcatggagatacgtcaaagactttcttatgtggagacgtcaatggaagccttaaacaacttgtcaaggtcacagaagaatgcttggagaaaggtatatctgtttgtaaagatggagcaagcttcaaacaaatcgggaagataatcagtgagcatgctgcaaagtatggctataatatggagcgattcatcggtcatggtttaggaacggtattacactcggaacctcttatatatcttcatagtaactatgattatgaacttgaatatatgattgaaggtcaaacttttacgctcgaaccaattctcaccattggaacaacagagtttgtaacatggcctgacaaatggacaattgtgaccgcagatggtggtccggccgcacagtttgagcatacaattcttattaccaccactggtgcagaaattctcaccatatcatcatgaattatatcacaaaatgttaaggaatttacattatgaaccatccatttctgttgtaaataagataaaaactgtttggttg

SEQ ID NO: 41988 - protein, 352 aa, Arabidopsis thaliana
  peptide (1)..(352): Ceres Seq. ID no. 13489386
LIHQGKMLQKISQSISLCNGDQFKPLIYLAGAPTNFISSPLSVSGKKKSSSLRIKRIQQLQSTLEDRINPPLVCGTVSPRLSVPDHILKPLYVESSKVPEISSELQIPDSIGIVKMKKACELAARVLDYAGTLVRPFVTTDEIDKAVHQMVIEFGAYPSPLGYGGFPKSVCTSVNECMFHGIPDSRPLQNGDIINIDVAVYLDGYHGDTSKTFLCGDVNGSLKQLVKVTEECLEKGISVCKDGASFKQIGKIISEHAAKYGYNMERFIGHGLGTVLHSEPLIYLHSNYDYELEYMIEGQTFTLEPILTIGTTEFVTWPDKWTIVTADGGPAAQFEHTILITTTGAEILTISS

SEQ ID NO: 41989 - protein, 346 aa, Arabidopsis thaliana
  peptide (1)..(346): Ceres Seq. ID no. 13489387
MLQKISQSISLCNGDQFKPLIYLAGAPTNFISSPLSVSGKKKSSSLRIKRIQQLQSTLEDRINPPLVCGTVSPRLSVPDHILKPLYVESSKVPEISSELQIPDSIGIVKMKKACELAARVLDYAGTLVRPFVTTDEIDKAVHQMVIEFGAYPSPLGYGGFPKSVCTSVNECMFHGIPDSRPLQNGDIINIDVAVYLDGYHGDTSKTFLCGDVNGSLKQLVKVTEECLEKGISVCKDGASFKQIGKIISEHAAKYGYNMERFIGHGLGTVLHSEPLIYLHSNYDYELEYMIEGQTFTLEPILTIGTTEFVTWPDKWTIVTADGGPAAQFEHTILITTTGAEILTISS

SEQ ID NO: 41990 - protein, 237 aa, Arabidopsis thaliana
  peptide (1)..(237): Ceres Seq. ID no. 13489388
MKKACELAARVLDYAGTLVRPFVTTDEIDKAVHQMVIEFGAYPSPLGYGGFPKSVCTSVNECMFHGIPDSRPLQNGDIINIDVAVYLDGYHGDTSKTFLCGDVNGSLKQLVKVTEECLEKGISVCKDGASFKQIGKIISEHAAKYGYNMERFIGHGLGTVLHSEPLIYLHSNYDYELEYMIEGQTFTLEPILTIGTTEFVTWPDKWTIVTADGGPAAQFEHTILITTTGAEILTISS

SEQ ID NO: 41991 - DNA, 1782 bp, Arabidopsis thaliana
  misc_feature (1)..(1782): Ceres Seq. ID no. 13492929
  misc_feature (1)..(1782): Ortholog of  Ceres SEQ ID NO 14301587 as cited in SEQ ID NO 66080
ggttcttcatctgcattgttctccgcctctctctctcaaactcttcagtttgcaaaacccttaagaaggtgtgaattagtaagtaatggggaagaagaagtttattgataagaaaaaggcggcgactttcgagttgtgtcctcgtgatacgtcagacccaagatacagtgatgcaccaggtggtgataagatcttcttacgagttgatcaaaaccctgttaacatcaatggtttcattgaagaagatgaagaagaagaaggagacagctcacggtttgatgatgctcctgaagagatggattatggttactctagttttggggattcgagtagttctttacctgctcatgtgaggaaggagattttagagttagggtatcctgatgatggttataattacttggagcatttgagagagattaagaatactggtggtggttctaatttctatgtgaatcctaagtatgaggttgctcagttacctcgtgatgttaaggcttatgatgcgtctcgtgtgaagatctctggtatggtgaatgaagaaggtaatgataataagttgatgtatagtgttgcgtccaagactgttaacgtcaaggtgcagaaagctattgatcctgaagttgctgcgttgcttgaaaacagtgatgggtctgagtttggttctgatgttgaggatttggaagaagattttgttgttcaagctaatcttactcaaaagggtgaatcttctggtgtgagcaatggagagctcgagttttctgtaagacgtgaggttagagaaagagaaagtgatgaacctgtggctgaaaacccgagagttcctcgtcaaattgatgagctatttgatcagctcgaactcaatgaatatggaagtgatagtgacggtgatggttacatagctgaagatggagaagaagaagaagaagaagacttcatggctcaagaagttcagaatcttattcatgggaaggcaaaagattatgagcttgaagaaaaatatatgaaccctgcggatatactgaagaacagtgactctgtcagagataaagaggaagtggacactgctgctcatgttatccgccgaactgtagaatatggtgaaaattttgataacgggaatgaagatgaatttgtagagctgactgaagaaagcagcgatgaaagcgagaagcatgattgtgaaaccatagtctcaacatactcgaatctcgataacctccctggtaaaatccttgctgcagagtcagctaggcagaagaagctgagtgaaacattagctaacgcattgagttcaaatggaagaatcattaatctccaagggagagagaggattcctgtcgagtttttacctggtaggagagctgaacaaaccgatgtcaaagcggaaatcccaaaagctgaaccgatcaagaggaagactcatggtcaagagtcgaaagaagagaagaaagagcggaaaaatgctgtaaaagccgaaaagcgagaagcaaggataattaagaaacagacaaagatgctgtattgcggtgaaacgcagcgtgctcaaagagctgttgctacctctggtccatcgtcgagacctctaaaataatatgttactaaggtaaaacaaaacaattctcagactgtttaaaaccagtttttccagccatttcgtgtaatatttgctgtttgtttttttctttttcatcaagatttgaaaatcttgaatcttgttttggatgtggacttttgaatattatttattacttttactagtctaatttcgagaaagtgatg

SEQ ID NO: 41992 - protein, 502 aa, Arabidopsis thaliana
  peptide (1)..(502): Ceres Seq. ID no. 13492930
MGKKKFIDKKKAATFELCPRDTSDPRYSDAPGGDKIFLRVDQNPVNINGFIEEDEEEEGDSSRFDDAPEEMDYGYSSFGDSSSSLPAHVRKEILELGYPDDGYNYLEHLREIKNTGGGSNFYVNPKYEVAQLPRDVKAYDASRVKISGMVNEEGNDNKLMYSVASKTVNVKVQKAIDPEVAALLENSDGSEFGSDVEDLEEDFVVQANLTQKGESSGVSNGELEFSVRREVRERESDEPVAENPRVPRQIDELFDQLELNEYGSDSDGDGYIAEDGEEEEEEDFMAQEVQNLIHGKAKDYELEEKYMNPADILKNSDSVRDKEEVDTAAHVIRRTVEYGENFDNGNEDEFVELTEESSDESEKHDCETIVSTYSNLDNLPGKILAAESARQKKLSETLANALSSNGRIINLQGRERIPVEFLPGRRAEQTDVKAEIPKAEPIKRKTHGQESKEEKKERKNAVKAEKREARIIKKQTKMLYCGETQRAQRAVATSGPSSRPLK

SEQ ID NO: 41993 - protein, 432 aa, Arabidopsis thaliana
  peptide (1)..(432): Ceres Seq. ID no. 13492931
MDYGYSSFGDSSSSLPAHVRKEILELGYPDDGYNYLEHLREIKNTGGGSNFYVNPKYEVAQLPRDVKAYDASRVKISGMVNEEGNDNKLMYSVASKTVNVKVQKAIDPEVAALLENSDGSEFGSDVEDLEEDFVVQANLTQKGESSGVSNGELEFSVRREVRERESDEPVAENPRVPRQIDELFDQLELNEYGSDSDGDGYIAEDGEEEEEEDFMAQEVQNLIHGKAKDYELEEKYMNPADILKNSDSVRDKEEVDTAAHVIRRTVEYGENFDNGNEDEFVELTEESSDESEKHDCETIVSTYSNLDNLPGKILAAESARQKKLSETLANALSSNGRIINLQGRERIPVEFLPGRRAEQTDVKAEIPKAEPIKRKTHGQESKEEKKERKNAVKAEKREARIIKKQTKMLYCGETQRAQRAVATSGPSSRPLK

SEQ ID NO: 41994 - protein, 354 aa, Arabidopsis thaliana
  peptide (1)..(354): Ceres Seq. ID no. 13492932
MVNEEGNDNKLMYSVASKTVNVKVQKAIDPEVAALLENSDGSEFGSDVEDLEEDFVVQANLTQKGESSGVSNGELEFSVRREVRERESDEPVAENPRVPRQIDELFDQLELNEYGSDSDGDGYIAEDGEEEEEEDFMAQEVQNLIHGKAKDYELEEKYMNPADILKNSDSVRDKEEVDTAAHVIRRTVEYGENFDNGNEDEFVELTEESSDESEKHDCETIVSTYSNLDNLPGKILAAESARQKKLSETLANALSSNGRIINLQGRERIPVEFLPGRRAEQTDVKAEIPKAEPIKRKTHGQESKEEKKERKNAVKAEKREARIIKKQTKMLYCGETQRAQRAVATSGPSSRPLK

SEQ ID NO: 41995 - DNA, 1779 bp, Arabidopsis thaliana
  misc_feature (1)..(1779): Ceres Seq. ID no. 13492875
  misc_feature (1)..(1779): Ortholog of  Ceres SEQ ID NO 13600220 as cited in SEQ ID NO 0
acttgcactcctctttttctttctttctttcttgttggtctctcttacttctttcttattcatctaaaacaatttcgatccatttacacataaatatatgtaactggccgtagaagaaacacattgaaggaagagatggctcataggagattaatcatgacgatgacaaagatgatgatgatggtgaccatgatgatgatgatgatgatggataaaacatgcatatgtgcggacatttccagaggcagttttccaaagggctttgtctttggaactgcttcttcggcttttcagcatgaaggagcggtgaaggcagaaggcagaggtcctacgatatgggacacattttcccacacttttggtaaaatcaccgattttagcaatgctgatgtcgctgttgatcagtatcatcgttacgaggaagatgtacaacttatgaagaatatgggaatggacgcttacagattttccatttcttggacccgcatctttccaaatggtgttggacatataaatgaagccggaatcgatcactacaacaaactcataaatgctttacttgctaaagggatcgagccgtacgtgacactgtaccactgggatcttccacaagcacttcatgatcgatacctcggttggctaaacccacaaatcataaatgattttgcagcgtatgcggaggtttgtttccagagatttggagatagagtgaagcactggatcacgttcaacgagccacacacgttcgcgatacaaggctatgatgttggcctacaagctccaggccgttgcactattctttttaagctcacttgtcgcgaaggaaactcatcgaccgagccttacattgttggtcacaatgttattttaactcacgccacagtatccgatatctataggaaaaagtataaggcaaagcaaggaggttcgttagggattgcgtttgatgtaatgtggtttgaaccagagtcgaacaagacagaggacattgaagctgcacaaagagctcaagactttcaacttggctggtttttggatccgttgatgtttggggattacccaagctcgatgagaagcagagtcggaagcagattaccggtgtttacaggatctcaatcttctctggtgaagggttctttagattttgtagggattaatcactacacaacgtactacgcaaggaacaatgccaccaatctcattggcactcttctacacgacgccgtttctgattctggaaccgtcactctaccgtttaagggtttaagcacgattggagatagggcaagttcgatatggttgtacatagtgcctagagggatgagaagcttgatgaattacattaaacatagatatggaaaccctccagtcttcatcactgaaaatggaatggacgacccaaacagcattctgatctcaagaaaagacgctctcaaagatgcaaagaggatcaaataccatcatgattacctttctagcttacaagcttcgataaaagaggatggatgtaatgtcaaagggtacttcgtatggtcgctattggacaattgggaatgggcagcaggttatagttcaagatttggtctctacttcgttgattacagagacaacctcaagagatatcctaaagactctgttcattggttcacttctttcttaaactccacttcttgatttttccttcccattttattggtttagcgtaatgtatacaaaagtttatgattagttatggatttcggtttagataaatatatttaaatcaagatatgttgatat

SEQ ID NO: 41996 - protein, 512 aa, Arabidopsis thaliana
  peptide (1)..(512): Ceres Seq. ID no. 13492876
MAHRRLIMTMTKMMMMVTMMMMMMMDKTCICADISRGSFPKGFVFGTASSAFQHEGAVKAEGRGPTIWDTFSHTFGKITDFSNADVAVDQYHRYEEDVQLMKNMGMDAYRFSISWTRIFPNGVGHINEAGIDHYNKLINALLAKGIEPYVTLYHWDLPQALHDRYLGWLNPQIINDFAAYAEVCFQRFGDRVKHWITFNEPHTFAIQGYDVGLQAPGRCTILFKLTCREGNSSTEPYIVGHNVILTHATVSDIYRKKYKAKQGGSLGIAFDVMWFEPESNKTEDIEAAQRAQDFQLGWFLDPLMFGDYPSSMRSRVGSRLPVFTGSQSSLVKGSLDFVGINHYTTYYARNNATNLIGTLLHDAVSDSGTVTLPFKGLSTIGDRASSIWLYIVPRGMRSLMNYIKHRYGNPPVFITENGMDDPNSILISRKDALKDAKRIKYHHDYLSSLQASIKEDGCNVKGYFVWSLLDNWEWAAGYSSRFGLYFVDYRDNLKRYPKDSVHWFTSFLNSTS

SEQ ID NO: 41997 - protein, 505 aa, Arabidopsis thaliana
  peptide (1)..(505): Ceres Seq. ID no. 13492877
MTMTKMMMMVTMMMMMMMDKTCICADISRGSFPKGFVFGTASSAFQHEGAVKAEGRGPTIWDTFSHTFGKITDFSNADVAVDQYHRYEEDVQLMKNMGMDAYRFSISWTRIFPNGVGHINEAGIDHYNKLINALLAKGIEPYVTLYHWDLPQALHDRYLGWLNPQIINDFAAYAEVCFQRFGDRVKHWITFNEPHTFAIQGYDVGLQAPGRCTILFKLTCREGNSSTEPYIVGHNVILTHATVSDIYRKKYKAKQGGSLGIAFDVMWFEPESNKTEDIEAAQRAQDFQLGWFLDPLMFGDYPSSMRSRVGSRLPVFTGSQSSLVKGSLDFVGINHYTTYYARNNATNLIGTLLHDAVSDSGTVTLPFKGLSTIGDRASSIWLYIVPRGMRSLMNYIKHRYGNPPVFITENGMDDPNSILISRKDALKDAKRIKYHHDYLSSLQASIKEDGCNVKGYFVWSLLDNWEWAAGYSSRFGLYFVDYRDNLKRYPKDSVHWFTSFLNSTS

SEQ ID NO: 41998 - protein, 503 aa, Arabidopsis thaliana
  peptide (1)..(503): Ceres Seq. ID no. 13492878
MTKMMMMVTMMMMMMMDKTCICADISRGSFPKGFVFGTASSAFQHEGAVKAEGRGPTIWDTFSHTFGKITDFSNADVAVDQYHRYEEDVQLMKNMGMDAYRFSISWTRIFPNGVGHINEAGIDHYNKLINALLAKGIEPYVTLYHWDLPQALHDRYLGWLNPQIINDFAAYAEVCFQRFGDRVKHWITFNEPHTFAIQGYDVGLQAPGRCTILFKLTCREGNSSTEPYIVGHNVILTHATVSDIYRKKYKAKQGGSLGIAFDVMWFEPESNKTEDIEAAQRAQDFQLGWFLDPLMFGDYPSSMRSRVGSRLPVFTGSQSSLVKGSLDFVGINHYTTYYARNNATNLIGTLLHDAVSDSGTVTLPFKGLSTIGDRASSIWLYIVPRGMRSLMNYIKHRYGNPPVFITENGMDDPNSILISRKDALKDAKRIKYHHDYLSSLQASIKEDGCNVKGYFVWSLLDNWEWAAGYSSRFGLYFVDYRDNLKRYPKDSVHWFTSFLNSTS

SEQ ID NO: 41999 - DNA, 1948 bp, Arabidopsis thaliana
  misc_feature (1)..(1948): Ceres Seq. ID no. 13645793
  misc_feature (1)..(1948): Ortholog of  Ceres SEQ ID NO 14308709 as cited in SEQ ID NO 55376
  misc_feature (1)..(1948): Ortholog of  Ceres SEQ ID NO 15178157 as cited in SEQ ID NO 57481
  misc_feature (1)..(1948): Ortholog of  Ceres SEQ ID NO 13597407 as cited in SEQ ID NO 64106
  misc_feature (1)..(1948): Ortholog of  Ceres SEQ ID NO 14303309 as cited in SEQ ID NO 67739
  misc_feature (1)..(1948): Ortholog of  Ceres SEQ ID NO 12637747 as cited in SEQ ID NO 0
ttggaggtaacgattgagaagaatctctcttttctccactgagagaatcacattctgagagatcagacaagaagaaacaatggtggaaggaggaattgcgaaagcagacaaaacagagttcacagagtgttggagaacaacatggaagacaccttacatcatgcgacttgctctctccgccggaatcggaggtcttctcttcggttacgataccggagtcatttccggagctcttcttttcatcaaagaagattttgatgaagttgataagaaaacatggcttcagtcaactattgttagtatggcagtggctggagccatcgtcggagcagcagtcggaggttggatcaatgataagtttggtaggaggatgtcgattcttatcgccgatgttcttttcttgatcggtgcgattgtgatggcatttgctccggctccttgggttatcatcgttggaagaatctttgttgggtttggtgttggtatggcttcgatgacgtctccgttgtatatctctgaagcttctccggcgaggattagaggtgcacttgttagtaccaatggtcttctcatcactggtggacaattcttctcgtacctcatcaatcttgcttttgtccatactccgggaacatggagatggatgttgggtgttgcgggagttccagctattgttcagtttgtgcttatgttgtcgctacctgagtctccaaggtggttatatagaaaggacaggattgcggaatccagagcgattcttgagaggatttacccggctgacgaagtggaggcggagatggaagctttgaaactgtcagtggaggcagagaaagcagacgaggcaatcattggagatagcttctctgcaaagctgaaaggagctttcgggaatcccgttgttcgacgtggactcgctgctggtatcacggtgcaagtggctcagcagtttgtggggatcaacactgtcatgtactacagtccttctattgtgcaatttgctggttacgcctctaacaagacagctatggccttgtctcttattacttccggtttgaatgctttgggttctattgtgagcatgatgtttgtcgatcggtacgggagaaggaagctcatgatcatctctatgtttgggatcatagcatgtcttatcatcttagccacggtgttctcacaagcggccatccacgcccccaagatcgatgcgtttgagtcaaggacgtttgcaccaaatgctacttgttcagcatatgcccctctcgcagccgaaaatgctcctccctcgaggtggaactgcatgaagtgtctcaggtccgaatgtggattctgcgccagcggggtacagccgtacgcaccaggagcatgtgtggtgttgtcagatgacatgaaagcaacttgcagctcaagaggaagaacattcttcaaagatggatgtccaagcaagtttgggttcttagctatagtgtttttggggctttacatcgtagtctacgcaccaggtatgggcactgtcccgtggatcgtcaactctgagatctatccgctcagatacagaggtcttggtggaggaatagccgccgtctcgaattgggtctccaacctgatagtgagtgagagcttcctctcactcacccatgctctcggctcctctggtaccttccttctctttgctggcttctccacgatcgggctcttcttcatttggttgctcgttcctgagaccaaagggcttcagtttgaggaggtcgagaagttgctcgaggtcggcttcaagcccagtctcttgcggcggagggagaagaagggcaaagaagtcgatgctgcttaagacgatgatgatcacttatctctctctttctatttttattattgtcgctgtctgttcctaattctataatgtatgacaccggatttggaatacgtatttttcaacaccttttaaaacctc

SEQ ID NO: 42000 - protein, 582 aa, Arabidopsis thaliana
  peptide (1)..(582): Ceres Seq. ID no. 13645794
MVEGGIAKADKTEFTECWRTTWKTPYIMRLALSAGIGGLLFGYDTGVISGALLFIKEDFDEVDKKTWLQSTIVSMAVAGAIVGAAVGGWINDKFGRRMSILIADVLFLIGAIVMAFAPAPWVIIVGRIFVGFGVGMASMTSPLYISEASPARIRGALVSTNGLLITGGQFFSYLINLAFVHTPGTWRWMLGVAGVPAIVQFVLMLSLPESPRWLYRKDRIAESRAILERIYPADEVEAEMEALKLSVEAEKADEAIIGDSFSAKLKGAFGNPVVRRGLAAGITVQVAQQFVGINTVMYYSPSIVQFAGYASNKTAMALSLITSGLNALGSIVSMMFVDRYGRRKLMIISMFGIIACLIILATVFSQAAIHAPKIDAFESRTFAPNATCSAYAPLAAENAPPSRWNCMKCLRSECGFCASGVQPYAPGACVVLSDDMKATCSSRGRTFFKDGCPSKFGFLAIVFLGLYIVVYAPGMGTVPWIVNSEIYPLRYRGLGGGIAAVSNWVSNLIVSESFLSLTHALGSSGTFLLFAGFSTIGLFFIWLLVPETKGLQFEEVEKLLEVGFKPSLLRRREKKGKEVDAA

SEQ ID NO: 42001 - protein, 555 aa, Arabidopsis thaliana
  peptide (1)..(555): Ceres Seq. ID no. 13645795
MRLALSAGIGGLLFGYDTGVISGALLFIKEDFDEVDKKTWLQSTIVSMAVAGAIVGAAVGGWINDKFGRRMSILIADVLFLIGAIVMAFAPAPWVIIVGRIFVGFGVGMASMTSPLYISEASPARIRGALVSTNGLLITGGQFFSYLINLAFVHTPGTWRWMLGVAGVPAIVQFVLMLSLPESPRWLYRKDRIAESRAILERIYPADEVEAEMEALKLSVEAEKADEAIIGDSFSAKLKGAFGNPVVRRGLAAGITVQVAQQFVGINTVMYYSPSIVQFAGYASNKTAMALSLITSGLNALGSIVSMMFVDRYGRRKLMIISMFGIIACLIILATVFSQAAIHAPKIDAFESRTFAPNATCSAYAPLAAENAPPSRWNCMKCLRSECGFCASGVQPYAPGACVVLSDDMKATCSSRGRTFFKDGCPSKFGFLAIVFLGLYIVVYAPGMGTVPWIVNSEIYPLRYRGLGGGIAAVSNWVSNLIVSESFLSLTHALGSSGTFLLFAGFSTIGLFFIWLLVPETKGLQFEEVEKLLEVGFKPSLLRRREKKGKEVDAA

SEQ ID NO: 42002 - protein, 508 aa, Arabidopsis thaliana
  peptide (1)..(508): Ceres Seq. ID no. 13645796
MAVAGAIVGAAVGGWINDKFGRRMSILIADVLFLIGAIVMAFAPAPWVIIVGRIFVGFGVGMASMTSPLYISEASPARIRGALVSTNGLLITGGQFFSYLINLAFVHTPGTWRWMLGVAGVPAIVQFVLMLSLPESPRWLYRKDRIAESRAILERIYPADEVEAEMEALKLSVEAEKADEAIIGDSFSAKLKGAFGNPVVRRGLAAGITVQVAQQFVGINTVMYYSPSIVQFAGYASNKTAMALSLITSGLNALGSIVSMMFVDRYGRRKLMIISMFGIIACLIILATVFSQAAIHAPKIDAFESRTFAPNATCSAYAPLAAENAPPSRWNCMKCLRSECGFCASGVQPYAPGACVVLSDDMKATCSSRGRTFFKDGCPSKFGFLAIVFLGLYIVVYAPGMGTVPWIVNSEIYPLRYRGLGGGIAAVSNWVSNLIVSESFLSLTHALGSSGTFLLFAGFSTIGLFFIWLLVPETKGLQFEEVEKLLEVGFKPSLLRRREKKGKEVDAA

SEQ ID NO: 42003 - DNA, 1274 bp, Arabidopsis thaliana
  misc_feature (1)..(1274): Ceres Seq. ID no. 12345067
  misc_feature (1)..(1274): Ortholog of  Ceres SEQ ID NO 15170239 as cited in SEQ ID NO 54977
  misc_feature (1)..(1274): Ortholog of  Ceres SEQ ID NO 12615622 as cited in SEQ ID NO 62802
  misc_feature (1)..(1274): Ortholog of  Ceres SEQ ID NO 13596203 as cited in SEQ ID NO 68499
aaacattgtcttttcgggttaatttcttcttcttcttccttttcttactaaattctcttagggttttagtcatatttaatggcttccaattcggagaaaaatcctcttctttcagatgagaaacccaaatcgacggaggagaataagagttctaagccggaatcagcttctgggagttcaacttcatcagctatgcctggcttgaatttcaatgcttttgatttctctaatatggctagtattctcaacgatcctagcatcagagaaatgtctgagcaaatagctaaagatcctgcctttaaccaattggctgagcagcttcagagatctattcctaacgctggccaggaaggtggtttccctaactttgatcctcaacagtatgtcaacacaatgcaacaggttatgcataaccctgagtttaagacaatggccgagaaacttggtaccgccttagttcaggatccacaaatgtctccttttttggatgctttctcgaatcctgaaacagcagaacactttactgagcgtatggcgcggatgaaagaagatccagagttgaaacctatactagatgagattgatgctggtggtccttctgccatgatgaagtactggaatgatccagaagtgctgaaaaagctgggtgaagcaatgggtatgcctgttgctggcttaccagaccagactgtttcagctgaacctgaggtagcagaagaaggtgaagaagaagagtctattgttcaccaaactgccagtcttggtgatgttgagggtttgaaagctgccttggcatctggtggtaacaaagatgaagaagattctgaaggaaggacagcattgcattttgcttgtggatacggcgagttgaaatgtgctcaagttcttatcgatgctggagcaagtgttaatgcggttgacaaaaacaagaacacacctctgcattatgctgctggttacgggaggaaagagtgtgtaagccttctcctggagaatggtgctgcagtcactctgcaaaacctagacgagaagacgccaattgatgtagcgaagctcaacagccagctggaggtggtgaagctgcttgagaaggatgctttcctttgagctctgctggttaaaggaaagctctaagctcatattgtctttgaggcatttgtcttgtgtgtgtcctgaaccagtttcacaggctttttgtgtacactttttattagttcctctcttctaaatttgtctcttatgttgttttaaaagtcaataaagaaagaaatagc

SEQ ID NO: 42004 - protein, 342 aa, Arabidopsis thaliana
  peptide (1)..(342): Ceres Seq. ID no. 12345068
MASNSEKNPLLSDEKPKSTEENKSSKPESASGSSTSSAMPGLNFNAFDFSNMASILNDPSIREMSEQIAKDPAFNQLAEQLQRSIPNAGQEGGFPNFDPQQYVNTMQQVMHNPEFKTMAEKLGTALVQDPQMSPFLDAFSNPETAEHFTERMARMKEDPELKPILDEIDAGGPSAMMKYWNDPEVLKKLGEAMGMPVAGLPDQTVSAEPEVAEEGEEEESIVHQTASLGDVEGLKAALASGGNKDEEDSEGRTALHFACGYGELKCAQVLIDAGASVNAVDKNKNTPLHYAAGYGRKECVSLLLENGAAVTLQNLDEKTPIDVAKLNSQLEVVKLLEKDAFL

SEQ ID NO: 42005 - protein, 304 aa, Arabidopsis thaliana
  peptide (1)..(304): Ceres Seq. ID no. 12345069
MPGLNFNAFDFSNMASILNDPSIREMSEQIAKDPAFNQLAEQLQRSIPNAGQEGGFPNFDPQQYVNTMQQVMHNPEFKTMAEKLGTALVQDPQMSPFLDAFSNPETAEHFTERMARMKEDPELKPILDEIDAGGPSAMMKYWNDPEVLKKLGEAMGMPVAGLPDQTVSAEPEVAEEGEEEESIVHQTASLGDVEGLKAALASGGNKDEEDSEGRTALHFACGYGELKCAQVLIDAGASVNAVDKNKNTPLHYAAGYGRKECVSLLLENGAAVTLQNLDEKTPIDVAKLNSQLEVVKLLEKDAFL

SEQ ID NO: 42006 - protein, 291 aa, Arabidopsis thaliana
  peptide (1)..(291): Ceres Seq. ID no. 12345070
MASILNDPSIREMSEQIAKDPAFNQLAEQLQRSIPNAGQEGGFPNFDPQQYVNTMQQVMHNPEFKTMAEKLGTALVQDPQMSPFLDAFSNPETAEHFTERMARMKEDPELKPILDEIDAGGPSAMMKYWNDPEVLKKLGEAMGMPVAGLPDQTVSAEPEVAEEGEEEESIVHQTASLGDVEGLKAALASGGNKDEEDSEGRTALHFACGYGELKCAQVLIDAGASVNAVDKNKNTPLHYAAGYGRKECVSLLLENGAAVTLQNLDEKTPIDVAKLNSQLEVVKLLEKDAFL

SEQ ID NO: 42007 - DNA, 1291 bp, Arabidopsis thaliana
  misc_feature (1)..(1291): Ceres Seq. ID no. 14306846
  misc_feature (1)..(1291): Ortholog of  Ceres SEQ ID NO 14312208 as cited in SEQ ID NO 54845
  misc_feature (1)..(1291): Ortholog of  Ceres SEQ ID NO 13597613 as cited in SEQ ID NO 65334
  misc_feature (1)..(1291): Ortholog of  Ceres SEQ ID NO 14303664 as cited in SEQ ID NO 65892
  misc_feature (1)..(1291): Ortholog of  Ceres SEQ ID NO 15178832 as cited in SEQ ID NO 0
cagacacttacccacaaaatattcctctcggcgatgatccctttctgctgaatttttagtcctttgtcgctcgactgttttcttcgtctactatttgttccttttggatattcttcggacttttcgttgatttgattttcaagagagagagtttgaacaaggaaggattgaactatggaagatgcatcagagactagctactggtgtcacatgtgctcccgatcggtgattccattgattcaagacgaaatcatcaaatgcaatttctgtcaaagtggttttgttgaagaaatggataataatgatgaccatcaggctgctgattctctctggactcctatcttgatggagatgatgaacaacaatcacgaccaacattctaccaatcaggaagactcagaatctattcttgaagatgaagacgaagacgaagatgatggtgatgatggtgatcagaacaatgatggagaaattgatataactcatcaacttgaagagattaggaggataaggactagacattcaactgctattgttaatctgcttcaggggattcgagctggattattgatcgaatccgagaacaacgaggataatcccgataatagcgagcttgtcgtcttgatcaactcatttaaccaaaggatcagggttcatcaagattctgtagacaccacttctgttccttctggatctttgggtgactatttcattggacctggattcgagacgttgcttcagcgtttggctgagaatgatctgaacaacaggtatgggacacctccagctacaaaagaagcggttgaggcattggcgatggtgaaaatcgaagatagtttgttgcagtgtagtgtgtgtttggatgattttgagattggaatggaggctaaagagatgccttgtaagcataagtttcatagtgactgcttgttgccatggcttgagcttcatagctcatgccctgtttgcagatatctgcttcctacaggagatgatgatgagccaaagactgatgcagaaacatcgagaaacgatgataacaatgaagatatcagtaatgcttctatggctagtaatggatcatcaccagactcaagttcgaacaattcatcggttaactaaactaaggctcactatctgagacaggtttacttgaacagaggagaactgatgggatcgtttgagatcagtctttagtgtttaatgttatttggtttgcacatagtttctcagatttggtggaaaatgtattctttggaattaattaacagtcttttttttttttgacttt

SEQ ID NO: 42008 - protein, 315 aa, Arabidopsis thaliana
  peptide (1)..(315): Ceres Seq. ID no. 14306847
MEDASETSYWCHMCSRSVIPLIQDEIIKCNFCQSGFVEEMDNNDDHQAADSLWTPILMEMMNNNHDQHSTNQEDSESILEDEDEDEDDGDDGDQNNDGEIDITHQLEEIRRIRTRHSTAIVNLLQGIRAGLLIESENNEDNPDNSELVVLINSFNQRIRVHQDSVDTTSVPSGSLGDYFIGPGFETLLQRLAENDLNNRYGTPPATKEAVEALAMVKIEDSLLQCSVCLDDFEIGMEAKEMPCKHKFHSDCLLPWLELHSSCPVCRYLLPTGDDDEPKTDAETSRNDDNNEDISNASMASNGSSPDSSSNNSSVN

SEQ ID NO: 42009 - protein, 303 aa, Arabidopsis thaliana
  peptide (1)..(303): Ceres Seq. ID no. 14306848
MCSRSVIPLIQDEIIKCNFCQSGFVEEMDNNDDHQAADSLWTPILMEMMNNNHDQHSTNQEDSESILEDEDEDEDDGDDGDQNNDGEIDITHQLEEIRRIRTRHSTAIVNLLQGIRAGLLIESENNEDNPDNSELVVLINSFNQRIRVHQDSVDTTSVPSGSLGDYFIGPGFETLLQRLAENDLNNRYGTPPATKEAVEALAMVKIEDSLLQCSVCLDDFEIGMEAKEMPCKHKFHSDCLLPWLELHSSCPVCRYLLPTGDDDEPKTDAETSRNDDNNEDISNASMASNGSSPDSSSNNSSVN

SEQ ID NO: 42010 - protein, 276 aa, Arabidopsis thaliana
  peptide (1)..(276): Ceres Seq. ID no. 14306849
MDNNDDHQAADSLWTPILMEMMNNNHDQHSTNQEDSESILEDEDEDEDDGDDGDQNNDGEIDITHQLEEIRRIRTRHSTAIVNLLQGIRAGLLIESENNEDNPDNSELVVLINSFNQRIRVHQDSVDTTSVPSGSLGDYFIGPGFETLLQRLAENDLNNRYGTPPATKEAVEALAMVKIEDSLLQCSVCLDDFEIGMEAKEMPCKHKFHSDCLLPWLELHSSCPVCRYLLPTGDDDEPKTDAETSRNDDNNEDISNASMASNGSSPDSSSNNSSVN

SEQ ID NO: 42011 - DNA, 981 bp, Arabidopsis thaliana
  misc_feature (1)..(981): Ceres Seq. ID no. 13488069
  misc_feature (1)..(981): Ortholog of  Ceres SEQ ID NO 15226909 as cited in SEQ ID NO 61336
  misc_feature (1)..(981): Ortholog of  Ceres SEQ ID NO 15179474 as cited in SEQ ID NO 0
gttggtttgcacaaaaaaaaaaattccattgttgttgttccacggaactctaaaatggagagtggcgatgagagtccggtggttctaattacgggatgttctcagggaggaattggtcacgcgctggcccgtgagttcactgagaagggatgtcgagtagtggcgacgagtcgatcacggagtacgatgacggatctggagcaagattcgaggttattcgtgaaggagcttgatgtgcaatcggaccagaatgtgagtaaggttttgtcggaggttattgataagttcggtaagatcgacgttcttgttaataacgccggagttcagtgcgttggacctctggcggagactccaatttccgccatggaaaacacattcaacaccaatgtttttggttccatgaggatgactcaagctgttgtaccacacatggtgtctaagaaaaagggaaagattgtcaacgttggaagtatcactgttatggcacctggtccatgggctggtgtctatacagctaccaaagctgctattcatgctcttaccgatactctgaggttggagcttcgtccgtttgggattgatgtcatcaatgttgtcccgggaggaataagaacaaacatagcaaactcagctgtggcaactttcaacaaaatgcctgagctgaaactatacaagccttatgaagaagctatcagagaaagggcgtttatatcacagaggatgaatccaactcctgcagaaacatttgccagagacactgtagccgcagtgctgaagaagaatccacccgcttggttctcgtcaggcaggtattcaaccctcatggcaggcatgtatcatatgcccttatggctcaaagattttttccagaagcaggttttaatgaagaagtgataatcaggttggggtttaagacagaatgtaccttaaacacgaatgtaaaagctttgttcaaattgttaattgaatctcttatgtctc

SEQ ID NO: 42012 - protein, 297 aa, Arabidopsis thaliana
  peptide (1)..(297): Ceres Seq. ID no. 13488070
VGLHKKKNSIVVVPRNSKMESGDESPVVLITGCSQGGIGHALAREFTEKGCRVVATSRSRSTMTDLEQDSRLFVKELDVQSDQNVSKVLSEVIDKFGKIDVLVNNAGVQCVGPLAETPISAMENTFNTNVFGSMRMTQAVVPHMVSKKKGKIVNVGSITVMAPGPWAGVYTATKAAIHALTDTLRLELRPFGIDVINVVPGGIRTNIANSAVATFNKMPELKLYKPYEEAIRERAFISQRMNPTPAETFARDTVAAVLKKNPPAWFSSGRYSTLMAGMYHMPLWLKDFFQKQVLMKK

SEQ ID NO: 42013 - protein, 279 aa, Arabidopsis thaliana
  peptide (1)..(279): Ceres Seq. ID no. 13488071
MESGDESPVVLITGCSQGGIGHALAREFTEKGCRVVATSRSRSTMTDLEQDSRLFVKELDVQSDQNVSKVLSEVIDKFGKIDVLVNNAGVQCVGPLAETPISAMENTFNTNVFGSMRMTQAVVPHMVSKKKGKIVNVGSITVMAPGPWAGVYTATKAAIHALTDTLRLELRPFGIDVINVVPGGIRTNIANSAVATFNKMPELKLYKPYEEAIRERAFISQRMNPTPAETFARDTVAAVLKKNPPAWFSSGRYSTLMAGMYHMPLWLKDFFQKQVLMKK

SEQ ID NO: 42014 - protein, 235 aa, Arabidopsis thaliana
  peptide (1)..(235): Ceres Seq. ID no. 13488072
MTDLEQDSRLFVKELDVQSDQNVSKVLSEVIDKFGKIDVLVNNAGVQCVGPLAETPISAMENTFNTNVFGSMRMTQAVVPHMVSKKKGKIVNVGSITVMAPGPWAGVYTATKAAIHALTDTLRLELRPFGIDVINVVPGGIRTNIANSAVATFNKMPELKLYKPYEEAIRERAFISQRMNPTPAETFARDTVAAVLKKNPPAWFSSGRYSTLMAGMYHMPLWLKDFFQKQVLMKK

SEQ ID NO: 42015 - DNA, 1624 bp, Arabidopsis thaliana
  misc_feature (1)..(1624): Ceres Seq. ID no. 12328464
  misc_feature (1)..(1624): Ortholog of  Ceres SEQ ID NO 15172174 as cited in SEQ ID NO 60481
  misc_feature (1)..(1624): Ortholog of  Ceres SEQ ID NO 13660287 as cited in SEQ ID NO 67316
gggagaaacagagagaaaatggaagatggtgtgacgcctccgcttctgatcacagagaaagacacgacgatgattcgtgtgaaggaggaggtgaagaagcagctatggctttctgctccactcattggtgttagccttcttcaatactctctccaagtcatctccgtcatgttcgttggctatcttggctctcttcctctctctgccgcctctatcgccacctcctttgcctccgttaccggcttcaccttcctcttgggaacagcaagtgcattggagactctatgtggccaagcttacggagcaaaactatatggaaaattgggaattcaaatgcagagagcaatgtttgtacttcttatactctctgttcctctctcaatcatttgggctaacacagaacagattctcgtattggtccatcaagacaagtccattgcaagtgttgctggctcctacgctaaatacatgatcccgagcctcttcgcctacggactgcttcaatgtatcaacaggttcttgcaagcgcagaacaatgtgttccctgtctttgtctgctctggtatcactacatgtcttcatttgcttctctgttggttgtttgtgttgaagactggtttaggatacagaggagctgctcttgctatttcggtctcttactggttcaacgtcattctcctctcgtgttatgtcaagttttcgccttcttgctcgcatagttggaccgggttttcgaaagaggcttttcaagaactttatgatttctctaaaattgcttttccttcagcagtcatggtctgtttggagctttggtccttcgagcttctggttcttgcctcaggccttcttcctaacccggttttagaaacttcggtgctttcaatctgtctaaatacttccctaacaatctggcagatttcggttggtcttggtggcgctgcaagcataagggtctcaaacgagttaggagcagggaatccacaagtggcaaaactggctgtatatgtcattgtaggcatagcagtagccgagggaattgtggttgtaacagttttgttgtcgattcggaagatcttaggtcatgcttttagcagcgacccgaaaatcatcgcatatgccgcatcaatgataccgattgttgcatgtggaaacttccttgatggcttacaatgcgtactctcaggggttgctagaggatgtgtatggcagaaaattggagcatgtgtgaatcttggatcatattatcttgttggagttccattaggattgttacttggtttccatttccacattggtggtcgggggctttggctgggaatcgtaacagcattgtctgttcaagtgttgtgtctttccttagtcactatattcacaaactgggataaagaggcaaagaaagctacgaacagagtcggatcttcagatgacaaagatggtgacgtccaatgatcaataaacgtcctgaggaaaaagcagttgcaaatgagcttaatgagtgctttattcttgtatgcccatatgaacttattgggaatttctaattgatgtggccgtacattggtctttagaaaactttaccattgttacatagttattgaaattccttggatgtgtttccattctc

SEQ ID NO: 42016 - protein, 482 aa, Arabidopsis thaliana
  peptide (1)..(482): Ceres Seq. ID no. 12328465
GRNREKMEDGVTPPLLITEKDTTMIRVKEEVKKQLWLSAPLIGVSLLQYSLQVISVMFVGYLGSLPLSAASIATSFASVTGFTFLLGTASALETLCGQAYGAKLYGKLGIQMQRAMFVLLILSVPLSIIWANTEQILVLVHQDKSIASVAGSYAKYMIPSLFAYGLLQCINRFLQAQNNVFPVFVCSGITTCLHLLLCWLFVLKTGLGYRGAALAISVSYWFNVILLSCYVKFSPSCSHSWTGFSKEAFQELYDFSKIAFPSAVMVCLELWSFELLVLASGLLPNPVLETSVLSICLNTSLTIWQISVGLGGAASIRVSNELGAGNPQVAKLAVYVIVGIAVAEGIVVVTVLLSIRKILGHAFSSDPKIIAYAASMIPIVACGNFLDGLQCVLSGVARGCVWQKIGACVNLGSYYLVGVPLGLLLGFHFHIGGRGLWLGIVTALSVQVLCLSLVTIFTNWDKEAKKATNRVGSSDDKDGDVQ

SEQ ID NO: 42017 - protein, 476 aa, Arabidopsis thaliana
  peptide (1)..(476): Ceres Seq. ID no. 12328466
MEDGVTPPLLITEKDTTMIRVKEEVKKQLWLSAPLIGVSLLQYSLQVISVMFVGYLGSLPLSAASIATSFASVTGFTFLLGTASALETLCGQAYGAKLYGKLGIQMQRAMFVLLILSVPLSIIWANTEQILVLVHQDKSIASVAGSYAKYMIPSLFAYGLLQCINRFLQAQNNVFPVFVCSGITTCLHLLLCWLFVLKTGLGYRGAALAISVSYWFNVILLSCYVKFSPSCSHSWTGFSKEAFQELYDFSKIAFPSAVMVCLELWSFELLVLASGLLPNPVLETSVLSICLNTSLTIWQISVGLGGAASIRVSNELGAGNPQVAKLAVYVIVGIAVAEGIVVVTVLLSIRKILGHAFSSDPKIIAYAASMIPIVACGNFLDGLQCVLSGVARGCVWQKIGACVNLGSYYLVGVPLGLLLGFHFHIGGRGLWLGIVTALSVQVLCLSLVTIFTNWDKEAKKATNRVGSSDDKDGDVQ

SEQ ID NO: 42018 - protein, 459 aa, Arabidopsis thaliana
  peptide (1)..(459): Ceres Seq. ID no. 12328467
MIRVKEEVKKQLWLSAPLIGVSLLQYSLQVISVMFVGYLGSLPLSAASIATSFASVTGFTFLLGTASALETLCGQAYGAKLYGKLGIQMQRAMFVLLILSVPLSIIWANTEQILVLVHQDKSIASVAGSYAKYMIPSLFAYGLLQCINRFLQAQNNVFPVFVCSGITTCLHLLLCWLFVLKTGLGYRGAALAISVSYWFNVILLSCYVKFSPSCSHSWTGFSKEAFQELYDFSKIAFPSAVMVCLELWSFELLVLASGLLPNPVLETSVLSICLNTSLTIWQISVGLGGAASIRVSNELGAGNPQVAKLAVYVIVGIAVAEGIVVVTVLLSIRKILGHAFSSDPKIIAYAASMIPIVACGNFLDGLQCVLSGVARGCVWQKIGACVNLGSYYLVGVPLGLLLGFHFHIGGRGLWLGIVTALSVQVLCLSLVTIFTNWDKEAKKATNRVGSSDDKDGDVQ

SEQ ID NO: 42019 - DNA, 1620 bp, Arabidopsis thaliana; identical to SEQ ID NO: 26344
  misc_feature (1)..(1620): Ceres Seq. ID no. 12325289
  misc_feature (1)..(1620): Ortholog of  Ceres SEQ ID NO 12625831 as cited in SEQ ID NO 65139

SEQ ID NO: 42020 - protein, 414 aa, Arabidopsis thaliana; identical to SEQ ID NO: 26345
  peptide (1)..(414): Ceres Seq. ID no. 12325290

SEQ ID NO: 42021 - protein, 391 aa, Arabidopsis thaliana; identical to SEQ ID NO: 26346
  peptide (1)..(391): Ceres Seq. ID no. 12325291

SEQ ID NO: 42022 - protein, 342 aa, Arabidopsis thaliana; identical to SEQ ID NO: 26347
  peptide (1)..(342): Ceres Seq. ID no. 12325292

SEQ ID NO: 42023 - DNA, 1589 bp, Arabidopsis thaliana
  misc_feature (1)..(1589): Ceres Seq. ID no. 13488782
  misc_feature (1)..(1589): Ortholog of  Ceres SEQ ID NO 13599602 as cited in SEQ ID NO 0
agtttgggcttcaaaataatcaaacgaaaacaatggaaaaagcaacggagagacaaaggatactgcttcgtcatcttcaaccttcgtcatcttccgacgcctctctctctgcctcagcttgcttgtccaaagacagtgctgcatatcaatatggagatgatgttgtcattgtcgcggcacaaaggactgcactttgcaaggcaaaacgtggcagcttcaaggatacatttccagacgagttgcttgcctctgtattgagagcattgatagagaaaactaatgtaaacccaagtgaagttggtgacattgtagtgggtactgttttgggaccaggatctcagagagccagtgaatgcaggatggctgcgttctatgctggtttccccgaaactgttcccatcagaaccgtgaacagacagtgttcatctgggcttcaggctgttgctgatgttgccgctgccataaaagctggtttttatgacattggtattggagctgggctggagtccatgacaactaatccaaggggatggaaaggatcagtcaacccaaatgtgaagaagtttgaacaagctcacaattgccttcttccaatgggtattacttcagaaaatgtagcacaccggtttaatgtttcaagggaggagcaggatcaagctgctgttgattctcacagaaaggctgcttctgctactgcttccggaaagtttaaggatgagataacccctgtaaaaaccaagattgttgacccaaagacaggtgatgagaaacccataacagtttctgtggatgatgggattcgacctaacacaaccctttccggacttgcaaagctgaagccagtgtttaaggaagacggaaccacaactgctgggaattctagccaattaagtgacggtgctggagctgttctccttatgaggagaaatgtcgcaatgcagaaaggccttcccattcttggtgtattcaggacattttctgcagttggtgtggacccagccatcatgggggttgggccagccgttgccattcctgctgcagtcaaggcagctggtttagaactcaatgacgtcgacttgtttgagattaacgaggcatttgcatctcagtttgtttattgtcggaacaagctcgggctagacgcggaaaagatcaatgtcaatggaggagccatagccattggacatcccttgggcgctacaggagccagatgcgttgcgacgctgctgcatgagatgaaacgacgtggtaaagactgtcgttttggcgtagtgtcaatgtgtataggttcgggaatgggagcagccgctgtgtttgagagaggaggcggtgtggatgagctctgtgatgtccggaaagtctaatgacaataaggccttttgaccaaggaccctagctaaggaccaaattagaacacagtactacaaataaacattatcacaaataaatgcgttctagatgaataaatcataacgatagtacaatacatgagggaaaacttcttgttattttttaactctcttttgttatatggttggaatatatacagatactctttgagaacatatcataatctatttggtttgtct

SEQ ID NO: 42024 - protein, 453 aa, Arabidopsis thaliana
  peptide (1)..(453): Ceres Seq. ID no. 13488783
FGLQNNQTKTMEKATERQRILLRHLQPSSSSDASLSASACLSKDSAAYQYGDDVVIVAAQRTALCKAKRGSFKDTFPDELLASVLRALIEKTNVNPSEVGDIVVGTVLGPGSQRASECRMAAFYAGFPETVPIRTVNRQCSSGLQAVADVAAAIKAGFYDIGIGAGLESMTTNPRGWKGSVNPNVKKFEQAHNCLLPMGITSENVAHRFNVSREEQDQAAVDSHRKAASATASGKFKDEITPVKTKIVDPKTGDEKPITVSVDDGIRPNTTLSGLAKLKPVFKEDGTTTAGNSSQLSDGAGAVLLMRRNVAMQKGLPILGVFRTFSAVGVDPAIMGVGPAVAIPAAVKAAGLELNDVDLFEINEAFASQFVYCRNKLGLDAEKINVNGGAIAIGHPLGATGARCVATLLHEMKRRGKDCRFGVVSMCIGSGMGAAAVFERGGGVDELCDVRKV

SEQ ID NO: 42025 - protein, 443 aa, Arabidopsis thaliana
  peptide (1)..(443): Ceres Seq. ID no. 13488784
MEKATERQRILLRHLQPSSSSDASLSASACLSKDSAAYQYGDDVVIVAAQRTALCKAKRGSFKDTFPDELLASVLRALIEKTNVNPSEVGDIVVGTVLGPGSQRASECRMAAFYAGFPETVPIRTVNRQCSSGLQAVADVAAAIKAGFYDIGIGAGLESMTTNPRGWKGSVNPNVKKFEQAHNCLLPMGITSENVAHRFNVSREEQDQAAVDSHRKAASATASGKFKDEITPVKTKIVDPKTGDEKPITVSVDDGIRPNTTLSGLAKLKPVFKEDGTTTAGNSSQLSDGAGAVLLMRRNVAMQKGLPILGVFRTFSAVGVDPAIMGVGPAVAIPAAVKAAGLELNDVDLFEINEAFASQFVYCRNKLGLDAEKINVNGGAIAIGHPLGATGARCVATLLHEMKRRGKDCRFGVVSMCIGSGMGAAAVFERGGGVDELCDVRKV

SEQ ID NO: 42026 - protein, 334 aa, Arabidopsis thaliana
  peptide (1)..(334): Ceres Seq. ID no. 13488785
MAAFYAGFPETVPIRTVNRQCSSGLQAVADVAAAIKAGFYDIGIGAGLESMTTNPRGWKGSVNPNVKKFEQAHNCLLPMGITSENVAHRFNVSREEQDQAAVDSHRKAASATASGKFKDEITPVKTKIVDPKTGDEKPITVSVDDGIRPNTTLSGLAKLKPVFKEDGTTTAGNSSQLSDGAGAVLLMRRNVAMQKGLPILGVFRTFSAVGVDPAIMGVGPAVAIPAAVKAAGLELNDVDLFEINEAFASQFVYCRNKLGLDAEKINVNGGAIAIGHPLGATGARCVATLLHEMKRRGKDCRFGVVSMCIGSGMGAAAVFERGGGVDELCDVRKV

SEQ ID NO: 42027 - DNA, 2425 bp, Arabidopsis thaliana
  misc_feature (1)..(2425): Ceres Seq. ID no. 13488766
  misc_feature (1)..(2425): Ortholog of  Ceres SEQ ID NO 15173102 as cited in SEQ ID NO 61106
gacaaaccacaacaaaaaatctcgagacaaagatacaatggcgagccgaaacagagcactcttctctgtttccactcttttcctctgtttcatcgtctgcatctccgagcaatcgaacaatcagtcttctccagtcttcgcctgtgacgtcaccggaaacccttctcttgccgggcttagattctgcaacgcggggttgagtatcaaagcccgagtcaccgatcttgtcggaagattgacgttggaggagaaaatcgggtttttgaccagcaaagctatcggcgttagccgccttgggattccgtcttacaaatggtggtcggaggcacttcatggcgtctctaacgtcggaggtggtagtcggttcaccggtcaagtccctggcgccactagcttcccacaagttatactcacggccgcttctttcaatgtgtctttgttccaagccattggcaaggttgtatcgacagaggcgagggcaatgtacaatgtgggatcagccggtttaacgttttggtcacctaatgtgaacatattccgggacccgagatggggaagaggacaagagactcccggtgaggacccaacactctcaagcaaatacgcagtggcctacgttaaaggtcttcaggagactgacggtggagatcctaaccgtctcaaagtcgctgcttgctgcaaacactacaccgcctatgatattgacaattggagaaatgtcaatcgtctcactttcaacgctgtggtaaaccaacaagatctggctgatacgtttcaaccaccgttcaagagctgtgtggttgatgggcatgttgctagtgtcatgtgttcttacaaccaagttaacggtaaaccaacatgtgccgatcctgatctgctttccggtgtgatccgcggacaatggcagctcaacggatacattgtttcggattgtgattcggtagatgtgttgttcagaaaacaacactatgctaagactccagaagaagctgtggccaaatctctattggcaggtttggatttgaattgtgatcatttcaatggtcaacacgcgatgggagcggtcaaggcgggtttggtaaacgaaacagctattgacaaagcgatttcaaacaatttcgcgactctgatgcgtttagggttcttcgatggagaccctaagaagcagctctacggtggtcttggtcctaaggatgtttgcaccgctgataaccaagaactcgcaagagatggcgcaagacaaggcattgtcttgcttaagaactctgctggttcgcttccgctctcaccttccgcaatcaaaacattagccgtgatcggaccaaacgccaatgccacagaaacaatgatcggaaactaccacggtgtaccatgcaagtacacaacgccgcttcagggattggcagaaacggtgtcgtctacctatcaactgggatgtaacgtggcttgcgtagatgcggatataggctcagccgtggatctggctgcttctgcggatgctgttgtgctcgtggtgggcgcagaccaatcaattgagagggagggccatgaccgagtcgacctgtatcttcctggaaagcagcaagagcttgtgactcgagttgctatggcagcaagaggaccggtggtgctagttatcatgtccggtggaggatttgacattacattcgccaagaatgataaaaagatcacaagcataatgtgggtcggataccctggtgaagccggtggtctcgccattgctgacgttatcttcggacgtcataatccgagtggaaatttgccgatgacgtggtatcctcaatcgtacgtggaaaaagttccgatgtcaaatatgaacatgagacccgacaaatcaaaggggtatccgggtcggagttacaggttttacaccggagaaaccgtatacgccttcgcagacgcgcttacctacactaaattcgaccatcagctaatcaaagcgccaagactcgtctctctcagtctcgacgagaaccacccttgccgatcatcggagtgccaatctttggacgcgatcggacctcactgcgagaacgccgttgagggaggatcggatttcgaggttcatttgaatgtaaagaacaccggagacagagcgggaagccacacggtgtttctgttcacgacgtcgccgcaagtacacggatctccgattaagcaactactaggatttgagaagattcgtctgggaaagagtgaagaagcggtggttaggtttaacgtcaatgtgtgtaaggatctgagtgtggttgatgagaccgggaagaggaaaatcgcgttaggtcatcatcttctccatgtaggaagcttgaaacactctttgaacattagtgtttgattcgacggctcgttttgtttttaacttaagatattaattatggtaataaaatgagatagcaatttt

SEQ ID NO: 42028 - protein, 785 aa, Arabidopsis thaliana
  peptide (1)..(785): Ceres Seq. ID no. 13488767
TNHNKKSRDKDTMASRNRALFSVSTLFLCFIVCISEQSNNQSSPVFACDVTGNPSLAGLRFCNAGLSIKARVTDLVGRLTLEEKIGFLTSKAIGVSRLGIPSYKWWSEALHGVSNVGGGSRFTGQVPGATSFPQVILTAASFNVSLFQAIGKVVSTEARAMYNVGSAGLTFWSPNVNIFRDPRWGRGQETPGEDPTLSSKYAVAYVKGLQETDGGDPNRLKVAACCKHYTAYDIDNWRNVNRLTFNAVVNQQDLADTFQPPFKSCVVDGHVASVMCSYNQVNGKPTCADPDLLSGVIRGQWQLNGYIVSDCDSVDVLFRKQHYAKTPEEAVAKSLLAGLDLNCDHFNGQHAMGAVKAGLVNETAIDKAISNNFATLMRLGFFDGDPKKQLYGGLGPKDVCTADNQELARDGARQGIVLLKNSAGSLPLSPSAIKTLAVIGPNANATETMIGNYHGVPCKYTTPLQGLAETVSSTYQLGCNVACVDADIGSAVDLAASADAVVLVVGADQSIEREGHDRVDLYLPGKQQELVTRVAMAARGPVVLVIMSGGGFDITFAKNDKKITSIMWVGYPGEAGGLAIADVIFGRHNPSGNLPMTWYPQSYVEKVPMSNMNMRPDKSKGYPGRSYRFYTGETVYAFADALTYTKFDHQLIKAPRLVSLSLDENHPCRSSECQSLDAIGPHCENAVEGGSDFEVHLNVKNTGDRAGSHTVFLFTTSPQVHGSPIKQLLGFEKIRLGKSEEAVVRFNVNVCKDLSVVDETGKRKIALGHHLLHVGSLKHSLNISV

SEQ ID NO: 42029 - protein, 773 aa, Arabidopsis thaliana
  peptide (1)..(773): Ceres Seq. ID no. 13488768
MASRNRALFSVSTLFLCFIVCISEQSNNQSSPVFACDVTGNPSLAGLRFCNAGLSIKARVTDLVGRLTLEEKIGFLTSKAIGVSRLGIPSYKWWSEALHGVSNVGGGSRFTGQVPGATSFPQVILTAASFNVSLFQAIGKVVSTEARAMYNVGSAGLTFWSPNVNIFRDPRWGRGQETPGEDPTLSSKYAVAYVKGLQETDGGDPNRLKVAACCKHYTAYDIDNWRNVNRLTFNAVVNQQDLADTFQPPFKSCVVDGHVASVMCSYNQVNGKPTCADPDLLSGVIRGQWQLNGYIVSDCDSVDVLFRKQHYAKTPEEAVAKSLLAGLDLNCDHFNGQHAMGAVKAGLVNETAIDKAISNNFATLMRLGFFDGDPKKQLYGGLGPKDVCTADNQELARDGARQGIVLLKNSAGSLPLSPSAIKTLAVIGPNANATETMIGNYHGVPCKYTTPLQGLAETVSSTYQLGCNVACVDADIGSAVDLAASADAVVLVVGADQSIEREGHDRVDLYLPGKQQELVTRVAMAARGPVVLVIMSGGGFDITFAKNDKKITSIMWVGYPGEAGGLAIADVIFGRHNPSGNLPMTWYPQSYVEKVPMSNMNMRPDKSKGYPGRSYRFYTGETVYAFADALTYTKFDHQLIKAPRLVSLSLDENHPCRSSECQSLDAIGPHCENAVEGGSDFEVHLNVKNTGDRAGSHTVFLFTTSPQVHGSPIKQLLGFEKIRLGKSEEAVVRFNVNVCKDLSVVDETGKRKIALGHHLLHVGSLKHSLNISV

SEQ ID NO: 42030 - protein, 625 aa, Arabidopsis thaliana
  peptide (1)..(625): Ceres Seq. ID no. 13488769
MYNVGSAGLTFWSPNVNIFRDPRWGRGQETPGEDPTLSSKYAVAYVKGLQETDGGDPNRLKVAACCKHYTAYDIDNWRNVNRLTFNAVVNQQDLADTFQPPFKSCVVDGHVASVMCSYNQVNGKPTCADPDLLSGVIRGQWQLNGYIVSDCDSVDVLFRKQHYAKTPEEAVAKSLLAGLDLNCDHFNGQHAMGAVKAGLVNETAIDKAISNNFATLMRLGFFDGDPKKQLYGGLGPKDVCTADNQELARDGARQGIVLLKNSAGSLPLSPSAIKTLAVIGPNANATETMIGNYHGVPCKYTTPLQGLAETVSSTYQLGCNVACVDADIGSAVDLAASADAVVLVVGADQSIEREGHDRVDLYLPGKQQELVTRVAMAARGPVVLVIMSGGGFDITFAKNDKKITSIMWVGYPGEAGGLAIADVIFGRHNPSGNLPMTWYPQSYVEKVPMSNMNMRPDKSKGYPGRSYRFYTGETVYAFADALTYTKFDHQLIKAPRLVSLSLDENHPCRSSECQSLDAIGPHCENAVEGGSDFEVHLNVKNTGDRAGSHTVFLFTTSPQVHGSPIKQLLGFEKIRLGKSEEAVVRFNVNVCKDLSVVDETGKRKIALGHHLLHVGSLKHSLNISV

SEQ ID NO: 42031 - DNA, 874 bp, Arabidopsis thaliana
  misc_feature (1)..(874): Ceres Seq. ID no. 12337723
  misc_feature (1)..(874): Ortholog of  Ceres SEQ ID NO 13594918 as cited in SEQ ID NO 55747
  misc_feature (1)..(874): Ortholog of  Ceres SEQ ID NO 12587066 as cited in SEQ ID NO 63204
aaacaaaaacagagcaaagtttttcaaaaaaaaaaaaaacagagccacgaagaaatttacagaaaattcaaaaccatcgataaagatgggagatgtgattttgttcattgatgatacgaaatcgaaagtgagaatcacgcgttgcagaatttgccatgaagaagaagaagaaagtttcttcgaagttccatgtgcttgttcaggcaccgttaagttcgcacatagaaactgcatacaacgttggtgtaatgaaaaaggaaacacaacttgtgaaatctgtcttcaggtgtataaagatggatatacagcagttttaaaacaatcgaaattgattgaacaagaagtcacaatcagagtaaatggacgaagaagaagaagaagtagaagattagtgtctatagctgaatccgatatttctcagtgtaattctgttgctgatagaggagcttcgttttgcagatcattaacttttactctttcagtatttttgctgatgaaacatacattcgatgtgatttacggaaccgaagaatatccattctctgtatttacggtactaacattaaaggccattgggatactattgccaatgttcattataattcgaacaatctcaactattcagaaaactcttcgtcgtcgtcatcaatatcctgaatctgaagaagaagataggttgagctctgacgacgacgatgacttggaagaagaagatgaagagcaacaacaacatttggcttaaaccttcaaattaacgaacttaacgaaattttttctttctttctttctaattctttctttttttaaacgaaaagcatctatttgatgctcatggtcatttttactcacaaagtcaaataaaaaacgtaaattt

SEQ ID NO: 42032 - protein, 246 aa, Arabidopsis thaliana
  peptide (1)..(246): Ceres Seq. ID no. 12337724
NKNRAKFFKKKKNRATKKFTENSKPSIKMGDVILFIDDTKSKVRITRCRICHEEEEESFFEVPCACSGTVKFAHRNCIQRWCNEKGNTTCEICLQVYKDGYTAVLKQSKLIEQEVTIRVNGRRRRRSRRLVSIAESDISQCNSVADRGASFCRSLTFTLSVFLLMKHTFDVIYGTEEYPFSVFTVLTLKAIGILLPMFIIIRTISTIQKTLRRRHQYPESEEEDRLSSDDDDDLEEEDEEQQQHLA

SEQ ID NO: 42033 - protein, 218 aa, Arabidopsis thaliana
  peptide (1)..(218): Ceres Seq. ID no. 12337725
MGDVILFIDDTKSKVRITRCRICHEEEEESFFEVPCACSGTVKFAHRNCIQRWCNEKGNTTCEICLQVYKDGYTAVLKQSKLIEQEVTIRVNGRRRRRSRRLVSIAESDISQCNSVADRGASFCRSLTFTLSVFLLMKHTFDVIYGTEEYPFSVFTVLTLKAIGILLPMFIIIRTISTIQKTLRRRHQYPESEEEDRLSSDDDDDLEEEDEEQQQHLA

SEQ ID NO: 42034 - DNA, 703 bp, Arabidopsis thaliana
  misc_feature (1)..(703): Ceres Seq. ID no. 12325894
  misc_feature (1)..(703): Ortholog of  Ceres SEQ ID NO 12563124 as cited in SEQ ID NO 57104
  misc_feature (1)..(703): Ortholog of  Ceres SEQ ID NO 13598373 as cited in SEQ ID NO 62185
  misc_feature (1)..(703): Ortholog of  Ceres SEQ ID NO 12617639 as cited in SEQ ID NO 65219
acacatctcactgctcactactctcactgtaatcccttagatcttcttttcaaatttcaatggcgtccggtgatgttgagtatcggtgcttcgttggaggtctagcatgggccactgatgacagagctcttgagactgccttcgctcaatacggcgacgttattgattccaagatcattaacgatcgtgagactggaagatcaaggggattcggattcgtcaccttcaaggatgagaaagccatgaaggatgcgattgagggaatgaacggacaagatctcgatggccgtagcatcactgttaacgaggctcagtcacgaggaagcggtggcggcggaggccaccgtggaggtggtggcggtggataccgcagcggcggtggtggaggttactccggtggaggaagacgtgagggaggaggaggatacggtggtggtgaaggaggaggttacggaggaagcggtggtggtggaggatggtaattcctttaattaggtttgggattaccaatgaatgttctctctctcgcttgttatgcttctacttggttttgtgtgttctctattttgttctggttctgctttagatttgatgtaacagttcgtgattaggtattttggtatctggaaacgtaatgttaagtcacttgtcattctctaaataacaaatttcttcggagatattatctctgttgattgattct

SEQ ID NO: 42035 - protein, 140 aa, Arabidopsis thaliana
  peptide (1)..(140): Ceres Seq. ID no. 12325895
MASGDVEYRCFVGGLAWATDDRALETAFAQYGDVIDSKIINDRETGRSRGFGFVTFKDEKAMKDAIEGMNGQDLDGRSITVNEAQSRGSGGGGGHRGGGGGGYRSGGGGGYSGGGRREGGGGYGGGEGGGYGGSGGGGGW

SEQ ID NO: 42036 - protein, 79 aa, Arabidopsis thaliana
  peptide (1)..(79): Ceres Seq. ID no. 12325896
MKDAIEGMNGQDLDGRSITVNEAQSRGSGGGGGHRGGGGGGYRSGGGGGYSGGGRREGGGGYGGGEGGGYGGSGGGGGW

SEQ ID NO: 42037 - protein, 72 aa, Arabidopsis thaliana
  peptide (1)..(72): Ceres Seq. ID no. 12325897
MNGQDLDGRSITVNEAQSRGSGGGGGHRGGGGGGYRSGGGGGYSGGGRREGGGGYGGGEGGGYGGSGGGGGW

SEQ ID NO: 42038 - DNA, 1630 bp, Arabidopsis thaliana; identical to SEQ ID NO: 21124
  misc_feature (1)..(1630): Ceres Seq. ID no. 13495859
  misc_feature (1)..(1630): Ortholog of  Ceres SEQ ID NO 12784451 as cited in SEQ ID NO 66483

SEQ ID NO: 42039 - protein, 466 aa, Arabidopsis thaliana; identical to SEQ ID NO: 21125
  peptide (1)..(466): Ceres Seq. ID no. 13495860

SEQ ID NO: 42040 - protein, 414 aa, Arabidopsis thaliana; identical to SEQ ID NO: 21126
  peptide (1)..(414): Ceres Seq. ID no. 13495861

SEQ ID NO: 42041 - protein, 380 aa, Arabidopsis thaliana; identical to SEQ ID NO: 21127
  peptide (1)..(380): Ceres Seq. ID no. 13495862

SEQ ID NO: 42042 - DNA, 948 bp, Arabidopsis thaliana
  misc_feature (1)..(948): Ceres Seq. ID no. 12357544
  misc_feature (1)..(948): Ortholog of  Ceres SEQ ID NO 13637842 as cited in SEQ ID NO 54650
  misc_feature (1)..(948): Ortholog of  Ceres SEQ ID NO 12608127 as cited in SEQ ID NO 57579
  misc_feature (1)..(948): Ortholog of  Ceres SEQ ID NO 12634558 as cited in SEQ ID NO 0
aaaacaccataaactaaacaataaaccatacaaaaaaatatgaaaatcctctcactttcactactcttgctcttggccgctacggtctcccacgtccagtcttcggcatccgttccagggctcatcgaactcctcgaccgaactcttagagaaagagggactgtccatcaactaccccaactgcagaagctggcaccttggtgttgagacctctaacatcataaacttcgacacggtgcccgcaaattgcaaagcctatgttgaagactacttgatcacttccaaacagtaccaatacgactccaaaactgtaaacaaagaggcatatttctacgccaaaggacttgccctaaagaacgataccatcaatgtttggatctttgacctagacgacactctcctctctagtattccctactacgccaaatatggatatgggaccgagaacacagccccgggggcgtactggtcgtggttagagtccggagaatcaacaccaggactcccggagaccttgcatctatacgaaaacctcttggaactcgggattgaacccatcataatctctgaccgatggaaaaagttgtcagaaatcactatcgagaatctcaaggctgttggtgtgacaaaatggaagcatctcatactcaagccaaacggatcgaagttgacgcaagtggtgtacaagtcaaaggtgaggaatagccttgtgaagaaaggatacaacatcgttggcaatattggagaccaatgggctgatttggttgaggatactcctggaagggtttttaagctcccaaatccactctactacgtaccttcttaattaagcatatatcttcatggcattgtccccttgtatccatttcaaatctatgtcgtttcgtttatctttgtagccgttttggcaccactgcttgaataaaatgccaatcctagattcctatc

SEQ ID NO: 42043 - protein, 55 aa, Arabidopsis thaliana
  peptide (1)..(55): Ceres Seq. ID no. 12357545
MKILSLSLLLLLAATVSHVQSSASVPGLIELLDRTLRERGTVHQLPQLQKLAPWC

SEQ ID NO: 42044 - protein, 43 aa, Arabidopsis thaliana
  peptide (1)..(43): Ceres Seq. ID no. 12357546
MEKVVRNHYRESQGCWCDKMEASHTQAKRIEVDASGVQVKGEE

SEQ ID NO: 42045 - DNA, 1407 bp, Arabidopsis thaliana
  misc_feature (1)..(1407): Ceres Seq. ID no. 12371453
  misc_feature (1)..(1407): Ortholog of  Ceres SEQ ID NO 14315874 as cited in SEQ ID NO 59983
  misc_feature (1)..(1407): Ortholog of  Ceres SEQ ID NO 13589000 as cited in SEQ ID NO 60876
  misc_feature (1)..(1407): Ortholog of  Ceres SEQ ID NO 14302787 as cited in SEQ ID NO 65398
attatttacaggagtgcgataatattctttgaagcttcaacattgttgcgaagaccagactctcagactcagactcgggagtgatttcacttcaactttctgctcagatggcagtccactactggacagccctgtttctattgctgtcatgccttttctgtatttcaaatgctagtgctggcgatgctgatccagattacaggacatgtgtttcagaatgtgagataagcggttgtgttggaccactttgctttcctcagtgcaattcttcatccgatggtggtccatggtacatccaagaacctctgtatttacaatggaaaaaatggggttgtcaaggtgattgccgttatcaatgtatggttaatagagagagtgaacgggaaactctcggtcaagccccagtcaagtaccatggtaaatggcccttcaagcgtgtacttgggattcaggagcctgcttctgttgctttctctgtactcaacctagcaatgcatttccatggttggctttcctttttcatcatgatctactataagttacctctgaaacaagataggacagcgtactatgaatacgtcggtttgtggcatatctacggtctcctgtccatgaactcttggttctggagtgctgttttccacagccgggatgttgaccttacagagaggttggactactcatccgcagtagcgattctcggattctcactcatcttagccattttacgaacatttgatattcgggtcgaggctgcaagggtcatggtatccgctccaatactagcttttgtaaccacccacatactctacataaacttctacaaactcgactatggctggaacatgattgtgtgtgtggcaatgggagtctcacagcttttcctatgggcaagatgggccgctgtctcaagccacccttctaattggaaactttgggtggttgtgatagctggaggattagccatgcttctagagatatatgattttcctncatatgaaggctacttcgatgctcactcgatctggcacgctgccacaattcccttaaccattctctggtggagcttcattagagacgatgctgagttcagaacttccagcctcctcaagaaaactaagacgaaggcaaagtgagtctctttgctaagttttacaaggatttttattcgaccatacaagtatgcagacacgagggaaaaacaaaaagtggaaatggatttaaacatcacgaagaaggcagagtcttttgtttaaagctagctggtttatggattcacaggtttcttcagtttttttttttttttttttttttattgttacataaactgtggaatttgctttgagcctttcagtgtttttctttggccttacttttggttaagaaagatttcgatatcatttactc

SEQ ID NO: 42046 - protein, 342 aa, Arabidopsis thaliana
  peptide (1)..(342): Ceres Seq. ID no. 12371454
  misc_feature (296)..(296): Xaa is any aa, unknown or other
MAVHYWTALFLLLSCLFCISNASAGDADPDYRTCVSECEISGCVGPLCFPQCNSSSDGGPWYIQEPLYLQWKKWGCQGDCRYQCMVNRESERETLGQAPVKYHGKWPFKRVLGIQEPASVAFSVLNLAMHFHGWLSFFIMIYYKLPLKQDRTAYYEYVGLWHIYGLLSMNSWFWSAVFHSRDVDLTERLDYSSAVAILGFSLILAILRTFDIRVEAARVMVSAPILAFVTTHILYINFYKLDYGWNMIVCVAMGVSQLFLWARWAAVSSHPSNWKLWVVVIAGGLAMLLEIYDFPXYEGYFDAHSIWHAATIPLTILWWSFIRDDAEFRTSSLLKKTKTKAK

SEQ ID NO: 42047 - protein, 258 aa, Arabidopsis thaliana
  peptide (1)..(258): Ceres Seq. ID no. 12371455
  misc_feature (212)..(212): Xaa is any aa, unknown or other
MVNRESERETLGQAPVKYHGKWPFKRVLGIQEPASVAFSVLNLAMHFHGWLSFFIMIYYKLPLKQDRTAYYEYVGLWHIYGLLSMNSWFWSAVFHSRDVDLTERLDYSSAVAILGFSLILAILRTFDIRVEAARVMVSAPILAFVTTHILYINFYKLDYGWNMIVCVAMGVSQLFLWARWAAVSSHPSNWKLWVVVIAGGLAMLLEIYDFPXYEGYFDAHSIWHAATIPLTILWWSFIRDDAEFRTSSLLKKTKTKAK

SEQ ID NO: 42048 - protein, 214 aa, Arabidopsis thaliana
  peptide (1)..(214): Ceres Seq. ID no. 12371456
  misc_feature (168)..(168): Xaa is any aa, unknown or other
MHFHGWLSFFIMIYYKLPLKQDRTAYYEYVGLWHIYGLLSMNSWFWSAVFHSRDVDLTERLDYSSAVAILGFSLILAILRTFDIRVEAARVMVSAPILAFVTTHILYINFYKLDYGWNMIVCVAMGVSQLFLWARWAAVSSHPSNWKLWVVVIAGGLAMLLEIYDFPXYEGYFDAHSIWHAATIPLTILWWSFIRDDAEFRTSSLLKKTKTKAK

SEQ ID NO: 42049 - DNA, 1248 bp, Arabidopsis thaliana
  misc_feature (1)..(1248): Ceres Seq. ID no. 12330974
  misc_feature (1)..(1248): Ortholog of  Ceres SEQ ID NO 13594727 as cited in SEQ ID NO 52169
  misc_feature (1)..(1248): Ortholog of  Ceres SEQ ID NO 14310369 as cited in SEQ ID NO 54765
  misc_feature (1)..(1248): Ortholog of  Ceres SEQ ID NO 14314050 as cited in SEQ ID NO 59952
  misc_feature (1)..(1248): Ortholog of  Ceres SEQ ID NO 13596474 as cited in SEQ ID NO 62169
  misc_feature (1)..(1248): Ortholog of  Ceres SEQ ID NO 13598714 as cited in SEQ ID NO 62656
  misc_feature (1)..(1248): Ortholog of  Ceres SEQ ID NO 13596969 as cited in SEQ ID NO 63375
  misc_feature (1)..(1248): Ortholog of  Ceres SEQ ID NO 14302434 as cited in SEQ ID NO 63410
  misc_feature (1)..(1248): Ortholog of  Ceres SEQ ID NO 13597519 as cited in SEQ ID NO 64759
  misc_feature (1)..(1248): Ortholog of  Ceres SEQ ID NO 14302388 as cited in SEQ ID NO 65655
  misc_feature (1)..(1248): Ortholog of  Ceres SEQ ID NO 15170183 as cited in SEQ ID NO 65667
  misc_feature (1)..(1248): Ortholog of  Ceres SEQ ID NO 13587054 as cited in SEQ ID NO 0
atatctcctaccatcacaaagtcatctccttcttctttcttgatctagctagcggaaaatttgacaatggcaagaatcggaagctttctcattattctttacctcatttacgctcttactctctgcatctgcgacgacgacgagagtaactatggcggcgacaaagggaacctcttcccaggtttctacagaagctcgtgccctagagccgaggagatcgtgaggtcagttgtagccaaagctgttgcaagggagactcgtatggctgcttctctcatgaggctccatttccacgattgtttcgttcagggttgtgatggatcgttgcttctagacaccagtgggagtatagttactgagaagaactctaacccgaacagcagatcggctcgcgggtttgaagttgttgacgagatcaaggcagcattagagaacgaatgccctaacactgtttcttgtgctgatgccttaactctagccgctagagactcctctgttcttactggtggaccaagctggatggttcctttgggaagaagagattcgacaagtgcaagcttgagtggatcaaacaacaacattcctgcacccaacaacactttcaacacaattgtcacgagatttaacaaccaaggtctcgatctcaccgacgttgttgctctctccgggagccacaccattggattttcaagatgcactagtttcagacagagactgtacaaccaatccggaaacggaagtcccgacagaaccttagagcaatcctacgctgctaacttgcgccaaaggtgccctagatcgggtggggaccagaacctgtcagagcttgacatcaacagcgctggaagatttgataacagctacttcaagaacttgatcgagaacatgggactgttgaattccgacgaggtcttgttctctagcaatgagcaatcaagagagctcgtcaagaagtatgcagaggatcaagaagagttcttcgagcagttcgcggagtcgatgatcaagatggggaatatctctcccttgacaggttcgagtggtgagatcagaaagaattgcaggaaaattaataactcttgatttcctagtatcggatgggagaaatagaaatgtgacatgttttggaggaaggaatttatgtttatgtttttttttatattgtatgagtctgtatttctttgtgtcaagaatttgaattttgtaagtttaaatgattgaaactatctataattaaaatgttattat

SEQ ID NO: 42050 - protein, 338 aa, Arabidopsis thaliana
  peptide (1)..(338): Ceres Seq. ID no. 12330975
MARIGSFLIILYLIYALTLCICDDDESNYGGDKGNLFPGFYRSSCPRAEEIVRSVVAKAVARETRMAASLMRLHFHDCFVQGCDGSLLLDTSGSIVTEKNSNPNSRSARGFEVVDEIKAALENECPNTVSCADALTLAARDSSVLTGGPSWMVPLGRRDSTSASLSGSNNNIPAPNNTFNTIVTRFNNQGLDLTDVVALSGSHTIGFSRCTSFRQRLYNQSGNGSPDRTLEQSYAANLRQRCPRSGGDQNLSELDINSAGRFDNSYFKNLIENMGLLNSDEVLFSSNEQSRELVKKYAEDQEEFFEQFAESMIKMGNISPLTGSSGEIRKNCRKINNS

SEQ ID NO: 42051 - protein, 273 aa, Arabidopsis thaliana
  peptide (1)..(273): Ceres Seq. ID no. 12330976
MAASLMRLHFHDCFVQGCDGSLLLDTSGSIVTEKNSNPNSRSARGFEVVDEIKAALENECPNTVSCADALTLAARDSSVLTGGPSWMVPLGRRDSTSASLSGSNNNIPAPNNTFNTIVTRFNNQGLDLTDVVALSGSHTIGFSRCTSFRQRLYNQSGNGSPDRTLEQSYAANLRQRCPRSGGDQNLSELDINSAGRFDNSYFKNLIENMGLLNSDEVLFSSNEQSRELVKKYAEDQEEFFEQFAESMIKMGNISPLTGSSGEIRKNCRKINNS

SEQ ID NO: 42052 - protein, 268 aa, Arabidopsis thaliana
  peptide (1)..(268): Ceres Seq. ID no. 12330977
MRLHFHDCFVQGCDGSLLLDTSGSIVTEKNSNPNSRSARGFEVVDEIKAALENECPNTVSCADALTLAARDSSVLTGGPSWMVPLGRRDSTSASLSGSNNNIPAPNNTFNTIVTRFNNQGLDLTDVVALSGSHTIGFSRCTSFRQRLYNQSGNGSPDRTLEQSYAANLRQRCPRSGGDQNLSELDINSAGRFDNSYFKNLIENMGLLNSDEVLFSSNEQSRELVKKYAEDQEEFFEQFAESMIKMGNISPLTGSSGEIRKNCRKINNS

SEQ ID NO: 42053 - DNA, 1231 bp, Arabidopsis thaliana
  misc_feature (1)..(1231): Ceres Seq. ID no. 12325874
  misc_feature (1)..(1231): Ortholog of  Ceres SEQ ID NO 15175857 as cited in SEQ ID NO 59046
acgtcaaaaattcaaaaaccccaaaaccctataatctcctatataaatattcagccctagatcttataattcatcaatcaaacaatctcttcaatcaaatctcttcttcaatcaaatcttcaaatcccttcaaagatgccttcaatgccagaagagccgctcctaacaccaaccccagacagattctgtatgttcccaattcactacccacagatctgggaaatgtacaaaaaagccgaagcatcattctggaccgccgaagaagtagatctatcacaagacaaccgcgactgggaaaacagtctcaacgacggtgaacgtcacttcatcaaacacgtcctcgctttcttcgctgcatctgacggaatcgtactagagaatctcgcttctcgcttcatgtccgatgttcaagtctctgaggcgcgtgctttctacggtttccagatcgcgattgaaaacatccactcggagatgtatagtctccttctcgatacttatatcaaagataacaaagagagagatcatctctttcgtgccattgaaacaatcccttgcgtcgccaagaaagctcaatgggctatgaaatggatcgacggttctcagactttcgccgaacgaatcatcgctttcgcttgcgtcgaaggtatcttcttctccggaagcttttgttcaatcttctggctgaagaaacgaggactcatgcctggattaacattctcaaacgaattgatctcacgtgacgaaggtttacactgtgatttcgcttgtctactctacacgctactcaaaacaaagcttagcgaagaacgcgtgaaatcaatcgtctgcgacgcggtcgaaatcgagagagagtttgtgtgcgacgcgcttccgtgcgcgttggttgggatgaaccgtgatttgatgagtcagtatattgagtttgttgcggataggcttttgggtgcgcttgggtacgggaaggtgtacggtgttactaatccgttcgattggatggaacttatttcacttcaagggaaaacgaatttcttcgagaaacgtgttggtgattaccaaaaggcttccgttatgtctagcgttaatggtaacggcgcgtttgataaccatgtcttctctctcgacgaagatttttaaagagcgtttgttttgatgctataattacgattctactcttgtattattaccgtgtattatccttggtttttgaattaatgaataattagttgctttt

SEQ ID NO: 42054 - protein, 332 aa, Arabidopsis thaliana; identical to SEQ ID NO: 25519
  peptide (1)..(332): Ceres Seq. ID no. 12325875

SEQ ID NO: 42055 - protein, 329 aa, Arabidopsis thaliana; identical to SEQ ID NO: 25520
  peptide (1)..(329): Ceres Seq. ID no. 12325876

SEQ ID NO: 42056 - protein, 314 aa, Arabidopsis thaliana
  peptide (1)..(314): Ceres Seq. ID no. 12325877
MFPIHYPQIWEMYKKAEASFWTAEEVDLSQDNRDWENSLNDGERHFIKHVLAFFAASDGIVLENLASRFMSDVQVSEARAFYGFQIAIENIHSEMYSLLLDTYIKDNKERDHLFRAIETIPCVAKKAQWAMKWIDGSQTFAERIIAFACVEGIFFSGSFCSIFWLKKRGLMPGLTFSNELISRDEGLHCDFACLLYTLLKTKLSEERVKSIVCDAVEIEREFVCDALPCALVGMNRDLMSQYIEFVADRLLGALGYGKVYGVTNPFDWMELISLQGKTNFFEKRVGDYQKASVMSSVNGNGAFDNHVFSLDEDF

SEQ ID NO: 42057 - DNA, 1374 bp, Arabidopsis thaliana
  misc_feature (1)..(1374): Ceres Seq. ID no. 13499634
  misc_feature (1)..(1374): Ortholog of  Ceres SEQ ID NO 13655992 as cited in SEQ ID NO 65504
  misc_feature (1)..(1374): Ortholog of  Ceres SEQ ID NO 13587581 as cited in SEQ ID NO 0
ctctctcacactcaccatgcaatttttctttccttgtgaccaagacttctctccaactctaaaccaaaaaacacccagattttttctctctgatttcaagattccccaaaactttttctccaagaccctctacaactttcttgatggcggtaggaatctttggattgatcccaagctcatcaccagacgagctaaggaagattcttcaagcgctttcgacgaaatggggaggtagttgaggattttgagagtcttgaagtgaagccaatgaaaggagcgatgactaacgaagtgttcatggttagttggcctagaaaagaaacgaatcttcgatgtaggaagcttcttgttcgtgtttatggtgaaggtgttgagcttttcttcaatagagacgatgagattcgtacttttgagtatgttgctcgtcatggtcacggtcctacacttcttggtcgcttcgccggcggtagagtcgaagagtttatccatgcccggacactatcggcaaccgatcttcgtgatccgaacatatcagctcttgttgcatctaagctaagaagatttcacagcatacacattcctggagatagaattatgctcatctgggacaggatgaggacttgggtaggacaagccaagaatctatgttcaaatgaacattcaacagagtttggtctagacgacattgaagatgaaatcaacctgctggagcaagaagtgaacaatgaacaagagattggcttctgtcacaatgacttgcagtatggtaacatcatgattgatgaagaaaccaatgcaattactatcattgattatgagtatgcaagttataatccgatcgcttacgacatagcaaatcatttctgtgaaatggcggcagattatcattcaaacactcctcatatcttggactacactctatatccaggggaagaagaaaggaggagattcatatgtaactacttaacctcttcaggtgaagaagcaagagaagaagacatagaacaacttttggatgatattgagaagtatacattggcaagccatctcttctggggtttatggggaatcatatctggttatgtgaacaagattgagtttgattatatcgagtattcgaggcagagattcaaacagtattggcttcgcaagccaaagcttttatctttcttcccatcctaataagtaaattctctgtttacttatgtttactctttgcgaataacgcggtaaaaacccgatgatggatccatgatatagctatgccaaagctaaaactatgtgtaattcttctgttctgaacttctgatactatgtaataagtaaaagatataaatattccatactataatatttccacaataatgagaaaag

SEQ ID NO: 42058 - protein, 304 aa, Arabidopsis thaliana
  peptide (1)..(304): Ceres Seq. ID no. 13499635
MKGAMTNEVFMVSWPRKETNLRCRKLLVRVYGEGVELFFNRDDEIRTFEYVARHGHGPTLLGRFAGGRVEEFIHARTLSATDLRDPNISALVASKLRRFHSIHIPGDRIMLIWDRMRTWVGQAKNLCSNEHSTEFGLDDIEDEINLLEQEVNNEQEIGFCHNDLQYGNIMIDEETNAITIIDYEYASYNPIAYDIANHFCEMAADYHSNTPHILDYTLYPGEEERRRFICNYLTSSGEEAREEDIEQLLDDIEKYTLASHLFWGLWGIISGYVNKIEFDYIEYSRQRFKQYWLRKPKLLSFFPS

SEQ ID NO: 42059 - protein, 300 aa, Arabidopsis thaliana
  peptide (1)..(300): Ceres Seq. ID no. 13499636
MTNEVFMVSWPRKETNLRCRKLLVRVYGEGVELFFNRDDEIRTFEYVARHGHGPTLLGRFAGGRVEEFIHARTLSATDLRDPNISALVASKLRRFHSIHIPGDRIMLIWDRMRTWVGQAKNLCSNEHSTEFGLDDIEDEINLLEQEVNNEQEIGFCHNDLQYGNIMIDEETNAITIIDYEYASYNPIAYDIANHFCEMAADYHSNTPHILDYTLYPGEEERRRFICNYLTSSGEEAREEDIEQLLDDIEKYTLASHLFWGLWGIISGYVNKIEFDYIEYSRQRFKQYWLRKPKLLSFFPS

SEQ ID NO: 42060 - protein, 294 aa, Arabidopsis thaliana
  peptide (1)..(294): Ceres Seq. ID no. 13499637
MVSWPRKETNLRCRKLLVRVYGEGVELFFNRDDEIRTFEYVARHGHGPTLLGRFAGGRVEEFIHARTLSATDLRDPNISALVASKLRRFHSIHIPGDRIMLIWDRMRTWVGQAKNLCSNEHSTEFGLDDIEDEINLLEQEVNNEQEIGFCHNDLQYGNIMIDEETNAITIIDYEYASYNPIAYDIANHFCEMAADYHSNTPHILDYTLYPGEEERRRFICNYLTSSGEEAREEDIEQLLDDIEKYTLASHLFWGLWGIISGYVNKIEFDYIEYSRQRFKQYWLRKPKLLSFFPS

SEQ ID NO: 42061 - DNA, 1440 bp, Arabidopsis thaliana
  misc_feature (1)..(1440): Ceres Seq. ID no. 13499630
  misc_feature (1)..(1440): Ortholog of  Ceres SEQ ID NO 13596392 as cited in SEQ ID NO 62136
  misc_feature (1)..(1440): Ortholog of  Ceres SEQ ID NO 13654360 as cited in SEQ ID NO 67980
  misc_feature (1)..(1440): Ortholog of  Ceres SEQ ID NO 13596394 as cited in SEQ ID NO 68561
gaacctctcattctctctttcatctcctcctcttacgtaaccctaacgaagtcgaagattctctggtagatctatctcgattcgattcgattcctcttttttcccagaaaagtcgctattgaaatcgaacgaaagtgttgaagattttaccagtcagaggtatatatatatagagagagagttatggatttggatcaatggatttccaaggttaaagatggtcagcatctctccgaagacgagcttcagcttctctgcgaatacgtgaaagagattctgattgaggagtcaaacgtacagcctgtaaacagtccagtcaccgtatgtggtgatatccatggccagtttcatgatcttatgaagctttttcagaccggaggtcatgttcccgacaccaattacatttttatgggggacttcgtggatagaggttacaacagccttgaagtcttcactattcttttacttcttaaagctagatatccagccaatattacacttttgcgcggaaatcatgaaagtaggcagctaacgcaggtgtatggtttctatgacgaatgccagaggaagtatggtaacgctaatgcgtggcgatattgcacagatgtttttgactatcttaccctgtcagctattatagatggcacagttctatgtgttcacggtggcctttccccggatgtccggacaattgatcagataagactgatcgagcgaaattgcgaaattcctcatgaagggcccttttgcgatcttatgtggagtgatcctgaagatattgaaacatgggcggttagtccacgtggagctggttggcttttcggatccagggttaccactgagtttaaccatatcaacaagctggatctagtatgccgcgcgcaccaacttgtacaagaaggtcttaagtacatgttccaagataaaggccttgtaactgtatggtctgcacctaattactgttaccgctgtgggaatgtcgcttctatattgagtttcaatgacaacatggaaagggaagtgaagttcttcacagagacagaagagaacaatcaaatgagagggccaaggactggagttccgtatttcctatgaagaatcacacttattatatttgctgtgatgatgaagccattgctgccattggcaatatgttcagttcaatgtggaaaaggttaatatatgattatatatattatctactgatgggtttcgcttactatcattatttttgtcctttaggttacatttcccttgtgaaagttacaagtcaaacactttggtaatagtcttagtcattttgattctctgctctcttttctttcccccaatctttcttctgtaatgttatttttttcattgttcacttgtactgtttcctctgtttttgttgttgttgttgtgaagatgacattaattctaaaataatcaaacatcgtt

SEQ ID NO: 42062 - protein, 303 aa, Arabidopsis thaliana
  peptide (1)..(303): Ceres Seq. ID no. 13499631
MDLDQWISKVKDGQHLSEDELQLLCEYVKEILIEESNVQPVNSPVTVCGDIHGQFHDLMKLFQTGGHVPDTNYIFMGDFVDRGYNSLEVFTILLLLKARYPANITLLRGNHESRQLTQVYGFYDECQRKYGNANAWRYCTDVFDYLTLSAIIDGTVLCVHGGLSPDVRTIDQIRLIERNCEIPHEGPFCDLMWSDPEDIETWAVSPRGAGWLFGSRVTTEFNHINKLDLVCRAHQLVQEGLKYMFQDKGLVTVWSAPNYCYRCGNVASILSFNDNMEREVKFFTETEENNQMRGPRTGVPYFL

SEQ ID NO: 42063 - protein, 245 aa, Arabidopsis thaliana
  peptide (1)..(245): Ceres Seq. ID no. 13499632
MKLFQTGGHVPDTNYIFMGDFVDRGYNSLEVFTILLLLKARYPANITLLRGNHESRQLTQVYGFYDECQRKYGNANAWRYCTDVFDYLTLSAIIDGTVLCVHGGLSPDVRTIDQIRLIERNCEIPHEGPFCDLMWSDPEDIETWAVSPRGAGWLFGSRVTTEFNHINKLDLVCRAHQLVQEGLKYMFQDKGLVTVWSAPNYCYRCGNVASILSFNDNMEREVKFFTETEENNQMRGPRTGVPYFL

SEQ ID NO: 42064 - protein, 228 aa, Arabidopsis thaliana
  peptide (1)..(228): Ceres Seq. ID no. 13499633
MGDFVDRGYNSLEVFTILLLLKARYPANITLLRGNHESRQLTQVYGFYDECQRKYGNANAWRYCTDVFDYLTLSAIIDGTVLCVHGGLSPDVRTIDQIRLIERNCEIPHEGPFCDLMWSDPEDIETWAVSPRGAGWLFGSRVTTEFNHINKLDLVCRAHQLVQEGLKYMFQDKGLVTVWSAPNYCYRCGNVASILSFNDNMEREVKFFTETEENNQMRGPRTGVPYFL

SEQ ID NO: 42065 - DNA, 1213 bp, Arabidopsis thaliana
  misc_feature (1)..(1213): Ceres Seq. ID no. 12562379
  misc_feature (1)..(1213): Ortholog of  Ceres SEQ ID NO 12562215 as cited in SEQ ID NO 20489
  misc_feature (1)..(1213): Ortholog of  Ceres SEQ ID NO 13595548 as cited in SEQ ID NO 51024
  misc_feature (1)..(1213): Ortholog of  Ceres SEQ ID NO 13582350 as cited in SEQ ID NO 56734
  misc_feature (1)..(1213): Ortholog of  Ceres SEQ ID NO 12476493 as cited in SEQ ID NO 58163
  misc_feature (1)..(1213): Ortholog of  Ceres SEQ ID NO 14313459 as cited in SEQ ID NO 62395
  misc_feature (1)..(1213): Ortholog of  Ceres SEQ ID NO 13597295 as cited in SEQ ID NO 63743
  misc_feature (1)..(1213): Ortholog of  Ceres SEQ ID NO 12617090 as cited in SEQ ID NO 64005
  misc_feature (1)..(1213): Ortholog of  Ceres SEQ ID NO 13597439 as cited in SEQ ID NO 64081
  misc_feature (1)..(1213): Ortholog of  Ceres SEQ ID NO 13597233 as cited in SEQ ID NO 64370
  misc_feature (1)..(1213): Ortholog of  Ceres SEQ ID NO 13599438 as cited in SEQ ID NO 0
  misc_feature (1)..(1213): Ortholog of  Ceres SEQ ID NO 13623850 as cited in SEQ ID NO 0
  misc_feature (1)..(1213): Ortholog of  Ceres SEQ ID NO 14309162 as cited in SEQ ID NO 0
acatcaaagcaattaacaaatacacaacttgtaacttcaaatagattactttcaaagaagagagagagaaagaaagatggagaagaacatgaagtttccagtagtagacttgtccaagctcaatggggaagagagagaccaaaccatggctctaatcaatgaagcttgtgagaattggggcttctttgagatagtgaaccatggattaccacatgacttaatggacaagatcgagaagatgacaaaggaccattacaagacatgccaagaacaaaagttcaatgacatgctcaagtccaaaggtttggataatcttgagacagaagtcgaagatgtcgattgggaaagcactttctacgttcgtcacctccctcaatccaatctcaatgacatttcagatgtgtctgatgaatacgacggccatgaaagactttggtaagagactggagaatcttgctgaggatttgttggatctactgtgtgagaatctagggttagagaaagggtatttgaagaaagtgtttcatggaacaaaaggcccaacctttgggacaaaggtgagcaattatccaccatgtcctaaaccagagatgatcaaaggtcttagggcccacactgatgcaggaggcatcatcttgttgtttcaagacgacaaggtcagtggtctccagcttcttaaagatggtgactggattgatgttcctcctctcaaccactctattgtcatcaatcttggtgaccaacttgaggtgataaccaacgggaagtataagagtgtgctgcaccgtgtggtgactcaacaagaaggaaacaggatgtcggttgcatcgttttacaacccgggaagcgatgcggagatctcaccagctacttcgcttgtcgagaaagattccgagtacccgagtttcgtctttgatgactacatgaagctttatgcaggggtcaagtttcagcccaaggagccacggttcgcagcaatgaagaatgcttctgcagttacagaactgaatcctacagcagccgtagagactttctaaaaatggatttgagattcaagtgaagcagagaaagaaagatgagtttgtgttgtgtgttatggcaataagttaaaacttgtattagtgttgattaattgttggtcaattggtgtgttttaaagtgtggggtgtttatgtttatggaagatgataataattataaaaatctaaattct

SEQ ID NO: 42066 - protein, 251 aa, Arabidopsis thaliana
  peptide (1)..(251): Ceres Seq. ID no. 12562380
MTCSSPKVWIILRQKSKMSIGKALSTFVTSLNPISMTFQMCLMNTTAMKDFGKRLENLAEDLLDLLCENLGLEKGYLKKVFHGTKGPTFGTKVSNYPPCPKPEMIKGLRAHTDAGGIILLFQDDKVSGLQLLKDGDWIDVPPLNHSIVINLGDQLEVITNGKYKSVLHRVVTQQEGNRMSVASFYNPGSDAEISPATSLVEKDSEYPSFVFDDYMKLYAGVKFQPKEPRFAAMKNASAVTELNPTAAVETF

SEQ ID NO: 42067 - protein, 234 aa, Arabidopsis thaliana
  peptide (1)..(234): Ceres Seq. ID no. 12562381
MSIGKALSTFVTSLNPISMTFQMCLMNTTAMKDFGKRLENLAEDLLDLLCENLGLEKGYLKKVFHGTKGPTFGTKVSNYPPCPKPEMIKGLRAHTDAGGIILLFQDDKVSGLQLLKDGDWIDVPPLNHSIVINLGDQLEVITNGKYKSVLHRVVTQQEGNRMSVASFYNPGSDAEISPATSLVEKDSEYPSFVFDDYMKLYAGVKFQPKEPRFAAMKNASAVTELNPTAAVETF

SEQ ID NO: 42068 - protein, 216 aa, Arabidopsis thaliana
  peptide (1)..(216): Ceres Seq. ID no. 12562382
MTFQMCLMNTTAMKDFGKRLENLAEDLLDLLCENLGLEKGYLKKVFHGTKGPTFGTKVSNYPPCPKPEMIKGLRAHTDAGGIILLFQDDKVSGLQLLKDGDWIDVPPLNHSIVINLGDQLEVITNGKYKSVLHRVVTQQEGNRMSVASFYNPGSDAEISPATSLVEKDSEYPSFVFDDYMKLYAGVKFQPKEPRFAAMKNASAVTELNPTAAVETF

SEQ ID NO: 42069 - DNA, 1194 bp, Arabidopsis thaliana
  misc_feature (1)..(1194): Ceres Seq. ID no. 12328053
  misc_feature (1)..(1194): Ortholog of  Ceres SEQ ID NO 14311407 as cited in SEQ ID NO 54067
  misc_feature (1)..(1194): Ortholog of  Ceres SEQ ID NO 14313107 as cited in SEQ ID NO 58915
  misc_feature (1)..(1194): Ortholog of  Ceres SEQ ID NO 15226556 as cited in SEQ ID NO 67908
ttcttagcttcttctctctcaaccctcaaaagatcttcgtcatctctgtattcaacacatagtgatgaatcgagactaacaaaatcaaattctcttcactctgattcgcagtcatagtttaccaatttcttcttactcgcaagcaatggcttgccttggaagaaaattctccagaattggttgaattcgtttttttttcatttccagaaattttagtatgtttaagagatgcaattagtgcctagtgatgatgatgatgatagaaaggaacagattttattcgacgaatcaacatcctcaaacgaaatcgtagcagcggaaagaggagatcgtgttgtggaggaaggacaagtttcagaaatagctgagactgatgatgacgaaaccacacttcttgtttctggagatcaaccacaatgtcgaatttgccttgatgttggaggggaagatctgattgctccgtgcaattgtaaaggtactcaaaagcacgttcacagatcttgtctcgataattggcgctccaccaaggaaggttttgcattttcgcattgtacagagtgtagagcctttttcaaactccgagccaatgtgcctgctgatagatggtggttgagattgagatttcagctgctggttgctagagatcatgccttcatcttcatttctgtccagatgattgtagcattcttggggttactagtttacaagttctacggtgaagaactacgagaaatgtttggttatgaggaacatccttatgggttctacacattggctgttttggccattgtcttggtaggactgctatatggattcttcatcgccataatatgtggccaaaagatcaacgagcggcattaccatgttctcgccaaacaagaactcacaaaggaatatatagtggaagaccgcgactgcaagaatgttcctgagcttgatcagagtcatgtgatggaactaaaaatgttgggactttattgaacatatactacaagaaaagagcttgttggatctttactcttcatgtcacctgtaaattatattcttcattgatttatatggttgcttcaacgaacgattgtgtcatctccaagtggttttttgattttttttttttttttaaattgtatatcttctgatgaacatgtttatctgttcgagtatacatatcagaagtaaattggtttacaaagt

SEQ ID NO: 42070 - protein, 250 aa, Arabidopsis thaliana
  peptide (1)..(250): Ceres Seq. ID no. 12328054
MQLVPSDDDDDRKEQILFDESTSSNEIVAAERGDRVVEEGQVSEIAETDDDETTLLVSGDQPQCRICLDVGGEDLIAPCNCKGTQKHVHRSCLDNWRSTKEGFAFSHCTECRAFFKLRANVPADRWWLRLRFQLLVARDHAFIFISVQMIVAFLGLLVYKFYGEELREMFGYEEHPYGFYTLAVLAIVLVGLLYGFFIAIICGQKINERHYHVLAKQELTKEYIVEDRDCKNVPELDQSHVMELKMLGLY

SEQ ID NO: 42071 - DNA, 1382 bp, Arabidopsis thaliana
  misc_feature (1)..(1382): Ceres Seq. ID no. 12371106
  misc_feature (1)..(1382): Ortholog of  Ceres SEQ ID NO 14308867 as cited in SEQ ID NO 55300
aaacctctctcctcgaccctttaatttctaatcaccgaccaaaattgatcggaaacctagagctcttcgtattgctccgccaccatgcatatccggcgccagatcttcgttaaatctcctgactgtcaaaaagtcgtcgctctgcaattggatcctgcgcaatctctattaactctttcgggtatcacttccttactcgaatcgtcgcagcgtatatcgttttcggcttgctcgattactctagatgggaagcttttgaatggctctacacggatccaagtatcgaagcttccttctgtatccatgctcactcttttccctcgcctccgtggaggtggaggagatggtggggcaacgggagccgagtctcgcgattgctatctcaatatgtacgcggagaagaaacctgacaaggttgatcctaatgagcagaggctctccaaatggttgaattgtgctttgtctaacgagcctttggctgagccgtgcgtgattgatctccttgggaatttgttcaataaagaagttttggtgcacgctttgttgtctaagaggttgcctaaacaattctcgtacattaagggtttgaaagatatggtgaatattaagcttacgcctgttgctggttctgatggttcatcgcaagatacgactagtgcacagtttcagtgtccggtctcagggcttgaattcaatggaaagtacaagtttttcgctttgaggggatgtggacatgtgatgagcgcaaaggcgttgaaggaagtgaagtcttcttcttgtttggtgtgtcatgcggatgtcaaagattctgataagattgtgatcaatggtactgaggaggaagtagatttgttgagggagaagatggaggaggagaaagctaagctgagagagaagaaaggtgtctcaaagaagagtaagaacggtgctgctgtggtggctgatacaggtgcgaaggtcgcaaagagacagatagaggatgggaatgtcaatggcaatggtataactgtgaagaaattcaaggcggcggataaagtgccggttaatgctactaaggaagtctatgcttctctctttacttcctctaagaagaagtctgatttcagggagacttactcttgcaggtcacttcctctcggcaggaattgatttgttggatcaatgttgtttacctgcttgcttcatttgctctgtaatctgttttgattatattgatatatcaacttgcttttgtaatttcgcctactggataatataatgtttttcttttccttttgcaattggtaaaaacagtaaacatgtttgcatccactatgctaaaactagtaaaagtgttgtatcataagctgcaattgtaacaagaggatatgtatgttgtttac

SEQ ID NO: 42072 - protein, 354 aa, Arabidopsis thaliana
  peptide (1)..(354): Ceres Seq. ID no. 12371107
MHIRRQIFVKSPDCQKVVALQLDPAQSLLTLSGITSLLESSQRISFSACSITLDGKLLNGSTRIQVSKLPSVSMLTLFPRLRGGGGDGGATGAESRDCYLNMYAEKKPDKVDPNEQRLSKWLNCALSNEPLAEPCVIDLLGNLFNKEVLVHALLSKRLPKQFSYIKGLKDMVNIKLTPVAGSDGSSQDTTSAQFQCPVSGLEFNGKYKFFALRGCGHVMSAKALKEVKSSSCLVCHADVKDSDKIVINGTEEEVDLLREKMEEEKAKLREKKGVSKKSKNGAAVVADTGAKVAKRQIEDGNVNGNGITVKKFKAADKVPVNATKEVYASLFTSSKKKSDFRETYSCRSLPLGRN

SEQ ID NO: 42073 - protein, 281 aa, Arabidopsis thaliana
  peptide (1)..(281): Ceres Seq. ID no. 12371108
MLTLFPRLRGGGGDGGATGAESRDCYLNMYAEKKPDKVDPNEQRLSKWLNCALSNEPLAEPCVIDLLGNLFNKEVLVHALLSKRLPKQFSYIKGLKDMVNIKLTPVAGSDGSSQDTTSAQFQCPVSGLEFNGKYKFFALRGCGHVMSAKALKEVKSSSCLVCHADVKDSDKIVINGTEEEVDLLREKMEEEKAKLREKKGVSKKSKNGAAVVADTGAKVAKRQIEDGNVNGNGITVKKFKAADKVPVNATKEVYASLFTSSKKKSDFRETYSCRSLPLGRN

SEQ ID NO: 42074 - protein, 253 aa, Arabidopsis thaliana
  peptide (1)..(253): Ceres Seq. ID no. 12371109
MYAEKKPDKVDPNEQRLSKWLNCALSNEPLAEPCVIDLLGNLFNKEVLVHALLSKRLPKQFSYIKGLKDMVNIKLTPVAGSDGSSQDTTSAQFQCPVSGLEFNGKYKFFALRGCGHVMSAKALKEVKSSSCLVCHADVKDSDKIVINGTEEEVDLLREKMEEEKAKLREKKGVSKKSKNGAAVVADTGAKVAKRQIEDGNVNGNGITVKKFKAADKVPVNATKEVYASLFTSSKKKSDFRETYSCRSLPLGRN

SEQ ID NO: 42075 - DNA, 1569 bp, Arabidopsis thaliana
  misc_feature (1)..(1569): Ceres Seq. ID no. 12328306
  misc_feature (1)..(1569): Ortholog of  Ceres SEQ ID NO 13659033 as cited in SEQ ID NO 66372
  misc_feature (1)..(1569): Ortholog of  Ceres SEQ ID NO 13655724 as cited in SEQ ID NO 68973
  misc_feature (1)..(1569): Ortholog of  Ceres SEQ ID NO 12625899 as cited in SEQ ID NO 69079
ataacagttacagaaaaaaataaataaagagatagaagatggagagacaaagaagtttctctgtgaagtccacaagagtcttagcattcatcatcacaataatctcttccgccattgttttcttcactttcttctcctcttccttactcaaatctaactcttctctttacccaacaccagaagctaacttccagatcgatttaagccctattgccgccatttccgattcttcagtttctcctcaagcaagtccgattctgatctctacccatttcaattcacccgaaaacacttccgggtcttcaaaaatttctgtttttgagcagaagattagcggcgagagtttggttaaggaagttagggaaattgctaatttaacttcgattaaagtgattgaacttccgagcaacaatggtgaagataagaagacagagaagagaatcgaagaatgtgatgttacgaaagggaagtgggtttacgatagtgattatccattgtacacaaatgcgtcttgtccttttatcgatgaaggatttggttgtcaaagcaatggaagattggatcttaattacatgaattggagatgggagcctcaggattgtcatgctcccaggttcaatgctacaaagatgctggaaatgattagaggcaagaggctagtgttcgttggagattcaattaataggaaccaatgggaatctatgctttgtttgttgtttcaagctgttaaagatcccaagagagtatacgaaacgcacaaccgaagaatcaccaaagagaaagggaattatagcttccgtttcgtggattataaatgcactgtggaattctatgttactcatttcttggttcgtgagggtagagcaagaataggaaagaagcgaagagaaacacttagaatcgatgctatggatcgaacctcttccagatggaaaggtgctaatatcttagtgttcaatacagctcattggtggtctcattacaaaaccaaatcaggggtcaactactaccaagaaggagacctgattcatcccaaactcgatgtatcaaccgcttttaagaaagctttgcagacttggtcatcatgggttgacaaaaatgtcgatccgaagaaaactcgcgttttctttagaagcgctgcaccttctcatttcagtggaggagaatggaactcaggaggtcattgcagagaagccaacatgccgttgaaccaaaccttcaaaccaagttactcgagcaaaaagtccattgttgaggacgtactgaagcaaatgagaacaccggtaaccctcttgaacgttagcggtttatctcagtacagaattgacgcccatccttctatttacggaacaaaacccgaaaaccggcgttcaagagctgtccaagattgcagccattggtgtctccctggtgttcctgatacttggaaccacttcctttacctccatttgctccataaacgataaatacagttacaaactaatcaaagctccagttacgtgttcaaaagtttgtttaatgtaggcattgctcgatccgatttaaccaaccaaaccaaaaccattttgg

SEQ ID NO: 42076 - protein, 475 aa, Arabidopsis thaliana
  peptide (1)..(475): Ceres Seq. ID no. 12328307
MERQRSFSVKSTRVLAFIITIISSAIVFFTFFSSSLLKSNSSLYPTPEANFQIDLSPIAAISDSSVSPQASPILISTHFNSPENTSGSSKISVFEQKISGESLVKEVREIANLTSIKVIELPSNNGEDKKTEKRIEECDVTKGKWVYDSDYPLYTNASCPFIDEGFGCQSNGRLDLNYMNWRWEPQDCHAPRFNATKMLEMIRGKRLVFVGDSINRNQWESMLCLLFQAVKDPKRVYETHNRRITKEKGNYSFRFVDYKCTVEFYVTHFLVREGRARIGKKRRETLRIDAMDRTSSRWKGANILVFNTAHWWSHYKTKSGVNYYQEGDLIHPKLDVSTAFKKALQTWSSWVDKNVDPKKTRVFFRSAAPSHFSGGEWNSGGHCREANMPLNQTFKPSYSSKKSIVEDVLKQMRTPVTLLNVSGLSQYRIDAHPSIYGTKPENRRSRAVQDCSHWCLPGVPDTWNHFLYLHLLHKR

SEQ ID NO: 42077 - protein, 297 aa, Arabidopsis thaliana
  peptide (1)..(297): Ceres Seq. ID no. 12328308
MNWRWEPQDCHAPRFNATKMLEMIRGKRLVFVGDSINRNQWESMLCLLFQAVKDPKRVYETHNRRITKEKGNYSFRFVDYKCTVEFYVTHFLVREGRARIGKKRRETLRIDAMDRTSSRWKGANILVFNTAHWWSHYKTKSGVNYYQEGDLIHPKLDVSTAFKKALQTWSSWVDKNVDPKKTRVFFRSAAPSHFSGGEWNSGGHCREANMPLNQTFKPSYSSKKSIVEDVLKQMRTPVTLLNVSGLSQYRIDAHPSIYGTKPENRRSRAVQDCSHWCLPGVPDTWNHFLYLHLLHKR

SEQ ID NO: 42078 - protein, 278 aa, Arabidopsis thaliana
  peptide (1)..(278): Ceres Seq. ID no. 12328309
MLEMIRGKRLVFVGDSINRNQWESMLCLLFQAVKDPKRVYETHNRRITKEKGNYSFRFVDYKCTVEFYVTHFLVREGRARIGKKRRETLRIDAMDRTSSRWKGANILVFNTAHWWSHYKTKSGVNYYQEGDLIHPKLDVSTAFKKALQTWSSWVDKNVDPKKTRVFFRSAAPSHFSGGEWNSGGHCREANMPLNQTFKPSYSSKKSIVEDVLKQMRTPVTLLNVSGLSQYRIDAHPSIYGTKPENRRSRAVQDCSHWCLPGVPDTWNHFLYLHLLHKR

SEQ ID NO: 42079 - DNA, 1840 bp, Arabidopsis thaliana
  misc_feature (1)..(1840): Ceres Seq. ID no. 13492433
  misc_feature (1)..(1840): Ortholog of  Ceres SEQ ID NO 14314536 as cited in SEQ ID NO 52436
gtagctactgtgtcacgcttttctctagcgaatactttgatgcttcttcatgactctttaacaagattattctgagcttttcctctggccttctaattattaaagtcttcctttttatctattgttaagtgatggctactgaagagaagcctcttaattctcttgatttaagccatgatgattcttcccctgcttcaaatcaggctgaaggatcatctgctataactgaagacacttctgcgaatgttcaacaatggaggcgaaagaatctctctttacagataccctctagagcagctggtctctctcctgaagattcggttgttatcaaaatgcctccaacgcctagtccaactccaagaagagtcaactttgctttgacttcgagttctccaggtcctactcctacttcttcttctgttcttcctcgtggcaaatcgtccctgaagaatctattgccaaaagctgggtgtaaaccaaaaacctctaacactgatatcgagaagggacaagggaatgcctgttctcctcctgcatcgcaggagaaggcttcgatatcgaggtcattatcactttcaaagctatttacacctaggatcaagagaacttcgtccctacctgtgactcctgttattctttcaaactcagagtcagctcacggaggaaccagtgttgctcctcaaactccaaacagaaaagggagtgtacacatagctcgctctcgctctgtgccccttaacgacaaggaattaagcctgaagggaatggattcatttttcagagtaattccttcgactcctcgtgttaaggaaggagacgttttctcaaatgcatcagaggctggtaatactgaaacaggtgatgctgatggagaagacatacctgaggatgaagcagtttgtaggatttgtttggtagagctctgtgaaggaggagaaaccttaaaaatggagtgtagttgcaaaggcgaacttgctcttgcccacaaagattgtgctcttaaatggttcaccataaagggtaacaagacttgtgaggtgtgtaaacaagaagttaagaacttacctgtaacactcttacgcatccaaagccttcgaaattctggtgttcctcagctagatgtctctggctatagggtgtggcaggaggtaccggttctagtaatcatcagcatgctcgcttacttctgcttcctcgagcagctcctggttgagaatatgggtacaggtgccatcgctatatcactgccgttttcttgtattcttggtcttcttgcatccatgaccgcatcaaccatggtaatgagaagatttgtctggatttacgcatctgtccagtttgcgttggtcgttctcttcgcccatatattttactctgtggtgaagttgcaaccagttctgtcagttcttctgtcaacatttgctggatttggtgtatgcatatgcggaagttcagtgatggttgagtttgtgagatggagacgaagatggcgagccagaaggctagagcaacagctgaaccatgctttgactctgtcacaaccgccgcaaccactggatccaacaacctctctgcatcattcaaatacctcatagagagccaagaagtggacagatgattttacatttatacagtgtagtttggttaatgtttatgtaatgatttgtataaaagaaaaagagaaagtgatccaaggaatgcttaaagattgttccttttgtttgttttacatacacatttgtattgttgtaagtttgtaactttgatttgctcaatctctgcaaatgaaatgtttgtagcagtattggtttctctgtataataaaaagatttaaaattgt

SEQ ID NO: 42080 - protein, 487 aa, Arabidopsis thaliana
  peptide (1)..(487): Ceres Seq. ID no. 13492434
MATEEKPLNSLDLSHDDSSPASNQAEGSSAITEDTSANVQQWRRKNLSLQIPSRAAGLSPEDSVVIKMPPTPSPTPRRVNFALTSSSPGPTPTSSSVLPRGKSSLKNLLPKAGCKPKTSNTDIEKGQGNACSPPASQEKASISRSLSLSKLFTPRIKRTSSLPVTPVILSNSESAHGGTSVAPQTPNRKGSVHIARSRSVPLNDKELSLKGMDSFFRVIPSTPRVKEGDVFSNASEAGNTETGDADGEDIPEDEAVCRICLVELCEGGETLKMECSCKGELALAHKDCALKWFTIKGNKTCEVCKQEVKNLPVTLLRIQSLRNSGVPQLDVSGYRVWQEVPVLVIISMLAYFCFLEQLLVENMGTGAIAISLPFSCILGLLASMTASTMVMRRFVWIYASVQFALVVLFAHIFYSVVKLQPVLSVLLSTFAGFGVCICGSSVMVEFVRWRRRWRARRLEQQLNHALTLSQPPQPLDPTTSLHHSNTS

SEQ ID NO: 42081 - protein, 420 aa, Arabidopsis thaliana
  peptide (1)..(420): Ceres Seq. ID no. 13492435
MPPTPSPTPRRVNFALTSSSPGPTPTSSSVLPRGKSSLKNLLPKAGCKPKTSNTDIEKGQGNACSPPASQEKASISRSLSLSKLFTPRIKRTSSLPVTPVILSNSESAHGGTSVAPQTPNRKGSVHIARSRSVPLNDKELSLKGMDSFFRVIPSTPRVKEGDVFSNASEAGNTETGDADGEDIPEDEAVCRICLVELCEGGETLKMECSCKGELALAHKDCALKWFTIKGNKTCEVCKQEVKNLPVTLLRIQSLRNSGVPQLDVSGYRVWQEVPVLVIISMLAYFCFLEQLLVENMGTGAIAISLPFSCILGLLASMTASTMVMRRFVWIYASVQFALVVLFAHIFYSVVKLQPVLSVLLSTFAGFGVCICGSSVMVEFVRWRRRWRARRLEQQLNHALTLSQPPQPLDPTTSLHHSNTS

SEQ ID NO: 42082 - protein, 276 aa, Arabidopsis thaliana
  peptide (1)..(276): Ceres Seq. ID no. 13492436
MDSFFRVIPSTPRVKEGDVFSNASEAGNTETGDADGEDIPEDEAVCRICLVELCEGGETLKMECSCKGELALAHKDCALKWFTIKGNKTCEVCKQEVKNLPVTLLRIQSLRNSGVPQLDVSGYRVWQEVPVLVIISMLAYFCFLEQLLVENMGTGAIAISLPFSCILGLLASMTASTMVMRRFVWIYASVQFALVVLFAHIFYSVVKLQPVLSVLLSTFAGFGVCICGSSVMVEFVRWRRRWRARRLEQQLNHALTLSQPPQPLDPTTSLHHSNTS

SEQ ID NO: 42083 - DNA, 1685 bp, Arabidopsis thaliana
  misc_feature (1)..(1685): Ceres Seq. ID no. 12370888
  misc_feature (1)..(1685): Ortholog of  Ceres SEQ ID NO 14303627 as cited in SEQ ID NO 62070
  misc_feature (1)..(1685): Ortholog of  Ceres SEQ ID NO 13597546 as cited in SEQ ID NO 65017
  misc_feature (1)..(1685): Ortholog of  Ceres SEQ ID NO 15176077 as cited in SEQ ID NO 66728
  misc_feature (1)..(1685): Ortholog of  Ceres SEQ ID NO 13654353 as cited in SEQ ID NO 68318
gtatgtttttgttccctattatatcttctagcttctttcttcctcttcttccttaaaaattcatcctccaaaacattctatcatcaacgaaacatttcatattaaattaaataataatcgatggctgaaatttggttcttggttgtaccaatcctcatcttatgcttgcttttggtaagagtgattgtttcaaagaagaaaaagaacagtagaggtaagcttcctcctggttccatgggatggccttacttaggagagactctacaactctattcacaaaaccccaatgttttcttcacctccaagcaaaagagatatggagagatattcaaaacccgaatcctcggctatccatgcgtgatgttggctagccctgaggctgcgaggtttgtacttgtgactcatgcccatatgttcaaaccaacttatccgagaagcaaagagaagctgataggaccctctgcactctttttccaccaaggagattatcattcccatataaggaaacttgttcaatcctctttctaccctgaaaccatccgtaaactcatccctgatatcgagcacattgccctttcttccttacaatcttgggccaatatgccgattgtctccacctaccaggagatgaagaagttcgcctttgatgtgggtattctagccatatttggacatttggagagttcttacaaagagatcttgaaacataactacaatattgtggacaaaggctacaactctttccccatgagtctccccggaacatcttatcacaaagctctcatggcgagaaagcagctaaagacgatagtaagcgagattatatgcgaaagaagagagaaaagggccttgcaaacggactttcttggtcatctactcaacttcaagaacgaaaaaggtcgtgtgctaacccaagaacagattgcagacaacatcatcggagtccttttcgccgcacaggacacgacagctagttgcttaacttggattcttaagtacttacatgatgatcagaaacttctagaagctgttaaggctgagcaaaaggctatatatgaagaaaacagtagagagaagaaacctttaacatggagacaaacgaggaatatgccactgacacataaggttatagttgaaagcttgaggatggcaagcatcatatccttcacattcagagaagcagtggttgatgttgaatataagggatatttgatacctaagggatggaaagtgatgccactgtttcggaatattcatcacaatccgaaatatttttcaaaccctgaggttttcgacccatctagattcgaggtaaatccgaagccgaatacattcatgccttttggaagtggagttcatgcttgtcccgggaacgaactcgccaagttacaaattcttatatttctccaccatttagtttccaatttccgatgggaagtgaagggaggagagaaaggaatacagtacagtccatttccaatacctcaaaacggtcttcccgctacatttcgtcgacattctctttagttccttaaacctttgtagtaatctttgttgtagttagccaaatctaatccaaattcgatataaaaaatcccctttctatttttttttaaaatcattgttgtagtcttgagggggtttaacatgtaacaactatgatgaagtaaaatgtcgattccggt

SEQ ID NO: 42084 - protein, 468 aa, Arabidopsis thaliana
  peptide (1)..(468): Ceres Seq. ID no. 12370889
MAEIWFLVVPILILCLLLVRVIVSKKKKNSRGKLPPGSMGWPYLGETLQLYSQNPNVFFTSKQKRYGEIFKTRILGYPCVMLASPEAARFVLVTHAHMFKPTYPRSKEKLIGPSALFFHQGDYHSHIRKLVQSSFYPETIRKLIPDIEHIALSSLQSWANMPIVSTYQEMKKFAFDVGILAIFGHLESSYKEILKHNYNIVDKGYNSFPMSLPGTSYHKALMARKQLKTIVSEIICERREKRALQTDFLGHLLNFKNEKGRVLTQEQIADNIIGVLFAAQDTTASCLTWILKYLHDDQKLLEAVKAEQKAIYEENSREKKPLTWRQTRNMPLTHKVIVESLRMASIISFTFREAVVDVEYKGYLIPKGWKVMPLFRNIHHNPKYFSNPEVFDPSRFEVNPKPNTFMPFGSGVHACPGNELAKLQILIFLHHLVSNFRWEVKGGEKGIQYSPFPIPQNGLPATFRRHSL

SEQ ID NO: 42085 - protein, 430 aa, Arabidopsis thaliana
  peptide (1)..(430): Ceres Seq. ID no. 12370890
MGWPYLGETLQLYSQNPNVFFTSKQKRYGEIFKTRILGYPCVMLASPEAARFVLVTHAHMFKPTYPRSKEKLIGPSALFFHQGDYHSHIRKLVQSSFYPETIRKLIPDIEHIALSSLQSWANMPIVSTYQEMKKFAFDVGILAIFGHLESSYKEILKHNYNIVDKGYNSFPMSLPGTSYHKALMARKQLKTIVSEIICERREKRALQTDFLGHLLNFKNEKGRVLTQEQIADNIIGVLFAAQDTTASCLTWILKYLHDDQKLLEAVKAEQKAIYEENSREKKPLTWRQTRNMPLTHKVIVESLRMASIISFTFREAVVDVEYKGYLIPKGWKVMPLFRNIHHNPKYFSNPEVFDPSRFEVNPKPNTFMPFGSGVHACPGNELAKLQILIFLHHLVSNFRWEVKGGEKGIQYSPFPIPQNGLPATFRRHSL

SEQ ID NO: 42086 - protein, 388 aa, Arabidopsis thaliana
  peptide (1)..(388): Ceres Seq. ID no. 12370891
MLASPEAARFVLVTHAHMFKPTYPRSKEKLIGPSALFFHQGDYHSHIRKLVQSSFYPETIRKLIPDIEHIALSSLQSWANMPIVSTYQEMKKFAFDVGILAIFGHLESSYKEILKHNYNIVDKGYNSFPMSLPGTSYHKALMARKQLKTIVSEIICERREKRALQTDFLGHLLNFKNEKGRVLTQEQIADNIIGVLFAAQDTTASCLTWILKYLHDDQKLLEAVKAEQKAIYEENSREKKPLTWRQTRNMPLTHKVIVESLRMASIISFTFREAVVDVEYKGYLIPKGWKVMPLFRNIHHNPKYFSNPEVFDPSRFEVNPKPNTFMPFGSGVHACPGNELAKLQILIFLHHLVSNFRWEVKGGEKGIQYSPFPIPQNGLPATFRRHSL

SEQ ID NO: 42087 - DNA, 1869 bp, Arabidopsis thaliana
  misc_feature (1)..(1869): Ceres Seq. ID no. 12422975
  misc_feature (1)..(1869): Ortholog of  Ceres SEQ ID NO 13599322 as cited in SEQ ID NO 0
aaattaaaatagaattgagaaaaaaagtttgatcagccatcggaggagaagagagaatgatagataactggatcacgagaagtcacaaatctcaaagaagaagaaagaaaaccaaaatcaagaacaataacaacaattcgcaatgatttgagccaaatctaaaggatggagttgatgaaattgttcttctagatgtttgttttggggatatgaacaaagaagaatctgagtttaatacactatgtggaaacagattctgagtaagcttcctaagaagtcttcttctaagaaccattcttcttcatctagttccacttcaaaaagtagtgataatggcgccggtaaatcgggtaattctcaaaccaagaacgctcctcctgtaaaaccttctgctgattcagggtttaaagaagggaatttgaaaggaaatggtaacggtttcactccatatgaagcattgccaggtttcaaagatgttcctaatgcagagaaacagaacttgtttgtgagaaaactcagcttgtgctgtgttgttttcgatttctcggatccaacgaagaacgttaaggaaaaggatattaagcggcagacattgcttgagcttgtggattatgtagcttctcctaatggaaagtttagtgaaactgtgattcaagaagtggttagaatggtttctgttaacatattcagaaccttgaatcctcaaccgcgcgagaataaagttattgatgcgttagacttggaggaagaagagccttctatggatcctacttggcctcacttgcagcttgtctatgaaattctcctgcggcttattgcttcaccagagacagacaccaagctggctaagaaatacattgaccaatcttttgtctcaaggttacttgatttatttgattcagaggatcctagagaaagagattgtcttaagaccgttctacatcgcatctacggtaaatttatggttcatcgtcctttcataaggaaatccattaataacattttctatcggtttgttttcgagactgagaaacacaatgggattgctgagtttctagagattttgggaagtatcatcaatggatttgctctgccgcttaaagacgagcataaagtgtttttggttagagctttggtacctcttcacaaaccgaaaagcttgcaaatgtatcatcagcaattgtcttattgtatcacacagtttgtggaaaaagattgcaaactcgctgatacggttataaggggactactcaagtcttggcctgtcacaaatagttccaaagaagtcatgtttctaaacgagctagaggaagtattagaagcaactcaaccacctgaattccaacggtgtatggtcccattgtttcgccaagttgctcggtgtttaaacagtctccattttcaggttgcagaaagagctttgttcttatggaacaacgatcatatcgagaatctaataatgcagaaccggaaagttattcttccaatcatattccctgcattagagagaaacactcagaagcattggaaccaagctgttcatagcttgacgttgaatgtgcagaagatatttaatgacattgatgcagagttgtttaaggattgtcttgctaagtttagagaagatgaatcaaaagaagctgaaattggcgcaaaacgtgaggcaacgtggaaacggttggaagaaattggtaatcaaaagaaaaagagttcattgtaagattttttagttgtagagacagaggttttgttctgtattttctcgttttttactacattggaaaattgggtttgtttttcttactctccagaaaaacttcgtgagaaaaaagtttcagattcgttttctttgaagagattgcaaatatt

SEQ ID NO: 42088 - protein, 492 aa, Arabidopsis thaliana
  peptide (1)..(492): Ceres Seq. ID no. 12422976
MWKQILSKLPKKSSSKNHSSSSSSTSKSSDNGAGKSGNSQTKNAPPVKPSADSGFKEGNLKGNGNGFTPYEALPGFKDVPNAEKQNLFVRKLSLCCVVFDFSDPTKNVKEKDIKRQTLLELVDYVASPNGKFSETVIQEVVRMVSVNIFRTLNPQPRENKVIDALDLEEEEPSMDPTWPHLQLVYEILLRLIASPETDTKLAKKYIDQSFVSRLLDLFDSEDPRERDCLKTVLHRIYGKFMVHRPFIRKSINNIFYRFVFETEKHNGIAEFLEILGSIINGFALPLKDEHKVFLVRALVPLHKPKSLQMYHQQLSYCITQFVEKDCKLADTVIRGLLKSWPVTNSSKEVMFLNELEEVLEATQPPEFQRCMVPLFRQVARCLNSLHFQVAERALFLWNNDHIENLIMQNRKVILPIIFPALERNTQKHWNQAVHSLTLNVQKIFNDIDAELFKDCLAKFREDESKEAEIGAKREATWKRLEEIGNQKKKSSL

SEQ ID NO: 42089 - protein, 350 aa, Arabidopsis thaliana
  peptide (1)..(350): Ceres Seq. ID no. 12422977
MVSVNIFRTLNPQPRENKVIDALDLEEEEPSMDPTWPHLQLVYEILLRLIASPETDTKLAKKYIDQSFVSRLLDLFDSEDPRERDCLKTVLHRIYGKFMVHRPFIRKSINNIFYRFVFETEKHNGIAEFLEILGSIINGFALPLKDEHKVFLVRALVPLHKPKSLQMYHQQLSYCITQFVEKDCKLADTVIRGLLKSWPVTNSSKEVMFLNELEEVLEATQPPEFQRCMVPLFRQVARCLNSLHFQVAERALFLWNNDHIENLIMQNRKVILPIIFPALERNTQKHWNQAVHSLTLNVQKIFNDIDAELFKDCLAKFREDESKEAEIGAKREATWKRLEEIGNQKKKSSL

SEQ ID NO: 42090 - protein, 319 aa, Arabidopsis thaliana
  peptide (1)..(319): Ceres Seq. ID no. 12422978
MDPTWPHLQLVYEILLRLIASPETDTKLAKKYIDQSFVSRLLDLFDSEDPRERDCLKTVLHRIYGKFMVHRPFIRKSINNIFYRFVFETEKHNGIAEFLEILGSIINGFALPLKDEHKVFLVRALVPLHKPKSLQMYHQQLSYCITQFVEKDCKLADTVIRGLLKSWPVTNSSKEVMFLNELEEVLEATQPPEFQRCMVPLFRQVARCLNSLHFQVAERALFLWNNDHIENLIMQNRKVILPIIFPALERNTQKHWNQAVHSLTLNVQKIFNDIDAELFKDCLAKFREDESKEAEIGAKREATWKRLEEIGNQKKKSSL

SEQ ID NO: 42091 - DNA, 1508 bp, Arabidopsis thaliana; identical to SEQ ID NO: 30648
  misc_feature (1)..(1508): Ceres Seq. ID no. 12388503
  misc_feature (1)..(1508): Ortholog of  Ceres SEQ ID NO 15178228 as cited in SEQ ID NO 58330
  misc_feature (1)..(1508): Ortholog of  Ceres SEQ ID NO 13596635 as cited in SEQ ID NO 62488

SEQ ID NO: 42092 - protein, 323 aa, Arabidopsis thaliana; identical to SEQ ID NO: 30649
  peptide (1)..(323): Ceres Seq. ID no. 12388504

SEQ ID NO: 42093 - protein, 191 aa, Arabidopsis thaliana; identical to SEQ ID NO: 30650
  peptide (1)..(191): Ceres Seq. ID no. 12388505

SEQ ID NO: 42094 - protein, 170 aa, Arabidopsis thaliana; identical to SEQ ID NO: 30651
  peptide (1)..(170): Ceres Seq. ID no. 12388506

SEQ ID NO: 42095 - DNA, 1102 bp, Arabidopsis thaliana
  misc_feature (1)..(1102): Ceres Seq. ID no. 13497659
  misc_feature (1)..(1102): Ortholog of  Ceres SEQ ID NO 13656486 as cited in SEQ ID NO 69202
gtcgtcacttaaccgagaaagcaaaagagaagaagaagaaggaatcgaaaaatgaggactccgatccacgcggtttcgacatgggtgaggaggcagcctccaaaggtgaaagctttccttgccgtcgtatctggcatggcggctcttgttctcctcaaactcatcgttcacgatcacgacaatctcttcgttgccgccgaagctgttcattctattggaatctctgttcttatctataaactcatgaaggagaagacttgtgctggattgtcattgaaatctcaggagcttacggcgatatttctagctgtgaggctttattgcagttttgtaatggaatatgatatacataccattctggacttggctactttgggaacaactctctgggttatatatatgatccgttttaacctcaaaactacttacatggaggaaaaagacaacttcgctctctattatgtgctggcgccctgtgttgtgctagctgtatggattcatccatcaacgtcacacaatatattgaatagaatatcctggggattctgtgtttacctcgaagctgtttcagtactgccacagttgagagtgatgcagaacacaaagattgtcgaacccttcacggctcattatgtttttgcacttggagtagcaagattttttagctgtgcacactgggttttacagatgatggacacgcacggacgactgcttgtagtgctgggttatggactatggccatcgatggttataatctcagaaatagtccaaacattcatattggcagatttctgttactactacgttaaaagtgttttcggtggccagcttgttctaaggcttccatctggggttgtgtaagttataaaggaaaaaagataagacacattatgacgaaatttgttacacgaagatagatctcagcttggtgtaatctgagtagcctctggttactctcaagttactccctcaggccaagtcctaattctattaactgtgttgtatatttttgtgtgggtcatcatcatagacagtcccttggatattattgacatgattttttccactgcatttgtgctaaattatccttggttcccacggc

SEQ ID NO: 42096 - protein, 269 aa, Arabidopsis thaliana
  peptide (1)..(269): Ceres Seq. ID no. 13497660
MRTPIHAVSTWVRRQPPKVKAFLAVVSGMAALVLLKLIVHDHDNLFVAAEAVHSIGISVLIYKLMKEKTCAGLSLKSQELTAIFLAVRLYCSFVMEYDIHTILDLATLGTTLWVIYMIRFNLKTTYMEEKDNFALYYVLAPCVVLAVWIHPSTSHNILNRISWGFCVYLEAVSVLPQLRVMQNTKIVEPFTAHYVFALGVARFFSCAHWVLQMMDTHGRLLVVLGYGLWPSMVIISEIVQTFILADFCYYYVKSVFGGQLVLRLPSGVV

SEQ ID NO: 42097 - protein, 241 aa, Arabidopsis thaliana
  peptide (1)..(241): Ceres Seq. ID no. 13497661
MAALVLLKLIVHDHDNLFVAAEAVHSIGISVLIYKLMKEKTCAGLSLKSQELTAIFLAVRLYCSFVMEYDIHTILDLATLGTTLWVIYMIRFNLKTTYMEEKDNFALYYVLAPCVVLAVWIHPSTSHNILNRISWGFCVYLEAVSVLPQLRVMQNTKIVEPFTAHYVFALGVARFFSCAHWVLQMMDTHGRLLVVLGYGLWPSMVIISEIVQTFILADFCYYYVKSVFGGQLVLRLPSGVV

SEQ ID NO: 42098 - protein, 205 aa, Arabidopsis thaliana
  peptide (1)..(205): Ceres Seq. ID no. 13497662
MKEKTCAGLSLKSQELTAIFLAVRLYCSFVMEYDIHTILDLATLGTTLWVIYMIRFNLKTTYMEEKDNFALYYVLAPCVVLAVWIHPSTSHNILNRISWGFCVYLEAVSVLPQLRVMQNTKIVEPFTAHYVFALGVARFFSCAHWVLQMMDTHGRLLVVLGYGLWPSMVIISEIVQTFILADFCYYYVKSVFGGQLVLRLPSGVV

SEQ ID NO: 42099 - DNA, 1132 bp, Arabidopsis thaliana
  misc_feature (1)..(1132): Ceres Seq. ID no. 12395551
  misc_feature (1)..(1132): Ortholog of  Ceres SEQ ID NO 13596198 as cited in SEQ ID NO 68488
acaagctttcatgctctgtttcatgttttctctctacacgcttaaatattcaatcttttaatcaaatctgattcaaccgtgtcgtagatttgcttcaatggagtggattcgaggagaaactatcggatacggaactttttctacagtaagtctagcgacgcggtctaataacgattccggcgagtttcctccgttaatggctgtgaaatctgcagactcatacggcgctgcttctctggcaaacgagaaatcagttctagataatctcggagacgattgcaacgagatcgtacggtgtttcggcgaggatcggacggtcgaaaacggtgaagagatgcataatttgttcttggaatacgcttctagaggaagcttagagagttatcttaagaaattagccggtgaaggtgtaccggaatccaccgtgcgtcgccacacaggatcggtgcttagaggtctacgacacatccacgctaacggattcgctcactgtgatttaaaactcgggaatattctgttgttcggtgacggcgccgttaagattgcggattttggattggcgaagagaattggggatttaacggcgttaaattacggtgtgcagattagaggtacgccgttgtacatggcgccggaatctgttaacgataacgagtacggatcagaaggtgacgtgtgggctttaggatgcgtagtagttgagatgtttagtggtaaaacggcatggagtttaaaagaagggtcgaacttcatgtcgttgttgttacgcatcggtgttggtgacgaggttccgatgattcccgaggagttgtcggaacaaggaagagattttttgtcaaagtgtttcgttaaagatcccaaaaagagatggacggctgagatgcttctaaaccatccatttgtaaccgtcgatgttgatcacgacgttttagtcaaagaagaagatttcgttgttaatatgaaaacagaggacgtctcgacatcgccgagatgcccattcgaatttcccgattgggtttcggtttcttccggttcacaaacgatcgattcgccggatgagagagttgctagtttggtgactgatatgatccctgattggtctgttaccaatagctgggtcaccgtacggtga

SEQ ID NO: 42100 - protein, 344 aa, Arabidopsis thaliana
  peptide (1)..(344): Ceres Seq. ID no. 12395552
MEWIRGETIGYGTFSTVSLATRSNNDSGEFPPLMAVKSADSYGAASLANEKSVLDNLGDDCNEIVRCFGEDRTVENGEEMHNLFLEYASRGSLESYLKKLAGEGVPESTVRRHTGSVLRGLRHIHANGFAHCDLKLGNILLFGDGAVKIADFGLAKRIGDLTALNYGVQIRGTPLYMAPESVNDNEYGSEGDVWALGCVVVEMFSGKTAWSLKEGSNFMSLLLRIGVGDEVPMIPEELSEQGRDFLSKCFVKDPKKRWTAEMLLNHPFVTVDVDHDVLVKEEDFVVNMKTEDVSTSPRCPFEFPDWVSVSSGSQTIDSPDERVASLVTDMIPDWSVTNSWVTVR

SEQ ID NO: 42101 - protein, 311 aa, Arabidopsis thaliana
  peptide (1)..(311): Ceres Seq. ID no. 12395553
MAVKSADSYGAASLANEKSVLDNLGDDCNEIVRCFGEDRTVENGEEMHNLFLEYASRGSLESYLKKLAGEGVPESTVRRHTGSVLRGLRHIHANGFAHCDLKLGNILLFGDGAVKIADFGLAKRIGDLTALNYGVQIRGTPLYMAPESVNDNEYGSEGDVWALGCVVVEMFSGKTAWSLKEGSNFMSLLLRIGVGDEVPMIPEELSEQGRDFLSKCFVKDPKKRWTAEMLLNHPFVTVDVDHDVLVKEEDFVVNMKTEDVSTSPRCPFEFPDWVSVSSGSQTIDSPDERVASLVTDMIPDWSVTNSWVTVR

SEQ ID NO: 42102 - protein, 265 aa, Arabidopsis thaliana
  peptide (1)..(265): Ceres Seq. ID no. 12395554
MHNLFLEYASRGSLESYLKKLAGEGVPESTVRRHTGSVLRGLRHIHANGFAHCDLKLGNILLFGDGAVKIADFGLAKRIGDLTALNYGVQIRGTPLYMAPESVNDNEYGSEGDVWALGCVVVEMFSGKTAWSLKEGSNFMSLLLRIGVGDEVPMIPEELSEQGRDFLSKCFVKDPKKRWTAEMLLNHPFVTVDVDHDVLVKEEDFVVNMKTEDVSTSPRCPFEFPDWVSVSSGSQTIDSPDERVASLVTDMIPDWSVTNSWVTVR

SEQ ID NO: 42103 - DNA, 1227 bp, Arabidopsis thaliana; identical to SEQ ID NO: 36064
  misc_feature (1)..(1227): Ceres Seq. ID no. 12334796
  misc_feature (1)..(1227): Ortholog of  Ceres SEQ ID NO 12778054 as cited in SEQ ID NO 63215
  misc_feature (1)..(1227): Ortholog of  Ceres SEQ ID NO 14303185 as cited in SEQ ID NO 67203

SEQ ID NO: 42104 - protein, 290 aa, Arabidopsis thaliana; identical to SEQ ID NO: 36065
  peptide (1)..(290): Ceres Seq. ID no. 12334797

SEQ ID NO: 42105 - DNA, 1110 bp, Arabidopsis thaliana
  misc_feature (1)..(1110): Ceres Seq. ID no. 12327704
  misc_feature (1)..(1110): Ortholog of  Ceres SEQ ID NO 14314312 as cited in SEQ ID NO 57283
aaaaaaatccgatccaacagaaattcttatcctaagcctctttctccaccgcgcacgttagcctcctctctttcccactccgagatggagacgacgccggagactcagtcgaagactcaccgtctaccggcgggaagagaggattggtggagcgaagacgctacggcgacattgatcgaagcttggggagatcgttacgtcaatctcaaccggggaaatctccggcaaaacgattggaaagaagtcgccgacgccgtcaattcaagccacgggaatggccggccaaagaccgatgtacagtgcaaaaaccggatcgatacgttgaagaagaagtacaaaactgaaaaggcgaaacctttatcgaattggtgcttctttgatagactcgatttcttaatcggtccggttatgaagaaatcgtccggtgctgttgttaaatcggcgttgatgaaccctaatttgaatcctactggatctaaatcaactggtagctctctcgatgacgatgatgatgatgatgatgacgacgaagaagatgatgatgatgcgggtgattggggatttgtggtgaggaagcatcgtaaagttgaagatgtagattcgagtgaaggatcagcctttagggagctagcgagatcgattctgaagttaggggaagcgtttgagagaatcgaggggaagaagcaacagatgatgattgaattggagaaacagagaatggaagttgcaaaggagcttgagttacaacgaatgaatatgttgatggagatgcaattggagcttgagaaatctaaacttgggaaacgaagagctgcttcaggtaagaagttgtaggattgtagattgtggaggagttactgatgtgaagcaaggagcaatggttggatctaaagctcatacgatttggagaagatgttattattattgatctttaggttttcttaagttatagcgcgatgctttttttcttcttcttctttttcattctcttttttagcattgtagagttacattggtagtagcaatgcgaattaccaaaagaactctcatagtatctgacatatcaagatgtacttttgtgaagtatcaatgtatgatggtttgtgtacc

SEQ ID NO: 42106 - protein, 277 aa, Arabidopsis thaliana
  peptide (1)..(277): Ceres Seq. ID no. 12327705
KKIRSNRNSYPKPLSPPRTLASSLSHSEMETTPETQSKTHRLPAGREDWWSEDATATLIEAWGDRYVNLNRGNLRQNDWKEVADAVNSSHGNGRPKTDVQCKNRIDTLKKKYKTEKAKPLSNWCFFDRLDFLIGPVMKKSSGAVVKSALMNPNLNPTGSKSTGSSLDDDDDDDDDDEEDDDDAGDWGFVVRKHRKVEDVDSSEGSAFRELARSILKLGEAFERIEGKKQQMMIELEKQRMEVAKELELQRMNMLMEMQLELEKSKLGKRRAASGKKL

SEQ ID NO: 42107 - protein, 249 aa, Arabidopsis thaliana
  peptide (1)..(249): Ceres Seq. ID no. 12327706
METTPETQSKTHRLPAGREDWWSEDATATLIEAWGDRYVNLNRGNLRQNDWKEVADAVNSSHGNGRPKTDVQCKNRIDTLKKKYKTEKAKPLSNWCFFDRLDFLIGPVMKKSSGAVVKSALMNPNLNPTGSKSTGSSLDDDDDDDDDDEEDDDDAGDWGFVVRKHRKVEDVDSSEGSAFRELARSILKLGEAFERIEGKKQQMMIELEKQRMEVAKELELQRMNMLMEMQLELEKSKLGKRRAASGKKL

SEQ ID NO: 42108 - protein, 141 aa, Arabidopsis thaliana
  peptide (1)..(141): Ceres Seq. ID no. 12327707
MKKSSGAVVKSALMNPNLNPTGSKSTGSSLDDDDDDDDDDEEDDDDAGDWGFVVRKHRKVEDVDSSEGSAFRELARSILKLGEAFERIEGKKQQMMIELEKQRMEVAKELELQRMNMLMEMQLELEKSKLGKRRAASGKKL

SEQ ID NO: 42109 - DNA, 1783 bp, Arabidopsis thaliana; identical to SEQ ID NO: 23493
  misc_feature (1)..(1783): Ceres Seq. ID no. 12335228
  misc_feature (1)..(1783): Ortholog of  Ceres SEQ ID NO 13599602 as cited in SEQ ID NO 0

SEQ ID NO: 42110 - protein, 462 aa, Arabidopsis thaliana; identical to SEQ ID NO: 23494
  peptide (1)..(462): Ceres Seq. ID no. 12335229

SEQ ID NO: 42111 - protein, 345 aa, Arabidopsis thaliana; identical to SEQ ID NO: 23495
  peptide (1)..(345): Ceres Seq. ID no. 12335230

SEQ ID NO: 42112 - protein, 295 aa, Arabidopsis thaliana; identical to SEQ ID NO: 23496
  peptide (1)..(295): Ceres Seq. ID no. 12335231

SEQ ID NO: 42113 - DNA, 1552 bp, Arabidopsis thaliana
  misc_feature (1)..(1552): Ceres Seq. ID no. 13645834
  misc_feature (1)..(1552): Ortholog of  Ceres SEQ ID NO 15176349 as cited in SEQ ID NO 58789
actgatgaactttcttctgcacttcttctcattaagcctccttgttaaaataatttgagatggcgataggaaacccagaagtagcaactatggggaaggagaacactgaagccgagtcctctaatggaaacgagtctcagttaagttctgacttaacgaagagtcttgatctggctgaagtgaaggaagacgaaaaggataataaccaagaagaagaagatggactgaaagctgaggcttcaacgaagaagaagaagaagaaaagtaaaagcaagaagaagaagagttctcttcaacagactgatcctccttcaattcctgttcttgagctcttcccttctggagattttcctcaaggtgaaatccaacagtacaatgatgataatttgtggagaacaacatctgaagagaagagagagatggagaggctgcaaaagccgatatataactctcttcgccaagcagcggaagttcatcgtcaagttaggaagtatatgagaagtatattgaagcctggaatgttgatgattgatctctgtgagactttagagaacactgttcgtaagttgatatcagagaatggtcttcaagctggtatcgcctttcctacaggatgttcactgaataatgttgctgctcattggacaccaaactctggagataagactgtccttcagtatgatgatgtgatgaagctggattttggaacacatattgatgggcacattgttgattctgcttttacagttgcgttcaatcctatgtttgatcctcttttagcagcctcgcgtgacgcaacatatactggtatcaaggaagccggggtagatgtccggctctgtgatgttggtgctgcagttcaggaggtcatggagtcttatgaggttgaaatcaatggaaaagtctaccaagtcaaaagtatcagaaacctgaatgggcacagcattggacgctatcagatacacgctgaaaaatcagttcctaatgttagaggaggcgagcagacgaaaatggaagagggtgaattatatgccattgaaacttttggatcaacagggaaaggatatgtaagagaagacttagaatgtagccattacatgaaaaactatgatgtgggtcatgtacctttgaggttaccaagggcaaaacaactccttgccactattaacaagaacttctccacgctagccttctgcagacgttatttggaccgccttggtgaaacaaaatacttgatggctttaaagaatctttgtgattctggcataattgagccatgtcctccagtgtgtgatgtcaaaggaagctatatttctcagtttgagcatacaatcctgttgcgaccaacttgcaaagagattatttccaaaggagacgattattgaaatagtgattttcacagaacttgaagcagttgttcttcttgagtttgtataatagttttggaaggctttttaagtcttgtgctcaaatatttgtatgttcttcgaagatgattctaagtataagagcttaggggatccttcatcaattatagctacatgttagctta

SEQ ID NO: 42114 - protein, 441 aa, Arabidopsis thaliana
  peptide (1)..(441): Ceres Seq. ID no. 13645835
MAIGNPEVATMGKENTEAESSNGNESQLSSDLTKSLDLAEVKEDEKDNNQEEEDGLKAEASTKKKKKKSKSKKKKSSLQQTDPPSIPVLELFPSGDFPQGEIQQYNDDNLWRTTSEEKREMERLQKPIYNSLRQAAEVHRQVRKYMRSILKPGMLMIDLCETLENTVRKLISENGLQAGIAFPTGCSLNNVAAHWTPNSGDKTVLQYDDVMKLDFGTHIDGHIVDSAFTVAFNPMFDPLLAASRDATYTGIKEAGVDVRLCDVGAAVQEVMESYEVEINGKVYQVKSIRNLNGHSIGRYQIHAEKSVPNVRGGEQTKMEEGELYAIETFGSTGKGYVREDLECSHYMKNYDVGHVPLRLPRAKQLLATINKNFSTLAFCRRYLDRLGETKYLMALKNLCDSGIIEPCPPVCDVKGSYISQFEHTILLRPTCKEIISKGDDY

SEQ ID NO: 42115 - protein, 431 aa, Arabidopsis thaliana
  peptide (1)..(431): Ceres Seq. ID no. 13645836
MGKENTEAESSNGNESQLSSDLTKSLDLAEVKEDEKDNNQEEEDGLKAEASTKKKKKKSKSKKKKSSLQQTDPPSIPVLELFPSGDFPQGEIQQYNDDNLWRTTSEEKREMERLQKPIYNSLRQAAEVHRQVRKYMRSILKPGMLMIDLCETLENTVRKLISENGLQAGIAFPTGCSLNNVAAHWTPNSGDKTVLQYDDVMKLDFGTHIDGHIVDSAFTVAFNPMFDPLLAASRDATYTGIKEAGVDVRLCDVGAAVQEVMESYEVEINGKVYQVKSIRNLNGHSIGRYQIHAEKSVPNVRGGEQTKMEEGELYAIETFGSTGKGYVREDLECSHYMKNYDVGHVPLRLPRAKQLLATINKNFSTLAFCRRYLDRLGETKYLMALKNLCDSGIIEPCPPVCDVKGSYISQFEHTILLRPTCKEIISKGDDY

SEQ ID NO: 42116 - protein, 321 aa, Arabidopsis thaliana
  peptide (1)..(321): Ceres Seq. ID no. 13645837
MERLQKPIYNSLRQAAEVHRQVRKYMRSILKPGMLMIDLCETLENTVRKLISENGLQAGIAFPTGCSLNNVAAHWTPNSGDKTVLQYDDVMKLDFGTHIDGHIVDSAFTVAFNPMFDPLLAASRDATYTGIKEAGVDVRLCDVGAAVQEVMESYEVEINGKVYQVKSIRNLNGHSIGRYQIHAEKSVPNVRGGEQTKMEEGELYAIETFGSTGKGYVREDLECSHYMKNYDVGHVPLRLPRAKQLLATINKNFSTLAFCRRYLDRLGETKYLMALKNLCDSGIIEPCPPVCDVKGSYISQFEHTILLRPTCKEIISKGDDY

SEQ ID NO: 42117 - DNA, 2548 bp, Arabidopsis thaliana
  misc_feature (1)..(2548): Ceres Seq. ID no. 12337038
  misc_feature (1)..(2548): Ortholog of  Ceres SEQ ID NO 14307827 as cited in SEQ ID NO 54367
atcatcactctctctctttcgttacagttccctaatcaagcaagttgcatatcacgagctctctcaactctcaatccaatccatctctctctcacgcattttcgtttgtttcttcgttttcctcttttcagattcttctcttcgattcttcacattgataaaacttgtctatggtggttgttacgtcgattgagtagatgaagttcaccggaaaatcaaatttgacggctacattacccgcaactgtcccaaatatcagggctattcatagaaggagagcgcgaaaacccgagcttcactcgtcaacgaagatctggcgtgtctgtcaggaggctaagcaggccggagactcctcaattgaaatcgaaggtggaggatcaaaacattgagcgatgcggcggggttgaagatgatgataacgaggatgatgattgtaataagatgcgttgtcaggaacggagtaggagtgtacggcctgatactgttaggaaacttgctgccggagtgtggcaattgcgagtcccggatgcggtttctagcggcggagataagaggagcaaggatcggttacggtttcaggaaactgctggtcctgctggaaacttgggtcctctgttttattatcaccaccatgatgacaaacattctggctttcaaagcaacaattcaagaaacaagcatagtggattcttgtgtaagcatgagccttcagttccatttccccactgcgcgatggagggagcaacaaaatgggatcccatctgcttggatacaagggatgatgtacaccaaatctatagcaacgtgaagtggaataatcaacaagtgaatgatgtttcattagcttcttctattgaattgaaacttcaggaagctcgtgcttgcatcaaggatcttgagagtgagaagcgatctcagaaaaagaagcttgagcagttcctgaagaaagttagcgaggagagggcagcttggcggagcagagagcatgagaaggtccgagcaattattgatgacatgaaagctgacatgaaccaggaaaagaagactcgtcagagattagaaatcgtcaattcaaaattagtcaatgagcttgcagattcaaagttagcagtaaagcgttacatgcatgattaccaacaggaaaggaaggcaagagaattgatcgaagaagtttgtgatgaactggcaaaggaaatagaagaagataaagctgagattgaagcattgaagagcgaatccatgaatctcagagaggaagtagacgatgaaagaagaatgctgcagatggctgaggtttggcgtgaggaacgtgtccagatgaagcttattgatgccaaagtaacactcgagaacaagtattcacaaatgaacaaactcgtaggagatatggaagccttcctcagttcaagaaatactacaggtgtgaaagaggtgaaagttgcggaattgttaagagaaactgctgcatcagttgataatatccaagaaatcaaggaatttacatatgaaccctcaaagccggacgatatcctcatgttgtttgaacaaatgaacatgggtgaaaaccaggatagagaaatcgagcaatatgttgcctacagtccggtcagccacgcttcaaaagctcacacggtaagtccagatgtcaatttgattaacaaagggagacattcgaatgctttcactgatcagaatggtgaatttgaagaagatgacagtggctgggaaactgtgagccattctgaagaacacggatccagttactctccagatgagagcatccctaatattagcaacactcatcaccgtaacagcaatgtatcgatgaatggaacagagtatgaaaagactctattgagagaaataaaagaagtgtgctcggttccaagacgacaatccaaaaagttaccgtcaatggcaaagctctggagttcattagaaggtatgaatggaagggtatcaaacgcgagaaaatcaaccatggagatggtttcaccagagacaggctcaaacaaaggcggattcaacacattggacctggttggtcaatggagctcatcaccagactcggctaatgctaatttaaatcgaggagggaggaaagggtgcatagagtggccaagaggtgcacataagaacagcttgaagacaaagctcatagaagcacaaatcgagagccaaaaggttcagctgaagcatgtccttgagcataagatctaggccacaacatattccaaaactaccagtcctaggccatactactattctttgtggctgagcagcagaactggatttttgatcccgttctcctgctattgccattgtcgcgtgatctagcgctggtcaagccaatcaacgtggtatattttcgttagctaaaagcaaaatgatctttgtgattgattgctgtcgtagcttggctgggctagctacagccacttaattaccaacaacctcttggttgctaggaacagaggcacaatggtgttttcctttaatgaattttgttcctctttagtccaacgctaggtcaataatatcttctttt

SEQ ID NO: 42118 - protein, 592 aa, Arabidopsis thaliana
  peptide (1)..(592): Ceres Seq. ID no. 12337039
MRCQERSRSVRPDTVRKLAAGVWQLRVPDAVSSGGDKRSKDRLRFQETAGPAGNLGPLFYYHHHDDKHSGFQSNNSRNKHSGFLCKHEPSVPFPHCAMEGATKWDPICLDTRDDVHQIYSNVKWNNQQVNDVSLASSIELKLQEARACIKDLESEKRSQKKKLEQFLKKVSEERAAWRSREHEKVRAIIDDMKADMNQEKKTRQRLEIVNSKLVNELADSKLAVKRYMHDYQQERKARELIEEVCDELAKEIEEDKAEIEALKSESMNLREEVDDERRMLQMAEVWREERVQMKLIDAKVTLENKYSQMNKLVGDMEAFLSSRNTTGVKEVKVAELLRETAASVDNIQEIKEFTYEPSKPDDILMLFEQMNMGENQDREIEQYVAYSPVSHASKAHTVSPDVNLINKGRHSNAFTDQNGEFEEDDSGWETVSHSEEHGSSYSPDESIPNISNTHHRNSNVSMNGTEYEKTLLREIKEVCSVPRRQSKKLPSMAKLWSSLEGMNGRVSNARKSTMEMVSPETGSNKGGFNTLDLVGQWSSSPDSANANLNRGGRKGCIEWPRGAHKNSLKTKLIEAQIESQKVQLKHVLEHKI

SEQ ID NO: 42119 - protein, 495 aa, Arabidopsis thaliana
  peptide (1)..(495): Ceres Seq. ID no. 12337040
MEGATKWDPICLDTRDDVHQIYSNVKWNNQQVNDVSLASSIELKLQEARACIKDLESEKRSQKKKLEQFLKKVSEERAAWRSREHEKVRAIIDDMKADMNQEKKTRQRLEIVNSKLVNELADSKLAVKRYMHDYQQERKARELIEEVCDELAKEIEEDKAEIEALKSESMNLREEVDDERRMLQMAEVWREERVQMKLIDAKVTLENKYSQMNKLVGDMEAFLSSRNTTGVKEVKVAELLRETAASVDNIQEIKEFTYEPSKPDDILMLFEQMNMGENQDREIEQYVAYSPVSHASKAHTVSPDVNLINKGRHSNAFTDQNGEFEEDDSGWETVSHSEEHGSSYSPDESIPNISNTHHRNSNVSMNGTEYEKTLLREIKEVCSVPRRQSKKLPSMAKLWSSLEGMNGRVSNARKSTMEMVSPETGSNKGGFNTLDLVGQWSSSPDSANANLNRGGRKGCIEWPRGAHKNSLKTKLIEAQIESQKVQLKHVLEHKI

SEQ ID NO: 42120 - protein, 401 aa, Arabidopsis thaliana
  peptide (1)..(401): Ceres Seq. ID no. 12337041
MKADMNQEKKTRQRLEIVNSKLVNELADSKLAVKRYMHDYQQERKARELIEEVCDELAKEIEEDKAEIEALKSESMNLREEVDDERRMLQMAEVWREERVQMKLIDAKVTLENKYSQMNKLVGDMEAFLSSRNTTGVKEVKVAELLRETAASVDNIQEIKEFTYEPSKPDDILMLFEQMNMGENQDREIEQYVAYSPVSHASKAHTVSPDVNLINKGRHSNAFTDQNGEFEEDDSGWETVSHSEEHGSSYSPDESIPNISNTHHRNSNVSMNGTEYEKTLLREIKEVCSVPRRQSKKLPSMAKLWSSLEGMNGRVSNARKSTMEMVSPETGSNKGGFNTLDLVGQWSSSPDSANANLNRGGRKGCIEWPRGAHKNSLKTKLIEAQIESQKVQLKHVLEHKI

SEQ ID NO: 42121 - DNA, 1505 bp, Arabidopsis thaliana
  misc_feature (1)..(1505): Ceres Seq. ID no. 12395386
  misc_feature (1)..(1505): Ortholog of  Ceres SEQ ID NO 14308095 as cited in SEQ ID NO 55286
atatcgtcccaaaaaaagcaaaagtccaaaaaaaacaactccaaaacattccctcttagctctttactctttagtttctctctctctctgcctttctctttgttgaagttcatggatgctacgaagtggactcagggttttcaagaaatgataaacgtaaagccaatggagcaaatgatttctagcaccaacaacaacacaccgcaacaacaaccaacattcatcgccaccaacacaaggccaaacgccaccgcatccaatggtggctccggaggaaataccaacaacacggctacgatggaaactagaaaggcgaggccacaagagaaagtaaattgtccaagatgcaactcaacaaacacaaagttctgttattacaacaactacagtctcacgcaaccaagatacttctgcaaaggttgtcgaaggtattggaccgaaggtggctctcttcgtaacgtcccagtcggaggtagctcaagaaagaacaagagatcctctacacctttagcttcaccttctaatcccaaacttccagatctaaacccaccgattcttttctcaagccaaatccctaataagtcaaataaagatctcaacttgctatctttcccggtcatgcaagatcatcatcatcatgctcttgagcttctaagatccaatggagtctcttcaagaggcatgaacacgttcttgcctggtcaaatgatggattcaaactcagtcctgtactcatctttagggtttccaacaatgcctgattacaaacagagtaataacaacctttcattctccattgatcatcatcaagggattggacataacaccatcaacagtaaccaaagagctcaagataacaatgatgacatgaatggagcaagtagggttttgttccctttttcagacatgaaagagctttcaagcacaacccaagagaagagtcatggtaataatacatactggaatgggatgttcagtaatacaggaggatcttcatggtgaaaaaaggttaaaaagagctcatgaactattagctttcttctctttttctgtttttttctcctattttattatagtttttactttgatgatcttttgttttttctcacatggggaactttacttaaagttgtcagaacttagtttacagattgtctttttattccttctttctggttttttttttttttttttcctttttaatcagtctttttaaaatatgtatttcataattgggtttgatcattcatatttattagtatcaaaatagagtctatgttcatgagggagtgtttaggggtgtgagggtagaagaataagtgaatacgagggcttcgtgtggcatcagtgagatctgtattcatcatttcttctatttgtagaagtatttctgtaatttattcatatttttcaaaaaaaaatattcatctttatatccaatcattatccgattgaaattaaaattgtgttaaccctaagcttgaatagattgttttaatttgttg

SEQ ID NO: 42122 - protein, 333 aa, Arabidopsis thaliana
  peptide (1)..(333): Ceres Seq. ID no. 12395387
ISSQKKQKSKKNNSKTFPLSSLLFSFSLSLPFSLLKFMDATKWTQGFQEMINVKPMEQMISSTNNNTPQQQPTFIATNTRPNATASNGGSGGNTNNTATMETRKARPQEKVNCPRCNSTNTKFCYYNNYSLTQPRYFCKGCRRYWTEGGSLRNVPVGGSSRKNKRSSTPLASPSNPKLPDLNPPILFSSQIPNKSNKDLNLLSFPVMQDHHHHALELLRSNGVSSRGMNTFLPGQMMDSNSVLYSSLGFPTMPDYKQSNNNLSFSIDHHQGIGHNTINSNQRAQDNNDDMNGASRVLFPFSDMKELSSTTQEKSHGNNTYWNGMFSNTGGSSW

SEQ ID NO: 42123 - protein, 296 aa, Arabidopsis thaliana
  peptide (1)..(296): Ceres Seq. ID no. 12395388
MDATKWTQGFQEMINVKPMEQMISSTNNNTPQQQPTFIATNTRPNATASNGGSGGNTNNTATMETRKARPQEKVNCPRCNSTNTKFCYYNNYSLTQPRYFCKGCRRYWTEGGSLRNVPVGGSSRKNKRSSTPLASPSNPKLPDLNPPILFSSQIPNKSNKDLNLLSFPVMQDHHHHALELLRSNGVSSRGMNTFLPGQMMDSNSVLYSSLGFPTMPDYKQSNNNLSFSIDHHQGIGHNTINSNQRAQDNNDDMNGASRVLFPFSDMKELSSTTQEKSHGNNTYWNGMFSNTGGSSW

SEQ ID NO: 42124 - protein, 284 aa, Arabidopsis thaliana
  peptide (1)..(284): Ceres Seq. ID no. 12395389
MINVKPMEQMISSTNNNTPQQQPTFIATNTRPNATASNGGSGGNTNNTATMETRKARPQEKVNCPRCNSTNTKFCYYNNYSLTQPRYFCKGCRRYWTEGGSLRNVPVGGSSRKNKRSSTPLASPSNPKLPDLNPPILFSSQIPNKSNKDLNLLSFPVMQDHHHHALELLRSNGVSSRGMNTFLPGQMMDSNSVLYSSLGFPTMPDYKQSNNNLSFSIDHHQGIGHNTINSNQRAQDNNDDMNGASRVLFPFSDMKELSSTTQEKSHGNNTYWNGMFSNTGGSSW

SEQ ID NO: 42125 - DNA, 1249 bp, Arabidopsis thaliana
  misc_feature (1)..(1249): Ceres Seq. ID no. 12361241
  misc_feature (1)..(1249): Ortholog of  Ceres SEQ ID NO 15226049 as cited in SEQ ID NO 55683
  misc_feature (1)..(1249): Ortholog of  Ceres SEQ ID NO 13597225 as cited in SEQ ID NO 63994
atcaaaagtctaagctactctgcaattcatttgccggcgaaaattctcagctaaaaaatggatcaagagtgtccctttgctgccgaaagcataatccagaaatgccctttcctgagaaacatcaacaagcctaccaatttgtccttctcctccttgagttttccaattccggtgcaaggaggtaaaggtcctatttttgaagatggtcctggatttgattcagcattcaagctcttccatgggaaagatggtattgtgccgctttctggtttcgctgatgattctgaagatgaggcgggtcgtcgtgctctgcaattcaatccacttgctggtaaggtagctacaataagcctatcagcttttggtcctggaggcccttttggttttggtcctttctcagagaaatggaagaaacaacagaagaaacctaaaccttccaaaaaccaacagtctggggactcttcgaaacatgaggcagttggagacgaatggttaaaaaccgggaattgtcctatcgccaagtcttttagagctgcaagcaaagtcatgcctcttatttctaaagcattaacgctaccacctggtatgaaatatagatgtccagctcctatagtagctgctagagctgcactttcgaagactgctttggtcaaaagtcttcgccctcagcctttacctgaaaagatgcttgcaatcgctctcatgggaatggctgcaaatgtgcctctaggtgtatggagagaacacacaaagaagttttcgcctgcatggtttttggctgtccatgctgctgtgccttttatagcaatgcttaggaaatctgttctgatgcccaaaacagccatggctttgaccattggagcttcgatcttgggacaggtgattgggtcaagagctgagcgttaccgtctcaaagcagtagctgagaaaatggttcctgtaaccgctatggtttctggatacaaccagagccctggcgactcaggcatttctgggggacattgtggtataggggagggagtgaagcaggtttattacaatgtaaatattggagagtctgctaaatcaactggactctgttattgagagaatgttcttattgatttcagaaactacaaattactatgtaaggattggatatttgtgtgtgagggaaggtttttgtaattcagtgaattgtgtaaaccataacaatggtgtcgttttatcccttcaaaatgggtctaaataaaaggttaataattccctc

SEQ ID NO: 42126 - protein, 342 aa, Arabidopsis thaliana
  peptide (1)..(342): Ceres Seq. ID no. 12361242
MDQECPFAAESIIQKCPFLRNINKPTNLSFSSLSFPIPVQGGKGPIFEDGPGFDSAFKLFHGKDGIVPLSGFADDSEDEAGRRALQFNPLAGKVATISLSAFGPGGPFGFGPFSEKWKKQQKKPKPSKNQQSGDSSKHEAVGDEWLKTGNCPIAKSFRAASKVMPLISKALTLPPGMKYRCPAPIVAARAALSKTALVKSLRPQPLPEKMLAIALMGMAANVPLGVWREHTKKFSPAWFLAVHAAVPFIAMLRKSVLMPKTAMALTIGASILGQVIGSRAERYRLKAVAEKMVPVTAMVSGYNQSPGDSGISGGHCGIGEGVKQVYYNVNIGESAKSTGLCY

SEQ ID NO: 42127 - protein, 179 aa, Arabidopsis thaliana
  peptide (1)..(179): Ceres Seq. ID no. 12361243
MPLISKALTLPPGMKYRCPAPIVAARAALSKTALVKSLRPQPLPEKMLAIALMGMAANVPLGVWREHTKKFSPAWFLAVHAAVPFIAMLRKSVLMPKTAMALTIGASILGQVIGSRAERYRLKAVAEKMVPVTAMVSGYNQSPGDSGISGGHCGIGEGVKQVYYNVNIGESAKSTGLCY

SEQ ID NO: 42128 - DNA, 1016 bp, Arabidopsis thaliana
  misc_feature (1)..(1016): Ceres Seq. ID no. 12482777
  misc_feature (1)..(1016): Ortholog of  Ceres SEQ ID NO 15178816 as cited in SEQ ID NO 405
gttgaatcaaaaataatcagtaacgctttgagtgaagatgatgaatgttgcagtgacagccactccctcgtctctcttgtactctcctctgcttcttccttctcaagggccaaaccggcgaatgcaatggaaaagaaacggaaagagacggttagggacaaaggtggctgtttccggtgttatcacagctggatttgagctgaagccacctccatatcctcttgatgctctggaaccgcatatgagccgggaaaccttggattatcactggggcaaacatcacaaaacttatgtagagaacctgaacaagcaaatcttaggcacggatctagatgcattatccttggaagaagttgtgcttctttcatacaacaaaggcaatatgcttcctgctttcaacaacgctgcacaggcttggaaccacgagttcttctgggagtctatccaacctggaggtggaggaaagccaactggagagctcctcagattaatagaaagagattttgggtctttcgaagagtttttggaaaggttcaagtcggctgcagcttcgaattttggttcgggttggacatggcttgcatataaggcgaatagacttgacgttgcaaatgccgttaatcctctcccaaaggaggaagacaagaaacttgttatagtgaagacgcccaatgcagtaaatccgctcgtatgggattattctccacttctcaccattgatacctgggagcacgcttactatctggattttgagaaccgaagagctgaatacataaatacattcatggaaaagcttgtgtcatgggaaactgtaagcacaaggttggaatccgcaattgctcgagcagtgcaaagagaacaagaaggaacagagacagaagatgaagagaatccagatgatgaagtaccagaggtctatttagatagtgacatcgatgtatctgaggttgactaaaacttgtgaagcaataacattagcatcttaaatgttaattacacagagcaaatttttttgc

SEQ ID NO: 42129 - protein, 305 aa, Arabidopsis thaliana
  peptide (1)..(305): Ceres Seq. ID no. 12482778
MMNVAVTATPSSLLYSPLLLPSQGPNRRMQWKRNGKRRLGTKVAVSGVITAGFELKPPPYPLDALEPHMSRETLDYHWGKHHKTYVENLNKQILGTDLDALSLEEVVLLSYNKGNMLPAFNNAAQAWNHEFFWESIQPGGGGKPTGELLRLIERDFGSFEEFLERFKSAAASNFGSGWTWLAYKANRLDVANAVNPLPKEEDKKLVIVKTPNAVNPLVWDYSPLLTIDTWEHAYYLDFENRRAEYINTFMEKLVSWETVSTRLESAIARAVQREQEGTETEDEENPDDEVPEVYLDSDIDVSEVD

SEQ ID NO: 42130 - protein, 304 aa, Arabidopsis thaliana
  peptide (1)..(304): Ceres Seq. ID no. 12482779
MNVAVTATPSSLLYSPLLLPSQGPNRRMQWKRNGKRRLGTKVAVSGVITAGFELKPPPYPLDALEPHMSRETLDYHWGKHHKTYVENLNKQILGTDLDALSLEEVVLLSYNKGNMLPAFNNAAQAWNHEFFWESIQPGGGGKPTGELLRLIERDFGSFEEFLERFKSAAASNFGSGWTWLAYKANRLDVANAVNPLPKEEDKKLVIVKTPNAVNPLVWDYSPLLTIDTWEHAYYLDFENRRAEYINTFMEKLVSWETVSTRLESAIARAVQREQEGTETEDEENPDDEVPEVYLDSDIDVSEVD

SEQ ID NO: 42131 - protein, 277 aa, Arabidopsis thaliana
  peptide (1)..(277): Ceres Seq. ID no. 12482780
MQWKRNGKRRLGTKVAVSGVITAGFELKPPPYPLDALEPHMSRETLDYHWGKHHKTYVENLNKQILGTDLDALSLEEVVLLSYNKGNMLPAFNNAAQAWNHEFFWESIQPGGGGKPTGELLRLIERDFGSFEEFLERFKSAAASNFGSGWTWLAYKANRLDVANAVNPLPKEEDKKLVIVKTPNAVNPLVWDYSPLLTIDTWEHAYYLDFENRRAEYINTFMEKLVSWETVSTRLESAIARAVQREQEGTETEDEENPDDEVPEVYLDSDIDVSEVD

SEQ ID NO: 42132 - DNA, 1384 bp, Arabidopsis thaliana
  misc_feature (1)..(1384): Ceres Seq. ID no. 12328018
  misc_feature (1)..(1384): Ortholog of  Ceres SEQ ID NO 12364737 as cited in SEQ ID NO 51089
  misc_feature (1)..(1384): Ortholog of  Ceres SEQ ID NO 14306553 as cited in SEQ ID NO 53121
  misc_feature (1)..(1384): Ortholog of  Ceres SEQ ID NO 13595567 as cited in SEQ ID NO 56760
  misc_feature (1)..(1384): Ortholog of  Ceres SEQ ID NO 13655302 as cited in SEQ ID NO 63307
  misc_feature (1)..(1384): Ortholog of  Ceres SEQ ID NO 13597380 as cited in SEQ ID NO 64054
  misc_feature (1)..(1384): Ortholog of  Ceres SEQ ID NO 12625474 as cited in SEQ ID NO 64169
  misc_feature (1)..(1384): Ortholog of  Ceres SEQ ID NO 13597502 as cited in SEQ ID NO 64681
gtccaaattagagaataagtaactcaagaaggagtgaaatcaacacaaaacacaatgatgatcctaaggctggctctagccatcgtcatctccgcctatgcaaccgcacaaccagcctcaacatcgtcgcttgtaacctatatattcggtgactcgctaaccgaagttggtaacaataatttcttgcagtattcgctagcaagagcagactttccatattatggagttgatttctccggtggtaaagctaccggaagattcaccaacggtcgaactatcggcgatatcatatctacgaagctcgggatactatcaccaccaccatatctatcgttatcacaaaacgacgatgcatttctcagtggtataaactacgcatctggaggagctggaattctcaatgaaactggcatttacttcatccaaaggctaactttcaatgatcaaataaattgtttcaagaaaactaaagaagttattagggcgaaaatcggagatggagctgcgaacaagcatataaatgatgccatgtacttcattggtttgggaagcaacgattatgtaaacaatttcttgcagccatttatggcagatgggcagcaatatacacatgacgagtttgtcgaactcttgacctcaaccctacacaatcagcttacgacaatatacaaattaggagcgaggaaggtaatatttcatgggttaggcccattgggctgtatcccatcacagagagtgaagtcaaagacacgcatgtgcctgaaccgtgtcaacgaatgggtattggaattcaattcaagaacgaagaagctattaatagatctcaacaaacgcctccccggagctaaattctctttcgcagacacttatcccgccgttctcgatctcatcaacaatcccactcactacggatttaagatagcaaacacgtcatgttgcaatgtggacacaagtgttggaggtctttgtcttcccaattccaagatgtgtaaaaaccgtcaagactttgtcttctgggacgcatttcatccgtccgattcggctaatcaaatcctagccgatcatcttttctcttctcttctttcttcctcttctccttctcctgctcctaaaccacgttaatagtttagcatttacaaaaataaaaacagttaaccaatttttgttaaattggacctacttgctatatacatgtgtaactaattttatgttcttgatgtaaccatcaggacaaatatgtgtgttttgttacacacaagtattatatattataagataattatggtttgtatgtatcatgaacacattgttatatatacacatatattcgtgtttagtgtttctagacatgtgttataaataaacatctacaccaattttggtc

SEQ ID NO: 42133 - protein, 355 aa, Arabidopsis thaliana
  peptide (1)..(355): Ceres Seq. ID no. 12328019
MMILRLALAIVISAYATAQPASTSSLVTYIFGDSLTEVGNNNFLQYSLARADFPYYGVDFSGGKATGRFTNGRTIGDIISTKLGILSPPPYLSLSQNDDAFLSGINYASGGAGILNETGIYFIQRLTFNDQINCFKKTKEVIRAKIGDGAANKHINDAMYFIGLGSNDYVNNFLQPFMADGQQYTHDEFVELLTSTLHNQLTTIYKLGARKVIFHGLGPLGCIPSQRVKSKTRMCLNRVNEWVLEFNSRTKKLLIDLNKRLPGAKFSFADTYPAVLDLINNPTHYGFKIANTSCCNVDTSVGGLCLPNSKMCKNRQDFVFWDAFHPSDSANQILADHLFSSLLSSSSPSPAPKPR

SEQ ID NO: 42134 - protein, 354 aa, Arabidopsis thaliana
  peptide (1)..(354): Ceres Seq. ID no. 12328020
MILRLALAIVISAYATAQPASTSSLVTYIFGDSLTEVGNNNFLQYSLARADFPYYGVDFSGGKATGRFTNGRTIGDIISTKLGILSPPPYLSLSQNDDAFLSGINYASGGAGILNETGIYFIQRLTFNDQINCFKKTKEVIRAKIGDGAANKHINDAMYFIGLGSNDYVNNFLQPFMADGQQYTHDEFVELLTSTLHNQLTTIYKLGARKVIFHGLGPLGCIPSQRVKSKTRMCLNRVNEWVLEFNSRTKKLLIDLNKRLPGAKFSFADTYPAVLDLINNPTHYGFKIANTSCCNVDTSVGGLCLPNSKMCKNRQDFVFWDAFHPSDSANQILADHLFSSLLSSSSPSPAPKPR

SEQ ID NO: 42135 - protein, 197 aa, Arabidopsis thaliana
  peptide (1)..(197): Ceres Seq. ID no. 12328021
MYFIGLGSNDYVNNFLQPFMADGQQYTHDEFVELLTSTLHNQLTTIYKLGARKVIFHGLGPLGCIPSQRVKSKTRMCLNRVNEWVLEFNSRTKKLLIDLNKRLPGAKFSFADTYPAVLDLINNPTHYGFKIANTSCCNVDTSVGGLCLPNSKMCKNRQDFVFWDAFHPSDSANQILADHLFSSLLSSSSPSPAPKPR

SEQ ID NO: 42136 - DNA, 1325 bp, Arabidopsis thaliana
  misc_feature (1)..(1325): Ceres Seq. ID no. 13488668
  misc_feature (1)..(1325): Ortholog of  Ceres SEQ ID NO 15226198 as cited in SEQ ID NO 62150
cggtatgcctagcgatatttttcaacgccattgacgacgctttatataccactgtgactgttcttttagttttgagtatgttaatgatcgcgaggaaagctttggcctcggcgcatactaaggcgtttcgtttggcaacaagggatgtacattgctttagttccatcttagtgtctcctcctctcgtgtcacttgacttgcctgaaaattggattccttactctgatcctccacctcctgtttcctttgagactgaacagaagactgtggtgatagatggtaatgttatcgctgaggaaatcagaacaaagattattagtgaagtggggaagatgaaaaaggctgttggaaaagtccctggtcttgctgttgttttggttggtgaacaaagagactcgcaaacttatgttcgcaacaaaattaaagcttgtgaagaaactggcattaaatctgttttggctgaattaccagaggattgtactgaaggacagattatcagtgtattgagaaaattcaatgaagacacgtctattcacggaattcttgtgcaacttcctttaccccaacatcttaatgaatcaaaaatcttgaatatggtgagattggagaaagatgttgatgggtttcatccattaaacgtggggaatcttgcaatgagagggagggaaccgctgtttgtatcttgcactcctaagggctgtgtggagttgttgataagaacgggtgttgaaatagcaggaaaaaatgctgtggtcataggcagaagcaacatcgttggactaccaatgtctttattattgcaggcatgacgcgacagtaagcacggtgcatgcgtttacaaaggatccagagcacattactaggaaggcggatatcgttatagcagcagcgggtatacctaatttagttcgtggaagttggcttaagcctggagcagttgtcattgatgttggaacaactccagtcgaggatagtagctgtgagtttggttaccgtcttgtcggggatgtatgttacgaggaagcgttaggtgttgcctcggctatcactcccgtaccgggaggagttggacctatgacgatcaccatgctactatgcaatactttggaggctgctaagcggatcttcctctgagtatggtatctctgtctattactaaatatattttgtaatgttagataggagactccatgctgttcgagttattaacgatctcttttgaattattgtataatagacctggcgattgtgatgccatggtttatcctaactcatcagcatctttagcatcaagttcaactaaacaagtattcatgttttcgttt

SEQ ID NO: 42137 - protein, 268 aa, Arabidopsis thaliana
  peptide (1)..(268): Ceres Seq. ID no. 13488669
VCLAIFFNAIDDALYTTVTVLLVLSMLMIARKALASAHTKAFRLATRDVHCFSSILVSPPLVSLDLPENWIPYSDPPPPVSFETEQKTVVIDGNVIAEEIRTKIISEVGKMKKAVGKVPGLAVVLVGEQRDSQTYVRNKIKACEETGIKSVLAELPEDCTEGQIISVLRKFNEDTSIHGILVQLPLPQHLNESKILNMVRLEKDVDGFHPLNVGNLAMRGREPLFVSCTPKGCVELLIRTGVEIAGKNAVVIGRSNIVGLPMSLLLQA

SEQ ID NO: 42138 - protein, 243 aa, Arabidopsis thaliana
  peptide (1)..(243): Ceres Seq. ID no. 13488670
MLMIARKALASAHTKAFRLATRDVHCFSSILVSPPLVSLDLPENWIPYSDPPPPVSFETEQKTVVIDGNVIAEEIRTKIISEVGKMKKAVGKVPGLAVVLVGEQRDSQTYVRNKIKACEETGIKSVLAELPEDCTEGQIISVLRKFNEDTSIHGILVQLPLPQHLNESKILNMVRLEKDVDGFHPLNVGNLAMRGREPLFVSCTPKGCVELLIRTGVEIAGKNAVVIGRSNIVGLPMSLLLQA

SEQ ID NO: 42139 - protein, 241 aa, Arabidopsis thaliana
  peptide (1)..(241): Ceres Seq. ID no. 13488671
MIARKALASAHTKAFRLATRDVHCFSSILVSPPLVSLDLPENWIPYSDPPPPVSFETEQKTVVIDGNVIAEEIRTKIISEVGKMKKAVGKVPGLAVVLVGEQRDSQTYVRNKIKACEETGIKSVLAELPEDCTEGQIISVLRKFNEDTSIHGILVQLPLPQHLNESKILNMVRLEKDVDGFHPLNVGNLAMRGREPLFVSCTPKGCVELLIRTGVEIAGKNAVVIGRSNIVGLPMSLLLQA

SEQ ID NO: 42140 - DNA, 1185 bp, Arabidopsis thaliana
  misc_feature (1)..(1185): Ceres Seq. ID no. 12328026
  misc_feature (1)..(1185): Ortholog of  Ceres SEQ ID NO 15169419 as cited in SEQ ID NO 58491
  misc_feature (1)..(1185): Ortholog of  Ceres SEQ ID NO 15179026 as cited in SEQ ID NO 0
tctgattaggtaagtatcgttcatggactaaaaatttcagagagaaatgagtgtaattctggattagtggctggatttaatcaaaatatgcaacagtctcctaaggtcagtttcatttccatcaatcaaagagcccaaaagtcaaatataagctaaattatatggttaatatatcttattaaatgtcatggactaaatatagaaattagagtatatatgtatatgtttgttgttgtaggccgagttcaagaaatctgagaataatagatctaagtcagtgtcagagatgaatactaataatgtcgacgatgaggtgatggagcaaggaaaactttggagagatgcagagaagaaatatccatggtatgatgcccctcctaaagtcaaggtgacaacaaaaaagggtctttgccatatgtacatagaattgacatttggattgcctccacgatcagtcttcgagcttttcactaatccagacaacttaccactcttcagtgacaagtcttggcgccaacttctggtaaacaaaaaaaggaaggttttgaagagggatggaccaaggcagatagtggaggtagaaaaagttgtggcctgggatttcctgtggtggtctggaggtatgccaataaatctaattgcggatgaaaatgagaaagatcttagaggaaaatataagaaacagaaaatgaagttcatgaaagtgttcgagggtagctataacgtggagccaatttatgtagactccgaacgcttttgcaagcataaggagccaaagagtccagaagaatacaaaaaatgtagcggtgggcaaggaaagattgcatcaaaagtgacaatggaccaatattttcagccatatcctatttttaatttgccgccgctttcttggtacattcgtaggaccaccatcaagaccaccacgactctgctcaaaatgcttcaagatatgggtgccaagatgcgagtagacccgtacgaaagttctaattagcacaagggtgaattaggagatttgttcctaattgttacggttgtctttgtcgtcgtttctagatttagttttcgtatgtgtatataaagtttggatatacttttcttcgttttttagtttgtataaaatctataccaaaatgactataatgtttgtctctatgtaaatcaataaatttatatgaaaaatgt

SEQ ID NO: 42141 - protein, 235 aa, Arabidopsis thaliana; identical to SEQ ID NO: 27321
  peptide (1)..(235): Ceres Seq. ID no. 12328027

SEQ ID NO: 42142 - protein, 225 aa, Arabidopsis thaliana; identical to SEQ ID NO: 27322
  peptide (1)..(225): Ceres Seq. ID no. 12328028

SEQ ID NO: 42143 - protein, 192 aa, Arabidopsis thaliana
  peptide (1)..(192): Ceres Seq. ID no. 12328029
MYIELTFGLPPRSVFELFTNPDNLPLFSDKSWRQLLVNKKRKVLKRDGPRQIVEVEKVVAWDFLWWSGGMPINLIADENEKDLRGKYKKQKMKFMKVFEGSYNVEPIYVDSERFCKHKEPKSPEEYKKCSGGQGKIASKVTMDQYFQPYPIFNLPPLSWYIRRTTIKTTTTLLKMLQDMGAKMRVDPYESSN

SEQ ID NO: 42144 - DNA, 1645 bp, Arabidopsis thaliana
  misc_feature (1)..(1645): Ceres Seq. ID no. 13497112
  misc_feature (1)..(1645): Ortholog of  Ceres SEQ ID NO 13646595 as cited in SEQ ID NO 20561
  misc_feature (1)..(1645): Ortholog of  Ceres SEQ ID NO 14314636 as cited in SEQ ID NO 56924
  misc_feature (1)..(1645): Ortholog of  Ceres SEQ ID NO 13594345 as cited in SEQ ID NO 58043
  misc_feature (1)..(1645): Ortholog of  Ceres SEQ ID NO 15171614 as cited in SEQ ID NO 60106
  misc_feature (1)..(1645): Ortholog of  Ceres SEQ ID NO 15168421 as cited in SEQ ID NO 60131
  misc_feature (1)..(1645): Ortholog of  Ceres SEQ ID NO 13597574 as cited in SEQ ID NO 64677
  misc_feature (1)..(1645): Ortholog of  Ceres SEQ ID NO 13597843 as cited in SEQ ID NO 64850
  misc_feature (1)..(1645): Ortholog of  Ceres SEQ ID NO 13597678 as cited in SEQ ID NO 65375
  misc_feature (1)..(1645): Ortholog of  Ceres SEQ ID NO 15176787 as cited in SEQ ID NO 66468
  misc_feature (1)..(1645): Ortholog of  Ceres SEQ ID NO 13596180 as cited in SEQ ID NO 67941
  misc_feature (1)..(1645): Ortholog of  Ceres SEQ ID NO 13591190 as cited in SEQ ID NO 68044
  misc_feature (1)..(1645): Ortholog of  Ceres SEQ ID NO 13595961 as cited in SEQ ID NO 68223
aacaaaaaaaaaaaagaaaaaaggagataataatcacaaactacaaaagtagaaagaagaaaaaagaacaaagtatcagttcttgaatatttgcatcaatggaggaatccaaaacacctcacgttgcgatcataccaagtccgggaatgggtcatctcataccactcgtcgagtttgctaaacgactcgtccatcttcacggcctcaccgttaccttcgtcatcgccggcgaaggtccaccatcaaaagctcagagaaccgtcctcgactctctcccttcttcaatctcctccgtctttctccctcctgttgatctcaccgatctctcttcgtccactcgcatcgaatctcggatctccctcaccgtgactcgttcaaacccggagctccggaaagtcttcgactcgttcgtggagggaggtcgtttgccaacggcgctcgtcgtcgatctcttcggtacggacgctttcgacgtggccgtagaatttcacgtgccaccgtatattttctacccaacaacggccaacgtcttgtcgttttttctccatttgcctaaactatacgaaacggtgtcgtgtgagttcagggaattaaccgaaccgcttatgcttcctggatgtgtaccggttgccgggaaagatttccttgacccggcccaagaccggaaagacgatgcatacaaatggcttctccataacaccaagaggtacaaagaagccgaaggtattcttgtgaataccttctttgagctagagccaaatgctataaaggccttgcaagaaccgggtcttgataaaccaccggtttatccggttggaccgttggttaacattggtaagcaagaggctaagcaaaccgaagagtctgaatgtttaaagtggttggataaccagccgctcggttcggttttatatgtgtcctttggtagtggcggtaccctcacatgtgagcagctcaatgagcttgctcttggtcttgcagatagtgagcaacggtttctttgggtcatacgaagtcctagtgggatcgctaattcgtcgtattttgattcacatagccaaacagatccattgacatttttaccaccgggatttttagagcggactaaaaaaagaggttttgtgatccctttttgggctccacaagcccaagtcttggcgcatccatccacgggaggatttttaactcattgtggatggaattcgactctagagagtgtagtaagcggtattccacttatagcatggccattatacgcagaacagaagatgaatgcggttttgttgagtgaagatattcgtgcggcacttaggccgcgtgccggggacgatgggttagttagaagagaagaggtggctagagtggtaaaaggattgatggaaggtgaagaaggcaaaggagtgaggaacaagatgaaggagttgaaggaagcagcttgtagggtgttgaaggatgatgggacttcgacaaaagcacttagtcttgtggccttaaagtggaaagcccacaaaaaagagttagagcaaaatggcaaccactaaatatttgatgttctaatatgatttgtataatcaacggtgggatttgtgcaaatgtgtttctgtatgtatatgtatgttctacttttctttgcttcgtttgtctc

SEQ ID NO: 42145 - protein, 480 aa, Arabidopsis thaliana
  peptide (1)..(480): Ceres Seq. ID no. 13497113
MEESKTPHVAIIPSPGMGHLIPLVEFAKRLVHLHGLTVTFVIAGEGPPSKAQRTVLDSLPSSISSVFLPPVDLTDLSSSTRIESRISLTVTRSNPELRKVFDSFVEGGRLPTALVVDLFGTDAFDVAVEFHVPPYIFYPTTANVLSFFLHLPKLYETVSCEFRELTEPLMLPGCVPVAGKDFLDPAQDRKDDAYKWLLHNTKRYKEAEGILVNTFFELEPNAIKALQEPGLDKPPVYPVGPLVNIGKQEAKQTEESECLKWLDNQPLGSVLYVSFGSGGTLTCEQLNELALGLADSEQRFLWVIRSPSGIANSSYFDSHSQTDPLTFLPPGFLERTKKRGFVIPFWAPQAQVLAHPSTGGFLTHCGWNSTLESVVSGIPLIAWPLYAEQKMNAVLLSEDIRAALRPRAGDDGLVRREEVARVVKGLMEGEEGKGVRNKMKELKEAACRVLKDDGTSTKALSLVALKWKAHKKELEQNGNH

SEQ ID NO: 42146 - protein, 464 aa, Arabidopsis thaliana
  peptide (1)..(464): Ceres Seq. ID no. 13497114
MGHLIPLVEFAKRLVHLHGLTVTFVIAGEGPPSKAQRTVLDSLPSSISSVFLPPVDLTDLSSSTRIESRISLTVTRSNPELRKVFDSFVEGGRLPTALVVDLFGTDAFDVAVEFHVPPYIFYPTTANVLSFFLHLPKLYETVSCEFRELTEPLMLPGCVPVAGKDFLDPAQDRKDDAYKWLLHNTKRYKEAEGILVNTFFELEPNAIKALQEPGLDKPPVYPVGPLVNIGKQEAKQTEESECLKWLDNQPLGSVLYVSFGSGGTLTCEQLNELALGLADSEQRFLWVIRSPSGIANSSYFDSHSQTDPLTFLPPGFLERTKKRGFVIPFWAPQAQVLAHPSTGGFLTHCGWNSTLESVVSGIPLIAWPLYAEQKMNAVLLSEDIRAALRPRAGDDGLVRREEVARVVKGLMEGEEGKGVRNKMKELKEAACRVLKDDGTSTKALSLVALKWKAHKKELEQNGNH

SEQ ID NO: 42147 - protein, 311 aa, Arabidopsis thaliana; identical to SEQ ID NO: 25937
  peptide (1)..(311): Ceres Seq. ID no. 13497115

SEQ ID NO: 42148 - DNA, 2015 bp, Arabidopsis thaliana
  misc_feature (1)..(2015): Ceres Seq. ID no. 12601323
  misc_feature (1)..(2015): Ortholog of  Ceres SEQ ID NO 14302935 as cited in SEQ ID NO 20442
ggtagcggacttgtggctgtaaatttacttgtctcacacttgtctcttctacacgtcttctcttccgaccacacccttcattcaattcaacgtctcctctctggctctctctctcaaatatataaacaccaataatgtctccaatttgagatttttaactgaacccaagtcatgacgaagcttctagagattaatcatattcaaaccctttgttttgccaagggtttttctcctgccagattaaatgttgcaacttcaccttttctgatatctcgtcgtggtggtggtggatattgcagcaatgcttgtatcccttatcggttgaaatttacttgttatgcaacactatctgctgtggtaaaggagcaagcatcagactttagtggaaaagaagcagctttgcttgtagatgagctcagaagcaacttcaactctggcagaacgaagagctacgagtggagaatttctcagcttcaaaacattgctaggatgattgatgagaaggagaaatgcatcaccgaagctttgtatcaagatctttctaagcctgagcttgaagcttttctagctgagatttcgaatacaaaatcatcctgtatgcttgcaatcaaagagttaaagaactggatggctccagaaacggtcaaaacttctgtgacaacatttccctcgtctgcacaaatagtctcagaaccgcttggagttgttttggttatttcagcctggaatttccctttcttattgtctgtcgagccagtcattggagctattgcagctggtaatgcggttgtgctaaaaccttctgaaattgctccagcagcatcttctcttttagcaaagttgtttagtgaatacttggacaatacaacaatcagagttatcgagggaggagtccctgaaacaacggcactactggatcaaaaatgggacaagatctttttcactggtggagcaagagttgctcgcattataatggctgcggctgcgagaaatcttactccagtggttctcgaacttggtgggaagtgcccagctcttgttgattcagatgttaatctacaagtggctgctaggaggatcattgcagggaaatgggcttgtaacagtggacaggcttgcattggtgttgattacgtgatcacaacaaaggattttgcatcaaaattgatagatgctctgaagactgaactggagacattttttgggcaaaacgcattagaatcaaaggacctgtcgcggattgtgaactctttccacttcaaaaggttggaaagtatgttaaaagagaatggagtagccaacaaaattgttcatggtggccgaataaccgaagataaacttaaaatatcaccaacaatactactggatgtgcctgaagcatcttccatgatgcaggaagagatatttggacctttacttcccataattacggtacaaaagattgaagatggctttcaggttatacgttcaaagccaaagcctttagcagcgtatctcttcacaaacaacaaagagttggagaaacaattcgtgcaggacgtatcagcaggaggaattaccatcaatgacactgtcttacacgtgactgtaaaagatctgccatttggtggggttggggagagtgggatcggtgcttaccatgggaaattctcgtatgagacgtttagccataagaaaggagttctttaccggagcttttcaggggacgcggatcttagatatcctccttacacaccaaaaaagaagatggtgcttaaggctttgctctcttcaaacatatttgctgccattttggctttctttgggttctctaaagactcatgatcacatgttataatcactgaacttgctggaatagtacaactgagaaagttgaatatttccatagagaaactaagatcaataaaactatagcctcccctatatatgtaaacagtgaataattttagttacttgaataacaattttacatagttactaggacagctaattatatattgaaaattccttctgct

SEQ ID NO: 42149 - protein, 550 aa, Arabidopsis thaliana
  peptide (1)..(550): Ceres Seq. ID no. 12601324
MTKLLEINHIQTLCFAKGFSPARLNVATSPFLISRRGGGGYCSNACIPYRLKFTCYATLSAVVKEQASDFSGKEAALLVDELRSNFNSGRTKSYEWRISQLQNIARMIDEKEKCITEALYQDLSKPELEAFLAEISNTKSSCMLAIKELKNWMAPETVKTSVTTFPSSAQIVSEPLGVVLVISAWNFPFLLSVEPVIGAIAAGNAVVLKPSEIAPAASSLLAKLFSEYLDNTTIRVIEGGVPETTALLDQKWDKIFFTGGARVARIIMAAAARNLTPVVLELGGKCPALVDSDVNLQVAARRIIAGKWACNSGQACIGVDYVITTKDFASKLIDALKTELETFFGQNALESKDLSRIVNSFHFKRLESMLKENGVANKIVHGGRITEDKLKISPTILLDVPEASSMMQEEIFGPLLPIITVQKIEDGFQVIRSKPKPLAAYLFTNNKELEKQFVQDVSAGGITINDTVLHVTVKDLPFGGVGESGIGAYHGKFSYETFSHKKGVLYRSFSGDADLRYPPYTPKKKMVLKALLSSNIFAAILAFFGFSKDS

SEQ ID NO: 42150 - protein, 444 aa, Arabidopsis thaliana
  peptide (1)..(444): Ceres Seq. ID no. 12601325
MIDEKEKCITEALYQDLSKPELEAFLAEISNTKSSCMLAIKELKNWMAPETVKTSVTTFPSSAQIVSEPLGVVLVISAWNFPFLLSVEPVIGAIAAGNAVVLKPSEIAPAASSLLAKLFSEYLDNTTIRVIEGGVPETTALLDQKWDKIFFTGGARVARIIMAAAARNLTPVVLELGGKCPALVDSDVNLQVAARRIIAGKWACNSGQACIGVDYVITTKDFASKLIDALKTELETFFGQNALESKDLSRIVNSFHFKRLESMLKENGVANKIVHGGRITEDKLKISPTILLDVPEASSMMQEEIFGPLLPIITVQKIEDGFQVIRSKPKPLAAYLFTNNKELEKQFVQDVSAGGITINDTVLHVTVKDLPFGGVGESGIGAYHGKFSYETFSHKKGVLYRSFSGDADLRYPPYTPKKKMVLKALLSSNIFAAILAFFGFSKDS

SEQ ID NO: 42151 - protein, 408 aa, Arabidopsis thaliana
  peptide (1)..(408): Ceres Seq. ID no. 12601326
MLAIKELKNWMAPETVKTSVTTFPSSAQIVSEPLGVVLVISAWNFPFLLSVEPVIGAIAAGNAVVLKPSEIAPAASSLLAKLFSEYLDNTTIRVIEGGVPETTALLDQKWDKIFFTGGARVARIIMAAAARNLTPVVLELGGKCPALVDSDVNLQVAARRIIAGKWACNSGQACIGVDYVITTKDFASKLIDALKTELETFFGQNALESKDLSRIVNSFHFKRLESMLKENGVANKIVHGGRITEDKLKISPTILLDVPEASSMMQEEIFGPLLPIITVQKIEDGFQVIRSKPKPLAAYLFTNNKELEKQFVQDVSAGGITINDTVLHVTVKDLPFGGVGESGIGAYHGKFSYETFSHKKGVLYRSFSGDADLRYPPYTPKKKMVLKALLSSNIFAAILAFFGFSKDS

SEQ ID NO: 42152 - DNA, 824 bp, Arabidopsis thaliana
  misc_feature (1)..(824): Ceres Seq. ID no. 12326290
  misc_feature (1)..(824): Ortholog of  Ceres SEQ ID NO 13596601 as cited in SEQ ID NO 62486
cgctttattcagatctgaagaagaagaagaaacatagttcaagtctctgctaatatgtcttcaacaacaacagattctacagaattgcaaaatctgatcaaactgtttcaaaattgccaaactcatcctcgtcaacattttcctgcaaaatcttcagctgtattagtttgtctataccaagaacaaagagaagacataaaccagctacgcgtaatcttaaccaaacgctcctctactctctcttctcatcctggggaagtagcattgcctggaggaaaaagagaccaagaagataaagatgatatagctactgcgttgagagaagctcgtgaagaaatcggtttagatccttctcttgttacaatcatttctgttcttgaaccatttgttaacaagaagggaatgtcggtagcaccagttatcggttttctacacgataagaaagcgtttaaaccgttaccaaatccagctgaagtggaagagatctttgatgtgccattagagatgttcctcaaggacagaaacaggcgagcagaggaacgagagcatgaaggagagagatatcttcttcaatactttgattactattccgaagataaagagagaagctttatcatatgggcactcactgctggtattctgatcagagttgcctccattgtttatcagagattaccggagtttcaagaacgtaaaccgagtttcttgaatcagcctaactgattcttgacttgatctgattgagaaaattgaaacttttatgtataataagcgatacagattgaatcttctttaaatgtgtttcaagaatctatctttactct

SEQ ID NO: 42153 - protein, 222 aa, Arabidopsis thaliana
  peptide (1)..(222): Ceres Seq. ID no. 12326291
MSSTTTDSTELQNLIKLFQNCQTHPRQHFPAKSSAVLVCLYQEQREDINQLRVILTKRSSTLSSHPGEVALPGGKRDQEDKDDIATALREAREEIGLDPSLVTIISVLEPFVNKKGMSVAPVIGFLHDKKAFKPLPNPAEVEEIFDVPLEMFLKDRNRRAEEREHEGERYLLQYFDYYSEDKERSFIIWALTAGILIRVASIVYQRLPEFQERKPSFLNQPN

SEQ ID NO: 42154 - DNA, 1616 bp, Arabidopsis thaliana; identical to SEQ ID NO: 36446
  misc_feature (1)..(1616): Ceres Seq. ID no. 13493832
  misc_feature (1)..(1616): Ortholog of  Ceres SEQ ID NO 13594128 as cited in SEQ ID NO 58608
  misc_feature (1)..(1616): Ortholog of  Ceres SEQ ID NO 14309682 as cited in SEQ ID NO 58908
  misc_feature (1)..(1616): Ortholog of  Ceres SEQ ID NO 15176122 as cited in SEQ ID NO 62462
  misc_feature (1)..(1616): Ortholog of  Ceres SEQ ID NO 12624849 as cited in SEQ ID NO 62773

SEQ ID NO: 42155 - protein, 468 aa, Arabidopsis thaliana; identical to SEQ ID NO: 36447
  peptide (1)..(468): Ceres Seq. ID no. 13493833

SEQ ID NO: 42156 - protein, 428 aa, Arabidopsis thaliana; identical to SEQ ID NO: 36448
  peptide (1)..(428): Ceres Seq. ID no. 13493834

SEQ ID NO: 42157 - protein, 338 aa, Arabidopsis thaliana; identical to SEQ ID NO: 24106
  peptide (1)..(338): Ceres Seq. ID no. 13493835

SEQ ID NO: 42158 - DNA, 1093 bp, Arabidopsis thaliana
  misc_feature (1)..(1093): Ceres Seq. ID no. 13592776
  misc_feature (1)..(1093): Ortholog of  Ceres SEQ ID NO 14303596 as cited in SEQ ID NO 65356
accgaaagctccacaaaccccattaattaacaaaaaaccaaaagaaggcggcgcaaacaaaagataatgcaaccagagacctcagatcagatgttgtactcgtttcttgccggaaacgaagtcggcggtggagggtactgcgtctccggcgactacatgacgactatgcagagcttatgtgggtcttcgtcgtcgacgtcatcgtattacccactggcgatctccggcatcggagaaacgatggctcaagacagagctttagctgctttgaggaaccacaaagaagctgagagaagaaggagagagaggatcaattctcatctcaacaagcttcgtaacgtactctcttgtaattctaagaccgataaagccacactgctcgccaaagtagttcaacgagtcagagaacttaaacagcaaaccctagagacctccgactccgaccaaacattattaccatcagagaccgacgaaattagtgttctacactttggagactattcaaacgacggtcatataatcttcaaagcctctctatgttgtgaagatagatcagatctcttgccggaccttatggagattctcaagtctcttaacatgaagactctccgagctgagatggtaaccattggtggtcggacaagaagtgttcttgtcgtagctgctgacaaagagatgcacggcgtcgagtctgtgcattttttgcaaaatgctctcaagtcgctgcttgagcggtcaagcaagtcgttgatggaacgtagttctggtggtggaggaggagaacggtcaaagcggcgtcgtgcgctggatcacatcataatggtgtgaaatgatgagaattgagcacactaaaaagtctataattgattaatatatatagggtatgatcataattaacttggttataattaccaaaaccttttttattcctctttaataatatatatgttatatggttttagttactaagtcttgggagtgtaagcaaatgttgtaagtaggtttggtgtgttctttttcttttcttttttttctttttcaagaaaaagaaaaagatctatattatatataaagaatatttgtcatgttattt

SEQ ID NO: 42159 - protein, 253 aa, Arabidopsis thaliana
  peptide (1)..(253): Ceres Seq. ID no. 13592777
MQPETSDQMLYSFLAGNEVGGGGYCVSGDYMTTMQSLCGSSSSTSSYYPLAISGIGETMAQDRALAALRNHKEAERRRRERINSHLNKLRNVLSCNSKTDKATLLAKVVQRVRELKQQTLETSDSDQTLLPSETDEISVLHFGDYSNDGHIIFKASLCCEDRSDLLPDLMEILKSLNMKTLRAEMVTIGGRTRSVLVVAADKEMHGVESVHFLQNALKSLLERSSKSLMERSSGGGGGERSKRRRALDHIIMV

SEQ ID NO: 42160 - protein, 245 aa, Arabidopsis thaliana
  peptide (1)..(245): Ceres Seq. ID no. 13592778
MLYSFLAGNEVGGGGYCVSGDYMTTMQSLCGSSSSTSSYYPLAISGIGETMAQDRALAALRNHKEAERRRRERINSHLNKLRNVLSCNSKTDKATLLAKVVQRVRELKQQTLETSDSDQTLLPSETDEISVLHFGDYSNDGHIIFKASLCCEDRSDLLPDLMEILKSLNMKTLRAEMVTIGGRTRSVLVVAADKEMHGVESVHFLQNALKSLLERSSKSLMERSSGGGGGERSKRRRALDHIIMV

SEQ ID NO: 42161 - protein, 223 aa, Arabidopsis thaliana
  peptide (1)..(223): Ceres Seq. ID no. 13592779
MTTMQSLCGSSSSTSSYYPLAISGIGETMAQDRALAALRNHKEAERRRRERINSHLNKLRNVLSCNSKTDKATLLAKVVQRVRELKQQTLETSDSDQTLLPSETDEISVLHFGDYSNDGHIIFKASLCCEDRSDLLPDLMEILKSLNMKTLRAEMVTIGGRTRSVLVVAADKEMHGVESVHFLQNALKSLLERSSKSLMERSSGGGGGERSKRRRALDHIIMV

SEQ ID NO: 42162 - DNA, 1332 bp, Arabidopsis thaliana
  misc_feature (1)..(1332): Ceres Seq. ID no. 12329037
  misc_feature (1)..(1332): Ortholog of  Ceres SEQ ID NO 14315874 as cited in SEQ ID NO 59983
  misc_feature (1)..(1332): Ortholog of  Ceres SEQ ID NO 13589000 as cited in SEQ ID NO 60876
  misc_feature (1)..(1332): Ortholog of  Ceres SEQ ID NO 14302787 as cited in SEQ ID NO 65398
aacattgttgcgaagaccagactctcagactcagactcgggagatggcagtccactactggacagccctgtttctattgctgtcatgccttttctgtatttcaaatgctagtgctggcgatgctgatccagattacaggacatgtgtttcagaatgtgagataagcggttgtgttggaccactttgctttcctcagtgcaattcttcatccgatggtggtccatggtacatccaagaacctctgtatttacaatggaaaaaatggggttgtcaaggtgattgccgttatcaatgtatggttaatagagagagtgaacgggaaactctcggtcaagccccagtcaagtaccatggtaaatggcccttcaagcgtgtacttgggattcaggagcctgcttctgttgctttctctgtactcaacctagcaatgcatttccatggttggctttcctttttcatcatgatctactataagttacctctgaaacaagataggacagcgtactatgaatacgtcggtttgtggcatatctacggtctcctgtccatgaactcttggttctggagtgctgttttccacagccgggatgttgaccttacagagaggttggactactcatccgcagtagcgattctcggattctcactcatcttagccattttacgaacatttgatattcgggtcgaggctgcaagggtcatggtatccgctccaatactagcttttgtaaccacccacatactctacataaacttctacaaactcgactatggctggaacatgattgtgtgtgtggcaatgggagtctcacagcttttcctatgggcaagatgggccgctgtctcaagccacccttctaattggaaactttgggtggttgtgatagctggaggattagccatgcttctagagatatatgattttcctccatatgaaggctacttcgatgctcactcgatctggcacgctgccacaattcccttaaccattctctggtggagcttcattagagacgatgctgagttcagaacttccagcctcctcaagaaaactaagacgaaggcaaagtgagtctctttgctaagttttacaaggatttttattcgaccatacaagtatgcagacacgagggaaaaacaaaaagtggaaatggatttaaacatcacgaagaaggcagagtcttttgtttaaagctagctggtttatggattcacaggtttcttcagtttttttttttttttttttttttattgttacataaactgtggaatttgctttgagcctttcagtgtttttctttggccttacttttggttaagaaagatttcgat

SEQ ID NO: 42163 - protein, 356 aa, Arabidopsis thaliana
  peptide (1)..(356): Ceres Seq. ID no. 12329038
TLLRRPDSQTQTREMAVHYWTALFLLLSCLFCISNASAGDADPDYRTCVSECEISGCVGPLCFPQCNSSSDGGPWYIQEPLYLQWKKWGCQGDCRYQCMVNRESERETLGQAPVKYHGKWPFKRVLGIQEPASVAFSVLNLAMHFHGWLSFFIMIYYKLPLKQDRTAYYEYVGLWHIYGLLSMNSWFWSAVFHSRDVDLTERLDYSSAVAILGFSLILAILRTFDIRVEAARVMVSAPILAFVTTHILYINFYKLDYGWNMIVCVAMGVSQLFLWARWAAVSSHPSNWKLWVVVIAGGLAMLLEIYDFPPYEGYFDAHSIWHAATIPLTILWWSFIRDDAEFRTSSLLKKTKTKAK

SEQ ID NO: 42164 - protein, 342 aa, Arabidopsis thaliana
  peptide (1)..(342): Ceres Seq. ID no. 12329039
MAVHYWTALFLLLSCLFCISNASAGDADPDYRTCVSECEISGCVGPLCFPQCNSSSDGGPWYIQEPLYLQWKKWGCQGDCRYQCMVNRESERETLGQAPVKYHGKWPFKRVLGIQEPASVAFSVLNLAMHFHGWLSFFIMIYYKLPLKQDRTAYYEYVGLWHIYGLLSMNSWFWSAVFHSRDVDLTERLDYSSAVAILGFSLILAILRTFDIRVEAARVMVSAPILAFVTTHILYINFYKLDYGWNMIVCVAMGVSQLFLWARWAAVSSHPSNWKLWVVVIAGGLAMLLEIYDFPPYEGYFDAHSIWHAATIPLTILWWSFIRDDAEFRTSSLLKKTKTKAK

SEQ ID NO: 42165 - protein, 258 aa, Arabidopsis thaliana
  peptide (1)..(258): Ceres Seq. ID no. 12329040
MVNRESERETLGQAPVKYHGKWPFKRVLGIQEPASVAFSVLNLAMHFHGWLSFFIMIYYKLPLKQDRTAYYEYVGLWHIYGLLSMNSWFWSAVFHSRDVDLTERLDYSSAVAILGFSLILAILRTFDIRVEAARVMVSAPILAFVTTHILYINFYKLDYGWNMIVCVAMGVSQLFLWARWAAVSSHPSNWKLWVVVIAGGLAMLLEIYDFPPYEGYFDAHSIWHAATIPLTILWWSFIRDDAEFRTSSLLKKTKTKAK

SEQ ID NO: 42166 - DNA, 1485 bp, Arabidopsis thaliana
  misc_feature (1)..(1485): Ceres Seq. ID no. 13497269
  misc_feature (1)..(1485): Ortholog of  Ceres SEQ ID NO 14315346 as cited in SEQ ID NO 53970
  misc_feature (1)..(1485): Ortholog of  Ceres SEQ ID NO 13594128 as cited in SEQ ID NO 58608
  misc_feature (1)..(1485): Ortholog of  Ceres SEQ ID NO 14309682 as cited in SEQ ID NO 58908
  misc_feature (1)..(1485): Ortholog of  Ceres SEQ ID NO 15176122 as cited in SEQ ID NO 62462
  misc_feature (1)..(1485): Ortholog of  Ceres SEQ ID NO 12624849 as cited in SEQ ID NO 62773
gaaattgtcctctcagttcctacgcgaagttttcaacagattcgccggagaatcttcgaatcaacggcggagaaatggctctatcacgcctctcatcacgatccaacatcatcactcgtcccttctccgccgccttcagccgattaatctcaacggacacaactccgatcacaatcgagacttcgcttcctttcacagctcacttatgtgatccaccgtcacgctccgtcgaatcatcgagtcaagagcttctcgatttcttcagaaccatggcgttgatgcgacgtatggaaatcgcagccgattcgctttacaaagcgaagctaatccgagggttttgtcatctctacgacggccaagaagctgtagctataggcatggaagctgcgattacaaagaaagacgcgattattactgcttatcgtgatcactgtattttcttaggtcgtggtggttcgcttcatgaggttttctcagagcttatgggaagacaagctggttgttctaaagggaaaggtggatctatgcacttctataagaaggaatcgtcgttttacggtggtcatgggattgttggtgctcaggttccattaggttgtggtattgcttttgctcagaagtataacaaggaagaggctgtcacatttgctttgtatggtgatggtgctgcgaatcagggacagttgtttgaagctttgaatatttctgctctttgggatttgcctgcaattttggtctgcgagaacaatcactatggaatgggaactgctgaatggagagccgctaagagtccatcttactacaagcgtggtgattatgttcctggactcaaggtagatggtatggatgcatttgctgtcaaacaagcttgcaaatttgctaagcagcatgcgttggagaaggggccaataattcttgagatggacacatacaggtaccacggtcactccatgtctgatcctgggagcacataccgtacccgagatgagatatctggtgtgaggcaggaacgggatccaattgagagaataaagaagctggtactatctcatgacctagcaaccgagaaagagcttaaggatatggagaaggaaattagaaaagaagtagatgacgccattgccaaagctaaggattgcccgatgccagagccttctgagctctttaccaatgtgtatgtgaagggatttggcaccgagtcatttggacctgacagaaaagaagtcaaagcttcccttccatgatcatggagctcttgttcgttaaactgccacgtgtcatgagaaagttggctgatagagaaatctatgaatatgaataaagatctgattgtatactctctctctcccccccccccccccttctgagttttaatctctctgtatctttgtttacaaacataaggagaaacatgttattcttgtgaagctttagtagtctcgtgtttaatattcaagcaatcgagttgagatctcattttgtgct

SEQ ID NO: 42167 - protein, 413 aa, Arabidopsis thaliana
  peptide (1)..(413): Ceres Seq. ID no. 13497270
NCPLSSYAKFSTDSPENLRINGGEMALSRLSSRSNIITRPFSAAFSRLISTDTTPITIETSLPFTAHLCDPPSRSVESSSQELLDFFRTMALMRRMEIAADSLYKAKLIRGFCHLYDGQEAVAIGMEAAITKKDAIITAYRDHCIFLGRGGSLHEVFSELMGRQAGCSKGKGGSMHFYKKESSFYGGHGIVGAQVPLGCGIAFAQKYNKEEAVTFALYGDGAANQGQLFEALNISALWDLPAILVCENNHYGMGTAEWRAAKSPSYYKRGDYVPGLKVDGMDAFAVKQACKFAKQHALEKGPIILEMDTYRYHGHSMSDPGSTYRTRDEISGVRQERDPIERIKKLVLSHDLATEKELKDMEKEIRKEVDDAIAKAKDCPMPEPSELFTNVYVKGFGTESFGPDRKEVKASLP

SEQ ID NO: 42168 - protein, 389 aa, Arabidopsis thaliana; identical to SEQ ID NO: 24019
  peptide (1)..(389): Ceres Seq. ID no. 13497271

SEQ ID NO: 42169 - protein, 324 aa, Arabidopsis thaliana; identical to SEQ ID NO: 24020
  peptide (1)..(324): Ceres Seq. ID no. 13497272

SEQ ID NO: 42170 - DNA, 1650 bp, Arabidopsis thaliana
  misc_feature (1)..(1650): Ceres Seq. ID no. 12326297
  misc_feature (1)..(1650): Ortholog of  Ceres SEQ ID NO 15178246 as cited in SEQ ID NO 52038
aatttccacactctaatactatttctcgccgccgcttttgtatcttcttctctctcgctttgctctctcggaattgtttttgcagaaagctctctcatctgaactcagaaaatctccgagttcgtatatcttctccgtttgagcaatggcgttggtcatgcacacatacaagggaaacaaaggtgccaataaggcacttattgctgcagagtatgcgggtgtgaagatcgaggagtccgcagactttcagatgggcgtcactaacaagtcacctgagttccttaagatgaaccctattggaaaggttcctgtgcttgagactcctgaaggtcccatatttgagagcaatgccattgcccgatatgtgagccgtaagaatggtgacaactctttgaatggatcctcccttattgaatacgctcacattgagcaatggatcgatttctcctcattggagattgatgctaacatgttgaagtggtttgctccaagaatgggctatgctcccttctctgccccagctgaggaagcggcaatttctgcattgaagagaggacttgaggctctgaacacacatctcgcctccaacactttccttgttggacactctgtcacccttgctgatattgtcacaatctgcaacttgaacttgggatttgccaccgtgatgaccaagaaatttacctctgcattccctcatgttgagagatacttctggacaatggttaaccagccagaattcaagaaggtgttgggtgatgccaaacaaaccgaagctgtccctccagttcctactaagaaagctccacagcctgctaagcccaaggaggagcccaagaaggcagcccctgtagcagaggcaccaaagcctgctgaggaggaggaagcaccaaagcctaaagccaagaatcctcttgacttgctaccaccaagcccaatggttctcgatgactggaagaggctttactcgaacaccaaatccaacttccgtgaggttgctatcaaaggattctgggacatgtatgacccggaggggtactcactatggttctgtgactataagtacaacgatgagaacatggtctcctttgttacactcaacaaggtaggagggttccttcagcgtatggacttggcacgtaaatactcctttggaaagatgcttatttgcgggtcagagggtcctttcaaggtgaagggtttatggcttttccgtggaccagagatccccaagttcataatggatgaggtgtacgacatggagctgtacgagtggactaaggttgatatctccgatgaagcacagaaggagcgtgttagccagatgattgaagacgctgagccatttgaaggcgaggctcttttggacgccaaatgctttaagtgaaaaggctctttgtatctccgtagaggtttactctgttactcgtgttttgataccttctagagagtccttaccaccttttgaatcgtactcgggtttaagaactagttgcttctcaatgttattttgacagaatattgttcttaaatacattacaacttctagttattgtttttattttgttttttattatccaaactcgtgtgtgtgacattctctctttaaattagttgcttggaagatgcaaagaatctcgtttaatgggg

SEQ ID NO: 42171 - protein, 413 aa, Arabidopsis thaliana
  peptide (1)..(413): Ceres Seq. ID no. 12326298
MALVMHTYKGNKGANKALIAAEYAGVKIEESADFQMGVTNKSPEFLKMNPIGKVPVLETPEGPIFESNAIARYVSRKNGDNSLNGSSLIEYAHIEQWIDFSSLEIDANMLKWFAPRMGYAPFSAPAEEAAISALKRGLEALNTHLASNTFLVGHSVTLADIVTICNLNLGFATVMTKKFTSAFPHVERYFWTMVNQPEFKKVLGDAKQTEAVPPVPTKKAPQPAKPKEEPKKAAPVAEAPKPAEEEEAPKPKAKNPLDLLPPSPMVLDDWKRLYSNTKSNFREVAIKGFWDMYDPEGYSLWFCDYKYNDENMVSFVTLNKVGGFLQRMDLARKYSFGKMLICGSEGPFKVKGLWLFRGPEIPKFIMDEVYDMELYEWTKVDISDEAQKERVSQMIEDAEPFEGEALLDAKCFK

SEQ ID NO: 42172 - protein, 409 aa, Arabidopsis thaliana
  peptide (1)..(409): Ceres Seq. ID no. 12326299
MHTYKGNKGANKALIAAEYAGVKIEESADFQMGVTNKSPEFLKMNPIGKVPVLETPEGPIFESNAIARYVSRKNGDNSLNGSSLIEYAHIEQWIDFSSLEIDANMLKWFAPRMGYAPFSAPAEEAAISALKRGLEALNTHLASNTFLVGHSVTLADIVTICNLNLGFATVMTKKFTSAFPHVERYFWTMVNQPEFKKVLGDAKQTEAVPPVPTKKAPQPAKPKEEPKKAAPVAEAPKPAEEEEAPKPKAKNPLDLLPPSPMVLDDWKRLYSNTKSNFREVAIKGFWDMYDPEGYSLWFCDYKYNDENMVSFVTLNKVGGFLQRMDLARKYSFGKMLICGSEGPFKVKGLWLFRGPEIPKFIMDEVYDMELYEWTKVDISDEAQKERVSQMIEDAEPFEGEALLDAKCFK

SEQ ID NO: 42173 - protein, 378 aa, Arabidopsis thaliana
  peptide (1)..(378): Ceres Seq. ID no. 12326300
MGVTNKSPEFLKMNPIGKVPVLETPEGPIFESNAIARYVSRKNGDNSLNGSSLIEYAHIEQWIDFSSLEIDANMLKWFAPRMGYAPFSAPAEEAAISALKRGLEALNTHLASNTFLVGHSVTLADIVTICNLNLGFATVMTKKFTSAFPHVERYFWTMVNQPEFKKVLGDAKQTEAVPPVPTKKAPQPAKPKEEPKKAAPVAEAPKPAEEEEAPKPKAKNPLDLLPPSPMVLDDWKRLYSNTKSNFREVAIKGFWDMYDPEGYSLWFCDYKYNDENMVSFVTLNKVGGFLQRMDLARKYSFGKMLICGSEGPFKVKGLWLFRGPEIPKFIMDEVYDMELYEWTKVDISDEAQKERVSQMIEDAEPFEGEALLDAKCFK

SEQ ID NO: 42174 - DNA, 1387 bp, Arabidopsis thaliana
  misc_feature (1)..(1387): Ceres Seq. ID no. 12328902
  misc_feature (1)..(1387): Ortholog of  Ceres SEQ ID NO 14304842 as cited in SEQ ID NO 54198
  misc_feature (1)..(1387): Ortholog of  Ceres SEQ ID NO 14308683 as cited in SEQ ID NO 58723
agattaaaaacctcagctcgcaggaaagaaatcagcgaatttgtgaacttcagagaaaaattggtcgtcaatggcgtctgctctatgtagaactgcaagccgtcttcgttccgttcaactttttcgtcggattcgcgtctccagcgatctactatcggcatcgtctccttctccggcgtgcatctccgacgcgcttcgtcatggagatttctctcttcctcgatcgtttttttcacttaactgtggaatcgaaatgctgaaaatggatcagagatgtttgctgagtacttctgcttctgatactacctcgaaacatgactcaggtaaaccggaaacaaaatcttcggagaaaaatgagaaatctggaggatcggagagttctgatggtggttcagatcataaaaacgagcgtgcttctggaaaagacgttcgtggagggccggtttcatggatgagctttttcttgctgtttgctactggagctggattggtctactattatgacacacaaaagaaacgtcatatcgaagatataaataagaactctatagccgtcaaggaggggccatctgctggaaaagcagccattggaggaccattcagccttataagagacgatgggaaacgtgtgacggagaaaaacttgatgggaaaatggaccattttatactttggtttcactcattgtcccgatatctgtcctgacgaacttattaagttagctgctgccattgacaaaataaaggaaaattcgggagtagacgtggtgccagtgtttatctctgtggaccctgaaagagacacagttcagcaagtacatgaatatgtcaaagaatttcacccgaaattgatcgggttaactgggagccctgaagaaatcaaatcggtggcccgatcttaccgggtttactacatgaagaccgaagaggaagattcagactatctcgttgatcactctatagtcatgtacttgatgagtccggagatgaattttgtgaaattctacgggaagaatcacgatgttgactcgttgacagacggcgttgtaaaagagatccgtcagtaccggaagtaaagaaccttcgaagtacacttaggtgattaatatacattattcccatttttggaagctcatcattaataaggatttctcagaacacggagctgcttgtgtttccttgaaaaaacatcagtttttgttgtggccgagcatgcacacaacggtagtatccatactataagggcattaagggatcaattgagattattccgattacccgtgtcccataaattgatcacacttcttcgtatagaattttaaggcctaaattatcggcagtgcttaaatgtcgaactaagaggcagtgcttaattacccgttattgct

SEQ ID NO: 42175 - protein, 334 aa, Arabidopsis thaliana
  peptide (1)..(334): Ceres Seq. ID no. 12328903
MASALCRTASRLRSVQLFRRIRVSSDLLSASSPSPACISDALRHGDFSLPRSFFSLNCGIEMLKMDQRCLLSTSASDTTSKHDSGKPETKSSEKNEKSGGSESSDGGSDHKNERASGKDVRGGPVSWMSFFLLFATGAGLVYYYDTQKKRHIEDINKNSIAVKEGPSAGKAAIGGPFSLIRDDGKRVTEKNLMGKWTILYFGFTHCPDICPDELIKLAAAIDKIKENSGVDVVPVFISVDPERDTVQQVHEYVKEFHPKLIGLTGSPEEIKSVARSYRVYYMKTEEEDSDYLVDHSIVMYLMSPEMNFVKFYGKNHDVDSLTDGVVKEIRQYRK

SEQ ID NO: 42176 - protein, 273 aa, Arabidopsis thaliana
  peptide (1)..(273): Ceres Seq. ID no. 12328904
MLKMDQRCLLSTSASDTTSKHDSGKPETKSSEKNEKSGGSESSDGGSDHKNERASGKDVRGGPVSWMSFFLLFATGAGLVYYYDTQKKRHIEDINKNSIAVKEGPSAGKAAIGGPFSLIRDDGKRVTEKNLMGKWTILYFGFTHCPDICPDELIKLAAAIDKIKENSGVDVVPVFISVDPERDTVQQVHEYVKEFHPKLIGLTGSPEEIKSVARSYRVYYMKTEEEDSDYLVDHSIVMYLMSPEMNFVKFYGKNHDVDSLTDGVVKEIRQYRK

SEQ ID NO: 42177 - protein, 270 aa, Arabidopsis thaliana
  peptide (1)..(270): Ceres Seq. ID no. 12328905
MDQRCLLSTSASDTTSKHDSGKPETKSSEKNEKSGGSESSDGGSDHKNERASGKDVRGGPVSWMSFFLLFATGAGLVYYYDTQKKRHIEDINKNSIAVKEGPSAGKAAIGGPFSLIRDDGKRVTEKNLMGKWTILYFGFTHCPDICPDELIKLAAAIDKIKENSGVDVVPVFISVDPERDTVQQVHEYVKEFHPKLIGLTGSPEEIKSVARSYRVYYMKTEEEDSDYLVDHSIVMYLMSPEMNFVKFYGKNHDVDSLTDGVVKEIRQYRK

SEQ ID NO: 42178 - DNA, 1057 bp, Arabidopsis thaliana
  misc_feature (1)..(1057): Ceres Seq. ID no. 12395778
  misc_feature (1)..(1057): Ortholog of  Ceres SEQ ID NO 13659044 as cited in SEQ ID NO 66526
gattcccgatagttacccgccgactctctgctccggcgccgcgaattaggttttatcattctacgatccgatttgctcatttccgaagattcacaacggcttctccttcaatgagccagcagactggcgaaatcgatgccgtcgtcgatgcttcgtcggcggagaaacccgacgacgtcgtggtgcaatacgttgtgcttcgacgagatctaatcgattcgtggccacttgggagcgttgtaacacaaggatgtcatgcgtcagtggcagcgatctggtcgttcaaagacgatccggtcacgcttcagtactgtgatccgcagcacattgattctatgcataaggtgactctggaagttaaaggggaaacgcagatgatgaatttgtcagagaagctgaaattaggaggaatctctcataagctatggatggagcagccggagaatattccgacgtgtattgctacaaagccttatcctaaatcccaagtctcttctttcttcaaaaagctcaagctttgcaagtgatcattcttgttctccaaaatcccaatttcttaaaattctcattttcataatcatgattcatacatatacagagaaatcataaaagagaagacatgttcttttctttttcttacaaacgtttagaaacacgatacacaaagcaagtcagagatttggatatatgtacatatagaaatgatctcgtatgaggtgggagttttgttttcagccatggacgatgagtcgtttgccgcaagtggaacagagatgacgacgtttggatttattagagagaggaacgaagcagaatctccactggctatttacgtcaaccacttgaaccgctcctccgcagtacggacacgctccaggagctgcgtaccttccgatcaccctctcgtcctgatcacacacgaacaccaaacacatccttcttcttcttctcttctagacaatgaaaacaaatggaaccgttcttagttttttgtttccgcgttaaaaagggttgtagttttgatgatatttataaggatgagattgagactccatgg

SEQ ID NO: 42179 - protein, 174 aa, Arabidopsis thaliana
  peptide (1)..(174): Ceres Seq. ID no. 12395779
FPIVTRRLSAPAPRIRFYHSTIRFAHFRRFTTASPSMSQQTGEIDAVVDASSAEKPDDVVVQYVVLRRDLIDSWPLGSVVTQGCHASVAAIWSFKDDPVTLQYCDPQHIDSMHKVTLEVKGETQMMNLSEKLKLGGISHKLWMEQPENIPTCIATKPYPKSQVSSFFKKLKLCK

SEQ ID NO: 42180 - protein, 138 aa, Arabidopsis thaliana
  peptide (1)..(138): Ceres Seq. ID no. 12395780
MSQQTGEIDAVVDASSAEKPDDVVVQYVVLRRDLIDSWPLGSVVTQGCHASVAAIWSFKDDPVTLQYCDPQHIDSMHKVTLEVKGETQMMNLSEKLKLGGISHKLWMEQPENIPTCIATKPYPKSQVSSFFKKLKLCK

SEQ ID NO: 42181 - protein, 94 aa, Arabidopsis thaliana
  peptide (1)..(94): Ceres Seq. ID no. 12395781
MISYEVGVLFSAMDDESFAASGTEMTTFGFIRERNEAESPLAIYVNHLNRSSAVRTRSRSCVPSDHPLVLITHEHQTHPSSSSLLDNENKWNRS

SEQ ID NO: 42182 - DNA, 1222 bp, Arabidopsis thaliana
  misc_feature (1)..(1222): Ceres Seq. ID no. 12328906
  misc_feature (1)..(1222): Ortholog of  Ceres SEQ ID NO 14307280 as cited in SEQ ID NO 59443
  misc_feature (1)..(1222): Ortholog of  Ceres SEQ ID NO 14316536 as cited in SEQ ID NO 60272
  misc_feature (1)..(1222): Ortholog of  Ceres SEQ ID NO 13598570 as cited in SEQ ID NO 65434
  misc_feature (1)..(1222): Ortholog of  Ceres SEQ ID NO 13660333 as cited in SEQ ID NO 67464
  misc_feature (1)..(1222): Ortholog of  Ceres SEQ ID NO 13596238 as cited in SEQ ID NO 68834
acaatggtcacattgatagacgaagaaaaagacaaaaaaaaatcaaccatggtttcgaaaccgctattctccctattgcttctcacggttgcattggttgtgtttcaaaccggaacccttgtcaacgctgaagattccgagccttcgagttcaacgagaaagcctctggtgaagattgtgaaaggtaaaaaattatgcgacaaaggatgggaatgcaaaggatggtccgagtattgttgcaaccatacaatctccgatttttttgagacatatcaattcgagaatctattctctaagcgtaacagtccagtggctcacgccgtcggcttttgggattaccgatcattcattactgcggctgccgagtaccagcctcttggtttcggtactgctggtgagaaacttcaagggatgaaggaagtcgctgcgtttcttggccacgttgggagcaaaacctcatgcgggtacggggttgcaacaggcggaccattagcttggggattgtgttacaacaaggagatgagtcctgatcagctttattgcgatgattactacaaattgacatatccttgtactcctggtgtctcgtaccacggtcgaggagctttaccggtttactggaattacaattatggtcaaaccggggaggctttgaaagtggatctactgagtcatccagagtatctcgagaacaatgctacgttagcgtttcaagcggcgatttggcggtggatgacgccaccgaagaagcatttaccgtcggcgcacgatgttttcgtcggaaaatggaagccaacaaagaatgacactgctgcaaaacgaactccggggtttggagccaccataaacgttctttacggcgatcaaatctgcaacagcggattcgataacgatgagatgaacaacattgtttctcattatttgtattatcttgatctgataggtgttggacgagaagaagctggtcctcacgagaagctgtcatgcgcagatcaagaacctttctcttcttcctcctctgctcctccgagttctggttcctcttcttgagtgaaagttttataacctctggttcggtgacttttgaaaaagaaagttgactttggtgtatatgtgttttgcatgggcttggttttaatattttgtaaaaatatacgtacgaacgattgcaatattttccacaccattttcttttcaaaaaatataaatatatattgcatgc

SEQ ID NO: 42183 - protein, 349 aa, Arabidopsis thaliana
  peptide (1)..(349): Ceres Seq. ID no. 12328907
TMVTLIDEEKDKKKSTMVSKPLFSLLLLTVALVVFQTGTLVNAEDSEPSSSTRKPLVKIVKGKKLCDKGWECKGWSEYCCNHTISDFFETYQFENLFSKRNSPVAHAVGFWDYRSFITAAAEYQPLGFGTAGEKLQGMKEVAAFLGHVGSKTSCGYGVATGGPLAWGLCYNKEMSPDQLYCDDYYKLTYPCTPGVSYHGRGALPVYWNYNYGQTGEALKVDLLSHPEYLENNATLAFQAAIWRWMTPPKKHLPSAHDVFVGKWKPTKNDTAAKRTPGFGATINVLYGDQICNSGFDNDEMNNIVSHYLYYLDLIGVGREEAGPHEKLSCADQEPFSSSSSAPPSSGSSS

SEQ ID NO: 42184 - protein, 348 aa, Arabidopsis thaliana
  peptide (1)..(348): Ceres Seq. ID no. 12328908
MVTLIDEEKDKKKSTMVSKPLFSLLLLTVALVVFQTGTLVNAEDSEPSSSTRKPLVKIVKGKKLCDKGWECKGWSEYCCNHTISDFFETYQFENLFSKRNSPVAHAVGFWDYRSFITAAAEYQPLGFGTAGEKLQGMKEVAAFLGHVGSKTSCGYGVATGGPLAWGLCYNKEMSPDQLYCDDYYKLTYPCTPGVSYHGRGALPVYWNYNYGQTGEALKVDLLSHPEYLENNATLAFQAAIWRWMTPPKKHLPSAHDVFVGKWKPTKNDTAAKRTPGFGATINVLYGDQICNSGFDNDEMNNIVSHYLYYLDLIGVGREEAGPHEKLSCADQEPFSSSSSAPPSSGSSS

SEQ ID NO: 42185 - protein, 333 aa, Arabidopsis thaliana
  peptide (1)..(333): Ceres Seq. ID no. 12328909
MVSKPLFSLLLLTVALVVFQTGTLVNAEDSEPSSSTRKPLVKIVKGKKLCDKGWECKGWSEYCCNHTISDFFETYQFENLFSKRNSPVAHAVGFWDYRSFITAAAEYQPLGFGTAGEKLQGMKEVAAFLGHVGSKTSCGYGVATGGPLAWGLCYNKEMSPDQLYCDDYYKLTYPCTPGVSYHGRGALPVYWNYNYGQTGEALKVDLLSHPEYLENNATLAFQAAIWRWMTPPKKHLPSAHDVFVGKWKPTKNDTAAKRTPGFGATINVLYGDQICNSGFDNDEMNNIVSHYLYYLDLIGVGREEAGPHEKLSCADQEPFSSSSSAPPSSGSSS

SEQ ID NO: 42186 - DNA, 1270 bp, Arabidopsis thaliana
  misc_feature (1)..(1270): Ceres Seq. ID no. 12328910
  misc_feature (1)..(1270): Ortholog of  Ceres SEQ ID NO 14303405 as cited in SEQ ID NO 54555
cttttgatccaagtttggttgcccagaaatatcaaagaaaaaaaaacaaagctttgttgtttctggcagtagaatcattcatggctttctttgcgtgttaaacattcactaacctaaaaactaaaacttcgttttcagcaatcatgagattcaacaagggaactaaagtcgaagtgttgagcaaatcatcggttccatctggcgcctggcggtctgcagagatcatatcaggaaatgggcattactacactgtcatgtatgatcataatgatggtacagagagggtaccgaggaagagtatgaggcctgagcctcctcgtttacaagttcttgatgcttggtgtcctggtgacattcttgaggttttccaaagttgttcgtggaagatggcaatcgtttccaaggttttaggaaacggttgtttcttggttagattacttggttcctcactgaagttcaaggtgactaaatccgatattcgggttagacaatcttggcaagataacgagtggatcatgattggacagggtacatcaagattaagcgcacagacttcaacaggagaactaaggagaaaggtgaatccgaaaggcgactacatttcatctgagagcaaagacaagcttgatgagtctgatgtacctttgtcagtaggtctaaagaaacggacttactctttggttgaacctcacaatcaaactagagctttagctgcttatcctccaaggtttcgtgaagaagtgaaagaagaagaagaagatagagagagtgttgcttcttctgttggtagttgttgcatggatactgatggtctcagtgctgtttcattcaatcccattgaaaccggtaactctagtgacacagagtcatcgtcttgtggctacgggaaggtcaagaagttggtggttccaagaaaaggctcagaggctgctgatgttcataggttagagctggatgcataccgaagcagtatcgagagattgcacgcatccggaccaatcataacatgggaacaagaaacgtggattacaaatctccgtctcaaattgaacatttcgaatgaggaacatctgatgcagataagaaaccttatctctgacgataacagtactatatacagatagcagcagcagcagcattgagaactacagtttgtgttacatagaataaaaactgagtgtagattgtacaaatgtcattttatttttcattcaggtttttttatttaattccaaacttgtgaaagaaaatttgatcatctttactcttc

SEQ ID NO: 42187 - protein, 326 aa, Arabidopsis thaliana
  peptide (1)..(326): Ceres Seq. ID no. 12328911
MRFNKGTKVEVLSKSSVPSGAWRSAEIISGNGHYYTVMYDHNDGTERVPRKSMRPEPPRLQVLDAWCPGDILEVFQSCSWKMAIVSKVLGNGCFLVRLLGSSLKFKVTKSDIRVRQSWQDNEWIMIGQGTSRLSAQTSTGELRRKVNPKGDYISSESKDKLDESDVPLSVGLKKRTYSLVEPHNQTRALAAYPPRFREEVKEEEEDRESVASSVGSCCMDTDGLSAVSFNPIETGNSSDTESSSCGYGKVKKLVVPRKGSEAADVHRLELDAYRSSIERLHASGPIITWEQETWITNLRLKLNISNEEHLMQIRNLISDDNSTIYR

SEQ ID NO: 42188 - protein, 289 aa, Arabidopsis thaliana
  peptide (1)..(289): Ceres Seq. ID no. 12328912
MYDHNDGTERVPRKSMRPEPPRLQVLDAWCPGDILEVFQSCSWKMAIVSKVLGNGCFLVRLLGSSLKFKVTKSDIRVRQSWQDNEWIMIGQGTSRLSAQTSTGELRRKVNPKGDYISSESKDKLDESDVPLSVGLKKRTYSLVEPHNQTRALAAYPPRFREEVKEEEEDRESVASSVGSCCMDTDGLSAVSFNPIETGNSSDTESSSCGYGKVKKLVVPRKGSEAADVHRLELDAYRSSIERLHASGPIITWEQETWITNLRLKLNISNEEHLMQIRNLISDDNSTIYR

SEQ ID NO: 42189 - protein, 274 aa, Arabidopsis thaliana
  peptide (1)..(274): Ceres Seq. ID no. 12328913
MRPEPPRLQVLDAWCPGDILEVFQSCSWKMAIVSKVLGNGCFLVRLLGSSLKFKVTKSDIRVRQSWQDNEWIMIGQGTSRLSAQTSTGELRRKVNPKGDYISSESKDKLDESDVPLSVGLKKRTYSLVEPHNQTRALAAYPPRFREEVKEEEEDRESVASSVGSCCMDTDGLSAVSFNPIETGNSSDTESSSCGYGKVKKLVVPRKGSEAADVHRLELDAYRSSIERLHASGPIITWEQETWITNLRLKLNISNEEHLMQIRNLISDDNSTIYR

SEQ ID NO: 42190 - DNA, 1464 bp, Arabidopsis thaliana
  misc_feature (1)..(1464): Ceres Seq. ID no. 13488192
  misc_feature (1)..(1464): Ortholog of  Ceres SEQ ID NO 15176423 as cited in SEQ ID NO 53228
tgaagggaaacaaaaataaattcctcgagagatagaagtaaaaaaaaaagaaggggattttcgcatttgccctgagcgaaagagagagaatgtatttgacgagttccaggagaaatcagagctagagaaatctagtggtaatggggagagaacttgtagacaaacacatggataagaaagcgaatagtttgacagctagctcgacgggatcttcagatgataataaagtcccaagtccgtctactaatgaagctgcagaggtgaaagaatgcaccgagcagaatttggttgcggatgatgctcgtttgaggcaacaagggataactgagacacctggatcccataaatcttctgttaaacctcgtgttactgcgaaaacaactgttccaaagccgttttccctgtcggctgaaaagcctagaagagcagcggttgataataattcattaggaaatggtgctagccataactcttcttcagcatcaagagtttcacagctaaactctcctttaccaactaggaggataccagatcataagatgcaccatgatgaagaagatagtttttctgttgcttcctcatcagctacatccataagaagttttaaacccaagataacgattggagttgctccaacatttagtagcacatcgcgactggagagacgaagagagttttaccagaagttagaggaaaaacagaaagcacttgaagcagagaaaagagaaaacgagaaaaggcttaaggaagagcaagaagcagtcactaagcaacttaggaagaacatggcttacaaagctaatccggtaccaagtttctaccaagagggtcctccaccgaaacaaccattgaaaaagtttccattgactcggcctaagtcaccaaaccttaaccgtagaaagagctgcagcgacacagttaacgcatcatatcaggaagtgaaggggaagcattgtgctcgacatcgtcacagtgtaggtggttgcaaggatgaagtcaaaacgaacagtgtcccaaggacaccaaatagcagcagcaaagatcagatgagaaagtccaaaaagggaacaccaaagtctgaagaagtacatgaaatgtttaatagtggccatgatggagagactggtgagaatggcgttggtgttgtggaggagtgaagcttcgcgtagttgtagtttcgttttgactaactttggtgaatgagaaaaacaagaaaaatggtgagaagcaactgcaaggagaagaacaggttttagagtgaaagaacaagtttaaagtttgtttgtttgtttgttgtctaatgttctgcagattgattgttctaaatttgattgctaaaatcagctgctctattttcgtatgatcttttcttatctgtttgacaattaatgtgaaatgtatattaaagttgttgttgtatggatcccaaattcccaattattataactagattaatggttaagc

SEQ ID NO: 42191 - protein, 338 aa, Arabidopsis thaliana
  peptide (1)..(338): Ceres Seq. ID no. 13488193
MGRELVDKHMDKKANSLTASSTGSSDDNKVPSPSTNEAAEVKECTEQNLVADDARLRQQGITETPGSHKSSVKPRVTAKTTVPKPFSLSAEKPRRAAVDNNSLGNGASHNSSSASRVSQLNSPLPTRRIPDHKMHHDEEDSFSVASSSATSIRSFKPKITIGVAPTFSSTSRLERRREFYQKLEEKQKALEAEKRENEKRLKEEQEAVTKQLRKNMAYKANPVPSFYQEGPPPKQPLKKFPLTRPKSPNLNRRKSCSDTVNASYQEVKGKHCARHRHSVGGCKDEVKTNSVPRTPNSSSKDQMRKSKKGTPKSEEVHEMFNSGHDGETGENGVGVVEE

SEQ ID NO: 42192 - protein, 329 aa, Arabidopsis thaliana
  peptide (1)..(329): Ceres Seq. ID no. 13488194
MDKKANSLTASSTGSSDDNKVPSPSTNEAAEVKECTEQNLVADDARLRQQGITETPGSHKSSVKPRVTAKTTVPKPFSLSAEKPRRAAVDNNSLGNGASHNSSSASRVSQLNSPLPTRRIPDHKMHHDEEDSFSVASSSATSIRSFKPKITIGVAPTFSSTSRLERRREFYQKLEEKQKALEAEKRENEKRLKEEQEAVTKQLRKNMAYKANPVPSFYQEGPPPKQPLKKFPLTRPKSPNLNRRKSCSDTVNASYQEVKGKHCARHRHSVGGCKDEVKTNSVPRTPNSSSKDQMRKSKKGTPKSEEVHEMFNSGHDGETGENGVGVVEE

SEQ ID NO: 42193 - protein, 205 aa, Arabidopsis thaliana
  peptide (1)..(205): Ceres Seq. ID no. 13488195
MHHDEEDSFSVASSSATSIRSFKPKITIGVAPTFSSTSRLERRREFYQKLEEKQKALEAEKRENEKRLKEEQEAVTKQLRKNMAYKANPVPSFYQEGPPPKQPLKKFPLTRPKSPNLNRRKSCSDTVNASYQEVKGKHCARHRHSVGGCKDEVKTNSVPRTPNSSSKDQMRKSKKGTPKSEEVHEMFNSGHDGETGENGVGVVEE

SEQ ID NO: 42194 - DNA, 1515 bp, Arabidopsis thaliana
  misc_feature (1)..(1515): Ceres Seq. ID no. 12422354
  misc_feature (1)..(1515): Ortholog of  Ceres SEQ ID NO 13593889 as cited in SEQ ID NO 53305
  misc_feature (1)..(1515): Ortholog of  Ceres SEQ ID NO 13581959 as cited in SEQ ID NO 56156
gtttttgattatctgagagagagagagaagaaacttgttgaaacaaaatcaacaacaacttatagaagaccaaaaaaagattcataggatcttttgcttgacaatgaaagaaggaaaggatgggtttgttcgagcagatcagattgatctaaaaagcttagacgagcaactagagagacacttaagcagagctttgactttagagaagaacaagaagaaagatgaagaagacacaaccgccgtcgccatcggtggctctgcttcttcttcccctgtcactctaaacggcggcggatttgttggcaagaggaaacagagacttgagtgggagatcgatccttctaaacttatcatcaagactgttcttgctcgtggcacttttggtaccgttcatcgtggtatctacgacggtcaagatgttgccgtgaagttgcttgattggggtgaagaaggtcatagatcagaagctgagatttgtgtctttgagagctgattttgctcaggaggttgctgtttggcataaattggatcatcctaatgtcaccaagtttataggagcaacaatgggtgcatcagggttacagttgcaaacagagagtggtccattagctatgccaaacaatatatgttgtgttgttgttgaatatcttccaggtggtgctttaaaatcttacctgatcaagaacagaagaagaaaactaacatttaaaattgttgttcagctcgctcttgatctcgctagagggttgagttaccttcattcgcagaagattgttcaccgagatgtaaagacagagaatatgttgttagacaaaacccggactgttaaaatcgcagattttggagttgcgagagttgaagcatctaaccctaatgacatgacaggagagactggcacacttggctacatggcgcctgaggttctcaatggaaacccgtataatcgaaaatgcgatgtatacagtttcgggatctgcttatgggagatatattgctgtgacatgccataccctgaccttactttctctgaggtcacttcagccgtcgtccgccagaacctgagacccgatataccgaggtgttgcccgagcgcacttgcagctgtgatgaagcgatgttgggatgcaaatccggacaagagaccggagatggatgaggttgtaccaatgttggagagtattgacacaaccaagggaggagggatgattcctaacgaccagcaacagggttgcctatgcttccgaaggaaacgtggtccttaattcccaaagaccaatctaagatcattcaaaactcaagattcgtgtccttgcttcttttctttttctttttataatccagaaggaaaaaaaatgggaaggcttgttagggatctaatggttgctaaaatttacgtaaagagtatgatttggtttccatattcttcaacatttcttgttttgctctatttgtgagagttgcttattaaatatttatggtcacgtatatcatcatctctaatcatatatttgatat

SEQ ID NO: 42195 - protein, 232 aa, Arabidopsis thaliana
  peptide (1)..(232): Ceres Seq. ID no. 12422355
MGASGLQLQTESGPLAMPNNICCVVVEYLPGGALKSYLIKNRRRKLTFKIVVQLALDLARGLSYLHSQKIVHRDVKTENMLLDKTRTVKIADFGVARVEASNPNDMTGETGTLGYMAPEVLNGNPYNRKCDVYSFGICLWEIYCCDMPYPDLTFSEVTSAVVRQNLRPDIPRCCPSALAAVMKRCWDANPDKRPEMDEVVPMLESIDTTKGGGMIPNDQQQGCLCFRRKRGP

SEQ ID NO: 42196 - protein, 216 aa, Arabidopsis thaliana
  peptide (1)..(216): Ceres Seq. ID no. 12422356
MPNNICCVVVEYLPGGALKSYLIKNRRRKLTFKIVVQLALDLARGLSYLHSQKIVHRDVKTENMLLDKTRTVKIADFGVARVEASNPNDMTGETGTLGYMAPEVLNGNPYNRKCDVYSFGICLWEIYCCDMPYPDLTFSEVTSAVVRQNLRPDIPRCCPSALAAVMKRCWDANPDKRPEMDEVVPMLESIDTTKGGGMIPNDQQQGCLCFRRKRGP

SEQ ID NO: 42197 - protein, 153 aa, Arabidopsis thaliana
  peptide (1)..(153): Ceres Seq. ID no. 12422357
MLLDKTRTVKIADFGVARVEASNPNDMTGETGTLGYMAPEVLNGNPYNRKCDVYSFGICLWEIYCCDMPYPDLTFSEVTSAVVRQNLRPDIPRCCPSALAAVMKRCWDANPDKRPEMDEVVPMLESIDTTKGGGMIPNDQQQGCLCFRRKRGP

SEQ ID NO: 42198 - DNA, 1934 bp, Arabidopsis thaliana
  misc_feature (1)..(1934): Ceres Seq. ID no. 13489363
  misc_feature (1)..(1934): Ortholog of  Ceres SEQ ID NO 14313167 as cited in SEQ ID NO 54354
agagttagagagagagagaccacgccagatatacctttcttgtttcaccggttttcatacacaaaaatggcgggcagtgcctcattcgccgccgcattattcatcggactctctcttctcttcgccgtcacggctgaagatccgtacagattctttgaatggaacataacttacggcgatatatacccactcggtgttcgccaacagggtattttgatcaacggggcgtttccgggaccggacattcattcggttactaatgacaatctcatcatcaacgtctacaatagcctcgacgaacctttccttctttcatggaatggaattcaacagaggaggaactctttcgttgatggagtgtatggaacgacatgcccaatcccgccggggaagaactacacttacattcttcagatgaaggatcagatcggaagtttttactacttcccttctctcggctttcacaaagccgccggtggatttggtggcattcgtatcctcagtcgtcctagaatcccggtccctttccctgatcccgccggagataccactgtccttatcggagactggtacaaagcaaaccacacggatttgagagcacagcttgataatggtaagaagcttcctttaccagacggcatcctcatcaatggtcgttcaagtggtgcaactcttaatgttgaacaaggtaagacatacaggtttagaatatccaatgtagggttacaagactctctcaacttccgcattcaagaccataagatgaaagtggtggaagtcgaaggaacacacactcttcagactactttctcttcactagatgttcatgttggacaatcttactcagtccttgtaaccgcggaccagactccacgggattattacgtggtcgtctcttctcggtttacctcaaatgtccttactaccacgggtattttccgatacagtaattctgctggtggtgtttctggacctattcctggtggacctaccattcaaatcgactggtccttgaaccaggctcgagccatcaggactaacctttcagcgagcggaccaaggccaaatccacaaggatcgtaccactacggtatgataaacactacaagaacgatcagacttgctagctctgctggtcaggttgatgggaagcaacgatacgctgtgaacagtgtctcattcaaacccgcagacactcctctgaaaatcgcggactacttcaagattgacggtgtttacagaagtggaagcatacagtaccaacccactggtggaggaatatacctcgacacatctgttatgcaagttgattacagaacctttgtggagattattttcgaaaattctgaggatattgtccagagctggcatcttgatggttactctttctgggttgttggaatggatggtggacagtggagtccagatagtaggaacgagtataacctacgcgatgcagtcgctcgctgcaccgttcaggtatacccaagctcatggacggctatattgatagcactcgacaacgtaggaatgtggaatctaagacccgagttctgggcgaggcaatacttaggacaacaattgtatttacgtgtgtacacaccctcaacttctctcagagatgaatatccaatccccaagaacgctcttctctgcgggagagccagtggtcgcagcaccagaccgctttgagctggtggttagatatagaaatgacggagagatggtcagccaaaccagctgacgcgttcttgaggcgggtttcttgttttatacacattcttcattttgctaatgaatgagaagagtttatgttaaaatcagtatatcagtttgtaacgatctcagctcgaggtctcattcttgattcttatattctttctttttctatggaacgaaacatttattcaatataattccacagtttcatcgtg

SEQ ID NO: 42199 - protein, 563 aa, Arabidopsis thaliana
  peptide (1)..(563): Ceres Seq. ID no. 13489364
RVRERETTPDIPFLFHRFSYTKMAGSASFAAALFIGLSLLFAVTAEDPYRFFEWNITYGDIYPLGVRQQGILINGAFPGPDIHSVTNDNLIINVYNSLDEPFLLSWNGIQQRRNSFVDGVYGTTCPIPPGKNYTYILQMKDQIGSFYYFPSLGFHKAAGGFGGIRILSRPRIPVPFPDPAGDTTVLIGDWYKANHTDLRAQLDNGKKLPLPDGILINGRSSGATLNVEQGKTYRFRISNVGLQDSLNFRIQDHKMKVVEVEGTHTLQTTFSSLDVHVGQSYSVLVTADQTPRDYYVVVSSRFTSNVLTTTGIFRYSNSAGGVSGPIPGGPTIQIDWSLNQARAIRTNLSASGPRPNPQGSYHYGMINTTRTIRLASSAGQVDGKQRYAVNSVSFKPADTPLKIADYFKIDGVYRSGSIQYQPTGGGIYLDTSVMQVDYRTFVEIIFENSEDIVQSWHLDGYSFWVVGMDGGQWSPDSRNEYNLRDAVARCTVQVYPSSWTAILIALDNVGMWNLRPEFWARQYLGQQLYLRVYTPSTSLRDEYPIPKNALLCGRASGRSTRPL

SEQ ID NO: 42200 - protein, 541 aa, Arabidopsis thaliana
  peptide (1)..(541): Ceres Seq. ID no. 13489365
MAGSASFAAALFIGLSLLFAVTAEDPYRFFEWNITYGDIYPLGVRQQGILINGAFPGPDIHSVTNDNLIINVYNSLDEPFLLSWNGIQQRRNSFVDGVYGTTCPIPPGKNYTYILQMKDQIGSFYYFPSLGFHKAAGGFGGIRILSRPRIPVPFPDPAGDTTVLIGDWYKANHTDLRAQLDNGKKLPLPDGILINGRSSGATLNVEQGKTYRFRISNVGLQDSLNFRIQDHKMKVVEVEGTHTLQTTFSSLDVHVGQSYSVLVTADQTPRDYYVVVSSRFTSNVLTTTGIFRYSNSAGGVSGPIPGGPTIQIDWSLNQARAIRTNLSASGPRPNPQGSYHYGMINTTRTIRLASSAGQVDGKQRYAVNSVSFKPADTPLKIADYFKIDGVYRSGSIQYQPTGGGIYLDTSVMQVDYRTFVEIIFENSEDIVQSWHLDGYSFWVVGMDGGQWSPDSRNEYNLRDAVARCTVQVYPSSWTAILIALDNVGMWNLRPEFWARQYLGQQLYLRVYTPSTSLRDEYPIPKNALLCGRASGRSTRPL

SEQ ID NO: 42201 - protein, 425 aa, Arabidopsis thaliana
  peptide (1)..(425): Ceres Seq. ID no. 13489366
MKDQIGSFYYFPSLGFHKAAGGFGGIRILSRPRIPVPFPDPAGDTTVLIGDWYKANHTDLRAQLDNGKKLPLPDGILINGRSSGATLNVEQGKTYRFRISNVGLQDSLNFRIQDHKMKVVEVEGTHTLQTTFSSLDVHVGQSYSVLVTADQTPRDYYVVVSSRFTSNVLTTTGIFRYSNSAGGVSGPIPGGPTIQIDWSLNQARAIRTNLSASGPRPNPQGSYHYGMINTTRTIRLASSAGQVDGKQRYAVNSVSFKPADTPLKIADYFKIDGVYRSGSIQYQPTGGGIYLDTSVMQVDYRTFVEIIFENSEDIVQSWHLDGYSFWVVGMDGGQWSPDSRNEYNLRDAVARCTVQVYPSSWTAILIALDNVGMWNLRPEFWARQYLGQQLYLRVYTPSTSLRDEYPIPKNALLCGRASGRSTRPL

SEQ ID NO: 42202 - DNA, 1605 bp, Arabidopsis thaliana
  misc_feature (1)..(1605): Ceres Seq. ID no. 13488652
  misc_feature (1)..(1605): Ortholog of  Ceres SEQ ID NO 13595870 as cited in SEQ ID NO 62101
  misc_feature (1)..(1605): Ortholog of  Ceres SEQ ID NO 13590241 as cited in SEQ ID NO 63878
  misc_feature (1)..(1605): Ortholog of  Ceres SEQ ID NO 13660597 as cited in SEQ ID NO 67655
gtcgtcgtccacaagaacaaccaaatttgtttccgtcttctgctaacatatcctctttttcatctgggaaccctaatttcttgactaacttagggttttatttatccatttgagatactctgtaattgaaaggttgaatttttagaagagacatgggaggttcgtcggagacaaagatcttacaagaactcatactttacgcggcgagcgctgctttcagctgcttggttctctttgcgggtcttcgtcatctcgatcctaatcgtgaggcttctaaaaaagctctcgagcataagaaggaaatctctaaacgtttgggtcgtcctcttgttcagaccaatccatacgaggatgtaattgcatgtgatgtgataaatccagaccacattgatgtggagtttggttctattggagggttggagaccatcaagcaggctttgtatgagcttgtgattttaccactgaaaagacctgagctttttgcttacgggaagcttcttggacctcaaaaaggtgtcttgctctatggacctcctggtactggaaagactatgcttgctaaggctattgccaaagagtcaggagctgttttcattaatgttagggtttcaaacctgatgagcaagtggtttggagatgctcagaagcttgtttctgctgtgtttagcttggcctacaaactccaacctgctatcatttttattgatgaggttgagagctttcttggtcagcgccgttcaacagatcatgaagctatggccaacatgaagactgagtttatggctttatgggatggattctctactgatccgcatgcaagggttatggttcttgctgcaactaacagaccgtcagagcttgatgaagcaatattaaggcgtcttcctcaggcctttgagattggaatacctgatcgccgggagagagctgagatattgaaagtgactctgaaaggagagagggtggaacctgatattgactttgatcacatagctcgcttatgcgaaggctataccggatcagacatttttgagctatgcaagaaagcagcttacttccctatcagagaaatcctagatgcagagagaaaggggaaaccatgtttggaccctaggccattatcacagttagatttggagaaggttcttgcaacgtcaaagaagacacaagttgcagcaggcgagtactcattgagctcgcagtcctcggcttggagaggctcaagggaaccagatgaggtccaggcagcgataagtgggatctcgaagcttctagtttctcagatcattaacctacagtcagaatctcaggattcatggcagcgggatcccgaagaagattcccgatgaaattccggatcacttttataaacgttctggtgttttcattggaagtttagaatttgtcacacacttcagtttattctgtaaaacttttcttttctttttggtaggatcatttgataacttatgactgtactaaaaagtctctcaagtttctacattactgaatctctcttgttcataatatggccactgttctcactcatgggttacttaagtgttaactctttcttcactttacttaatcgttaatggaaccttg

SEQ ID NO: 42203 - protein, 398 aa, Arabidopsis thaliana
  peptide (1)..(398): Ceres Seq. ID no. 13488653
MGGSSETKILQELILYAASAAFSCLVLFAGLRHLDPNREASKKALEHKKEISKRLGRPLVQTNPYEDVIACDVINPDHIDVEFGSIGGLETIKQALYELVILPLKRPELFAYGKLLGPQKGVLLYGPPGTGKTMLAKAIAKESGAVFINVRVSNLMSKWFGDAQKLVSAVFSLAYKLQPAIIFIDEVESFLGQRRSTDHEAMANMKTEFMALWDGFSTDPHARVMVLAATNRPSELDEAILRRLPQAFEIGIPDRRERAEILKVTLKGERVEPDIDFDHIARLCEGYTGSDIFELCKKAAYFPIREILDAERKGKPCLDPRPLSQLDLEKVLATSKKTQVAAGEYSLSSQSSAWRGSREPDEVQAAISGISKLLVSQIINLQSESQDSWQRDPEEDSR

SEQ ID NO: 42204 - protein, 265 aa, Arabidopsis thaliana
  peptide (1)..(265): Ceres Seq. ID no. 13488654
MLAKAIAKESGAVFINVRVSNLMSKWFGDAQKLVSAVFSLAYKLQPAIIFIDEVESFLGQRRSTDHEAMANMKTEFMALWDGFSTDPHARVMVLAATNRPSELDEAILRRLPQAFEIGIPDRRERAEILKVTLKGERVEPDIDFDHIARLCEGYTGSDIFELCKKAAYFPIREILDAERKGKPCLDPRPLSQLDLEKVLATSKKTQVAAGEYSLSSQSSAWRGSREPDEVQAAISGISKLLVSQIINLQSESQDSWQRDPEEDSR

SEQ ID NO: 42205 - protein, 243 aa, Arabidopsis thaliana
  peptide (1)..(243): Ceres Seq. ID no. 13488655
MSKWFGDAQKLVSAVFSLAYKLQPAIIFIDEVESFLGQRRSTDHEAMANMKTEFMALWDGFSTDPHARVMVLAATNRPSELDEAILRRLPQAFEIGIPDRRERAEILKVTLKGERVEPDIDFDHIARLCEGYTGSDIFELCKKAAYFPIREILDAERKGKPCLDPRPLSQLDLEKVLATSKKTQVAAGEYSLSSQSSAWRGSREPDEVQAAISGISKLLVSQIINLQSESQDSWQRDPEEDSR

SEQ ID NO: 42206 - DNA, 1780 bp, Arabidopsis thaliana
  misc_feature (1)..(1780): Ceres Seq. ID no. 12327983
  misc_feature (1)..(1780): Ortholog of  Ceres SEQ ID NO 15170095 as cited in SEQ ID NO 68852
gtttcagacaaagtagtgacatttttctaacaattaaaccaatatcgccgtagtcaaccaccgcataacgttttggcgccgcctgaggctgacctggggctgctaaagattttatcgcgacgactctctttctctctcaaactgtttcagctgcttgcgaattggaaatggcttgtaattcctcaggctgtgagtcaggttgctatgaccgtgagaaagataatggaagtaagatagtggatgatgcagtatctggtggcggtaatcatgagagtgtctgcgtcaagtgtaaatgcaatgcgcctatgacatttggtgacggtggcttcgacgatggaagattctgcgcagattgttttaggaacaatgtctttgggaaattccgtcttgctgttacttctcatgctatgatcactccttcagataacgtccttgttgctttctctggcggatcatcttccagggtttctcttcaatttgtgcacgagttgcaaatcaaggctttgaagaattacgaggcgagtcgagatagatctttacctgtgtttggtgttggtgttgcttttgtggatgaaactgcagcttttcctgctctttccactgaaatgattgatgcaattgagtgggttcgatatactgtctcgtgtttgtctccacctgctaaggatctccatgttgttcaagtcgaaagcatatttggttcagactctcttgacgcacgggatagacttctgaagctattagattctgttcctgacgatactggaaaagaagaccttctgctgcatctgaaaatgttatctttgcaaaaggttgccgctgaaaatgggtacaatagattagtgttgggatcatgcacgtcgagaattgcttcccatgttcttacggctactgtcaagggacgaggttattcactatcagcagatattcagcatgttgatgctagatggaaggttcccattgtacttccacttcgagattgtgttcgactggaaataactagactctgccttttggatggacttaagactgtggagttggcttgtcgttctcaatgcggaatcaatgatttggtgtcttcatttgtcgctctgttgcaggaagaaaatccttcccgggaatgcacaattgtacggacagctgcgaagctgactccattttacttcaataaaattccggaaacagacgactctaatgtacctatggccactcagaggcgcctaaagagattcaatctcaaatatgatggatcaatgactactgaagctttctgtcctatctgcaatggcccgctaaatagatcagactcatcagagttggatacttttgaagaaggccaggaatctgatgtcctctatgctgcttgctgttcaagttgccggtttcaaatacttccacaggatggatcatctcttgagcaattcagttcatttctaccagatcacatgatttcccaagtgaaacatcaaaaagttgatagtcaagcttatctgagggagaaaattaaagactgtctgctcttggacgatgaagaggttgtctaaatctgcattcggatgcttgcacaaggtatgagaggaagtttaaatcctgtcatgcttatcaaggattattcctagaaacctaagatcatcttagtttaatgtcgatctgatatcatcgtagatgttaaaagtgtttttactcattcgttacaatgattgtctcaatgtgaagcaaaatcactgagcaattgaatgaagcatctacagttttacacatataatacaagaatcatggg

SEQ ID NO: 42207 - protein, 458 aa, Arabidopsis thaliana
  peptide (1)..(458): Ceres Seq. ID no. 12327984
MACNSSGCESGCYDREKDNGSKIVDDAVSGGGNHESVCVKCKCNAPMTFGDGGFDDGRFCADCFRNNVFGKFRLAVTSHAMITPSDNVLVAFSGGSSSRVSLQFVHELQIKALKNYEASRDRSLPVFGVGVAFVDETAAFPALSTEMIDAIEWVRYTVSCLSPPAKDLHVVQVESIFGSDSLDARDRLLKLLDSVPDDTGKEDLLLHLKMLSLQKVAAENGYNRLVLGSCTSRIASHVLTATVKGRGYSLSADIQHVDARWKVPIVLPLRDCVRLEITRLCLLDGLKTVELACRSQCGINDLVSSFVALLQEENPSRECTIVRTAAKLTPFYFNKIPETDDSNVPMATQRRLKRFNLKYDGSMTTEAFCPICNGPLNRSDSSELDTFEEGQESDVLYAACCSSCRFQILPQDGSSLEQFSSFLPDHMISQVKHQKVDSQAYLREKIKDCLLLDDEEVV

SEQ ID NO: 42208 - protein, 412 aa, Arabidopsis thaliana
  peptide (1)..(412): Ceres Seq. ID no. 12327985
MTFGDGGFDDGRFCADCFRNNVFGKFRLAVTSHAMITPSDNVLVAFSGGSSSRVSLQFVHELQIKALKNYEASRDRSLPVFGVGVAFVDETAAFPALSTEMIDAIEWVRYTVSCLSPPAKDLHVVQVESIFGSDSLDARDRLLKLLDSVPDDTGKEDLLLHLKMLSLQKVAAENGYNRLVLGSCTSRIASHVLTATVKGRGYSLSADIQHVDARWKVPIVLPLRDCVRLEITRLCLLDGLKTVELACRSQCGINDLVSSFVALLQEENPSRECTIVRTAAKLTPFYFNKIPETDDSNVPMATQRRLKRFNLKYDGSMTTEAFCPICNGPLNRSDSSELDTFEEGQESDVLYAACCSSCRFQILPQDGSSLEQFSSFLPDHMISQVKHQKVDSQAYLREKIKDCLLLDDEEVV

SEQ ID NO: 42209 - protein, 378 aa, Arabidopsis thaliana
  peptide (1)..(378): Ceres Seq. ID no. 12327986
MITPSDNVLVAFSGGSSSRVSLQFVHELQIKALKNYEASRDRSLPVFGVGVAFVDETAAFPALSTEMIDAIEWVRYTVSCLSPPAKDLHVVQVESIFGSDSLDARDRLLKLLDSVPDDTGKEDLLLHLKMLSLQKVAAENGYNRLVLGSCTSRIASHVLTATVKGRGYSLSADIQHVDARWKVPIVLPLRDCVRLEITRLCLLDGLKTVELACRSQCGINDLVSSFVALLQEENPSRECTIVRTAAKLTPFYFNKIPETDDSNVPMATQRRLKRFNLKYDGSMTTEAFCPICNGPLNRSDSSELDTFEEGQESDVLYAACCSSCRFQILPQDGSSLEQFSSFLPDHMISQVKHQKVDSQAYLREKIKDCLLLDDEEVV

SEQ ID NO: 42210 - DNA, 1132 bp, Arabidopsis thaliana
  misc_feature (1)..(1132): Ceres Seq. ID no. 13487470
  misc_feature (1)..(1132): Ortholog of  Ceres SEQ ID NO 12563124 as cited in SEQ ID NO 57104
  misc_feature (1)..(1132): Ortholog of  Ceres SEQ ID NO 15226273 as cited in SEQ ID NO 64934
  misc_feature (1)..(1132): Ortholog of  Ceres SEQ ID NO 12617639 as cited in SEQ ID NO 65219
  misc_feature (1)..(1132): Ortholog of  Ceres SEQ ID NO 15173998 as cited in SEQ ID NO 0
gaaagacgcttcgagagagatagatcatctccgttaaaccctagcgattggaatacggatatactccaaatggctttcttaagtaaagttggaaggttattcagtcagaccagcagccatgtcactgcctctagctcgatgctacagagcatccgttgcatgtcttcatcaaaaatctttgttggaggtatctcctacagcactgatgagtttggcttaagagaagcttttagcaaatatggagaagttgttgatgcaaagattattgtggaccgtgaaacaggcagatctaggggctttgctttcgtaacatttacttcgactgaggaggctagtaatgccatgcaattggatggacaggaccttcatggtcgaagaattagggtgaattatgcaactgaaagaggaagtgggtttggaggaaggggattcggtggtcctggtggtggttatggtgcttcagatggtggttatggtgctccagctggtggttatggaggtggtgccggtggttacggaggcaactcttcttatagtggaaatgctgggggtggtggtggttatggtggtaactcttcctatggtggaaatgctggtggttatggaggtaaccctccttatagtggcaatgctgttggtggtggcggtggctatggaagcaattttggcggcggcggtggatatggtgttgcaggtggtgttggtggaagtgaaaactttgcccaaggcagctccactaatgctggctttgatgacaagtttgagagcaaccaaccattaggcaatgatacggatcatcagactgaaagcggtttgggaggcgatgaacaatttggtggcagtgacaatcaatttggagatgcagagaacggtaacacagagaatggtccagttgggtttgatcaaactgacgatggcgatgttgccaagagagcctagtctccacgatgttgtgccgtgtatgtttacgtcatggaacttttgttttgcagtttcagtctaaaacttacgaactttcttaatctctctatttaacgtttgaggttgtttatcatgtagagagacctctttagttggtctgtttttcttaaaatgttggccaattaataaaaactgtaataacttctgagtt

SEQ ID NO: 42211 - protein, 312 aa, Arabidopsis thaliana
  peptide (1)..(312): Ceres Seq. ID no. 13487471
ERRFERDRSSPLNPSDWNTDILQMAFLSKVGRLFSQTSSHVTASSSMLQSIRCMSSSKIFVGGISYSTDEFGLREAFSKYGEVVDAKIIVDRETGRSRGFAFVTFTSTEEASNAMQLDGQDLHGRRIRVNYATERGSGFGGRGFGGPGGGYGASDGGYGAPAGGYGGGAGGYGGNSSYSGNAGGGGGYGGNSSYGGNAGGYGGNPPYSGNAVGGGGGYGSNFGGGGGYGVAGGVGGSENFAQGSSTNAGFDDKFESNQPLGNDTDHQTESGLGGDEQFGGSDNQFGDAENGNTENGPVGFDQTDDGDVAKRA

SEQ ID NO: 42212 - protein, 289 aa, Arabidopsis thaliana
  peptide (1)..(289): Ceres Seq. ID no. 13487472
MAFLSKVGRLFSQTSSHVTASSSMLQSIRCMSSSKIFVGGISYSTDEFGLREAFSKYGEVVDAKIIVDRETGRSRGFAFVTFTSTEEASNAMQLDGQDLHGRRIRVNYATERGSGFGGRGFGGPGGGYGASDGGYGAPAGGYGGGAGGYGGNSSYSGNAGGGGGYGGNSSYGGNAGGYGGNPPYSGNAVGGGGGYGSNFGGGGGYGVAGGVGGSENFAQGSSTNAGFDDKFESNQPLGNDTDHQTESGLGGDEQFGGSDNQFGDAENGNTENGPVGFDQTDDGDVAKRA

SEQ ID NO: 42213 - protein, 266 aa, Arabidopsis thaliana
  peptide (1)..(266): Ceres Seq. ID no. 13487473
MLQSIRCMSSSKIFVGGISYSTDEFGLREAFSKYGEVVDAKIIVDRETGRSRGFAFVTFTSTEEASNAMQLDGQDLHGRRIRVNYATERGSGFGGRGFGGPGGGYGASDGGYGAPAGGYGGGAGGYGGNSSYSGNAGGGGGYGGNSSYGGNAGGYGGNPPYSGNAVGGGGGYGSNFGGGGGYGVAGGVGGSENFAQGSSTNAGFDDKFESNQPLGNDTDHQTESGLGGDEQFGGSDNQFGDAENGNTENGPVGFDQTDDGDVAKRA

SEQ ID NO: 42214 - DNA, 1048 bp, Arabidopsis thaliana
  misc_feature (1)..(1048): Ceres Seq. ID no. 13503932
  misc_feature (1)..(1048): Ortholog of  Ceres SEQ ID NO 13594298 as cited in SEQ ID NO 57803
  misc_feature (1)..(1048): Ortholog of  Ceres SEQ ID NO 13503476 as cited in SEQ ID NO 61978
  misc_feature (1)..(1048): Ortholog of  Ceres SEQ ID NO 12578438 as cited in SEQ ID NO 62201
  misc_feature (1)..(1048): Ortholog of  Ceres SEQ ID NO 12617675 as cited in SEQ ID NO 64656
atcaacaatacatttgagatatcaatacacctccaaaatatatacaaaaatgaagctttcttgtggtacaagttttgcgttcttgattatgtttctctttgcggcacaatctatgcatgtctatgcgggtagcttccacaaagatgttcagatacattggggtgacggccgtggaaaggtgcgcgacagagatggaaagcttctatctctctcgctcgacaaatcctctggatccggttttcagtccaaccaggagtttctctatggcaaagccgaggttcaaatgaaacttgtccctggtaactcagctggaacagtaacaacattctatcttaagtctccgggaactacgtgggatgagattgatttcgagttcttaggaaacctaagtggtcatccgtatactctccatactaatgtttacacaaaaggctcaggagacaaagaacaacaatttcatctatggttcgacccaactgttaactttcacacttattgcatcacatggaatccccaaaggattatttttacagttgatggaattcctattagagagttcaagaactccgagtcaattggagttccgttcccaacgaagcaaccaatgaggctttacgcgagtctctgggaagccgagcattgggctacaaggggagggttagagaaaacagattggtcaaaggctcctttcaccgctttctacagaaactacaatgttgaaggatgtgtatgggctaatggaaaatcatcttgtcccgcaaattcctcatggttcactcaacaactcgattcaaacggccagacaagaatgaaaggggtacagagtaagtacatggtctacaactattgtaacgacaaaagaaggtttcctcgaggtgttcctgtagagtgcagttaaattgttgattctttgatacatgaataagttacttggcattgccttagtaactcaattgagttcttacatatttttatcattcatttgttgctcatatgtatgcggtgtttgtgtaagatgattttaagaagtaataaaaataaattatgg

SEQ ID NO: 42215 - protein, 298 aa, Arabidopsis thaliana
  peptide (1)..(298): Ceres Seq. ID no. 13503933
STIHLRYQYTSKIYTKMKLSCGTSFAFLIMFLFAAQSMHVYAGSFHKDVQIHWGDGRGKVRDRDGKLLSLSLDKSSGSGFQSNQEFLYGKAEVQMKLVPGNSAGTVTTFYLKSPGTTWDEIDFEFLGNLSGHPYTLHTNVYTKGSGDKEQQFHLWFDPTVNFHTYCITWNPQRIIFTVDGIPIREFKNSESIGVPFPTKQPMRLYASLWEAEHWATRGGLEKTDWSKAPFTAFYRNYNVEGCVWANGKSSCPANSSWFTQQLDSNGQTRMKGVQSKYMVYNYCNDKRRFPRGVPVECS

SEQ ID NO: 42216 - protein, 282 aa, Arabidopsis thaliana
  peptide (1)..(282): Ceres Seq. ID no. 13503934
MKLSCGTSFAFLIMFLFAAQSMHVYAGSFHKDVQIHWGDGRGKVRDRDGKLLSLSLDKSSGSGFQSNQEFLYGKAEVQMKLVPGNSAGTVTTFYLKSPGTTWDEIDFEFLGNLSGHPYTLHTNVYTKGSGDKEQQFHLWFDPTVNFHTYCITWNPQRIIFTVDGIPIREFKNSESIGVPFPTKQPMRLYASLWEAEHWATRGGLEKTDWSKAPFTAFYRNYNVEGCVWANGKSSCPANSSWFTQQLDSNGQTRMKGVQSKYMVYNYCNDKRRFPRGVPVECS

SEQ ID NO: 42217 - protein, 269 aa, Arabidopsis thaliana
  peptide (1)..(269): Ceres Seq. ID no. 13503935
MFLFAAQSMHVYAGSFHKDVQIHWGDGRGKVRDRDGKLLSLSLDKSSGSGFQSNQEFLYGKAEVQMKLVPGNSAGTVTTFYLKSPGTTWDEIDFEFLGNLSGHPYTLHTNVYTKGSGDKEQQFHLWFDPTVNFHTYCITWNPQRIIFTVDGIPIREFKNSESIGVPFPTKQPMRLYASLWEAEHWATRGGLEKTDWSKAPFTAFYRNYNVEGCVWANGKSSCPANSSWFTQQLDSNGQTRMKGVQSKYMVYNYCNDKRRFPRGVPVECS

SEQ ID NO: 42218 - DNA, 1226 bp, Arabidopsis thaliana
  misc_feature (1)..(1226): Ceres Seq. ID no. 12329631
  misc_feature (1)..(1226): Ortholog of  Ceres SEQ ID NO 13595503 as cited in SEQ ID NO 56643
gttcttcaaagcacaaaccaattctcgaccaaaagatcagaacaaagcgaaggcggattttctggattctcgacggccggagattcatggcgacggctaacggagcaaagagtccgtcgagtatgggccctaaggttttgttttattccatattgctcacacttcagtacggagcccagcctctgatctccaaacgctgcatcagaaaggatgttattgtaacttcatctgttttgacgtgcgagattgttaaggtcatatgtgctctgattctcatggcaagaaatggtagtttgaagggattagcaaaagagtggacgttgatgggatccttgacagcatcaggacttcctgcagccatatatgcactgcagaacagtttgctgcagatctcatacaggagtcttgattccttgacattttcaattctgaatcagacgaaaatctttttcacagcattctttactttcataatactaaggcagaagcaatcaattctacaaataggagccttgtgtctattgatcatggcagcagtccttctaagtgttggtgaaggctctaacaaagattcaagcggcattaatgcggatcaaaagctgttttatggaattatcccggtcttggcagcctctgtcctgtcgggtttagcctcttctctgtgtcaatgggcttctcaggtcaagaagcattcatcatacttaatgacggttgaaatgtctatcgttggaagcctctgtttattagtaagtactcttaaatctccagatggtgaagcgattaaaaaatatggcttctttcatggttggactgctttaacactggtcccagtaataagcaatgctcttggtgggattcttgttggcctagttacatcacatgccggtggtgtaagaaagggatttgtgattgtgtcggcattacttgtgacggcgctacttcaatttgcgtttgaaggaaaaccgccatcatcgtattgcctagttgctcttcctcttgtgatgagtagtatctcaatgtaccagaaatacccatacattgacaagaagaagaagaaggtgtaagaaaaaggttccattcagagaatagctgctagtgctaagtacaacaatgagatatcttaatgccattattattaactaagtagatgatagtgtgattcttggagcattcaaaagactttgtagtatatttacattcaaagatggaatgagtccaattgagct

SEQ ID NO: 42219 - protein, 353 aa, Arabidopsis thaliana
  peptide (1)..(353): Ceres Seq. ID no. 12329632
SSKHKPILDQKIRTKRRRIFWILDGRRFMATANGAKSPSSMGPKVLFYSILLTLQYGAQPLISKRCIRKDVIVTSSVLTCEIVKVICALILMARNGSLKGLAKEWTLMGSLTASGLPAAIYALQNSLLQISYRSLDSLTFSILNQTKIFFTAFFTFIILRQKQSILQIGALCLLIMAAVLLSVGEGSNKDSSGINADQKLFYGIIPVLAASVLSGLASSLCQWASQVKKHSSYLMTVEMSIVGSLCLLVSTLKSPDGEAIKKYGFFHGWTALTLVPVISNALGGILVGLVTSHAGGVRKGFVIVSALLVTALLQFAFEGKPPSSYCLVALPLVMSSISMYQKYPYIDKKKKKV

SEQ ID NO: 42220 - protein, 325 aa, Arabidopsis thaliana; identical to SEQ ID NO: 21559
  peptide (1)..(325): Ceres Seq. ID no. 12329633

SEQ ID NO: 42221 - protein, 313 aa, Arabidopsis thaliana; identical to SEQ ID NO: 21560
  peptide (1)..(313): Ceres Seq. ID no. 12329634

SEQ ID NO: 42222 - DNA, 1570 bp, Arabidopsis thaliana
  misc_feature (1)..(1570): Ceres Seq. ID no. 12327884
  misc_feature (1)..(1570): Ortholog of  Ceres SEQ ID NO 15178236 as cited in SEQ ID NO 67053
actacttggattcctacttcttcttcttcttcctctgattctctcccattccaatcaatctctagggttcttcttcagcaatacttcagaagctggttttggccatggaacccaatgggtacaggaaagaaagaagaaaggaacaacatttggggagaatgaatggtggtggtggtgatgttgagactgatcttgatccatggactgcatgggcttacaagcctcgcactatctctcttctccttattggcgcttgttttctcatttgggctagtggagctcttgatcctgacagcactacatctgatgatcttgtcacttctgtcaaaaggggagtgtgggctatgatcgctgtctttcttgcttactctttgctccaggccccttcaacggttctaatcaggccccatcctgcaatctggcgcttagttcatggaatggccgtcatttacttagttgcacttacttttttgctctttcagagacgtgatgatgcacggcagttcatgaagtttctccaccctgaccttggaatagaacttcctgagaaatcatacggtgctgattgccgtatatatgtgcctgatcacccaacgaacaggtttaagaatctttatgacacagtatttgatgagtttttcttggctcacatctttggttgatgggggaaagcaattctgatccggaaccagccgcttctttgggtgctttcaattggttttgagttattggaggttacttttcggcatatgttaccaaatttcaacgagtgctggtgggacagtattgttcttgatatcttgatatgcaactggtttggtatctgggcaggaatgtatacagttcgatattttgatggaaaaacatatgagtgggttggcattagccgccagcctaacattattggcaaagtgaaaaggacactggggcagttcacaccagctcactgggacaaagacgagtggcatccgctgcagggaccttggcgttttattcaagtactcactctttgcatcatattcttgacagtggagctgaacacattctttctcaagtttagcctgtggatcccccctcgaaacccagtgattctctataggctgatcttgtggtggctcatagcgataccaacaacacgggagtacaattcatatcttcaagacagaaaacctgtgaaaaaggtgggagcattctgttggctgtcactggggatatgcatagtagaacttctcatctgcatcaagtttggaagtggattgtacccaacagaaatgccattgtgggtagtgacactatggggaagtgtgggacttggacttgtggccttcttgctgtcttggacatggaagatccagaagatcctcgcgcaaaagagacgttaagcgcatcattattgttgcagcagagacgagagagaaatagaggtgagacagtgaaatgccattgtggtttttttttgtaaatagggagaagaaggaacgatgtaaatgcaattttctttagggatagtgtgtgatattcaacatttacgaagattccatcaattctttcatgcatcaaaagttctttc

SEQ ID NO: 42223 - protein, 210 aa, Arabidopsis thaliana
  peptide (1)..(210): Ceres Seq. ID no. 12327885
MLPNFNECWWDSIVLDILICNWFGIWAGMYTVRYFDGKTYEWVGISRQPNIIGKVKRTLGQFTPAHWDKDEWHPLQGPWRFIQVLTLCIIFLTVELNTFFLKFSLWIPPRNPVILYRLILWWLIAIPTTREYNSYLQDRKPVKKVGAFCWLSLGICIVELLICIKFGSGLYPTEMPLWVVTLWGSVGLGLVAFLLSWTWKIQKILAQKRR

SEQ ID NO: 42224 - protein, 185 aa, Arabidopsis thaliana
  peptide (1)..(185): Ceres Seq. ID no. 12327886
MEPNGYRKERRKEQHLGRMNGGGGDVETDLDPWTAWAYKPRTISLLLIGACFLIWASGALDPDSTTSDDLVTSVKRGVWAMIAVFLAYSLLQAPSTVLIRPHPAIWRLVHGMAVIYLVALTFLLFQRRDDARQFMKFLHPDLGIELPEKSYGADCRIYVPDHPTNRFKNLYDTVFDEFFLAHIFG

SEQ ID NO: 42225 - protein, 182 aa, Arabidopsis thaliana
  peptide (1)..(182): Ceres Seq. ID no. 12327887
MYTVRYFDGKTYEWVGISRQPNIIGKVKRTLGQFTPAHWDKDEWHPLQGPWRFIQVLTLCIIFLTVELNTFFLKFSLWIPPRNPVILYRLILWWLIAIPTTREYNSYLQDRKPVKKVGAFCWLSLGICIVELLICIKFGSGLYPTEMPLWVVTLWGSVGLGLVAFLLSWTWKIQKILAQKRR

SEQ ID NO: 42226 - DNA, 1660 bp, Arabidopsis thaliana
  misc_feature (1)..(1660): Ceres Seq. ID no. 13499948
  misc_feature (1)..(1660): Ortholog of  Ceres SEQ ID NO 13582619 as cited in SEQ ID NO 56520
  misc_feature (1)..(1660): Ortholog of  Ceres SEQ ID NO 12611392 as cited in SEQ ID NO 56826
  misc_feature (1)..(1660): Ortholog of  Ceres SEQ ID NO 13660872 as cited in SEQ ID NO 60830
  misc_feature (1)..(1660): Ortholog of  Ceres SEQ ID NO 12616221 as cited in SEQ ID NO 63291
aaacctagaaacaaatacggtcttttttttttctttttatgggtcgcgaatctctggctgttgtgtcctcgccgccatcggcgactgcgcccagtactgctgtgtcggctacctcgcttgctcctggctttcgatttcatccgactgatgaggaactcgtgagctattacttgaagaggaaggttctgggtaaacctgtacgcttcgatgcgattggagaggtagatatctacaagcatgagccctgggatttagcagtgttttcgaagttgaaaactcgggaccaagaatggtacttcttcagtgcgttagataagaagtacggtaatggtgctaggatgaatcgagcaactaacaaagggtactggaaagcaactggaaaagacagagaaatccgccgggatattcagttgctcggtatgaaaaagacgcttgttttccacagcgggcgtgctccagacggccttcggactaattgggtcatgcacgagtatcgccttgtggaatatgaaactgaaactaacggaagcctgctgcaggatgcatatgtgttgtgcagagtgtttcacaagaataacattgggccaccaagtgggaacagatatgcgccattcatggaagaagaatgggctgatggtggaggagctctgattccaggaatagacgttagggtcagggtagaggctctaccacaagccaatggaaacaaccagatggaccaggaaatgcattcagcaagcaaggatctcattaacatcaacgagctaccgagagatgctactccaatggacatcgaacctaaccaacagaatcatcatgagagtgccttcaagccacaggagagtaacaaccatagtggttatgaagaggatgaggacacactcaaacgcgagcacgcagaagaagatgagcgtcctccttctctatgcattctcaacaaagaagctccactacctctcctgcaatacaaacgtagacgccaaaacgagtccaacaacaactcaagcaggaacacacaggaccattgttcgtccacaataacaaccgtcgacaatacaaccaccttaatctcatcatctgctgctgctgctaccaacactgccatctctgcattgcttgagttctcacttatgggtatctccgacaagaaagaaaaccagcagaaagaggaaacttctcctcctagtccaattgcatctcctgaagagaaggttaatgatctccagaaggaggttcaccagatgtctgttgaaagagaaactttcaagcttgagatgatgagtgcagaggctatgatcagcattctccagtcaagaatcgatgcgctgcgtcaggagaacgaggaacttaagaagaagaacgccagtggacaagctagttaaaccaccgcaacatctctccaggtgtcttcttcttcttcttcttcttctttgcctcttagctgtaatcttcttaatagtatgagctatggatgtagcttcttcagacggatcagaaaccttatgaatctctgttgtaaaattaggataaaacggaacggagccaaccaactaggtctttttattttatccttttttactttggatgtttctgcatcttttgggaacattttcaggctgatccattgtcgtatattatcatctatctatctagtcttttc

SEQ ID NO: 42227 - protein, 447 aa, Arabidopsis thaliana
  peptide (1)..(447): Ceres Seq. ID no. 13499949
MGRESLAVVSSPPSATAPSTAVSATSLAPGFRFHPTDEELVSYYLKRKVLGKPVRFDAIGEVDIYKHEPWDLAVFSKLKTRDQEWYFFSALDKKYGNGARMNRATNKGYWKATGKDREIRRDIQLLGMKKTLVFHSGRAPDGLRTNWVMHEYRLVEYETETNGSLLQDAYVLCRVFHKNNIGPPSGNRYAPFMEEEWADGGGALIPGIDVRVRVEALPQANGNNQMDQEMHSASKDLININELPRDATPMDIEPNQQNHHESAFKPQESNNHSGYEEDEDTLKREHAEEDERPPSLCILNKEAPLPLLQYKRRRQNESNNNSSRNTQDHCSSTITTVDNTTTLISSSAAAATNTAISALLEFSLMGISDKKENQQKEETSPPSPIASPEEKVNDLQKEVHQMSVERETFKLEMMSAEAMISILQSRIDALRQENEELKKKNASGQAS

SEQ ID NO: 42228 - protein, 347 aa, Arabidopsis thaliana
  peptide (1)..(347): Ceres Seq. ID no. 13499950
MNRATNKGYWKATGKDREIRRDIQLLGMKKTLVFHSGRAPDGLRTNWVMHEYRLVEYETETNGSLLQDAYVLCRVFHKNNIGPPSGNRYAPFMEEEWADGGGALIPGIDVRVRVEALPQANGNNQMDQEMHSASKDLININELPRDATPMDIEPNQQNHHESAFKPQESNNHSGYEEDEDTLKREHAEEDERPPSLCILNKEAPLPLLQYKRRRQNESNNNSSRNTQDHCSSTITTVDNTTTLISSSAAAATNTAISALLEFSLMGISDKKENQQKEETSPPSPIASPEEKVNDLQKEVHQMSVERETFKLEMMSAEAMISILQSRIDALRQENEELKKKNASGQAS

SEQ ID NO: 42229 - protein, 320 aa, Arabidopsis thaliana
  peptide (1)..(320): Ceres Seq. ID no. 13499951
MKKTLVFHSGRAPDGLRTNWVMHEYRLVEYETETNGSLLQDAYVLCRVFHKNNIGPPSGNRYAPFMEEEWADGGGALIPGIDVRVRVEALPQANGNNQMDQEMHSASKDLININELPRDATPMDIEPNQQNHHESAFKPQESNNHSGYEEDEDTLKREHAEEDERPPSLCILNKEAPLPLLQYKRRRQNESNNNSSRNTQDHCSSTITTVDNTTTLISSSAAAATNTAISALLEFSLMGISDKKENQQKEETSPPSPIASPEEKVNDLQKEVHQMSVERETFKLEMMSAEAMISILQSRIDALRQENEELKKKNASGQAS

SEQ ID NO: 42230 - DNA, 1353 bp, Arabidopsis thaliana
  misc_feature (1)..(1353): Ceres Seq. ID no. 13592834
  misc_feature (1)..(1353): Ortholog of  Ceres SEQ ID NO 15170501 as cited in SEQ ID NO 52774
aaaccctaaatctttttcttattcgaatctgttagccatccaaaacctctctctttgccgcaaaaaatgactagtacggagaacaacaacaacggctctgatgaaactcagacgacgaagttacacttcgaggatgctgatgaatcaatgcacgatggagatgacaacaatgccgatgttgctgatgacattaccagcgccgattactacttcgattcttactctcatttcggtattcatgaagaaatgttaaaggatgtagtgaggacaaagagttatcaagatgttatttacaagaacaagtttcttatcaaggacaaaattgttcttgatgttggagctggaactggaatcttgtctctcttctgtgctaaagcaggagcagctcacgtttacgcagttgagtgttctcaaatggctgacacaacaaaggagattgttaagtcgaatggattctcagatgttataacggttttgaaagggaagattgaggagatcgaacttccagttcctaaagtggatgtgattatctctgaatggatgggttactttctgttgtatgaaaatatgcttgacaccgtcttgtatgctcgcaataaatggcttgttgatggtggaattgttctaccagataaagcttctctttatgttactgccattgaggatgctcattataaagacgacaaagtagagttttgggacgacgtgtatgggtttgacatgtcgtgcatcaagagaagagcaattacagaaccgcttgttgacaccgttgatggtaaccaaatcgtgactgatagcaagctgctgaagacaatggatatctctaagatggctgctggagatgcttccttcacagctccgtttaagctcgtcgcacaacgaaatgaccatatccatgcccttgtagcctacttcgatgtgtcattcactatgtgtcacaagaagatgggtttctcaacaggaccgaaatcgcgggctacgcattggaaacaaactgtgctgtacctggaagatgtgttaaccatatgcgagggtgaaacaatcacaggaagcatgaccattgcacaaaacaaaaagaatcccagagacgtcgacataaagctcagctattctttgaacggccaacattgcaatatctcaaggacccacttctataagatgcgctaaaagctctcagaggatgtaaaatcccccacaagtacctttcatcatcttgaggctgagatggacaaatctcatttgtatctctactgtttccattattgctgcttatgtttcagaattagatattaaccatctctctttctctctcactgtgcgtctcttcctctatgatagtttcttgttcctctc

SEQ ID NO: 42231 - protein, 366 aa, Arabidopsis thaliana
  peptide (1)..(366): Ceres Seq. ID no. 13592835
MTSTENNNNGSDETQTTKLHFEDADESMHDGDDNNADVADDITSADYYFDSYSHFGIHEEMLKDVVRTKSYQDVIYKNKFLIKDKIVLDVGAGTGILSLFCAKAGAAHVYAVECSQMADTTKEIVKSNGFSDVITVLKGKIEEIELPVPKVDVIISEWMGYFLLYENMLDTVLYARNKWLVDGGIVLPDKASLYVTAIEDAHYKDDKVEFWDDVYGFDMSCIKRRAITEPLVDTVDGNQIVTDSKLLKTMDISKMAAGDASFTAPFKLVAQRNDHIHALVAYFDVSFTMCHKKMGFSTGPKSRATHWKQTVLYLEDVLTICEGETITGSMTIAQNKKNPRDVDIKLSYSLNGQHCNISRTHFYKMR

SEQ ID NO: 42232 - protein, 339 aa, Arabidopsis thaliana
  peptide (1)..(339): Ceres Seq. ID no. 13592836
MHDGDDNNADVADDITSADYYFDSYSHFGIHEEMLKDVVRTKSYQDVIYKNKFLIKDKIVLDVGAGTGILSLFCAKAGAAHVYAVECSQMADTTKEIVKSNGFSDVITVLKGKIEEIELPVPKVDVIISEWMGYFLLYENMLDTVLYARNKWLVDGGIVLPDKASLYVTAIEDAHYKDDKVEFWDDVYGFDMSCIKRRAITEPLVDTVDGNQIVTDSKLLKTMDISKMAAGDASFTAPFKLVAQRNDHIHALVAYFDVSFTMCHKKMGFSTGPKSRATHWKQTVLYLEDVLTICEGETITGSMTIAQNKKNPRDVDIKLSYSLNGQHCNISRTHFYKMR

SEQ ID NO: 42233 - protein, 306 aa, Arabidopsis thaliana
  peptide (1)..(306): Ceres Seq. ID no. 13592837
MLKDVVRTKSYQDVIYKNKFLIKDKIVLDVGAGTGILSLFCAKAGAAHVYAVECSQMADTTKEIVKSNGFSDVITVLKGKIEEIELPVPKVDVIISEWMGYFLLYENMLDTVLYARNKWLVDGGIVLPDKASLYVTAIEDAHYKDDKVEFWDDVYGFDMSCIKRRAITEPLVDTVDGNQIVTDSKLLKTMDISKMAAGDASFTAPFKLVAQRNDHIHALVAYFDVSFTMCHKKMGFSTGPKSRATHWKQTVLYLEDVLTICEGETITGSMTIAQNKKNPRDVDIKLSYSLNGQHCNISRTHFYKMR

SEQ ID NO: 42234 - DNA, 704 bp, Arabidopsis thaliana
  misc_feature (1)..(704): Ceres Seq. ID no. 12325848
  misc_feature (1)..(704): Ortholog of  Ceres SEQ ID NO 12587416 as cited in SEQ ID NO 68868
cttctcgaacaatcaaaaacgaactaaccaaacataaaattgaacacatcctcttcctctgctctctgcaaacaaaaaaacaccgattcggtcaggaatcattcgtcgtgaaatctgtaatggggattgttgtcaagtctttcaaggatcaattctcctctgatgagagattgaaggagtcgaacaacatcattgcgaaatatccagatagaatacctgtgatcattgagaaatattcaaacgcagatctgccagacatggagaagaacaaatacttggtcccacgagacatgactgttggacatttcatccatatgctaagcaaaaggatgcagttagatccatccaaagctctctttgttttcgtacacaacactcttcctcaaaccgctagtcgcatggactctctctacaatactttcaaggaagaagacgggttcttgtacatgtgctacagcaccgagaaaactttcggctaacaaaagatttgtcgcttcatatcgaaatcgaagcgcactctgaataatccatttgtttgattcctatgtttgtgaataacgtcagctcttgttgttactgttattgttgttgttagctgacattgtacagaaaagctaaaaaaaagaaagacatttgactttgtaaattatgtataatccaactatggcaataataataagaccaagtgatgatgattcacacgc

SEQ ID NO: 42235 - protein, 158 aa, Arabidopsis thaliana
  peptide (1)..(158): Ceres Seq. ID no. 12325849
SRTIKNELTKHKIEHILFLCSLQTKKHRFGQESFVVKSVMGIVVKSFKDQFSSDERLKESNNIIAKYPDRIPVIIEKYSNADLPDMEKNKYLVPRDMTVGHFIHMLSKRMQLDPSKALFVFVHNTLPQTASRMDSLYNTFKEEDGFLYMCYSTEKTFG

SEQ ID NO: 42236 - protein, 119 aa, Arabidopsis thaliana
  peptide (1)..(119): Ceres Seq. ID no. 12325850
MGIVVKSFKDQFSSDERLKESNNIIAKYPDRIPVIIEKYSNADLPDMEKNKYLVPRDMTVGHFIHMLSKRMQLDPSKALFVFVHNTLPQTASRMDSLYNTFKEEDGFLYMCYSTEKTFG

SEQ ID NO: 42237 - DNA, 1484 bp, Arabidopsis thaliana
  misc_feature (1)..(1484): Ceres Seq. ID no. 12389109
  misc_feature (1)..(1484): Ortholog of  Ceres SEQ ID NO 15170155 as cited in SEQ ID NO 64363
agttcctttttttttgttctccgaacgttctctcctctctgtctatcatcgaacgccgtcgctctcgccgttgacttctaccagtgaccccaacgccttcaatttccgcctcgtcggataatttcatcggagaagacaatggtgatggaagttacagagactgagcgatggtgcgttgtaactggtggtagaggattcgctgcaagacatcttgtagaaatgctcgtacgttaccaaatgttccacgttcgtatcgccgatttagctcctgcgatagtgctcgatcctcacgaggaaactggaattctcggtgaagcaattagatccggtagagttcaatacgtctccgctgatcttcggaacaaaactcaagttgtcaaaggttttcaaggagcagaagtggtgtttcatatggcagctccagattcatcgattaacaatcaccagcttcagtactcagttaatgttcaagggacaacaaatgtaattgatgcttgtattgaggttggagtaaagaggctaatctatacaagttctccgagtgttgtgtttgacggggtccatggtactttgaatgctgatgaatcactgccgtatccacctaagcataatgattcatattcagctactaaagctgaaggggaagctttgattttgaaagcgaatggaagaagtggactactcacttgttgcatacgtcctagcagcatatttggtcctggtgataaattaatggttccatcgcttgttactgctgccagggctgggaaatccaagttcattataggtgatgggagtaacttctatgatttcacttattttgaaaatgttgtgcacgcccatgtctgtgctgagcgagctctagcatcaggaggagaagtatgtgcaaaagctgctggccaggcttacttcattaccaacatggagccaattaaattttgggagtttatgtcacagcttcttgaaggacttggctatgagaggccaagtataaagatacctgcaagtctcatgatgccaatagcatatcttgtggaactagcatataaattactcggaccgtatgggatgaaagtaccagtgctaacaccttctagggttaggctactctcttgcaacagaacatttgattcttcaaaagcaaaggatcgtttaggctattctcctgttgtcccacttcaggaaggtataaagaggacaatagattcattctcacacttgaaagctcaaaatcaacccaaaacagaagagaaaatgaaagtgttcgggagcaagaagatcgactaaagaatactccaaatttgagctttgtgtaaggtaaacaacgacttattttttcctctatacattgataaacatgactcctgcgtgtgtagatggatgttgtttggtctgagttttgcgtcgtttattttacgatttgtaatttgaactctgtaactgtcgatttcggttactctgataccaaaatctatgaattgatg

SEQ ID NO: 42238 - protein, 382 aa, Arabidopsis thaliana
  peptide (1)..(382): Ceres Seq. ID no. 12389110
MVMEVTETERWCVVTGGRGFAARHLVEMLVRYQMFHVRIADLAPAIVLDPHEETGILGEAIRSGRVQYVSADLRNKTQVVKGFQGAEVVFHMAAPDSSINNHQLQYSVNVQGTTNVIDACIEVGVKRLIYTSSPSVVFDGVHGTLNADESLPYPPKHNDSYSATKAEGEALILKANGRSGLLTCCIRPSSIFGPGDKLMVPSLVTAARAGKSKFIIGDGSNFYDFTYFENVVHAHVCAERALASGGEVCAKAAGQAYFITNMEPIKFWEFMSQLLEGLGYERPSIKIPASLMMPIAYLVELAYKLLGPYGMKVPVLTPSRVRLLSCNRTFDSSKAKDRLGYSPVVPLQEGIKRTIDSFSHLKAQNQPKTEEKMKVFGSKKID

SEQ ID NO: 42239 - protein, 380 aa, Arabidopsis thaliana
  peptide (1)..(380): Ceres Seq. ID no. 12389111
MEVTETERWCVVTGGRGFAARHLVEMLVRYQMFHVRIADLAPAIVLDPHEETGILGEAIRSGRVQYVSADLRNKTQVVKGFQGAEVVFHMAAPDSSINNHQLQYSVNVQGTTNVIDACIEVGVKRLIYTSSPSVVFDGVHGTLNADESLPYPPKHNDSYSATKAEGEALILKANGRSGLLTCCIRPSSIFGPGDKLMVPSLVTAARAGKSKFIIGDGSNFYDFTYFENVVHAHVCAERALASGGEVCAKAAGQAYFITNMEPIKFWEFMSQLLEGLGYERPSIKIPASLMMPIAYLVELAYKLLGPYGMKVPVLTPSRVRLLSCNRTFDSSKAKDRLGYSPVVPLQEGIKRTIDSFSHLKAQNQPKTEEKMKVFGSKKID

SEQ ID NO: 42240 - protein, 355 aa, Arabidopsis thaliana
  peptide (1)..(355): Ceres Seq. ID no. 12389112
MLVRYQMFHVRIADLAPAIVLDPHEETGILGEAIRSGRVQYVSADLRNKTQVVKGFQGAEVVFHMAAPDSSINNHQLQYSVNVQGTTNVIDACIEVGVKRLIYTSSPSVVFDGVHGTLNADESLPYPPKHNDSYSATKAEGEALILKANGRSGLLTCCIRPSSIFGPGDKLMVPSLVTAARAGKSKFIIGDGSNFYDFTYFENVVHAHVCAERALASGGEVCAKAAGQAYFITNMEPIKFWEFMSQLLEGLGYERPSIKIPASLMMPIAYLVELAYKLLGPYGMKVPVLTPSRVRLLSCNRTFDSSKAKDRLGYSPVVPLQEGIKRTIDSFSHLKAQNQPKTEEKMKVFGSKKID

SEQ ID NO: 42241 - DNA, 1766 bp, Arabidopsis thaliana
  misc_feature (1)..(1766): Ceres Seq. ID no. 13497239
  misc_feature (1)..(1766): Ortholog of  Ceres SEQ ID NO 15176433 as cited in SEQ ID NO 59539
gagacgataatctcccaaatgtcatctccttcatctctcaggtaaaaaaactgagtcgagatttggtgacgtgatgaatcatttggtgataatctctgtgttcttgagctcagtattgttgttatatagaggagaatctggaatcacaagtagttttattcgatctgaatggcctgcggttgatataccacttgatcatcatgttttcaaagtcccaaaaggatataatgcaccacaacaagtacacataactcaaggtgattatgatggtaaagctgttatcatctcttgggttacacctgatgaacctggttctagccaagtacattacggtgcggttcaggggaaatatgagtttgttgctcaagggacttaccataactacacgttttacaagtataagtctggctttattcatcactgccttgtctctgaccttgagcatgatacaaaatactattacaagattgaaagcggtgaatcttctcgagagttttggtttgttacaccaccacatgtacatccagatgcttcctacaagtttggtattataggcgatatgggtcagacattcaactcgttatccacgttggaacattacatggagagtggagctcaggctgttttatttcttggagatctttcttatgctgatagatatcagtataatgacgttggtgtgagatgggatagctggggtcgttttgtggagcgtagtaccgcttatcaaccgtggctttggtctgcaggaaatcatgaagtagattacatgccatacatgggggaggtgacacctttcaggaattaccttcagcgttacactacgccttacttagcctcaaaaagtagcagtcctctttggtacgctgttaggcgtgcatctgctcatatcattgtcctctccagctattcgccttttgtgaagtataccccgcaatggcactggcttagtgaagagcttacaagagttgatagggagaaaacaccttggctaattgttttgatgcacgtcccaatatacaacagtaatgaagcacatttcatggagggtgaaagcatgcgagcagcttttgaggagtggtttgtccaacacaaagttgatgtaatctttgctgggcatgttcatgcctacgagagatcgtaccgaatatcaaatgtgcggtataacgtgtcaagcggagatcgttacccagttccagataagtcagcgcctgtttatatcacagttggagacggaggaaatcaagaaggtctggctggaaggtttacggaaccacagccagattattctgcatttcgggaagctagctatggccactctactctggatataaagaaccgaacacacgctatataccactggaaccgcaatgatgatgggaagaaagtggcaacggatgaatttgtattacacaaccagtactggggaaagaacattcgacggagaaagcttaagaagcattatatcaggagtgttgttggtggctggatcgccacttaattcactaagtctgcctcatgctttgtatcaaagtgtgtgaggatattcttttaactcggaacttattacttaatttgatgttaaatctctttcccgcttaagttttcagcaatctggaatatgaagggaattatgtattcttatcagtcttttgatgaagtgaggtctacttctgggattatggatttggtgaataatgtattccttagaacggtgttaaggaattgtttcacatgggtgtgaattgagaagtccatttgtgttt

SEQ ID NO: 42242 - protein, 475 aa, Arabidopsis thaliana
  peptide (1)..(475): Ceres Seq. ID no. 13497240
MNHLVIISVFLSSVLLLYRGESGITSSFIRSEWPAVDIPLDHHVFKVPKGYNAPQQVHITQGDYDGKAVIISWVTPDEPGSSQVHYGAVQGKYEFVAQGTYHNYTFYKYKSGFIHHCLVSDLEHDTKYYYKIESGESSREFWFVTPPHVHPDASYKFGIIGDMGQTFNSLSTLEHYMESGAQAVLFLGDLSYADRYQYNDVGVRWDSWGRFVERSTAYQPWLWSAGNHEVDYMPYMGEVTPFRNYLQRYTTPYLASKSSSPLWYAVRRASAHIIVLSSYSPFVKYTPQWHWLSEELTRVDREKTPWLIVLMHVPIYNSNEAHFMEGESMRAAFEEWFVQHKVDVIFAGHVHAYERSYRISNVRYNVSSGDRYPVPDKSAPVYITVGDGGNQEGLAGRFTEPQPDYSAFREASYGHSTLDIKNRTHAIYHWNRNDDGKKVATDEFVLHNQYWGKNIRRRKLKKHYIRSVVGGWIAT

SEQ ID NO: 42243 - protein, 313 aa, Arabidopsis thaliana
  peptide (1)..(313): Ceres Seq. ID no. 13497241
MGQTFNSLSTLEHYMESGAQAVLFLGDLSYADRYQYNDVGVRWDSWGRFVERSTAYQPWLWSAGNHEVDYMPYMGEVTPFRNYLQRYTTPYLASKSSSPLWYAVRRASAHIIVLSSYSPFVKYTPQWHWLSEELTRVDREKTPWLIVLMHVPIYNSNEAHFMEGESMRAAFEEWFVQHKVDVIFAGHVHAYERSYRISNVRYNVSSGDRYPVPDKSAPVYITVGDGGNQEGLAGRFTEPQPDYSAFREASYGHSTLDIKNRTHAIYHWNRNDDGKKVATDEFVLHNQYWGKNIRRRKLKKHYIRSVVGGWIAT

SEQ ID NO: 42244 - protein, 299 aa, Arabidopsis thaliana
  peptide (1)..(299): Ceres Seq. ID no. 13497242
MESGAQAVLFLGDLSYADRYQYNDVGVRWDSWGRFVERSTAYQPWLWSAGNHEVDYMPYMGEVTPFRNYLQRYTTPYLASKSSSPLWYAVRRASAHIIVLSSYSPFVKYTPQWHWLSEELTRVDREKTPWLIVLMHVPIYNSNEAHFMEGESMRAAFEEWFVQHKVDVIFAGHVHAYERSYRISNVRYNVSSGDRYPVPDKSAPVYITVGDGGNQEGLAGRFTEPQPDYSAFREASYGHSTLDIKNRTHAIYHWNRNDDGKKVATDEFVLHNQYWGKNIRRRKLKKHYIRSVVGGWIAT

SEQ ID NO: 42245 - DNA, 1669 bp, Arabidopsis thaliana
  misc_feature (1)..(1669): Ceres Seq. ID no. 12482563
  misc_feature (1)..(1669): Ortholog of  Ceres SEQ ID NO 15177692 as cited in SEQ ID NO 52664
ttcttccatctctctcaaacttctgaaaatcttcttcttcttctcaatcataaaccctaaatcttcatctcttcagatcagaaactaatgtccattcaaagacaccctgtcctgtttcatctctgtcattagtcttctgttttcagattccaattttttttcttgaattatcctcttagccatttcttgatttaacttcgattttcccggcgatgttacgagaatcagacggtgagatgagtttaggaacaacaaactcaccgataagcagcggaacagagagttgcagcagtttcagccggttatcattcgacgcgccgccgtcaactatccccgaagaagaaagcttcctttctctcaaacctcaccgatcctcagatttcgcttacgcagagatccgaagacgaaaaaaacaaggcctaaccttccgagattttcgcctcatgcgtcgtatcggcgccggcgacatcggaacagtttacttatgccgtctagccggagacgaagaagagagccggagctcgtattttgcgatgaaagttgtggataaagaagctcttgcgttgaagaagaagatgcatagagcagagatggagaaaacgattttgaaaatgcttgaccatccatttttgccgactctttacgctgagtttgaagcctcacatttctcttgcatcgttatggaatattgctccggtggtgatttacactctctccgtcatagacaacctcaccggcgattctccctctcttccgccagattttatgccgccgaagttctagtggcgttagaatatctacacatgttgggtatcatctacagagatctgaagcctgaaaatatcttagttagatccgacggtcacattatgctctctgactttgacctctctctatgctccgactcaatcgcagccgttgaatcttcctcgtcttcgccggagaatcaacaactccgttcaccgcgacgattcactcgtctcgctagacttttccaacgagtcttgcggtctaaaaaggttcagactttagaaccaacccgtctctttgttgctgaaccggttactgcccggtccggttcgttcgttggtacgcatgaatacgtggcaccagaagttgcttcaggtggatcacatggtaatgccgttgactggtgggcctttggagtgtttctctacgagatgatatatggcaagactccgttcgttgcgccgactaatgacgtcattctccgtaacattgtgaaaagacagttgagtttcccgactgattcgccggcgactatgtttgagcttcatgcgcggaatttgatttccgggttgcttaacaaagatccgactaaaagacttgggtcacggcgaggtgcggcggaggttaaagtgcatccttttttcaaaggtctaaactttgcgctcattcgtacgcttactccgccggagattccttcttccgtcgtcaagaagccgatgaaatcggcgacgtttagtggtagaagtagtaacaaaccagcggcgttcgattacttttgaacgttttctacggtcgagattagggccacgtgttagtctgttttagctgtacatattccctcgaagctgtcctttttttcgttctttaatttttaaaatttcgttaatctgacttataaattaaaaatttaggtgacttt

SEQ ID NO: 42246 - protein, 438 aa, Arabidopsis thaliana [sequence omitted]

SEQ ID NO: 42247 - protein, 430 aa, Arabidopsis thaliana
  peptide (1)..(430): Ceres Seq. ID no. 12482565
MSLGTTNSPISSGTESCSSFSRLSFDAPPSTIPEEESFLSLKPHRSSDFAYAEIRRRKKQGLTFRDFRLMRRIGAGDIGTVYLCRLAGDEEESRSSYFAMKVVDKEALALKKKMHRAEMEKTILKMLDHPFLPTLYAEFEASHFSCIVMEYCSGGDLHSLRHRQPHRRFSLSSARFYAAEVLVALEYLHMLGIIYRDLKPENILVRSDGHIMLSDFDLSLCSDSIAAVESSSSSPENQQLRSPRRFTRLARLFQRVLRSKKVQTLEPTRLFVAEPVTARSGSFVGTHEYVAPEVASGGSHGNAVDWWAFGVFLYEMIYGKTPFVAPTNDVILRNIVKRQLSFPTDSPATMFELHARNLISGLLNKDPTKRLGSRRGAAEVKVHPFFKGLNFALIRTLTPPEIPSSVVKKPMKSATFSGRSSNKPAAFDYF

SEQ ID NO: 42248 - protein, 361 aa, Arabidopsis thaliana
  peptide (1)..(361): Ceres Seq. ID no. 12482566
MRRIGAGDIGTVYLCRLAGDEEESRSSYFAMKVVDKEALALKKKMHRAEMEKTILKMLDHPFLPTLYAEFEASHFSCIVMEYCSGGDLHSLRHRQPHRRFSLSSARFYAAEVLVALEYLHMLGIIYRDLKPENILVRSDGHIMLSDFDLSLCSDSIAAVESSSSSPENQQLRSPRRFTRLARLFQRVLRSKKVQTLEPTRLFVAEPVTARSGSFVGTHEYVAPEVASGGSHGNAVDWWAFGVFLYEMIYGKTPFVAPTNDVILRNIVKRQLSFPTDSPATMFELHARNLISGLLNKDPTKRLGSRRGAAEVKVHPFFKGLNFALIRTLTPPEIPSSVVKKPMKSATFSGRSSNKPAAFDYF

SEQ ID NO: 42249 - DNA, 1338 bp, Arabidopsis thaliana
  misc_feature (1)..(1338): Ceres Seq. ID no. 12422062
  misc_feature (1)..(1338): Ortholog of  Ceres SEQ ID NO 15170866 as cited in SEQ ID NO 54810
atatatagtttcaggtcacctgttgcacaatctctgctcagccctaaaagcttactcctttcaactttctggaggccttctcgtagcctagcgtcatagatggatttgatggagaagaacttggagttagtggagattcagaaactagaaggccacaccgatcgtgtttggagcgtagcttggaaccccgtttcttctcacgccgacggtgtttcaccgattcttgcttcttgcagtggcgataacactgttcgaatctgggaacaaagctctctctctcgctcctggacttgcaagacagttttggaagagacgcatacaagaactgtgaggtcgtgcgcttggtcaccctcaggacagttattggccactgcaagttttgatggtaccactggcatttggaagaattacggttctgagtttgagtgtatttccactttggagggacatgaaaacgaagtcaaaagtgtatcatggaatgcatctggttcatgccttgcaacatgtagtagagataagtctgtttggatttgggaagtgcttgaagggaatgaatatgactgtgctgcggtattaactgggcatacacaagatgtgaagatggttcagtggcatcccaccatggatgttttattttcttgcagttatgataacaccatcaaggtttggtggtctgaagatgatgatggtgagtatcaatgtgtccaaaccttaggtgaatctaacaacggtcactcttcaacggtatggtccatctcatttaacgctgcaggggacaagatggtcacttgtagtgatgatctaaccttgaagatatgggggacagatattgccaagatgcagtctggtgaagaatatgcaccttggattcatctttgtactctctctggctatcatgaccgtaccatatactcagctcactggtcaagggacgacattattgccagtggagcaggcgataatgctatacggttgtttgtggacagcaaacatgactctgttgatggaccttcatataatcttttgctgaagaagaataaagcacatgaaaatgatgtaaactctgtccaatggtcacccggtgaggggaaccggttgcttgcgtcggctagtgatgatgggatggtcaagatttggcagcttgcaactaaaccgtgactgctgttggtttggataggttctgaaactcctgtgttgttttactttttctgaggtctatctgtaaacaacataacattttaggtagaagagaactctatactattttgtcatacaagattagctccatgatgtttcatacgatttctgttttacttttactacgatcacttaagtttt

SEQ ID NO: 42250 - protein, 352 aa, Arabidopsis thaliana
  peptide (1)..(352): Ceres Seq. ID no. 12422063
MDLMEKNLELVEIQKLEGHTDRVWSVAWNPVSSHADGVSPILASCSGDNTVRIWEQSSLSRSWTCKTVLEETHTRTVRSCAWSPSGQLLATASFDGTTGIWKNYGSEFECISTLEGHENEVKSVSWNASGSCLATCSRDKSVWIWEVLEGNEYDCAAVLTGHTQDVKMVQWHPTMDVLFSCSYDNTIKVWWSEDDDGEYQCVQTLGESNNGHSSTVWSISFNAAGDKMVTCSDDLTLKIWGTDIAKMQSGEEYAPWIHLCTLSGYHDRTIYSAHWSRDDIIASGAGDNAIRLFVDSKHDSVDGPSYNLLLKKNKAHENDVNSVQWSPGEGNRLLASASDDGMVKIWQLATKP

SEQ ID NO: 42251 - protein, 349 aa, Arabidopsis thaliana
  peptide (1)..(349): Ceres Seq. ID no. 12422064
MEKNLELVEIQKLEGHTDRVWSVAWNPVSSHADGVSPILASCSGDNTVRIWEQSSLSRSWTCKTVLEETHTRTVRSCAWSPSGQLLATASFDGTTGIWKNYGSEFECISTLEGHENEVKSVSWNASGSCLATCSRDKSVWIWEVLEGNEYDCAAVLTGHTQDVKMVQWHPTMDVLFSCSYDNTIKVWWSEDDDGEYQCVQTLGESNNGHSSTVWSISFNAAGDKMVTCSDDLTLKIWGTDIAKMQSGEEYAPWIHLCTLSGYHDRTIYSAHWSRDDIIASGAGDNAIRLFVDSKHDSVDGPSYNLLLKKNKAHENDVNSVQWSPGEGNRLLASASDDGMVKIWQLATKP

SEQ ID NO: 42252 - protein, 185 aa, Arabidopsis thaliana
  peptide (1)..(185): Ceres Seq. ID no. 12422065
MVQWHPTMDVLFSCSYDNTIKVWWSEDDDGEYQCVQTLGESNNGHSSTVWSISFNAAGDKMVTCSDDLTLKIWGTDIAKMQSGEEYAPWIHLCTLSGYHDRTIYSAHWSRDDIIASGAGDNAIRLFVDSKHDSVDGPSYNLLLKKNKAHENDVNSVQWSPGEGNRLLASASDDGMVKIWQLATKP

SEQ ID NO: 42253 - DNA, 1048 bp, Arabidopsis thaliana
  misc_feature (1)..(1048): Ceres Seq. ID no. 12422952
  misc_feature (1)..(1048): Ortholog of  Ceres SEQ ID NO 12473977 as cited in SEQ ID NO 133
  misc_feature (1)..(1048): Ortholog of  Ceres SEQ ID NO 12585294 as cited in SEQ ID NO 63023
ggagtctctcttgtcttcgtttgtgtttgttttttttggactttgaccttccttggcttggacttgagaccaaaaaaaaaaaaaggagaagaagaccatcgttgttctccgatggctattaacagaattgctcatggttctctgtttctgacggtagtcttgttctttctgacggttaattacggcgaagctatatggttgacgattccgacgacgggtggaacgaagtgtgtctccgaggagatacagagcaacgtcgtcgttttggctgattactatgtcgtcgatgagcataatcctgaaaatacacctgctgtttcttctaaggtaacatctccgtatgggaacaatcttcatcaccaagaaaatgtaacacatggtcagtttgcattcacaactcaagaagctgggaactacttggcttgtttctggattgattccagtcatcacttagccaatcctataacccttggggttgattggaagatgggtattgcagctaaagactgggactctgttgctaaaaaggaaaagatcgagggtgttgagcttcagttgaggagacttgaagggttggtgctgtcgattcgtgagaacttaaactatataaaagacagggaagcggagatgcgagaagtgagtgaaacaaccaactcaagagtggcttggttcagtataatgtcactcggggtttgcgttgtggttgtgggttcacagatactgtatctgaagaggtatttccacaagaagaaacttatctagaaacttggcctgaaggatactcttactatatattagtaacatcacacatccctaccttgaaaagagggataagctcaagattgtagagttgaattggttaaaaaatcgaagaacgcgttttcatttatattttctgtgaaactttactactgtcgatagttagagatcattgagtttgtgcacagtcacttttgtgttttgattgatctcttttggagttaaaaaaaaaaatacaggtaatgtgacaatgtaccaaaagttctttctttcacaggcattttggggt

SEQ ID NO: 42254 - protein, 253 aa, Arabidopsis thaliana
  peptide (1)..(253): Ceres Seq. ID no. 12422953
GVSLVFVCVCFFWTLTFLGLDLRPKKKKGEEDHRCSPMAINRIAHGSLFLTVVLFFLTVNYGEAIWLTIPTTGGTKCVSEEIQSNVVVLADYYVVDEHNPENTPAVSSKVTSPYGNNLHHQENVTHGQFAFTTQEAGNYLACFWIDSSHHLANPITLGVDWKMGIAAKDWDSVAKKEKIEGVELQLRRLEGLVLSIRENLNYIKDREAEMREVSETTNSRVAWFSIMSLGVCVVVVGSQILYLKRYFHKKKLI

SEQ ID NO: 42255 - protein, 216 aa, Arabidopsis thaliana
  peptide (1)..(216): Ceres Seq. ID no. 12422954
MAINRIAHGSLFLTVVLFFLTVNYGEAIWLTIPTTGGTKCVSEEIQSNVVVLADYYVVDEHNPENTPAVSSKVTSPYGNNLHHQENVTHGQFAFTTQEAGNYLACFWIDSSHHLANPITLGVDWKMGIAAKDWDSVAKKEKIEGVELQLRRLEGLVLSIRENLNYIKDREAEMREVSETTNSRVAWFSIMSLGVCVVVVGSQILYLKRYFHKKKLI

SEQ ID NO: 42256 - DNA, 1390 bp, Arabidopsis thaliana
  misc_feature (1)..(1390): Ceres Seq. ID no. 12325882
  misc_feature (1)..(1390): Ortholog of  Ceres SEQ ID NO 13597161 as cited in SEQ ID NO 63998
aataagaacaataaccaaaaactcccaaattaattttgcttaagcagcagcagaagaagaagcatggcggaacaagaattacagagaatcaatgagaagaagccatggcaagttctcgagttctacagtggaatcggtggaatgagatactctttaatggcgtcaggcatcgtctcagaagtagtagaagcttttgagatcaatgattctgctaatgatgtttatcaacataatttcaaacatcgtccctatcaggggaatattcagagtctcactgctgctgatttagataagtataatgcagatgcttggcttctttctcctccttgtcaaccttatactagacaaggccttcagaaacactctggtgatgctcgggcttcttcgtttctcaggattcttgagcttataccgcatacaacaaagcctccacaaatgttatttgtagagaatgttgttggatttgagacttcggatacacatatggaaatgattggtacattaacaaaattagattatgtcacacaagagtttatattgagtccgctgcagtttggtgtgccgtattcaagaccacgttatttctgcctggccaaaagaaaacctctgccatttaagtcccaacacagtaataacaaactactctggtctccagacccgttatatgggcgtgatgatcaggttgagtttggaaaatgtcaagcagaagaaggattggataaattacttgagttttgcgaaccagtagagaagtttctcgagttagctgcacatgttgatggcgagccaagtagtgttgatgactctgaaaatgggtccaaagattgttgtggacaagaaggcgattctgtcccagactctgtacatcagtatctagtaccagttagtttgatagagagatggggaaacgcaatggacattgtttaccctgattcaaagagatgttgttgtttcacaaagagttattatcgatacgtgaagggcacaggttccctattggcaactgtccagccaaaaatcaagggtaaggaatcttgtttgaaggagcaacggcttagatacttcacccctagagaggtagctaactttcactcattccctgaagattttgagttccccaagcacataagccttcgacaaagatacgcaatgcttggaaacagtttaagtgtagcagtggtggctcctctgcttcggtatctattcgattcttgactacacaatttgatgcactaagtgacgcgaccaattaccggaatcagttattctcctgaacaagcttctactacttttttgtttactgataaagttcaaactgatgaacttacgttttgttatcgatccttaactttatgggccagtattttaaatgggccttattcggcccgtt

SEQ ID NO: 42257 - protein, 383 aa, Arabidopsis thaliana
  peptide (1)..(383): Ceres Seq. ID no. 12325883
MAEQELQRINEKKPWQVLEFYSGIGGMRYSLMASGIVSEVVEAFEINDSANDVYQHNFKHRPYQGNIQSLTAADLDKYNADAWLLSPPCQPYTRQGLQKHSGDARASSFLRILELIPHTTKPPQMLFVENVVGFETSDTHMEMIGTLTKLDYVTQEFILSPLQFGVPYSRPRYFCLAKRKPLPFKSQHSNNKLLWSPDPLYGRDDQVEFGKCQAEEGLDKLLEFCEPVEKFLELAAHVDGEPSSVDDSENGSKDCCGQEGDSVPDSVHQYLVPVSLIERWGNAMDIVYPDSKRCCCFTKSYYRYVKGTGSLLATVQPKIKGKESCLKEQRLRYFTPREVANFHSFPEDFEFPKHISLRQRYAMLGNSLSVAVVAPLLRYLFDS

SEQ ID NO: 42258 - protein, 357 aa, Arabidopsis thaliana
  peptide (1)..(357): Ceres Seq. ID no. 12325884
MRYSLMASGIVSEVVEAFEINDSANDVYQHNFKHRPYQGNIQSLTAADLDKYNADAWLLSPPCQPYTRQGLQKHSGDARASSFLRILELIPHTTKPPQMLFVENVVGFETSDTHMEMIGTLTKLDYVTQEFILSPLQFGVPYSRPRYFCLAKRKPLPFKSQHSNNKLLWSPDPLYGRDDQVEFGKCQAEEGLDKLLEFCEPVEKFLELAAHVDGEPSSVDDSENGSKDCCGQEGDSVPDSVHQYLVPVSLIERWGNAMDIVYPDSKRCCCFTKSYYRYVKGTGSLLATVQPKIKGKESCLKEQRLRYFTPREVANFHSFPEDFEFPKHISLRQRYAMLGNSLSVAVVAPLLRYLFDS

SEQ ID NO: 42259 - protein, 352 aa, Arabidopsis thaliana
  peptide (1)..(352): Ceres Seq. ID no. 12325885
MASGIVSEVVEAFEINDSANDVYQHNFKHRPYQGNIQSLTAADLDKYNADAWLLSPPCQPYTRQGLQKHSGDARASSFLRILELIPHTTKPPQMLFVENVVGFETSDTHMEMIGTLTKLDYVTQEFILSPLQFGVPYSRPRYFCLAKRKPLPFKSQHSNNKLLWSPDPLYGRDDQVEFGKCQAEEGLDKLLEFCEPVEKFLELAAHVDGEPSSVDDSENGSKDCCGQEGDSVPDSVHQYLVPVSLIERWGNAMDIVYPDSKRCCCFTKSYYRYVKGTGSLLATVQPKIKGKESCLKEQRLRYFTPREVANFHSFPEDFEFPKHISLRQRYAMLGNSLSVAVVAPLLRYLFDS

SEQ ID NO: 42260 - DNA, 1135 bp, Arabidopsis thaliana
  misc_feature (1)..(1135): Ceres Seq. ID no. 13488073
  misc_feature (1)..(1135): Ortholog of  Ceres SEQ ID NO 13594298 as cited in SEQ ID NO 57803
  misc_feature (1)..(1135): Ortholog of  Ceres SEQ ID NO 13503476 as cited in SEQ ID NO 61978
  misc_feature (1)..(1135): Ortholog of  Ceres SEQ ID NO 12578438 as cited in SEQ ID NO 62201
  misc_feature (1)..(1135): Ortholog of  Ceres SEQ ID NO 12617675 as cited in SEQ ID NO 64656
aaaaaactcatcatcataagcaacaatggtggtgtcactcttctcttccagaaatgttttctatacgttaagcttatgcttatttgcagcattataccagccggttatgagtagaccggctaagtttgaagatgactttaggatcgcatggtccgatactcatatcactcaaattgacggaggcagagccattcagctcaaattggaccctagctcaggatgtggatttgcttcgaagaagcaatacttgttcggccgtgtgagcatgaaaatcaaactgatccccggtgattctgccgggactgtcactgccttctacatgaattcagataccgattcggtacgagacgagcttgattttgagttcttaggaaatcgaagtggacaaccttacacagtgcaaaccaatgtgtttgctcatggtaaaggcgatagagagcaaagagttaacctttggttcgacccttctcgtgatttccacgaatatgccatctcatggaaccatctccgtattgtcttctacgtagacaatgtgcccatcagggtttacaagaacaatgaggcaaggaaagtaccatacccaagattccaaccaatgggtgtatattccacgttatgggaagccgatgattgggcgacacgtggaggaatagagaaaatcaattggtcgagagcgccattttatgcttattacaaagattttgatatagaaggatgtccggttccaggacccgcagattgtcccgctaattcgaagaattggtgggaaggcagtgcgtaccaccagttgagtccggtggaagctcgaagttatagatgggtccgagtgaaccatatggtctacgattattgcactgacaaatctcgttttcctgttccacctccagaatgctcggctggaatctgatccaaacattattgtcttaaaagcaaaacaagtgcgaagtggttccataagcaacgttgcaatgtatgtgaagtgattaatgagtcttgtggtatgtggtgaattgctcataatcgatctgattgtggtcaaatgttcatatatatatgtatatctttgaattttactttgttttcatgatgtcttatgttttgttgatctattgaagagaaccatgtttgtttgttg

SEQ ID NO: 42261 - protein, 293 aa, Arabidopsis thaliana
  peptide (1)..(293): Ceres Seq. ID no. 13488074
MVVSLFSSRNVFYTLSLCLFAALYQPVMSRPAKFEDDFRIAWSDTHITQIDGGRAIQLKLDPSSGCGFASKKQYLFGRVSMKIKLIPGDSAGTVTAFYMNSDTDSVRDELDFEFLGNRSGQPYTVQTNVFAHGKGDREQRVNLWFDPSRDFHEYAISWNHLRIVFYVDNVPIRVYKNNEARKVPYPRFQPMGVYSTLWEADDWATRGGIEKINWSRAPFYAYYKDFDIEGCPVPGPADCPANSKNWWEGSAYHQLSPVEARSYRWVRVNHMVYDYCTDKSRFPVPPPECSAGI

SEQ ID NO: 42262 - protein, 266 aa, Arabidopsis thaliana
  peptide (1)..(266): Ceres Seq. ID no. 13488075
MSRPAKFEDDFRIAWSDTHITQIDGGRAIQLKLDPSSGCGFASKKQYLFGRVSMKIKLIPGDSAGTVTAFYMNSDTDSVRDELDFEFLGNRSGQPYTVQTNVFAHGKGDREQRVNLWFDPSRDFHEYAISWNHLRIVFYVDNVPIRVYKNNEARKVPYPRFQPMGVYSTLWEADDWATRGGIEKINWSRAPFYAYYKDFDIEGCPVPGPADCPANSKNWWEGSAYHQLSPVEARSYRWVRVNHMVYDYCTDKSRFPVPPPECSAGI

SEQ ID NO: 42263 - protein, 213 aa, Arabidopsis thaliana
  peptide (1)..(213): Ceres Seq. ID no. 13488076
MKIKLIPGDSAGTVTAFYMNSDTDSVRDELDFEFLGNRSGQPYTVQTNVFAHGKGDREQRVNLWFDPSRDFHEYAISWNHLRIVFYVDNVPIRVYKNNEARKVPYPRFQPMGVYSTLWEADDWATRGGIEKINWSRAPFYAYYKDFDIEGCPVPGPADCPANSKNWWEGSAYHQLSPVEARSYRWVRVNHMVYDYCTDKSRFPVPPPECSAGI

SEQ ID NO: 42264 - DNA, 1501 bp, Arabidopsis thaliana
  misc_feature (1)..(1501): Ceres Seq. ID no. 12579981
  misc_feature (1)..(1501): Ortholog of  Ceres SEQ ID NO 14314363 as cited in SEQ ID NO 52272
acttgagtttcgtcttccattcctgttttttttcagagaccggcaaaataaaaaaaaagaagatcgtacaactaaaaatacctcaaagaaggaagatacaaaagtagtaacctttgttggtgattgatactatatctgttgtgggttttagacaaagaccacgtctttgcagttgtagattggaattttccggatctttctgtaaatcgctttttctccgagcaacttttgtttggggttaagctcaaagaatccgttcttttcagtctttactccatctagggtaccacgattggatcggtttttatctgatgatttagtaacagagattttgaagaaaaagaaaaatgggagatactagtccaagaacatcagtctcaacagatggagacactgatcataataacctaatgttcgatgaagggcatttgggtatcggtgcttctgattctagtgaccgttcaaagagtaaaatggatcaaaagacgcttcgtaggctcgctcaaaaccgtgaggctgcaaggaaaagcagattgaggaagaaagcatatgttcagcagctagagaacagtcgattgaagctaacacaacttgagcaggagctacaaagagcacggcaacagggtgtctttatctcaagctctggagaccaagcccattctaccgctggagatggggcaatggcatttgatgtagaatacagacgatggcaggaagataaaaacagacagatgaaggagctgagttctgctatagattctcacgcgactgattctgagcttcggataattgtagatggagtaatagctcactatgaggagctttacaggataaaaggcaacgcagctaagagtgatgtcttccatttattatcagggatgtggaaaaccccagctgagagatgtttcttgtggctcggcggtttccgttcatcagaacttctcaagcgagtcagttggagcccttgacagaacaacaatcgctagacataaataacttgcaacagtcttctcagcaagcagaagatgctttgtctcaagggatggacaacttacagcaatcactcgctgatactttatcgagtgggactctcggttcaagttcatcagggaatgtagctagctacatgggtcagatggccatggcgatggggaagttaggtacccttgaaggatttatccgccaggctgataacttaaggctacaaacatatcaacagatggtgagactattaacaacccgacaatcggctcgtgctctccttgcagtacacaattatacattgcggttacgtgctcttagctctctatggcttgccagaccaagagagtgaaccatgactctattatacttcaacgaaggtccagaaaatttgagattcttagcataagatttgacgactttagacacgtagctcgtatacaagattatgattatactgttttgtgttgtaatgtttgtgtgtaatgaatgtatcttgaaaaaatcataaaagtcccgt

SEQ ID NO: 42265 - protein, 206 aa, Arabidopsis thaliana
  peptide (1)..(206): Ceres Seq. ID no. 12579982
MGDTSPRTSVSTDGDTDHNNLMFDEGHLGIGASDSSDRSKSKMDQKTLRRLAQNREAARKSRLRKKAYVQQLENSRLKLTQLEQELQRARQQGVFISSSGDQAHSTAGDGAMAFDVEYRRWQEDKNRQMKELSSAIDSHATDSELRIIVDGVIAHYEELYRIKGNAAKSDVFHLLSGMWKTPAERCFLWLGGFRSSELLKRVSWSP

SEQ ID NO: 42266 - protein, 185 aa, Arabidopsis thaliana
  peptide (1)..(185): Ceres Seq. ID no. 12579983
MFDEGHLGIGASDSSDRSKSKMDQKTLRRLAQNREAARKSRLRKKAYVQQLENSRLKLTQLEQELQRARQQGVFISSSGDQAHSTAGDGAMAFDVEYRRWQEDKNRQMKELSSAIDSHATDSELRIIVDGVIAHYEELYRIKGNAAKSDVFHLLSGMWKTPAERCFLWLGGFRSSELLKRVSWSP

SEQ ID NO: 42267 - protein, 164 aa, Arabidopsis thaliana
  peptide (1)..(164): Ceres Seq. ID no. 12579984
MDQKTLRRLAQNREAARKSRLRKKAYVQQLENSRLKLTQLEQELQRARQQGVFISSSGDQAHSTAGDGAMAFDVEYRRWQEDKNRQMKELSSAIDSHATDSELRIIVDGVIAHYEELYRIKGNAAKSDVFHLLSGMWKTPAERCFLWLGGFRSSELLKRVSWSP

SEQ ID NO: 42268 - DNA, 1224 bp, Arabidopsis thaliana
  misc_feature (1)..(1224): Ceres Seq. ID no. 12581246
  misc_feature (1)..(1224): Ortholog of  Ceres SEQ ID NO 13595164 as cited in SEQ ID NO 56222
  misc_feature (1)..(1224): Ortholog of  Ceres SEQ ID NO 13595665 as cited in SEQ ID NO 59902
  misc_feature (1)..(1224): Ortholog of  Ceres SEQ ID NO 14302438 as cited in SEQ ID NO 62982
  misc_feature (1)..(1224): Ortholog of  Ceres SEQ ID NO 13591068 as cited in SEQ ID NO 69043
  misc_feature (1)..(1224): Ortholog of  Ceres SEQ ID NO 13623041 as cited in SEQ ID NO 0
actaataattcgtttaaacgcaaagtttcagaaaacagaccaacatggaagatcggtgcttgatcaagaacgatgtcactgaattgattggtaacacaccaatggtgtatctgaacaatgttgttgatggttgcgtggctcgtatcgctgcaaagcttgagatgatggagccttgttctagcgtcaaagacagaatcgcgtatagtatgatcaaagatgcagaagaaaaaggattgattactcccggaaagagtacattgatagagccaactgctggtaacaccgggattggtttagcttgcatgggagctgcaagaggctataaagtgatccttgtgatgccttcaactatgagcttagagagaagaatcattctgagggcactaggtgcagagcttcatctctcggaccagcgcataggccttaaaggaatgttggagaaaactgaagcgattttaagcaaaactcctggtggttacattccacaacaatttgaaaatcctgcaaaccccgagattcattaccgaaccacgggaccggaaatatggagagattcagccgggaaagtagatatattggtcgctggcgtagggactggtggaactgctactggagtagggaagttcctcaaggagcagaacaaagacatcaaggtttgtgtggtggaaccagtagaaagtccggtacttagcggaggtcaaccaggtccacatttgattcagggaattggctctggtatcgtcccattcaatttggacttaaccattgttgatgaaattattcaagtggcaggtgaagaggctattgaaacagccaagcttcttgccctcaaagaaggattactggtgggaatatcctctggagccgcagcagcggctgcgttaaaggttgcaaagcggccagaaaacgcggggaaactcattgtggtggtttttcctagtggaggagaacgttatttatcgactaaactgttcgattcgattagatatgaagcagagaatttgcctattgaatgaatgttggacgtgtgccggtttcgtgtgtaataagagacgttcgttccaagagtccaagatttcaatttgcttattactggtcaatgtgaaatgtataaaaagttgcatattcgattatgaataattttagttgactacttccattgcaattcttggtcgaaaacatgaattttaataaaacagaataatctacatgaacgtttcattg

SEQ ID NO: 42269 - protein, 323 aa, Arabidopsis thaliana; identical to SEQ ID NO: 41227
  peptide (1)..(323): Ceres Seq. ID no. 12581247

SEQ ID NO: 42270 - protein, 304 aa, Arabidopsis thaliana; identical to SEQ ID NO: 41228
  peptide (1)..(304): Ceres Seq. ID no. 12581248

SEQ ID NO: 42271 - protein, 284 aa, Arabidopsis thaliana
  peptide (1)..(284): Ceres Seq. ID no. 12581249
MMEPCSSVKDRIAYSMIKDAEEKGLITPGKSTLIEPTAGNTGIGLACMGAARGYKVILVMPSTMSLERRIILRALGAELHLSDQRIGLKGMLEKTEAILSKTPGGYIPQQFENPANPEIHYRTTGPEIWRDSAGKVDILVAGVGTGGTATGVGKFLKEQNKDIKVCVVEPVESPVLSGGQPGPHLIQGIGSGIVPFNLDLTIVDEIIQVAGEEAIETAKLLALKEGLLVGISSGAAAAAALKVAKRPENAGKLIVVVFPSGGERYLSTKLFDSIRYEAENLPIE

SEQ ID NO: 42272 - DNA, 1318 bp, Arabidopsis thaliana
  misc_feature (1)..(1318): Ceres Seq. ID no. 12330261
  misc_feature (1)..(1318): Ortholog of  Ceres SEQ ID NO 13581775 as cited in SEQ ID NO 51066
  misc_feature (1)..(1318): Ortholog of  Ceres SEQ ID NO 13595727 as cited in SEQ ID NO 57082
  misc_feature (1)..(1318): Ortholog of  Ceres SEQ ID NO 15171152 as cited in SEQ ID NO 60275
aaaaataataagctttggtaaaaccctaaactttcgtttccaagatgcaatttctagcttctctcgtttccaattccagaaagtttggtcggagatgggatcgagctctctcgttgcatcatttctcttcgaatgcgacaccagcttcgatatcaaatccagcgttcgtcgagtttctcagggacaatgggttccagaaacctctagcaattgccatcgcaatgcgttaccctaacctcaaatccctagaacaacctcggtcagtgattcaaatgcttaaaagttacagtttttccgatacccagatccagaaatcgatccgggtccatcctcgaatgatgttctacaacgtggagaaaattctagaacccaaacttcgattctttaaagatattggatttactggctctggtcttggtaagttcgtctctcaaaactcatcagtcgttggtgtaagtctagtgaagaaattgattcctaccgttgagattctgaaatcgattgttgccccgaaacatgaagaccttcctgtcattcttagtagatgtggttggcttcttctcagtagagaccctaacttgtttctcttaccaaacatctcataccttgaaacctgtggaattgttgggtctcagcttgcttctttacttagaagacagccaagaatcttcaatctctctgaggaaaaactcagaggatatgtctctcgtgctttggatcttggttttactttgaactcgaggatgcttgtgcacgctattatctcgttaagttctttgagcgagaaaacgtttgatcgaaaggttaagttgtttatggctaatggattctctgaagatgagataacagatattatacgaagatctccaggtttgatccggtgctcagaagataagcttacactggggtttgagttttacttgaagagaatggggatagagagggaagctttggcgaaacgtccttgtgtgttgtcgtataatcttgagaagagggtgattcctaggcttaaagttttgcagatcttgagggaaaaagggttgttgttaaaagaggagaagaagaagaagaacatggttggcattgttgagatgactgaggaagcttttctagagaaatatgttgtgagatttggagatgagattgctgaggaactgctggttgcttacaagtgcgtgtgtttagtcgatgaaacgctacttgatcgtatcaagatctaattgtagatttcacaagtccaaacttgaaattttgtcattgtatccaaacttcgctcatccgtaactgtgttgaacattataatttggaagtaactctt

SEQ ID NO: 42273 - protein, 391 aa, Arabidopsis thaliana
  peptide (1)..(391): Ceres Seq. ID no. 12330262
MQFLASLVSNSRKFGRRWDRALSLHHFSSNATPASISNPAFVEFLRDNGFQKPLAIAIAMRYPNLKSLEQPRSVIQMLKSYSFSDTQIQKSIRVHPRMMFYNVEKILEPKLRFFKDIGFTGSGLGKFVSQNSSVVGVSLVKKLIPTVEILKSIVAPKHEDLPVILSRCGWLLLSRDPNLFLLPNISYLETCGIVGSQLASLLRRQPRIFNLSEEKLRGYVSRALDLGFTLNSRMLVHAIISLSSLSEKTFDRKVKLFMANGFSEDEITDIIRRSPGLIRCSEDKLTLGFEFYLKRMGIEREALAKRPCVLSYNLEKRVIPRLKVLQILREKGLLLKEEKKKKNMVGIVEMTEEAFLEKYVVRFGDEIAEELLVAYKCVCLVDETLLDRIKI

SEQ ID NO: 42274 - protein, 332 aa, Arabidopsis thaliana
  peptide (1)..(332): Ceres Seq. ID no. 12330263
MRYPNLKSLEQPRSVIQMLKSYSFSDTQIQKSIRVHPRMMFYNVEKILEPKLRFFKDIGFTGSGLGKFVSQNSSVVGVSLVKKLIPTVEILKSIVAPKHEDLPVILSRCGWLLLSRDPNLFLLPNISYLETCGIVGSQLASLLRRQPRIFNLSEEKLRGYVSRALDLGFTLNSRMLVHAIISLSSLSEKTFDRKVKLFMANGFSEDEITDIIRRSPGLIRCSEDKLTLGFEFYLKRMGIEREALAKRPCVLSYNLEKRVIPRLKVLQILREKGLLLKEEKKKKNMVGIVEMTEEAFLEKYVVRFGDEIAEELLVAYKCVCLVDETLLDRIKI

SEQ ID NO: 42275 - protein, 315 aa, Arabidopsis thaliana
  peptide (1)..(315): Ceres Seq. ID no. 12330264
MLKSYSFSDTQIQKSIRVHPRMMFYNVEKILEPKLRFFKDIGFTGSGLGKFVSQNSSVVGVSLVKKLIPTVEILKSIVAPKHEDLPVILSRCGWLLLSRDPNLFLLPNISYLETCGIVGSQLASLLRRQPRIFNLSEEKLRGYVSRALDLGFTLNSRMLVHAIISLSSLSEKTFDRKVKLFMANGFSEDEITDIIRRSPGLIRCSEDKLTLGFEFYLKRMGIEREALAKRPCVLSYNLEKRVIPRLKVLQILREKGLLLKEEKKKKNMVGIVEMTEEAFLEKYVVRFGDEIAEELLVAYKCVCLVDETLLDRIKI

SEQ ID NO: 42276 - DNA, 1415 bp, Arabidopsis thaliana
  misc_feature (1)..(1415): Ceres Seq. ID no. 12329339
  misc_feature (1)..(1415): Ortholog of  Ceres SEQ ID NO 14312324 as cited in SEQ ID NO 60453
  misc_feature (1)..(1415): Ortholog of  Ceres SEQ ID NO 12624791 as cited in SEQ ID NO 63574
  misc_feature (1)..(1415): Ortholog of  Ceres SEQ ID NO 12780574 as cited in SEQ ID NO 65624
aaaggacctttgaagaagaagaatcgcgatttcgagctctatggtgtccgtaaaccctagacctaagggttttccagttttcgattcctcgaatatgagtttaccaagctccgatggatttggttcgattccggccacgggacggaccagtacggtgtcgttttctgaggatccgacgacgaagattcggaagccgtacacaatcaagaagtcgagagagaattggacagatcaagagcacgataaatttctagaagctcttcacttattcgatagggattggaagaaaatagaagcctttgttggatcaaaaacagtagttcagatacgaagccacgctcagaaatactttctcaaagttcagaagagtggtgctaacgaacatcttccacctcctcgacctaagaggaaagcgagtcatccttatcctataaaggctcctaaaaatgttgcttatacctctctcccgtcttcgagtacattaccgttgcttgagcctggttatttgtatagctctgattcgaagtcattgatgggaaaccaggctgtttgtgcatctacctcttcttcgtggaatcatgaatcgacaaatctgccaaaaccggtgattgaagaggaaccgggagtctcggccacggctcctctcccaaataatcgctgcagacaggaagatacagagagggtacgagcagtgacaaagccaaataacgaagaaagttgtgaaaagccacatagagtgatgccgaattttgctgaagtttacagcttcattggaagtgtcttcgatcccaacacatcaggccacctccagagattaaagcagatggatccaataaatatggaaacggttcttttactgatgcaaaacctgtctgtaaatctgacaagtcccgagtttgcagagcaaaggaggttgatatcatcatacagcgctaaagctttgaaatagagatagaataaaacaataatgtaccttatgtgagatcaagagacaatcatccaaggtctgtatgcattgcttggatttaggcctcgtgttctcactacaggagcagaaccaatcgcaaagactcttagatggctactgagttgtggtttttatgtctctgtaagtcgcggtggagcacacgtgtttgtcctgtcttgtgtatgtgtgtatagataatacaaggttttgcagagtaaggtcacagttagctgcaagtgagtttggatcaatcttaagattaaaaccctgagagtgagtgtccaaagagactgtgtaatattggtttggcggtcagcagaagagttttgaagtgcacatccagttagtgataacacggttgaagaaaaggtaaggttacaagtttagttttgaataattgtatactcaaaaaatatgaatgtataaagaataatcacttgagtcgcct

SEQ ID NO: 42277 - protein, 302 aa, Arabidopsis thaliana
  peptide (1)..(302): Ceres Seq. ID no. 12329340
MVSVNPRPKGFPVFDSSNMSLPSSDGFGSIPATGRTSTVSFSEDPTTKIRKPYTIKKSRENWTDQEHDKFLEALHLFDRDWKKIEAFVGSKTVVQIRSHAQKYFLKVQKSGANEHLPPPRPKRKASHPYPIKAPKNVAYTSLPSSSTLPLLEPGYLYSSDSKSLMGNQAVCASTSSSWNHESTNLPKPVIEEEPGVSATAPLPNNRCRQEDTERVRAVTKPNNEESCEKPHRVMPNFAEVYSFIGSVFDPNTSGHLQRLKQMDPINMETVLLLMQNLSVNLTSPEFAEQRRLISSYSAKALK

SEQ ID NO: 42278 - protein, 284 aa, Arabidopsis thaliana
  peptide (1)..(284): Ceres Seq. ID no. 12329341
MSLPSSDGFGSIPATGRTSTVSFSEDPTTKIRKPYTIKKSRENWTDQEHDKFLEALHLFDRDWKKIEAFVGSKTVVQIRSHAQKYFLKVQKSGANEHLPPPRPKRKASHPYPIKAPKNVAYTSLPSSSTLPLLEPGYLYSSDSKSLMGNQAVCASTSSSWNHESTNLPKPVIEEEPGVSATAPLPNNRCRQEDTERVRAVTKPNNEESCEKPHRVMPNFAEVYSFIGSVFDPNTSGHLQRLKQMDPINMETVLLLMQNLSVNLTSPEFAEQRRLISSYSAKALK

SEQ ID NO: 42279 - DNA, 1141 bp, Arabidopsis thaliana; identical to SEQ ID NO: 39501
  misc_feature (1)..(1141): Ceres Seq. ID no. 13593329
  misc_feature (1)..(1141): Ortholog of  Ceres SEQ ID NO 13503500 as cited in SEQ ID NO 68001
  misc_feature (1)..(1141): Ortholog of  Ceres SEQ ID NO 15174327 as cited in SEQ ID NO 0

SEQ ID NO: 42280 - protein, 170 aa, Arabidopsis thaliana; identical to SEQ ID NO: 39502
  peptide (1)..(170): Ceres Seq. ID no. 15221211

SEQ ID NO: 42281 - DNA, 945 bp, Arabidopsis thaliana
  misc_feature (1)..(945): Ceres Seq. ID no. 13500238
  misc_feature (1)..(945): Ortholog of  Ceres SEQ ID NO 13654054 as cited in SEQ ID NO 67735
  misc_feature (1)..(945): Ortholog of  Ceres SEQ ID NO 15180245 as cited in SEQ ID NO 0
ctcagagtttcttctcctctgtgaatctccgacaatggcgatagcaatggcggttgtttctttcccatctctactcaacaagtcaaccttatcctcttcactctttactcccactttcctcccggcgaaatcctcttcacttctcatcaaatcatcacccaaaaccagattcgttgtttcatcatccatggaagctggaatcggagtaatggggtcaaaactcggaatgatgagtttcttcgaagaagacggcacagtagttccagtaacagtcgtcggattccgcgaaggtaacatcgtaactcaaatcaaaaccctagccaccgacggttacgacgcggttcaaatcggttaccgtcgtgtacgcgacaaaaagctaactaaaccggaaaccggtcatctccaaaaagccggtacaatcccaatgagacatctccaagagttcagattaacaaacatcgaaggattcgaaccgaaccagaagcttgtgttcgatgagatattcaaagaaggtgatctcgttgatgtagctggaaccacaattggtaaagggtttcaaggaggaatcaaaaggcatcatttcaagagaggtcaaatgactcatggttccaagagtcatcgagctttgggttcgattggtgctggtactactccgggaagagtttataaagggaagaagatgcctggaagaatgggagggacgaggacaaagattaggaagcttaagattgttaaagttgataaggagcttaatgttgtcatgatcaaaggtgctttgcctggtaagcctgggaatcttcttcgtattactcccgctaaaatcgtcggagttaacattcccaagaactagtagagaagagactctgttttgttttgtaatgttgacttgtgtttatccattccttgaaaatttgtatcgaattgctaaatcacagtttctctgtc

SEQ ID NO: 42282 - protein, 282 aa, Arabidopsis thaliana
  peptide (1)..(282): Ceres Seq. ID no. 13500239
SEFLLLCESPTMAIAMAVVSFPSLLNKSTLSSSLFTPTFLPAKSSSLLIKSSPKTRFVVSSSMEAGIGVMGSKLGMMSFFEEDGTVVPVTVVGFREGNIVTQIKTLATDGYDAVQIGYRRVRDKKLTKPETGHLQKAGTIPMRHLQEFRLTNIEGFEPNQKLVFDEIFKEGDLVDVAGTTIGKGFQGGIKRHHFKRGQMTHGSKSHRALGSIGAGTTPGRVYKGKKMPGRMGGTRTKIRKLKIVKVDKELNVVMIKGALPGKPGNLLRITPAKIVGVNIPKN

SEQ ID NO: 42283 - protein, 271 aa, Arabidopsis thaliana
  peptide (1)..(271): Ceres Seq. ID no. 13500240
MAIAMAVVSFPSLLNKSTLSSSLFTPTFLPAKSSSLLIKSSPKTRFVVSSSMEAGIGVMGSKLGMMSFFEEDGTVVPVTVVGFREGNIVTQIKTLATDGYDAVQIGYRRVRDKKLTKPETGHLQKAGTIPMRHLQEFRLTNIEGFEPNQKLVFDEIFKEGDLVDVAGTTIGKGFQGGIKRHHFKRGQMTHGSKSHRALGSIGAGTTPGRVYKGKKMPGRMGGTRTKIRKLKIVKVDKELNVVMIKGALPGKPGNLLRITPAKIVGVNIPKN

SEQ ID NO: 42284 - protein, 267 aa, Arabidopsis thaliana
  peptide (1)..(267): Ceres Seq. ID no. 13500241
MAVVSFPSLLNKSTLSSSLFTPTFLPAKSSSLLIKSSPKTRFVVSSSMEAGIGVMGSKLGMMSFFEEDGTVVPVTVVGFREGNIVTQIKTLATDGYDAVQIGYRRVRDKKLTKPETGHLQKAGTIPMRHLQEFRLTNIEGFEPNQKLVFDEIFKEGDLVDVAGTTIGKGFQGGIKRHHFKRGQMTHGSKSHRALGSIGAGTTPGRVYKGKKMPGRMGGTRTKIRKLKIVKVDKELNVVMIKGALPGKPGNLLRITPAKIVGVNIPKN

SEQ ID NO: 42285 - DNA, 672 bp, Arabidopsis thaliana; identical to SEQ ID NO: 37926
  misc_feature (1)..(672): Ceres Seq. ID no. 12326318
  misc_feature (1)..(672): Ortholog of  Ceres SEQ ID NO 12614157 as cited in SEQ ID NO 67965

SEQ ID NO: 42286 - protein, 187 aa, Arabidopsis thaliana; identical to SEQ ID NO: 37927
  peptide (1)..(187): Ceres Seq. ID no. 12326319

SEQ ID NO: 42287 - protein, 175 aa, Arabidopsis thaliana; identical to SEQ ID NO: 37928
  peptide (1)..(175): Ceres Seq. ID no. 12326320

SEQ ID NO: 42288 - DNA, 2671 bp, Arabidopsis thaliana
  misc_feature (1)..(2671): Ceres Seq. ID no. 13489440
  misc_feature (1)..(2671): Ortholog of  Ceres SEQ ID NO 15172609 as cited in SEQ ID NO 61938
  misc_feature (1)..(2671): Ortholog of  Ceres SEQ ID NO 13595870 as cited in SEQ ID NO 62101
  misc_feature (1)..(2671): Ortholog of  Ceres SEQ ID NO 13590241 as cited in SEQ ID NO 63878
  misc_feature (1)..(2671): Ortholog of  Ceres SEQ ID NO 13657939 as cited in SEQ ID NO 66349
  misc_feature (1)..(2671): Ortholog of  Ceres SEQ ID NO 13660597 as cited in SEQ ID NO 67655
  misc_feature (1)..(2671): Ortholog of  Ceres SEQ ID NO 13654484 as cited in SEQ ID NO 67717
attcatcatcatcatcatcatcaccaatcgatctctctagaaacaaatttcccaacttccttcttagagctctcttgtcagtttaagctatcattatgtcaaacgaaccggaatcctccgactcgaaaactaagaaggatttcagtactgcgattctagagaggaagaagtctccaaaccgacttgttgtcgatgaagctattaacgatgacaactctgttgtctctctccatcctactaccatggaaaaactccagcttttccgaggcgatacaattctcatcaagggtaagaagaggaaggacactgtatgcattgccctcgctgatgaaacatgtgaggaacccaagatcagaatgaataaggttgtaaggtctaacttgagggttaggctgggagatgttatttctgttcaccaatgcccagatgtcaagtatggaaagcgtgttcacatcttgcctgttgatgatacagttgaaggcgttactggaaacctctttgatgcttacctgaaaccttactttctggaggcgtaccgtccagtgaggaagggagatcttttcctagtgagaggaggaatgaggagtgtggagttcaaagtgatcgagactgatcctgctgagtactgtgtggtggctccagatacagagattttctgtgagggtgaaccagttaagagggaggacgaagaaaggcttgatgaggttggttatgacgatgttggtggtgtcaggaaacagatggctcagattagggaattggttgaacttcccttgaggcatccacaactctttaaatcaattggtgtgaagccaccaaagggaattctgctttacggacctcctggatccgggaagactcttattgctcgtgctgtggctaatgaaaccggagcattcttcttctgtatcaatggaccggaaatcatgtcgaaactagctggtgagagtgagagcaacctcaggaaagcatttgaggaggctgagaagaatgccccgtctatcatattcattgatgagattgactctattgcaccaaaaagagagaagacgaatggtgaggttgagaggaggattgtctctcagctccttacgcttatggatggactaaaatcacgtgcccatgttattgttatgggagcaacaaatcgtcccaacagtattgatccggctttgagaaggtttggaagattcgacagggaaattgatatcggtgttcctgatgaaattggacgtcttgaagttcttaggatccacacgaagaacatgaagctagctgaagatgttgatctagaaagaatctccaaggacacgcatggatatgttggagctgatcttgcagctctatgcactgaagctgcccttcaatgtatcagagagaagatggatgtgattgacttggaagatgactcaattgacgccgaaatcctcaattccatggctgtgtctaatgaacacttccacactgctcttggaaacagcaacccatccgcccttcgtgaaactgttgtggaggttccaaatgtctcctgggaggatattggaggtctcgagaatgttaagagagagcttcaggagactgttcaataccctgtggagcatccagagaaattcgagaagtttggtatgtctccatcaaagggagttcttttctacggtcctcctggatgtggtaaaaccctgttagccaaagctatagcaaacgagtgccaagcaaacttcatcagtgtcaagggacccgagcttctcacaatgtggtttggagaaagtgaagccaacgtccgagaaatctttgacaaggctcgtcaatctgctccttgtgttctgtttttcgatgagctagactccattgctactcagagagggaacagcgcgggtgatgccggcggtgcagctgacagagtgttgaatcagcttttgacagaaatggatggaatgaatgcaaagaagacggtattcattattggagcaactaacagaccggatatcatagattcagctcttcttcgacctggaagactcgaccagcttatctacattcctctacctgatgaagattcccgtctcaatatctttaaggcctgcttgagaaaatctcccgtcgctaaagatgtagatgttactgcactcgcaaagtacactcagggattcagtggtgctgatatcaccgagatctgccagagagcttgcaagtacgccatcagagaaaacatcgaaaaggatattgagaacgagcgtagaaggagccagaatccagaggccatggaggaagatatggtggatgatgaagtttcagagattagagctgctcatttcgaagagtcgatgaaatatgcaaggagaagtgtgagtgatgctgatattcgcaagtaccaagcttttgctcagacgctgcagcaatccagagggtttggatctgagttcaggtttgactcaaccgctggtgtcggacgcaccactggtgttgcagccgccgatccctttgccacttctgcagctgcagctgatgacgacgatctctacagttagattttgatttcttagtgatcgtttttcttctttctttaacttaaattaggttcttttggatgatgtcgagattgatacagtttaaaatcatctgggtttgccagcttataatcacttgagcaaattatttctatgtttattcc

SEQ ID NO: 42289 - protein, 810 aa, Arabidopsis thaliana
  peptide (1)..(810): Ceres Seq. ID no. 13489441
MSNEPESSDSKTKKDFSTAILERKKSPNRLVVDEAINDDNSVVSLHPTTMEKLQLFRGDTILIKGKKRKDTVCIALADETCEEPKIRMNKVVRSNLRVRLGDVISVHQCPDVKYGKRVHILPVDDTVEGVTGNLFDAYLKPYFLEAYRPVRKGDLFLVRGGMRSVEFKVIETDPAEYCVVAPDTEIFCEGEPVKREDEERLDEVGYDDVGGVRKQMAQIRELVELPLRHPQLFKSIGVKPPKGILLYGPPGSGKTLIARAVANETGAFFFCINGPEIMSKLAGESESNLRKAFEEAEKNAPSIIFIDEIDSIAPKREKTNGEVERRIVSQLLTLMDGLKSRAHVIVMGATNRPNSIDPALRRFGRFDREIDIGVPDEIGRLEVLRIHTKNMKLAEDVDLERISKDTHGYVGADLAALCTEAALQCIREKMDVIDLEDDSIDAEILNSMAVSNEHFHTALGNSNPSALRETVVEVPNVSWEDIGGLENVKRELQETVQYPVEHPEKFEKFGMSPSKGVLFYGPPGCGKTLLAKAIANECQANFISVKGPELLTMWFGESEANVREIFDKARQSAPCVLFFDELDSIATQRGNSAGDAGGAADRVLNQLLTEMDGMNAKKTVFIIGATNRPDIIDSALLRPGRLDQLIYIPLPDEDSRLNIFKACLRKSPVAKDVDVTALAKYTQGFSGADITEICQRACKYAIRENIEKDIENERRRSQNPEAMEEDMVDDEVSEIRAAHFEESMKYARRSVSDADIRKYQAFAQTLQQSRGFGSEFRFDSTAGVGRTTGVAAADPFATSAAAADDDDLYS

SEQ ID NO: 42290 - protein, 761 aa, Arabidopsis thaliana
  peptide (1)..(761): Ceres Seq. ID no. 13489442
MEKLQLFRGDTILIKGKKRKDTVCIALADETCEEPKIRMNKVVRSNLRVRLGDVISVHQCPDVKYGKRVHILPVDDTVEGVTGNLFDAYLKPYFLEAYRPVRKGDLFLVRGGMRSVEFKVIETDPAEYCVVAPDTEIFCEGEPVKREDEERLDEVGYDDVGGVRKQMAQIRELVELPLRHPQLFKSIGVKPPKGILLYGPPGSGKTLIARAVANETGAFFFCINGPEIMSKLAGESESNLRKAFEEAEKNAPSIIFIDEIDSIAPKREKTNGEVERRIVSQLLTLMDGLKSRAHVIVMGATNRPNSIDPALRRFGRFDREIDIGVPDEIGRLEVLRIHTKNMKLAEDVDLERISKDTHGYVGADLAALCTEAALQCIREKMDVIDLEDDSIDAEILNSMAVSNEHFHTALGNSNPSALRETVVEVPNVSWEDIGGLENVKRELQETVQYPVEHPEKFEKFGMSPSKGVLFYGPPGCGKTLLAKAIANECQANFISVKGPELLTMWFGESEANVREIFDKARQSAPCVLFFDELDSIATQRGNSAGDAGGAADRVLNQLLTEMDGMNAKKTVFIIGATNRPDIIDSALLRPGRLDQLIYIPLPDEDSRLNIFKACLRKSPVAKDVDVTALAKYTQGFSGADITEICQRACKYAIRENIEKDIENERRRSQNPEAMEEDMVDDEVSEIRAAHFEESMKYARRSVSDADIRKYQAFAQTLQQSRGFGSEFRFDSTAGVGRTTGVAAADPFATSAAAADDDDLYS

SEQ ID NO: 42291 - protein, 723 aa, Arabidopsis thaliana
  peptide (1)..(723): Ceres Seq. ID no. 13489443
MNKVVRSNLRVRLGDVISVHQCPDVKYGKRVHILPVDDTVEGVTGNLFDAYLKPYFLEAYRPVRKGDLFLVRGGMRSVEFKVIETDPAEYCVVAPDTEIFCEGEPVKREDEERLDEVGYDDVGGVRKQMAQIRELVELPLRHPQLFKSIGVKPPKGILLYGPPGSGKTLIARAVANETGAFFFCINGPEIMSKLAGESESNLRKAFEEAEKNAPSIIFIDEIDSIAPKREKTNGEVERRIVSQLLTLMDGLKSRAHVIVMGATNRPNSIDPALRRFGRFDREIDIGVPDEIGRLEVLRIHTKNMKLAEDVDLERISKDTHGYVGADLAALCTEAALQCIREKMDVIDLEDDSIDAEILNSMAVSNEHFHTALGNSNPSALRETVVEVPNVSWEDIGGLENVKRELQETVQYPVEHPEKFEKFGMSPSKGVLFYGPPGCGKTLLAKAIANECQANFISVKGPELLTMWFGESEANVREIFDKARQSAPCVLFFDELDSIATQRGNSAGDAGGAADRVLNQLLTEMDGMNAKKTVFIIGATNRPDIIDSALLRPGRLDQLIYIPLPDEDSRLNIFKACLRKSPVAKDVDVTALAKYTQGFSGADITEICQRACKYAIRENIEKDIENERRRSQNPEAMEEDMVDDEVSEIRAAHFEESMKYARRSVSDADIRKYQAFAQTLQQSRGFGSEFRFDSTAGVGRTTGVAAADPFATSAAAADDDDLYS

SEQ ID NO: 42292 - DNA, 726 bp, Arabidopsis thaliana
  misc_feature (1)..(726): Ceres Seq. ID no. 12396668
  misc_feature (1)..(726): Ortholog of  Ceres SEQ ID NO 12638221 as cited in SEQ ID NO 0
tttcttttttaatccctttgttctctgtggtattcaacaaatttgtctcgaatttatagagctcgaagcttcaaggaagttataatggctagtgaagatgaatcgattgaacaaaaagctgccgctcgtaaagaggcacttaaagctctaagggcagctcaggaactgtctgagaccaaggaagacggagaggatgaagctgtcgaagaagatggtccagccatgaagtttagaaactatgttccccaagctaaggagcttcaggatggtaaactagcgccaccagagctacccaaattcgaagatccgatcgttgcacttccacctgctgtagagaagaaagaggacccatttgttaacatcgctccaaagaagccaaactgggacctccgaagagatgtgcagaagaagcttgataagctcgaaaggcggactcaaaaggcaatgcataaactcatggaggagcaagagaaagaacgtgagatggctgaagctgatggtaacaccatagaaagttgaaacccaacgacgtcatcaaagaaagccaccactgaacagtatattctactcgattttgtttaactgttaaagcattcgaagtgagtagaccatgtaaaatcctacggccattggcatagacatagtaggtttatcttcttgtgtgaatcaaagaaagtcgcaatttatttccgagtagaattaagtgcggtccggttgtttttctct

SEQ ID NO: 42293 - protein, 144 aa, Arabidopsis thaliana
  peptide (1)..(144): Ceres Seq. ID no. 12396669
MASEDESIEQKAAARKEALKALRAAQELSETKEDGEDEAVEEDGPAMKFRNYVPQAKELQDGKLAPPELPKFEDPIVALPPAVEKKEDPFVNIAPKKPNWDLRRDVQKKLDKLERRTQKAMHKLMEEQEKEREMAEADGNTIES

SEQ ID NO: 42294 - protein, 98 aa, Arabidopsis thaliana; identical to SEQ ID NO: 39091
  peptide (1)..(98): Ceres Seq. ID no. 12396670

SEQ ID NO: 42295 - DNA, 920 bp, Arabidopsis thaliana
  misc_feature (1)..(920): Ceres Seq. ID no. 12676789
  misc_feature (1)..(920): Ortholog of  Ceres SEQ ID NO 15226744 as cited in SEQ ID NO 61720
gatacagagagagcgatgatgattcgaacggcgttagtgttcgttgtcttcttcgtcggaacagtcgtacaagcgcagctgatacctccggcgaggcgtgatggatttttgtatccaccgggtcggaaaatcgaccgggatacgatacttatcgaggcgtatattgacccggtttgtccggattgtagagacgcttgggagccgctaaagctagcgattgatcactatggatctcgcgttgctcttgttcttcacctcattcctttacccttccatgacaatgcatttgtagcatctcgggctttacacatcgttgataccttaaacgccaatgccacgttcaatttgctggaagggatcttcaagcatcagacattgttctacaactcgcaaacacaactcatgtcaagacctgcagttgtggaagaattaatcaagcttggaacagttacgttaggaaactcatatcattctcctttgaaatctggcttcagcaactcaaaatctgatcttgccactagagtttccttcaagtatagcgtctcaagaggagtctccgcgacaccaaccttctacgtgaatggattcgagctgcctggtgctggttctcccaaagattatgaaggatggagagacaccattgatcctctggttaaaccacaagaagtagacatacgagacaccttcctttcattcctcacgcaaccatcttactagtttgtactttctatgatgtgccaaactcccacctacttagttgaaaagtccagaagcataactctcatacatgttcatattgttacatcttcaactgtcttcatttgcagcttaatgtataataaaccaaaaattcttcaaatgcttctcatgttttgtataaacgataaaaattaaagtattaaaagttttatactgatgac

SEQ ID NO: 42296 - protein, 238 aa, Arabidopsis thaliana
  peptide (1)..(238): Ceres Seq. ID no. 12676790
DTERAMMIRTALVFVVFFVGTVVQAQLIPPARRDGFLYPPGRKIDRDTILIEAYIDPVCPDCRDAWEPLKLAIDHYGSRVALVLHLIPLPFHDNAFVASRALHIVDTLNANATFNLLEGIFKHQTLFYNSQTQLMSRPAVVEELIKLGTVTLGNSYHSPLKSGFSNSKSDLATRVSFKYSVSRGVSATPTFYVNGFELPGAGSPKDYEGWRDTIDPLVKPQEVDIRDTFLSFLTQPSY

SEQ ID NO: 42297 - protein, 233 aa, Arabidopsis thaliana
  peptide (1)..(233): Ceres Seq. ID no. 12676791
MMIRTALVFVVFFVGTVVQAQLIPPARRDGFLYPPGRKIDRDTILIEAYIDPVCPDCRDAWEPLKLAIDHYGSRVALVLHLIPLPFHDNAFVASRALHIVDTLNANATFNLLEGIFKHQTLFYNSQTQLMSRPAVVEELIKLGTVTLGNSYHSPLKSGFSNSKSDLATRVSFKYSVSRGVSATPTFYVNGFELPGAGSPKDYEGWRDTIDPLVKPQEVDIRDTFLSFLTQPSY

SEQ ID NO: 42298 - protein, 232 aa, Arabidopsis thaliana
  peptide (1)..(232): Ceres Seq. ID no. 12676792
MIRTALVFVVFFVGTVVQAQLIPPARRDGFLYPPGRKIDRDTILIEAYIDPVCPDCRDAWEPLKLAIDHYGSRVALVLHLIPLPFHDNAFVASRALHIVDTLNANATFNLLEGIFKHQTLFYNSQTQLMSRPAVVEELIKLGTVTLGNSYHSPLKSGFSNSKSDLATRVSFKYSVSRGVSATPTFYVNGFELPGAGSPKDYEGWRDTIDPLVKPQEVDIRDTFLSFLTQPSY

SEQ ID NO: 42299 - DNA, 1551 bp, Arabidopsis thaliana
  misc_feature (1)..(1551): Ceres Seq. ID no. 13497658
  misc_feature (1)..(1551): Ortholog of  Ceres SEQ ID NO 13597446 as cited in SEQ ID NO 64098
cttttggatcgcttccgttcaatgtaaccggcgaaacagagcaatctgaaattatcttagggctatagttatggatattttcatggatttcttcaataaaccttctgttacagagacattcgtcgacgttttgctatgtgcagttccgatttgggtcactgttatgatcgggcttctgatcggttggtcttggcgtcctagatggactagcttggtttatttaggtttccgttctaagcttcggtttctatgtactgttcctcctggatttggtgctcgtcgtatttggcttgctttcaccgctctctctgctttttccgtttgttcaacctccaataaatcctcggttaataacggttcctctaaaccggtcgaagaagaagcattttcacgagctagtgataaagttacagrgaaagagaaagatgttgtgacagagaaggatttagagcatttgttgcatctgcttgaagctggaaatgctagttttgagtggcaatctatgatggataagtctactccgaatatgagctatcaagcttggcgtcatgagcctgagataggtcctgttgtttatcgtagtcgaactgtttttgaggatgtaacaccagacattgttagggatttcttctgggacgatgagtttcgacctaaatgggatactatgcttgcttacttcaaaactttagaggaagatcctaagacaggaactaccattgttcattggattaaaaagttcccattcttctgtagtgaccgggaatacatcattggtaggagaatatgggaatctggaagaaaatattatgctgtgactaagggagtaccctataaagatttaccaaagcgtgataagccgaggcgagtcgagctttatttctcaagctggattgtcaaagcagttgaatccaggaaaggtgatgggcaaatgacagcttgtgaagtctctcttgtccattacgaagacatgggaatcccaaaagatgtagcaaagttaggagtccgtcatggcatgtggggagctgtaaagaagctaaactctggtttgagggcataccaaagcgctagaaaaccagggacgtcgctctcacggagtcgcagatggcaagtatcaccacaaagctgaacatgtatttggtggwaacatctggrgcagaggamgaagagagwggamgagcagtagagaatgcgaggaaacaaaatgatcagttcggtgtagactggaaatggatcgttgtaggaggagtagctttggcttgtgggcttcattctagtgctataggtaaggcgttaatggttggagctggacagagacttgctcgtaggtgagatcttttgcctgagagtttcattatcttatctgtttccctggagaattcttagaccaacacagaaacactatattactgatatggattgtgttttcttgtaactgcactgaaatgagcatagtggtttcgaaagcaaaccatgcagagtagttttgaagcaagggcaaacatttggtcgaatatttcttgtaatacggtttaagattctggagacggtttt

SEQ ID NO: 42300 - protein, 351 aa, Arabidopsis thaliana
  peptide (1)..(351): Ceres Seq. ID no. 15223014
  misc_feature (115)..(115): Xaa is any aa, unknown or other
MDIFMDFFNKPSVTETFVDVLLCAVPIWVTVMIGLLIGWSWRPRWTSLVYLGFRSKLRFLCTVPPGFGARRIWLAFTALSAFSVCSTSNKSSVNNGSSKPVEEEAFSRASDKVTXKEKDVVTEKDLEHLLHLLEAGNASFEWQSMMDKSTPNMSYQAWRHEPEIGPVVYRSRTVFEDVTPDIVRDFFWDDEFRPKWDTMLAYFKTLEEDPKTGTTIVHWIKKFPFFCSDREYIIGRRIWESGRKYYAVTKGVPYKDLPKRDKPRRVELYFSSWIVKAVESRKGDGQMTACEVSLVHYEDMGIPKDVAKLGVRHGMWGAVKKLNSGLRAYQSARKPGTSLSRSRRWQVSPQS

SEQ ID NO: 42301 - protein, 347 aa, Arabidopsis thaliana
  peptide (1)..(347): Ceres Seq. ID no. 15223015
  misc_feature (111)..(111): Xaa is any aa, unknown or other
MDFFNKPSVTETFVDVLLCAVPIWVTVMIGLLIGWSWRPRWTSLVYLGFRSKLRFLCTVPPGFGARRIWLAFTALSAFSVCSTSNKSSVNNGSSKPVEEEAFSRASDKVTXKEKDVVTEKDLEHLLHLLEAGNASFEWQSMMDKSTPNMSYQAWRHEPEIGPVVYRSRTVFEDVTPDIVRDFFWDDEFRPKWDTMLAYFKTLEEDPKTGTTIVHWIKKFPFFCSDREYIIGRRIWESGRKYYAVTKGVPYKDLPKRDKPRRVELYFSSWIVKAVESRKGDGQMTACEVSLVHYEDMGIPKDVAKLGVRHGMWGAVKKLNSGLRAYQSARKPGTSLSRSRRWQVSPQS

SEQ ID NO: 42302 - protein, 320 aa, Arabidopsis thaliana
  peptide (1)..(320): Ceres Seq. ID no. 15223016
  misc_feature (84)..(84): Xaa is any aa, unknown or other
MIGLLIGWSWRPRWTSLVYLGFRSKLRFLCTVPPGFGARRIWLAFTALSAFSVCSTSNKSSVNNGSSKPVEEEAFSRASDKVTXKEKDVVTEKDLEHLLHLLEAGNASFEWQSMMDKSTPNMSYQAWRHEPEIGPVVYRSRTVFEDVTPDIVRDFFWDDEFRPKWDTMLAYFKTLEEDPKTGTTIVHWIKKFPFFCSDREYIIGRRIWESGRKYYAVTKGVPYKDLPKRDKPRRVELYFSSWIVKAVESRKGDGQMTACEVSLVHYEDMGIPKDVAKLGVRHGMWGAVKKLNSGLRAYQSARKPGTSLSRSRRWQVSPQS

SEQ ID NO: 42303 - DNA, 1270 bp, Arabidopsis thaliana
  misc_feature (1)..(1270): Ceres Seq. ID no. 12326321
  misc_feature (1)..(1270): Ortholog of  Ceres SEQ ID NO 15171382 as cited in SEQ ID NO 51642
  misc_feature (1)..(1270): Ortholog of  Ceres SEQ ID NO 15168545 as cited in SEQ ID NO 57829
  misc_feature (1)..(1270): Ortholog of  Ceres SEQ ID NO 15168468 as cited in SEQ ID NO 58115
  misc_feature (1)..(1270): Ortholog of  Ceres SEQ ID NO 15179784 as cited in SEQ ID NO 64755
  misc_feature (1)..(1270): Ortholog of  Ceres SEQ ID NO 13596440 as cited in SEQ ID NO 68769
  misc_feature (1)..(1270): Ortholog of  Ceres SEQ ID NO 15180012 as cited in SEQ ID NO 0
ctactttagatttgatgtgttccttcaaggtcttgtttggttttatccaggtccaagtaattagcacaggatgagagaggcacagctaggcggtcacactctgaggtcccatggaatgactgttgcaaggactcacatgcatgattggatcattctcgtgttacttgttattctcgagtgtgtactccttataatccacccattttatcgctttgttggtaaagatatgatgactgatctaagttacccgttaaagagtaacaccgtaccaatttggtctgtcccggtatatgcgatgctgttacctttggtaatcttcatctttatctacttccgtcgaagagatgtttatgatcttcatcacgcggtgctaggtctcttatactctgttctggtgacagcagtacttaccgatgcaataaagaatgcagttggtcgaccacgtcctgacttcttctggcgttgttttccagatggcaaagctctttatgatagccttggagatgttatatgccatggtgataaaagcgtcataagggaaggtcacaaaagctttccaagtggacacacgtcatggtctttttcgggtctcggatttctttcgctttacttatcgggaaagattcaagcatttgacggtaaaggccacgttgcaaagctatgcatagtcatactccctttgctatttgcagctcttgtcggcatttcccgtgttgatgactattggcatcattggcaagacgtctttgcaggaggcttgctaggtcttgcgatctctacaatctgttatcttcaatttttcccgccaccatatcacaccgaaggttggggaccatatgcttacttccaagtgttggaggctgcgagagtgcaaggagcagcgaatggagcagtgcagcagccgccgccccaagttaacaacggtgaagaagaagacggtgggtttatgggtttacatttggtggataatccgactatgaggagagaagaggatgtagaaactggtagaggctgagatgaagaaactctgaagctggtttggttacttgttaggacactttctcttgttcttttgattctttgttggacaactttagtagatttctctaagataactaatagagtcgtttggttttggttttggtttaaatggatgaccggttttatggttccggtattggtggttaaagtttatgtttttcaaaaaagttcactggataaatgtagctttattttcaatattttaaggattgaaatcggatttgaactt

SEQ ID NO: 42304 - protein, 314 aa, Arabidopsis thaliana; identical to SEQ ID NO: 27353
  peptide (1)..(314): Ceres Seq. ID no. 12326322

SEQ ID NO: 42305 - protein, 299 aa, Arabidopsis thaliana; identical to SEQ ID NO: 27354
  peptide (1)..(299): Ceres Seq. ID no. 12326323

SEQ ID NO: 42306 - protein, 292 aa, Arabidopsis thaliana; identical to SEQ ID NO: 27355
  peptide (1)..(292): Ceres Seq. ID no. 12326324

SEQ ID NO: 42307 - DNA, 890 bp, Arabidopsis thaliana
  misc_feature (1)..(890): Ceres Seq. ID no. 12326932
  misc_feature (1)..(890): Ortholog of  Ceres SEQ ID NO 13599328 as cited in SEQ ID NO 1002
  misc_feature (1)..(890): Ortholog of  Ceres SEQ ID NO 14302544 as cited in SEQ ID NO 56628
  misc_feature (1)..(890): Ortholog of  Ceres SEQ ID NO 14302529 as cited in SEQ ID NO 59789
  misc_feature (1)..(890): Ortholog of  Ceres SEQ ID NO 13584819 as cited in SEQ ID NO 64536
  misc_feature (1)..(890): Ortholog of  Ceres SEQ ID NO 13663748 as cited in SEQ ID NO 67516
  misc_feature (1)..(890): Ortholog of  Ceres SEQ ID NO 12635897 as cited in SEQ ID NO 0
caatggcggttacattttctgatctccacacagagcgaggtctcaaaaccctcgaggaacatctcgccggtaaaacgtacatctccggcgatcagctttcggttgatgatgtgaaggtttacgctgccgtattggagaatccaggtgatggttttcccaatgctagcaagtggtacgattctgttgcttctcacctagctaaaagttttcccgggaaagcagacggagtgagagttggtggtggtgttgctcctccatctgaagctcatccacatactgaggaacctgctgctgatggtgatggtgatgatgatgatgatattgatcttttcgctgatgagactgaagatgagaaaaaagctgctgaagagagagaagctgctaagaaagatactaagaagactaaagagagtggaaaatcttctgtgctactggaagtaaaaccatgggatgatgaaaccgacatgaagaagttagaagaagctgttcgtagtgttcagatgccaggtcttacatggggagcttcgaaattggtacctgttggttacgggataaagaaactcacaatcatgatgacaattgttgatgaccttgtgtctgtggacaacctcattgaagaccatctcacctcagagcctaacaacgagtacatccaaagtgtcgatattgtcgcttttaacaagatttagacacatgagaaagatgtcgagtttttcagttttggtgtcagtcttgttgtgtttcgctaaagtctcttcttcaagttccaaggccaactttggagttgaagcacattaacttcacttcacttggtcttaattaaaagctatttgtaagttcttgtctaagataaattgcctgggcttggtaacgtgtggaaagaattgcgg

SEQ ID NO: 42308 - protein, 228 aa, Arabidopsis thaliana
  peptide (1)..(228): Ceres Seq. ID no. 12326933
MAVTFSDLHTERGLKTLEEHLAGKTYISGDQLSVDDVKVYAAVLENPGDGFPNASKWYDSVASHLAKSFPGKADGVRVGGGVAPPSEAHPHTEEPAADGDGDDDDDIDLFADETEDEKKAAEEREAAKKDTKKTKESGKSSVLLEVKPWDDETDMKKLEEAVRSVQMPGLTWGASKLVPVGYGIKKLTIMMTIVDDLVSVDNLIEDHLTSEPNNEYIQSVDIVAFNKI

SEQ ID NO: 42309 - DNA, 1503 bp, Arabidopsis thaliana
  misc_feature (1)..(1503): Ceres Seq. ID no. 12422979
  misc_feature (1)..(1503): Ortholog of  Ceres SEQ ID NO 15171805 as cited in SEQ ID NO 57433
  misc_feature (1)..(1503): Ortholog of  Ceres SEQ ID NO 13596743 as cited in SEQ ID NO 62731
attttgctctgcaaatttgtctgaaaaaatctttgtgcgaagcaggaaaaatgtcgtcgacccatcagttagtttcttcgatgatctcttcttcctcatccactttcttagccccttcaaattttaatctcagaactcgaaatgcttgcttacccatggcaaaacgggtcaatacttgcaaacttcaggctggatacctattcccggagattgcaagaagaaggtctgcacacttgttgaaatatccagatgcacaagttataagtcttggaataggcgacacaactgagccaattcctgaagtgatcacttctgctatggcaaagaaagctcatgagttgtcaacaatagagggatatagtggttatggtgctgaacaaagtgcaaagccactgagagctgctattgcgaaaacattctacggtggccttggcataggggatgatgacgtttttgtttctgatggagctaaatgtgatatctcacgtctccaggttatgtttggttccaatgttacaattgctgttcaggatccttcatatccggcttatgtggactccagtgttattatgggtcagactgggcaatttaacactgatgtgcaaaagtatggaaacatcgagtacatgagatgcactccagagaatggcttctttcccgacttgtccaccgttggcaggacagatataattttcttctgttccccaaataaccctacgggtgctgctgccacgagagagcaactaacgcagttagttgagtttgcaaagaagaacggttctataatagtgtatgattccgcctatgcaatgtacatgtctgatgataacccacgatccatcttcgaaatccctggagcagaggaggtcgctatggagacagcttcgttcagcaaatatgctggtttcactggagttcgacttggttggactgtcatcccgaaaaagctactctattcagacggtttccctgttgccaaagacttcaatcggattatctgcacttgtttcaatggtgcatctaatatctctcaagctggtgctcttgcttgccttacacccgaaggacttgaggcaatgcataaggtgattggattctataaagaaaacacaaacataatcattgacacattcacatctctcgggtatgatgtatatggaggaaagaatgcgccttacgtatgggttcacttcccgaaccaaagctcatgggatgtgtttgctgagattctggagaagactcatgtggttacaactccaggaagtgagtttggaccagggggtgaagggttcgttcgtgtcagtgcctttggtcacagagagaacatcttagaggcatgtcgaagattcaagcagctttacaaatgaagaaccttgtttgtaatcgttcctcatcatcatcaccctctttaatgacatgatttgagttaaaataatgtcgtttccattgttttctggaatttgtagaagacacttttgacaccagtgtttcaagcaatttggc

SEQ ID NO: 42310 - protein, 454 aa, Arabidopsis thaliana
  peptide (1)..(454): Ceres Seq. ID no. 12422980
FALQICLKKSLCEAGKMSSTHQLVSSMISSSSSTFLAPSNFNLRTRNACLPMAKRVNTCKLQAGYLFPEIARRRSAHLLKYPDAQVISLGIGDTTEPIPEVITSAMAKKAHELSTIEGYSGYGAEQSAKPLRAAIAKTFYGGLGIGDDDVFVSDGAKCDISRLQVMFGSNVTIAVQDPSYPAYVDSSVIMGQTGQFNTDVQKYGNIEYMRCTPENGFFPDLSTVGRTDIIFFCSPNNPTGAAATREQLTQLVEFAKKNGSIIVYDSAYAMYMSDDNPRSIFEIPGAEEVAMETASFSKYAGFTGVRLGWTVIPKKLLYSDGFPVAKDFNRIICTCFNGASNISQAGALACLTPEGLEAMHKVIGFYKENTNIIIDTFTSLGYDVYGGKNAPYVWVHFPNQSSWDVFAEILEKTHVVTTPGSEFGPGGEGFVRVSAFGHRENILEACRRFKQLYK

SEQ ID NO: 42311 - protein, 438 aa, Arabidopsis thaliana
  peptide (1)..(438): Ceres Seq. ID no. 12422981
MSSTHQLVSSMISSSSSTFLAPSNFNLRTRNACLPMAKRVNTCKLQAGYLFPEIARRRSAHLLKYPDAQVISLGIGDTTEPIPEVITSAMAKKAHELSTIEGYSGYGAEQSAKPLRAAIAKTFYGGLGIGDDDVFVSDGAKCDISRLQVMFGSNVTIAVQDPSYPAYVDSSVIMGQTGQFNTDVQKYGNIEYMRCTPENGFFPDLSTVGRTDIIFFCSPNNPTGAAATREQLTQLVEFAKKNGSIIVYDSAYAMYMSDDNPRSIFEIPGAEEVAMETASFSKYAGFTGVRLGWTVIPKKLLYSDGFPVAKDFNRIICTCFNGASNISQAGALACLTPEGLEAMHKVIGFYKENTNIIIDTFTSLGYDVYGGKNAPYVWVHFPNQSSWDVFAEILEKTHVVTTPGSEFGPGGEGFVRVSAFGHRENILEACRRFKQLYK

SEQ ID NO: 42312 - protein, 428 aa, Arabidopsis thaliana
  peptide (1)..(428): Ceres Seq. ID no. 12422982
MISSSSSTFLAPSNFNLRTRNACLPMAKRVNTCKLQAGYLFPEIARRRSAHLLKYPDAQVISLGIGDTTEPIPEVITSAMAKKAHELSTIEGYSGYGAEQSAKPLRAAIAKTFYGGLGIGDDDVFVSDGAKCDISRLQVMFGSNVTIAVQDPSYPAYVDSSVIMGQTGQFNTDVQKYGNIEYMRCTPENGFFPDLSTVGRTDIIFFCSPNNPTGAAATREQLTQLVEFAKKNGSIIVYDSAYAMYMSDDNPRSIFEIPGAEEVAMETASFSKYAGFTGVRLGWTVIPKKLLYSDGFPVAKDFNRIICTCFNGASNISQAGALACLTPEGLEAMHKVIGFYKENTNIIIDTFTSLGYDVYGGKNAPYVWVHFPNQSSWDVFAEILEKTHVVTTPGSEFGPGGEGFVRVSAFGHRENILEACRRFKQLYK

SEQ ID NO: 42313 - DNA, 690 bp, Arabidopsis thaliana
  misc_feature (1)..(690): Ceres Seq. ID no. 12326325
  misc_feature (1)..(690): Ortholog of  Ceres SEQ ID NO 12635643 as cited in SEQ ID NO 340
  misc_feature (1)..(690): Ortholog of  Ceres SEQ ID NO 13661877 as cited in SEQ ID NO 61689
agtgagaactgagaagcgattatggcgagcaagatgagtctccgttactctctctttttgatcttcttctctctcatttcactccaaggttttgccaagaagaccggagatgtgtcggaattgcagatcggtgtcaagtttaagccaaaaacatgtgaagttcaggctcacaaaggtgatacgatcaaggtgcactatagggggaaacttactgatggaactgtattcgattcgagttttgaaaggggtgatccgtttgagtttaaattaggaagtggtcaggttatcaaaggttgggatcaaggtttgctaggagcgtgtgtaggtgagaagaggaagttaaagatacctgctaaacttggatatggagaacaaggctctccacctactatccccggtggtgcaacactgatctttgacacagagcttattgcggtaaatgaaaaaccagctggtggtgaagaatacggaggggatgaagatgatgagggatatggaaatgacgagctatgatccggtctccgttctttaacgattttgcttcaagagttctctggataatacaaagaaaccatctatgggagggttttttctagtcttttggcttttaggcgtaaagactgcagatgattgttatggtgatatttaacattttcttttcataattggctcaacttcaattagttagcc

SEQ ID NO: 42314 - protein, 163 aa, Arabidopsis thaliana
  peptide (1)..(163): Ceres Seq. ID no. 12326326
MASKMSLRYSLFLIFFSLISLQGFAKKTGDVSELQIGVKFKPKTCEVQAHKGDTIKVHYRGKLTDGTVFDSSFERGDPFEFKLGSGQVIKGWDQGLLGACVGEKRKLKIPAKLGYGEQGSPPTIPGGATLIFDTELIAVNEKPAGGEEYGGDEDDEGYGNDEL

SEQ ID NO: 42315 - protein, 159 aa, Arabidopsis thaliana
  peptide (1)..(159): Ceres Seq. ID no. 12326327
MSLRYSLFLIFFSLISLQGFAKKTGDVSELQIGVKFKPKTCEVQAHKGDTIKVHYRGKLTDGTVFDSSFERGDPFEFKLGSGQVIKGWDQGLLGACVGEKRKLKIPAKLGYGEQGSPPTIPGGATLIFDTELIAVNEKPAGGEEYGGDEDDEGYGNDEL

SEQ ID NO: 42316 - DNA, 750 bp, Arabidopsis thaliana
  misc_feature (1)..(750): Ceres Seq. ID no. 12326332
  misc_feature (1)..(750): Ortholog of  Ceres SEQ ID NO 15169849 as cited in SEQ ID NO 53636
aaaacttattgttgattcttctctattcgtcgtcgacctattttcctcagccatggccgtcgggaaaaacaagagaatctctaagggtaggaagggaggaaagaagaaggctgttgatcctttctccaagaaagattggtatgatgttaaggctccttcaatcttcactcacaggaatgttggaaagacacttgtttccagaactcagggtaccaaaattgcctcagaaggcttgaaacacagagtttttgaggtttctcttgctgatcttcaaggtgatgaggataacgcttacaggaagatccgtctcagagctgaagatgtccagggcagcttcctcatgtgaccttaaggatcttgttgctaagttcattcctgaagctattggcagggagattgagaaggcaactcagggcatctaccctcttcagaatgttttcatccgtaaagtcaagatcctcaaggcccctaaattcgaccttggcaagctcatggatgttcacggagattactcagcagaagatgttggtgttaaggtagacaggccggctgatgagatggctgttgaggaacctactgaaatcatcggagcttaagaaatcgagagatgtctttttcttctaaactttagctttttgatgctctgtcgtttcacacactcttttgttcccggtttaattttgctgtattgatgacttttctcagtgtaaacttgcgagtttttgataatttatggaacaccttttctct

SEQ ID NO: 42317 - protein, 114 aa, Arabidopsis thaliana
  peptide (1)..(114): Ceres Seq. ID no. 12326333
KLIVDSSLFVVDLFSSAMAVGKNKRISKGRKGGKKKAVDPFSKKDWYDVKAPSIFTHRNVGKTLVSRTQGTKIASEGLKHRVFEVSLADLQGDEDNAYRKIRLRAEDVQGSFLM

SEQ ID NO: 42318 - protein, 105 aa, Arabidopsis thaliana
  peptide (1)..(105): Ceres Seq. ID no. 12326334
MRITLTGRSVSELKMSRAASSCDLKDLVAKFIPEAIGREIEKATQGIYPLQNVFIRKVKILKAPKFDLGKLMDVHGDYSAEDVGVKVDRPADEMAVEEPTEIIGA

SEQ ID NO: 42319 - protein, 97 aa, Arabidopsis thaliana
  peptide (1)..(97): Ceres Seq. ID no. 12326335
MAVGKNKRISKGRKGGKKKAVDPFSKKDWYDVKAPSIFTHRNVGKTLVSRTQGTKIASEGLKHRVFEVSLADLQGDEDNAYRKIRLRAEDVQGSFLM

SEQ ID NO: 42320 - DNA, 1153 bp, Arabidopsis thaliana
  misc_feature (1)..(1153): Ceres Seq. ID no. 13500234
  misc_feature (1)..(1153): Ortholog of  Ceres SEQ ID NO 13581804 as cited in SEQ ID NO 51424
  misc_feature (1)..(1153): Ortholog of  Ceres SEQ ID NO 14307797 as cited in SEQ ID NO 54802
  misc_feature (1)..(1153): Ortholog of  Ceres SEQ ID NO 15168374 as cited in SEQ ID NO 55652
  misc_feature (1)..(1153): Ortholog of  Ceres SEQ ID NO 13663874 as cited in SEQ ID NO 67003
  misc_feature (1)..(1153): Ortholog of  Ceres SEQ ID NO 13624654 as cited in SEQ ID NO 0
cccagagagacataagaaagaaagagagagagagatactttggtcatttcagggttgtcgtttctctctcttgttcttgagattttgaagagagagagatatgggaagaggtagggttcagctgaagaggatagagaacaagatcaataggcaagttactttctcaaagagaaggtctggtttgctcaagaaagctcatgagatctctgttctctgcgatgctgaggttgctctcatcgtcttctcttccaaaggcaaactcttcgaatattccaccgactcttgcatggagaggatacttgaacgctatgatcgctatttatattcagacaaacaacttgttggccgagacgtttcacaaagtgaaaattgggttctagaacatgctaagctcaaggcaagagttgaggtacttgagaagaacaaaaggaattttatgggggaagatcttgattcgttgagcttgaaggagctccaaagcttggagcatcagctcgatgcagctatcaagagcattaggtcaagaaagaaccaagctatgttcgaatccatatctgcgctccagaagaaggataaagccttgcaagatcacaacaattcgcttctcaaaaagattaaggagagggagaagaaaacgggtcagcaagaaggacaattagtccaatgctccaactcttcttcagttcttctgcctcaatactgcgtaacctcctccagagatggctttgtggagagagttgggggagagaacggtggtgcatcgtcgttgacggaaccaaactctctgcttccggcttggatgttacgtcctaccactacgaacgagtagaactatctcactctttataatataatgataatataattaatgtttaatattttcataacattcagcatttttttggtgacttatactcattattaataccgatatgttttagctagtcatattatatgtatgatggaactccgttgtcgagacgtatgtacgtaagctatcattagattcactgcgtcttaagaacaaagattcatatcttggtaatgatttctcatgaataattaatgtaacttttactttttaaactgtggtgaacgcaatatatcaatattctatcatttgtaaatgcgatcactatgttgtttatgactg

SEQ ID NO: 42321 - protein, 242 aa, Arabidopsis thaliana; identical to SEQ ID NO: 35943
  peptide (1)..(242): Ceres Seq. ID no. 13500235

SEQ ID NO: 42322 - protein, 180 aa, Arabidopsis thaliana; identical to SEQ ID NO: 35944
  peptide (1)..(180): Ceres Seq. ID no. 13500236

SEQ ID NO: 42323 - protein, 130 aa, Arabidopsis thaliana; identical to SEQ ID NO: 35945
  peptide (1)..(130): Ceres Seq. ID no. 13500237

SEQ ID NO: 42324 - DNA, 536 bp, Arabidopsis thaliana
  misc_feature (1)..(536): Ceres Seq. ID no. 12326577
  misc_feature (1)..(536): Ortholog of  Ceres SEQ ID NO 15177246 as cited in SEQ ID NO 57731
acttccttctcttgaagccggaaaccttaaggttttatatctgggaaaaaactcgcatccgcttcaatgactaagggaacgggaagtttcggaaagagaagaaacaagagtcacacactctgtgtcagatgtggccgtcgcagtttccacatccagaagagtcgttgctctgcttgtgcttatcccgccgctcgcaagaggacttacaactggagtgtgaaggcaatccgtagaaagactactggaactggaaggatgaggtatcttcgcaatgtgcctcgcaggttcaagaccggtttcagagagggtaccgaagccaagccaaggaacaagggagttgcttcatcagcttaaacttgtttttgagcatcaagggagagagaattctgagtttgttgttcacaagattactactcttaagtgtctgattatgactatctttttgtgtggtctttgcgtttttaaagttttggacatggatggatttcaatttgcaagtcttttaattctctttattctaatcattatggttcctc

SEQ ID NO: 42325 - protein, 95 aa, Arabidopsis thaliana
  peptide (1)..(95): Ceres Seq. ID no. 12326578
MTKGTGSFGKRRNKSHTLCVRCGRRSFHIQKSRCSACAYPAARKRTYNWSVKAIRRKTTGTGRMRYLRNVPRRFKTGFREGTEAKPRNKGVASSA
